United States Patent Application Publication US 2005/0228172 A9 - sequence listing, part 57

SEQ ID NO: 240006 - DNA, 624 bp, Homo sapiens
atataatcagaccttagtaaagttacttcgaaaaatttaattgttcccaagtcacctggctctttagggggttggtcagtcaaggaagccatatgttcagtggggacacaggttttagagccagacattcatggagctgattctggcttcttaacctttctaagtgttagtttattcgtctgttaaatgcagataacaatagtgtcatgtmatttttttttcatgtctgagggcagattctgtgagcacaaaataaaagactacttacaagagcttaggttttaagttaatatttaatttattaatttaaaactcaatacctaggtttatttatgtcttaaaattcagttcataagtatactattctatctgtaagtctattatatatatctattatatggatttacagatagaatagtatacttataaactgaacttatataaaataattcagtttaaggggatcttttataattgttcaagtaactcaggtagaactatctaaactcttaaacagtctcacttataagcttatacaatgtaattatattagaattttaactgaatttgtaaatgtttatattctttttcattctgtacctgtcatatgcctaatcaatcaag

SEQ ID NO: 240007 - DNA, 470 bp, Homo sapiens
  misc_feature (1)...(470): n = A,T,C or G
gaattcagcagtttaagtcccccttraactcagtttactccttctgttcccaacatctcctaggcatcctccgagagcaggttctctgctcaattccacaatggcatggaaatgagtcaccaccacacacatgttcagcccaactagagccttttgtcagtaagtcaactaggcacccttcaggctccatgacttattcttctattgggaagaaggaaaacagacaataatatcaataatacgttgtccccaagtcaggcctccaaaacactgaattagagagaaaggacaaaggaaaaatgaagtggaggaagagagtagtggagtgggggagatataattggggagcactgnagatgctcccacctcagtggaagtaatcaaggatgtaaaaatcccttggcccaggcatacaggccctcaagtgtttgttgatggggaatctgaaggtcaatgagacagagtcatct

SEQ ID NO: 240008 - DNA, 470 bp, Homo sapiens
  misc_feature (1)...(470): n = A,T,C or G
gaattcagcagtttaagtcccccttgaactcagtttaytccttctgttcccaacatctcctaggcatcctccgagagcaggttctctgctcaattccacaatggcatggaaatgagtcaccaccacacacatgttcagcccaactagagccttttgtcagtaagtcaactaggcacccttcaggctccatgacttattcttctattgggaagaaggaaaacagacaataatatcaataatacgttgtccccaagtcaggcctccaaaacactgaattagagagaaaggacaaaggaaaaatgaagtggaggaagagagtagtggagtgggggagatataattggggagcactgnagatgctcccacctcagtggaagtaatcaaggatgtaaaaatcccttggcccaggcatacaggccctcaagtgtttgttgatggggaatctgaaggtcaatgagacagagtcatct

SEQ ID NO: 240009 - DNA, 470 bp, Homo sapiens
  misc_feature (1)...(470): n = A,T,C or G
gaattcagcagtttaagtcccccttgaactcagtttactycttctgttcccaacatctcctaggcatcctccgagagcaggttctctgctcaattccacaatggcatggaaatgagtcaccaccacacacatgttcagcccaactagagccttttgtcagtaagtcaactaggcacccttcaggctccatgacttattcttctattgggaagaaggaaaacagacaataatatcaataatacgttgtccccaagtcaggcctccaaaacactgaattagagagaaaggacaaaggaaaaatgaagtggaggaagagagtagtggagtgggggagatataattggggagcactgnagatgctcccacctcagtggaagtaatcaaggatgtaaaaatcccttggcccaggcatacaggccctcaagtgtttgttgatggggaatctgaaggtcaatgagacagagtcatct

SEQ ID NO: 240010 - DNA, 470 bp, Homo sapiens
  misc_feature (1)...(470): n = A,T,C or G
gaattcagcagtttaagtcccccttgaactcagtttactccttctgttcccaacatctyctaggcatcctccgagagcaggttctctgctcaattccacaatggcatggaaatgagtcaccaccacacacatgttcagcccaactagagccttttgtcagtaagtcaactaggcacccttcaggctccatgacttattcttctattgggaagaaggaaaacagacaataatatcaataatacgttgtccccaagtcaggcctccaaaacactgaattagagagaaaggacaaaggaaaaatgaagtggaggaagagagtagtggagtgggggagatataattggggagcactgnagatgctcccacctcagtggaagtaatcaaggatgtaaaaatcccttggcccaggcatacaggccctcaagtgtttgttgatggggaatctgaaggtcaatgagacagagtcatct

SEQ ID NO: 240011 - DNA, 330 bp, Homo sapiens
gaattctttcccttgcgtgctcatcaagccctttcttccttgtactattgtagtacttacgatttaagaacttgcattatacttactaggcgggctcccttacttagattataaattcctttagagtacatagacattgtgacaaatagatgaacaattatagatatagatgatagataaataggaactcttcatgaatgaactattcatttatttatcaaataaatatttatagggtaccttycaatgtcaggcaccgtgccaggctctgggtatcacaatctttggataatcgtctaaggtgagggaattaaggtgcccataagtgcc

SEQ ID NO: 240012 - DNA, 491 bp, Homo sapiens
ctgtagaaggttttatagtttatagcatcatctgtttggcctgacttgccaaaacatcctctagtctggtttacctagattctcttataaaaatatttattgagcacttactctgtgccaagtgctaagaatagaaagatgaaagasaagtgctataatacaggtctacatctaaaacctggggttgtgagggaacatgattatatgaatgttgaactcaacagaaagatctgtgctggaaaaaaaataattgtgggtgaatgagtctccctaggaaaactgtagaaagagaaaagaatgctaaggattggactgggagtcagagagtggggcagaaggaaaatttaagggtaggcagaaaaagaagaatcaaggagactgagaggaagcaacctgcaatatagaaagagacacagaaaacagagaggtgaggaaagccgagggaaagaattattttcagagggagagaggggtcagaaatttctatcaca

SEQ ID NO: 240013 - DNA, 552 bp, Homo sapiens
gaactggcctgctaaaatctcattcttcccttctaaattctgtcttcatctccattcctgccttctttctcatttcttacaccaagtaattgtaccaggatgcaccctggtacaggtgcattcactgcaatgttctgctctggaggacagagcccacgttaaagggcatctgtgtgttttcaatgcatcttgtccctttagtgaccattcctsagctattgctaagtttcatttaattgagctggagtcatcatctgggaaaggcagcgagaccaacaagaatacgaaagcctctcaataaaccttcaaatgtaggtgggaagggagaaataggactgtattagaggataatttcagaaagtaggcaggaacaaaggacttgcagaacaaacagactccaagagagtcatgtacgaagcagcacctgctgatgactgcagaaatgaagagacggttattatctgaatactccaatagactggcatattgttctggcccagtgccaggcgcacgtgatgatctggctaggattattagagctcttctgttaaa

SEQ ID NO: 240014 - DNA, 491 bp, Homo sapiens
tgaataggaaacatttgtcatctattctctctaagggcagacactataagacttcaaaaggaccttggtctccacaatcttttatcttaacctgaacatttcctttctaagcaattgtcaaccagaaaatgtttaaatttacctatagcctagaagcactccctgcaccccccgctttgagttgtcccacctttctggrccaaaccaatgtatttttaagaaatacatttaagatgcagttgattgatgtctcatgcctttctaaaatgtataaaaccaacctgtgccccggccaccttgggcacatgttctcaggacctcttgagggctgtgtcacaggccatagtcactcatatttggcttagaataaatctcttcaaatattttacataatttgactcttttcgttgacacacatgttgggaaacaaacctggtacagttacgtaggtgagcttatcactcccatgaatttgatatcttctatatacc

SEQ ID NO: 240015 - DNA, 390 bp, Homo sapiens
agatattggctaactgtgaatatatgcattgtccaatctaatgcaccaggatctaaacatagatgtggatataaagaaaaaatttatatctgaaattagacttattatgtcacaacaaccaaaaagatattgaggttaaggagactattttaatactttattaataaacaaaaaaatcgctcatctaaacctgaatactttgttttattctaattgctactcctagaaaatatatacratcatgaagtacacataaaaggaaagactctaaggcaaagggttagaaataatctagttagaaatattgctatatatctgtaaaactaatcactcaatcttaataaatacagaaagaaccatatgaaaataaaatactggtattaatgatgc

SEQ ID NO: 240016 - DNA, 488 bp, Homo sapiens
ttatatctacaaatgaaggataaagatcatataatcatttaaattgatcctgaaaaagcatttgacaaagctcaacatccttttggataaaaaccctcaaaaaactggggaraggaaggacatacttcaatataataaaaactgtatatgacagacccatagccagtgtcatactgaatggggaaaaactgaaagcctttcctctaagataaagaacatgacaaggttgcccaccttcaccattgttattcaacatagtactggaattattagctagagcagccagacaagagaaagaagtaaaaaaacataccaattgaaaagaaagaagtcaaattattcttgttttcagataatataatcttctcaaaaatggtaaaaagactgcacagaaaactattagagctgataaacaaattcggtaaacttaaaggataccaaatcaacatacaaatttcagtagcatttctatattccaacagtgaaca

SEQ ID NO: 240017 - DNA, 488 bp, Homo sapiens
ttatatctacaaatgaaggataaagatcatataatcatttaaattgatcctgaaaaagcatttgacaaagctcaacatccttttggataaaaaccctcaaaaaactggggagaggaaggacatacttcaatataataaaaactgtatatgacagacccatagccagtgtcatactgaatggggaaaaactgaaagcctttcctctaagataaagaacatgacaaggttgcccaccttcaccattgttattcaacatagtactggaattattagctagagcagccagacaagagaaagaagtaaaaaaacataccaattgaaaagaaagaagtcaaattattcttgttttcagataatataatcttytcaaaaatggtaaaaagactgcacagaaaactattagagctgataaacaaattcggtaaacttaaaggataccaaatcaacatacaaatttcagtagcatttctatattccaacagtgaaca

SEQ ID NO: 240018 - DNA, 585 bp, Homo sapiens
tttattgagtgcttcactgctttagtgatgtatagaatttatacctgtattcaagtcactgttactatattgaatactaaaaatagtgggaggcaaatttatgttgtttttatagcatgctagatacaaaggtttatagcatttttttcctgaaattatgtacctgtcacataaataaatttgacaaagaaaatgtgtgaaackattgacagcactgatagctagtgattttacatgatttagcttctgtcacctcatgagctaaataatgttattttagctccttgtcatagtagtatatcttcttaagttgatagttactttcttataaatataccattttttgtctttattaagaaaccatattaagctgatattttaaataattgttcatttaactgtttaataaaaaactgcttgtgctgtttaatagaaagcagttaaagtggacaattatttctattaaaagctttctgttttctattatttctattaaataggtgtctatgaatcaaatcaatgatgtattagatatcaattggtaacaaagataaaaagtctacattgacaacatttttaaaaagg

SEQ ID NO: 240019 - DNA, 585 bp, Homo sapiens
tttattgagtgcttcactgctttagtgatgtatagaatttatacctgtattcaagtcactgttactatattgaatactaaaaatagtgggaggcaaatttatgttgtttttatagcatgctagatacaaaggtttatagcatttttttcctgaaattatgtacctgtcacataaataaatttgacaaagaaaatgtgtgaaacgattgacagcactgatagctagtgattttacatgatttagcttctgtcacctcatgagctaaataatgtwattttagctccttgtcatagtagtatatcttcttaagttgatagttactttcttataaatataccattttttgtctttattaagaaaccatattaagctgatattttaaataattgttcatttaactgtttaataaaaaactgcttgtgctgtttaatagaaagcagttaaagtggacaattatttctattaaaagctttctgttttctattatttctattaaataggtgtctatgaatcaaatcaatgatgtattagatatcaattggtaacaaagataaaaagtctacattgacaacatttttaaaaagg

SEQ ID NO: 240020 - DNA, 585 bp, Homo sapiens
tttattgagtgcttcactgctttagtgatgtatagaatttatacctgtattcaagtcactgttactatattgaatactaaaaatagtgggaggcaaatttatgttgtttttatagcatgctagatacaaaggtttatagcatttttttcctgaaattatgtacctgtcacataaataaatttgacaaagaaaatgtgtgaaacgattgacagcactgatagctagtgattttacatgatttagcttctgtcacctcatgagctaaataatgttattttagctccttgtcatagtagtatatcttcttaagttgatagttactttcttataaatataccattttttgtctttattaagaaaccatattaagctgatattttaaataattgttcatttaactgtttaataaaaaactgcttgtgctgtttaatagaaagcagttaaagtggacaattatttctattaaaagctttctgttttctattatttctattraataggtgtctatgaatcaaatcaatgatgtattagatatcaattggtaacaaagataaaaagtctacattgacaacatttttaaaaagg

SEQ ID NO: 240021 - DNA, 596 bp, Homo sapiens
tggttaaaatgagaccttaagatagaaaatagtagcaggagaaaagtggaaaagataagcctttttctatcatctgaagaccgtcttctccggactatctgaacaggtatcatattcactcaagtaacataataaagactactgattactgaaagactatataggtatctgttgtcaaaacaagtgattattaaatggtaagtacatttaataatcatttgagggtaagaaacttggacatttcatagaataatttcagtgaagcctggtaaatcataattaaaatggactattagaattaaagatcaggggcttaagacatgcatttaagatatcacggaaggcactgattatttgtgtggacaaccaatccccatgtggatgcaattttctgtaagtagatgcttctgagagtgtaacatctaatttgtggcattgagtaaagtttaagacttgtcagacctgccttggragggatagcttccccaccccttccccagccacaaatggaatactgcattccacagtgagaatgtggctggattcaaagtcactttaatctaggtgtatgaatgtcagggagaaacactgaattc

SEQ ID NO: 240022 - DNA, 487 bp, Homo sapiens
agaattattcacttcagtgctatcacagactgctccatcccagggcaggagcattggggaagttccytatttgaagaagaaaaataaaagactactcatttgcattttttagtccagcttcttttattaaaacacaaactaccggaccatgtaaaggtgttaagttctattttgaactttattgggaaactgtatgacaggctcaggtagaagtgcagctacctacaattcagactctgaaacaatcaagacaagtcacagggaatttaatggggactgggcagccacagatgggcagaggatcactgcttaggccatcggggtctcagagaacagttcagcaagaacccagaatgtaaaggtacacctccctgttacttttaaaatttctttctaataaggattataaaacaagtacctcagataacaatgcattaaaaagaccaagaaatgcatttagaatgaaaaaaaaaataccactataaaa

SEQ ID NO: 240023 - DNA, 580 bp, Homo sapiens
ggggtgacaattgtggaagctgagttaggtacccagaggttcrttataatattctgtctatgttaatctgcaatatgtctgacattttttataattaaaacttcttttgaaaagacaaaaatcaggccaggcacgatggctcacgcctgtaatcccagcactttgggagactgaggtgggaggatcacctgaggtcaggaagtcgagaccagcctggccaacatggtgaaactcagtctctactaaaaatacaaaaattagccaggcgtggtggcaggcgcctgtaatcccagctgctcaggaggctgaagcaagagaatcgcttgaacccagaaggcggaggttgcagtgagctgagatcacactattgctctccaccctgagcaataaagcgagactccatctcaaaaaaaaaaaaaggcaaaatcaacaaaaaatatgtatctgtaagaagaaacagtatacctcaaaggattaaggagttgatggatgagatagattttgctcttagccaaacactttgcattcagtatgtagcattttgctttgtggaagataattttcaaggatgaatgagtgc

SEQ ID NO: 240024 - DNA, 601 bp, Homo sapiens
  misc_feature (1)...(601): n = A,T,C or G
tgtctagccttcctaatattgttgaggaaacactgaccagagtgaagacaraaataatatgtgcttttgttgctttgataatgtttagagattaaagctcttagtaaagcttagtatcatttccaaaaaaatcactggtttaattaataaaagtagtagtgacaatgaggtggtttacatgtctcaaaatttatttgcaaatattctcctcttcaaatgatgtcaaatggttttactattaaaaaaaagtctaaaagagagtcaaccattaatttttttcaggcaatcatcatgtgttcctttcagctatgtcaacattcccaaaagcccaatcaaggtgcagtctttccaaagtttccagtctttatcagctaagtgatatccttgacctccttaaaagtctatgaactctcaagaagtaagctgaggtgctgaagatagccggcacccaaacgttagagagtgtagaactttagtctttcttaacctgacaagcaattatttctgagctatgaaaatttcacagagtaaaatcaagcantaagcattcctgaaacacaacaaaaaccacacacacacaaacaactttgtggtatagcac

SEQ ID NO: 240025 - DNA, 488 bp, Homo sapiens
ggcatttccatacatcctccgaaatctagttggaggttcctaatcctcaattcttcacttctgtgcacccacaggctcaacaccatgtggaagctgccaaggcctggggcttgtaccctctgaagccacagcccaagctgtaccttggccccttttaaccatggctagagcagctgggacacatggtaccaaagccctagattgcacacagaaggggaaccctgggccaagcccaggaaaacatattttccrcctaggtcaccaggcctataatgggaggagctgctgcaaaggtctcttacatgccctggagacattttccccattgtcttggtgatttacatttggctcattacttatgcaaatttttgcagctggcttgaatttctcctcagaaaagggtttttcttttctattgcatcctcagcctgcaaattttccaaatttttatgctctgcttcctttttaaacataagttccaattccaa

SEQ ID NO: 240026 - DNA, 445 bp, Homo sapiens
tagttttccgtggccataagacaacgaatctcgggtatttaccccagacaaggaagccgcttcataattacttctaaattcctcagataaggagttttgtcttcaggtggcctgcttgatggtcaccaggtgatctttgctctcctcaccgaggaggcgtcatgtacactgggaagaaaggagacctcaggacagaactctgggaaacagcctccaatgggcaagcaaaggggyttaaagacaagtggaaagagagggctaggaggctggtgccatggaaggcaagagaaaggaattttatgtgctggtgaaaaacgttactaagtattttccttcttcatttatagagtattctaaaaaaaatcagaagatgaaatcgggtgccatatatcttctatctttgaaatattaaaaatgtggctgagttaaatcaatctaatgataa

SEQ ID NO: 240027 - DNA, 445 bp, Homo sapiens
tagttttccgtggccataagacaacgaatctcgggtatttaccccagacaaggaagccgcttcataattacttctaaattcctcagataaggagttttgtcttcaggtggcctgcttgatggtcaccaggtgatctttgctctcctcaccgaggaggcgtcatgtacactgggaagaaaggagacctcaggacagaactctgggaaacagcctccaatgggcaagcaaaggggcttaaagacaagtggaaagagagggctaggaggctggtgccatggaaggcaagagaaaggaattttatgtgctggtgaaaaacgttactaagtattttccttcttcatttatagagtattctaaaaaaaatcagaagatgaaatcgggtgccatrtatcttctatctttgaaatattaaaaatgtggctgagttaaatcaatctaatgataa

SEQ ID NO: 240028 - DNA, 444 bp, Homo sapiens
tgcacacctgtatgcaaagtttccagtctttttttcttttttgaagaagacagggtctcactatgttgcccaggcttgccttgaactcctgagttcaagtgatcctccttgctcagccttcccagtagctggaccacaggcacaaagtttagaggttccctgatgttctgacggctacctctggatcctggtatccaggattcctatattacagrtacagagctactggagctaaagcagtgcactcaaactattcgacaggtcctggcggaactggtaaggaaggttaccccgcttccagaatgaatacatttatccattttatactctcctgcaggtgcagcctagggtcaccctgaacacacgatccatctacagatgccccttatcctcagtgactagcattagaggcctcccaaacagatctgctcagaggcagaattc

SEQ ID NO: 240029 - DNA, 557 bp, Homo sapiens
aaggagactaagaaatgataataaaaaagggagatagaggaaaaacagagagactacggagttctaaaatactctagaggaaaatatatcaaagaggagggtgtgagcaactatctcaagttctgttgctgtcatctcaactcaggactgggtttattgcaatgcagaggacttcaggaaccttggaaaaaggggttttggtgacataaaaaaaggggatctaagaggaaactggagaaaaggaattgaaagtagaatatataaactttttttaactttttcaaattcatccccatcacaacttctccccttaatcttgggtaatgatcttacattttacttcattgaaaggtattaggtatgaaataactaaagatattgggtataaaattatttctcttccaccaaactacaaacattcttgcatctgtagctgtcatgtcctttattttccatcctgttacaatggaggacatttccagcttcttagcaaatggkcttagcacatttgggccgctataacaaaatattattgactgggtggcttataaacaaca

SEQ ID NO: 240030 - DNA, 436 bp, Homo sapiens
ataaaatctcattatgatggaagaaagtaacctgaagattatataaaaaatccatttttagtctaaaagttttttttttttattttagggygaaattttaaatagagagcgaatcaaaagagtgacaaaataaatttactaaaatgtgtttgtctattcagagttaaggccaaataataaaaaaggattaaggttctttttcattcatatattatttataattctaatatacatatagacacacccacgtaatcctcatacctttactctttatatgatttgcaaaaacagttattaatctaatttgatgtgaagtaagactttaaacctaaataataatggatcaaatggattttatttcattttaaataaatataagcaaatatataggttctgactcaaaagtaatgtaactgatcttttaataagaatagct

SEQ ID NO: 240031 - DNA, 636 bp, Homo sapiens
attgttcatgcttaaggagtattatatttttaagtgatcttacagtttttaatatactgaccttttgttcttttgaatctattattgtcttaacaagggatttaagtgaaaagtttgatgttctacaactaaattattttcttatacagagtctttttaagtctcacatcactttccagagagagatttaaaaggcaaaagttatccccaaagtttattgcaaggattaacccagagtcttttataattatgaaacacatgaatgaaatatggtgtcctttgcacttgaagaaagctgagacagtaaatccagaaacagggaagtgcaaagacatgttcaccttcattattaaaagtatcttcayttaaattttaggttgcctagttagccttcttattaagtatatttacagcagaaatagttgacaaatttaccaatgtgaaaaagaaataaaaggtaacttaagtagcaaatgccaagaccctttaaaaaaccactaaatatgtatgtgtgtgtatttaatcatcttttgcatacacagacatatttaattttgaaaataaattatctcttaggggttttaatttaaggcaaaggaaaacaaaattatagtcattcaaagggacataatgaca

SEQ ID NO: 240032 - DNA, 636 bp, Homo sapiens
attgttcatgcttaaggagtattatatttttaagtgatcttacagtttttaatatactgaccttttgttcttttgaatctattattgtcttaacaagggatttaagtgaaaagtttgatgttctacaactaaattattttcttatacagagtctttttaagtctcacatcactttccagagagagatttaaaaggcaaaagttatccccaaagtttattgcaaggattaacccagagtcttttataattatgaaacacatgaatgaaatatggtgtcctttgcacttgaagaaagctgagacagtaaatccagaaacagggaagtgcaaagacatgttcaccttcattattaaaagtatcttcacttaaattttaggttgcctagttagccttcttattaagtatatttacagcagaaatagttgacaaatttaccaatgtgaaaaagaaataaaargtaacttaagtagcaaatgccaagaccctttaaaaaaccactaaatatgtatgtgtgtgtatttaatcatcttttgcatacacagacatatttaattttgaaaataaattatctcttaggggttttaatttaaggcaaaggaaaacaaaattatagtcattcaaagggacataatgaca

SEQ ID NO: 240033 - DNA, 636 bp, Homo sapiens
attgttcatgcttaaggagtattatatttttaagtgatcttacagtttttaatatactgaccttttgttcttttgaatctattattgtcttaacaagggatttaagtgaaaagtttgatgttctacaactaaattattttcttatacagagtctttttaagtctcacatcactttccagagagagatttaaaaggcaaaagttatccccaaagtttattgcaaggattaacccagagtcttttataattatgaaacacatgaatgaaatatggtgtcctttgcacttgaagaaagctgagacagtaaatccagaaacagggaagtgcaaagacatgttcaccttcattattaaaagtatcttcacttaaattttaggttgcctagttagccttcttattaagtatatttacagcagaaatagttgacaaatttaccaatgtgaaaaagaaataaaaggtaacttaagtagcaaatgccaagaccctttaaaaaacyactaaatatgtatgtgtgtgtatttaatcatcttttgcatacacagacatatttaattttgaaaataaattatctcttaggggttttaatttaaggcaaaggaaaacaaaattatagtcattcaaagggacataatgaca

SEQ ID NO: 240034 - DNA, 581 bp, Homo sapiens
ctctgttcgtaaaccttcccaaagaaatgtaacactacaagaaattgcagctttcctctcgttaaaacaatctagcaaaccactaattcatttctacacctaaaaaggttcatttaaacatttaccccaaaatatttctcaataaaatgttagcaattataaaagatgattttatgacagaagaatatgggccatcttgattgagaaacaaatgttgaaaaagtggtagtttgtggcaaagccagagtttttcagagagagtaaaaggcagtattgtcagtttcacctacgacaaaggtatttatcctgtaatattaacatgtgggtgacataaagaagggaagttgaaggtcacagttgaaatacaacttgatgaatcattagatagaaacctgaaagtcactgacataatcatcaaagttgaatgtcaagcatagtcattttggtagggaaaagaggcaagtcagatgtctaaaaaaaactcagaagaaaagcggraatgaaatactataacaaggaaaagtctctataattacccttttatgttctctgtgaggtagcacagaggaaattctctaaat

SEQ ID NO: 240035 - DNA, 470 bp, Homo sapiens
tgtgtcaggaactatagtgtctatagagataaaaaaaagacataccccctgttttcagagggttcacaatcctgttgaataaatcataagataaccacagtataagtcgagtcatgtcactcatctcctaaatgatgtccgtcagttctacatcaagtcatgtcaactctcctctgaaagctctctaatgcctcacctttttactgagagtaaagttcaaagccctggtagtgcctacaaagcartgcctacaagggtgctgtatgacctgatctttcatatccctaaccagcctctctttttccaatcttatttcctagtactctcccttccaccccttcactgtttctactctagcttacacattatatgatactgcctcctctaggagtttgtatttgctcttcccttgtctggaactcccttattccttctttttcagtttttcaaatgtccgtttaaacatcacc

SEQ ID NO: 240036 - DNA, 672 bp, Homo sapiens
tactaggtactactgcaaataatggcttaaggattttgtttaattttctcaacagtcccaggacataactattactattcccatagagtgttcattgtgccgaagtaacttgcccaaggccctatggctgtcagtgctgggatcccactgcagtggcatttgcagccccaatgccacactcatcctatatcaacatgatgcttacagaacgactcttacccacactctccatctgctcttcttctgaaccacagttcctgtcatgtgttctcttgagcacattcctcttgttgttgtttaattttgtatgcgtacatgtcttgcagaatttatgaatatactccctcatgtttctatggaagtagcacagctctattctttcacatttttgacacaggcagaggccatgtaggaaacagaaggagagtgggtagtgagctgtaaggagaatgtgaagctttgaactctgaagaaacagagaggtctacaatggaggaaataattcagaagttcaaacaatgtgtaagagaacaataagataagaactcaaaactktctactggatttcctaattaggagcagtaccatttgtgattttagaaaaagaagcttttgcaaattgttgggagtagaacctagattcctgtggattcaagagtaaataggaggtgg

SEQ ID NO: 240037 - DNA, 525 bp, Homo sapiens
aaatacgtgttagtgatactggcttttttgtttgtttgttttgttctgttttgttttgttttggtgagacggagtcttgctctgttgcccaggctgaagtgcagtggcacaatctcgttttctttgtagcctctgcctcccgggttcaagcaattcttctgctctcagcctcccgagtaactgggattacaggtgtgcaccaccatgcttggctaatttttgtatttttagtaaagacgaggttttgcsttgttgaccaggttggtcttgaactcctggcctcaagtgatccgcccacctcggcctcccaaagtgctgggattataggcataagccactgcgcccggccatgatggtggcctttttgaaggcccccaggaaagaaggatcacagtgtcgcctgtaagctgctcatcagcagagtgcgtccactgcctcgcctgactgttagtcattaggtcctacctttctttctggccatttcagcccaccacgtgttattacatgagagaaacgacaaccagc

SEQ ID NO: 240038 - DNA, 612 bp, Homo sapiens
aagcttcactgcacaggcctacaataaatggtgccttgacatcaaatgagttggttggctagttccttccccatgaaattgttattttaaaccccaaactacctggcataattttcagtctgctgactgaaaatcaraatggagcataactattttccttgcagaaaaaggctgcccagggatgtactgggagatgatcaggagagacatgcttttctccttcaaaccttttgcctgctttgtatttccagttttcacagcccacctttttcagagaccacacacagagactacactgattggaatcaagtttaaaggcatggcttacattcaggtgagtgaaagaaagactgcctttaagctaaggagaccctgctgtgcagtccccattctccaaaactttatctctgaatcaccttttcttgaacagggtctagtttattttaatttgtccttcagaataagaagtttttttgactgaagattcacttggatgaactttaacagaggctgaatcaaacccaagtgtatgctgtactcttgggcttcagttcacaatctagatatatactgcagttaagacaagaaggaagaaaagaaaaagggacatgt

SEQ ID NO: 240039 - DNA, 561 bp, Homo sapiens
ctggaccacagcagacaggtaataaactgttgaatgaatcactgcatgaatgtaattgtttctgaggtaggtagcatatctttagttgctcctaaatctgatatccacaattcgataagaggccacaaggttgaggatggctgggccatagtttcataatccaaataaccatatttcccttggatatggataacagagttagactgttacaagctcttccactcaacaatgttttcttttttaacagaactttaaattttatacactgagcaacacatcccaataaccaacatgaaaagtgttcyacttcagaaaaaatatgtctatttagagcaatatttgaagatctactacaattctatacctttgtcacaaatcttcaactactagtaattagagctcaattaatcctaacattcccttgggttcaagcagattataatgaccaaactaactctgaaaggctttgtagacctcaagattcatccagggtgtcacataggttttgggaattaagacactttggatttaaaagccattcaagcagctctgtatttaatt

SEQ ID NO: 240040 - DNA, 561 bp, Homo sapiens
ctggaccacagcagacaggtaataaactgttgaatgaatcactgcatgaatgtaattgtttctgaggtaggtagcatatctttagttgctcctaaatctgatatccacaattcgataagaggccacaaggttgaggatggctgggccatagtttcataatccaaataaccatatttcccttggatatggataacagagttagactgttacaagctcttccactcaacaatgttttcttttttaacagaactttaaattttatacactgagcaacacatcccaataaccaacatgaaaagtgttctacttcagaaaaaatatgtctatttagagcaatatttgaagatctactacaattctatacctttgycacaaatcttcaactactagtaattagagctcaattaatcctaacattcccttgggttcaagcagattataatgaccaaactaactctgaaaggctttgtagacctcaagattcatccagggtgtcacataggttttgggaattaagacactttggatttaaaagccattcaagcagctctgtatttaatt

SEQ ID NO: 240041 - DNA, 517 bp, Homo sapiens
catgagatttttcacaggtttagccaggaaatctaattcgtacaaagactaaagacgtgaattctggggatgctactgataagcatatttaaagattattatttctattagtttaaaccatcaaagcattttaaaaagcctctagaaatacttttatgaaaagtatatgcacctctatttagaaataaacattttcttytaagattaaaaacttgctcccagctgcatcaataaacctgtcatagttacataagtctaaggcagtaggcaatttggaaacagctcacaaatttccttcttgagcaatttctgattagcaaaagtctaaagagagctagtggatcagcctgcacaaagcatttggaagtgtgtattcacattcactgatatcaaatgcattatcctggaggcaagctagtgaaaacatcagtgggactgaagtgggttaaaaaagaaaaacctttcagagataaaagcatctttaaagttttctggaaaatttagttactgtctattg

SEQ ID NO: 240042 - DNA, 430 bp, Homo sapiens
aagcttcatagaagttaactgaaaatttacagtaagggggagattgctgtcagcaaaatggattttattctctatgccagactagtagagctatttctacacagcagttttctcttctgaagctgaacagcagcaaggtgagtaattattagaagcacagcaagttcctggatgcagccagcttggtgaagagcatattctaagacatgtgaatgcatgtagggagaaaaaaggatttccaaagcaagcagatatctttgaagagtttatacccctaaagtaatcccaaaggaacaattttagctgcttgattctctttgtaargtgcaatatgacctgatctagactatatgatattatgatagctatttattcaaagggatggccacatgtacagtcccaagttccagacagaatatttttctagtta

SEQ ID NO: 240043 - DNA, 459 bp, Homo sapiens
aatagtttcagtaggaacactaccagctcttctttatatatatgatagaatttggctatgactctatctggtcctgggtgttttttggttggtagacattttattactgattcaattttggtaytcattattcatcttttcagggattcaacttcttggttcaatcttgggaggttgtatatgtccaggaaactatccatttattctgagttttctggtatgtgtgcatagagatattcatagtagtctgtgagggatttttttatttttgtgaggtcagtagtaatatcccctttatcatttctgattgtgtttatttggatcttctctctttttgcctttattaatcaagctagtggtctatatatcttattaatttttcaaaaactcactcttggacttgttgaggagtttgttatgtattgtttttcatatctcaatttccttcacttcagttcc

SEQ ID NO: 240044 - DNA, 355 bp, Homo sapiens
caccagagcttcttctacagtctcatagtatactcatcctaggtatctgttaatttcttattgctatttctttctattaccctatctttaaaatatgaagtacctggatgtttgatttctatcatatagtgttaacaagagctggtgttgtgtgaatctattttttcaatgttcttgtattatgctgtgcatatatatatatatgtgtgtattatatatatacacatatatatttaaagcactgttcaagcaaaggtttttatatatatrtgtgtgtgtgtgtgtgtgtgtgtgtgtatatatttaaagcactattcaagcaagacaaacttttgtattttatttgattctccat

SEQ ID NO: 240045 - DNA, 663 bp, Homo sapiens
tatacctggggaaatcattcttttaaagtgatcatcctatgcagaggctctgaggtaggaataaactttattgcaagtataataaagatgaccgtgatacaaaagagtgagcaaagggaagaataataggaagtaaagaaacaaggagtgggatcctgtattgctgcaagaacttcgggctttttctctaagtaagatgaaaaactagtgattttttagatatgtcatatttcatcatacataatattaaaaagatgtgcccaaggacctaatataataaaattaatattttaaaaatatttaattttttaaatgtagcttccatttcttcctgaggttccttccatattcactcattatatccatcatttcctttaaatcattgaccagctttataatggctcttatgaagccyttatttgttgatgccaacatcttaggtcatctcaaattccattttcagtgtcattttaaaatttataatggatcatattttctcgattcttcacatgtcaagtatcttaagctgtgggttatactttgtagaatatctacattgtgttttcttatttcagagttttggttttggttctgttaaaaatctttttgactgagtcctgtttggttttattcaaaaatctttttgactgagtcctgtttggt

SEQ ID NO: 240046 - DNA, 603 bp, Homo sapiens
tttgtaataatttctatactgtatcaatagcttaagtacaaaggagatttaataaacttcataaatgttaaagtaattttaaatttattaaacttgcacagaagtcttgtattgtttcctatgaaagaccttgggaataaataactactacatttcaacttttcccctggatgattctatattctatgtaaatatgcatatcttggtaaaacatgtaaaaattctggaaaactgtttgagcaagtatatttagaaggatrctataatcagataaaataactaaatttaccaatttaattattttacaaaaattcatgaaactaagcctctgaaaccaaatgtgtgctcaggaaagaaatctaaatactttaagggcattttaaagttatttgccattgtggtggtcaaattagagtgacaagccatatgtcccaaataattatgtaatttatgtcttgtcttggtaatcttcctcttccagaggaaaagttaattaagtaatattttaatttaaaaatatattttaatatttatgagtaatccttgctcaatgcacattcacgtaaacttgtataagcttgaatgttacactgagctgaaatt

SEQ ID NO: 240047 - DNA, 551 bp, Homo sapiens
gacatgggtcttgaggactgcttgccaccgtgccacacagacttgaggacaccctgcagacactacctgctggcagcacacctggctggccacaccttgccagcccctcacacggctcctctgctgagcctgtggtgggttgaggaggaccactcaagcttctaggacaaatagagtctcctcctccccaccccctagttcctacagagatattatctttccaaaatcttatcagatcataagcrtttttatggatttttatttattttattttttatttttgagactgagtcttgctctatcacccaggctggagtgcagtggcaccatgtcggctcactgcaatctctgcctcccaggttcaagtgattctcatgcctgagcctctcaagtagctgggattacaggcgcccgccaccacactcggctaatttctgtatttttggtcgagatggggtttcaccaagttggccaggctggtctcaaactcctgacctcaagtgatccgcttgcctcggcctcccaaagtgctgggattacgggcatgagcc

SEQ ID NO: 240048 - DNA, 486 bp, Homo sapiens
actagatgcagaaaggaattacatttagtaagaacagagagtaagtacaattagtaccttttttcccctctttcttcccttcagaccacttcaatcttgttggtgtcatcgtgacagctggagagccagaaaataactgtaataagaaaattgtacagtggtttcaatgttctaatgccattcctatagacagactttactaacaaatgaattatttgttcaatttcaatgtgaagagtttttctgagactgatgtatttatatctcattaatcttaactgatttactgctggcttaatgaagtaggcatgcctaggatatcttgaaccaccaccccacaggtaatatagagcctaggaggcctggctcaaatgtcacctgtggaatcttccagtaagaactaaytgcttcctccagcacttgtttaaggagctactgtactgtactactcatctgcttgtgactagtgatatcattcttgaattc

SEQ ID NO: 240049 - DNA, 548 bp, Homo sapiens
tttttaatcaccttggccatatgcaccattacaaatcagagattctgtgacataggaagtgggagagatcagatattgaaatccagaactagctacctctgttccatgtttcctgggacaaaagcaactccctgtctgtaggagagaagtaccttaaagtaggcagtgttgaagaatggcttcccttccatgttgttcctttaagatgccaatgctcataaaaaggaggttgcctcccgactcacatcctaaatagcatagtccaaaggcaatccatctccacatagatgccaaaaggcatttcaaactgacatttataaaatagagcacttacctctattggcacccctgcccaaacctatttcttctccagtatcagctctcatacaataccatcacctggccaagtgctcaaaccaaaaacmttgaagtcattttttattccactcttgtcttctctactcccctacccccttaccttcattgcattagttctacctccaaaatctaacccaagcctacccactgctctccattaccacgaattc

SEQ ID NO: 240050 - DNA, 591 bp, Homo sapiens
aattaagcaggatatcatcccctgcgatttacaaaaaataaaatctaacctccttagcatggcatacgaagcctttcagggtctttcctcaccaggttgttctgccttgtattctttcctcacatgtttccccttcctggwatatcctttccttgtttgcctattggtcaaattcatgtttacttcacaagtttttgcttaagcatgacttcctctctgacagcttttccatcttctgtgctttaccacccactacattaagttctctttccctgcatttctattgtaccctgttacgcttccattgcagtacattatgaatgcacatacagttaatccttattattcacagattccatatttgtgaattttcctacttgctaaaatttatttgtaacccctaaattgatacttgcatcactttcctagtcatttgtagacacacgtatgcataatggcaaaaattttatgtcacctgacacacattcccagctgagatcaaattaagggacactctgttttcttcctttagctctcatactatgaacatatatctattttgtggtctgtttggcgccatattgtcacatt

SEQ ID NO: 240051 - DNA, 591 bp, Homo sapiens
aattaagcaggatatcatcccctgcgatttacaaaaaataaaatctaacctccttagcatggcatacgaagcctttcagggtctttcctcaccaggttgttctgccttgtattctttcctcacatgtttccccttcctggtatatcctttccttgtttgcctattggtcaaattcatgtttacttcacaagtttttgcttaagcatgacttcctctctgacagcttttccatcttctgtgctttaccacccactacattaagttctctttccctgcatttctattgtaccctgttacgcttccattgcagtacattatgaatgcacatacagttaatccttattattcacagattccatatttgtgaattttcctacttgctaaaatttatttgtaacccctaaattgatacttgcatcactttcctagtcatttgtagacacacrtatgcataatggcaaaaattttatgtcacctgacacacattcccagctgagatcaaattaagggacactctgttttcttcctttagctctcatactatgaacatatatctattttgtggtctgtttggcgccatattgtcacatt

SEQ ID NO: 240052 - DNA, 560 bp, Homo sapiens
gaatgataacaccgtgaggttaaaaagtactctcttaaaaacatgtcctttgagccttctgggtactactaatgacatctttttttttaatatcttgaagcaagatttcataataaagaatgttgtctaattcctctgcaccaatggaaaaacaccttcctgactcccacaaagcatttgggaaacccatgatgtatagggcattataattatcacttggaatatgaaaatgtgggagattgcttcttgtcctcaaggaatttccaatccagtgggaagaatayagatgggtgagctgaaaattccatacaatgtgttaaatactccaaccaaagattaaacaacatgaaatggattctcaaacaaaaaaacagcttaggtctacctaacttaggtttacctgcagtgttaagatttagtttagttgccatggcatgtgggctgaattgatcatcaaaatgcagttggtaattttgtactgcgacgtatctatacagctaaatcatgttcaatttattatcttgggataataaaccaaacagagttttggatcctatgag

SEQ ID NO: 240053 - DNA, 527 bp, Homo sapiens
acttgtttttattactctttcttaattgtacatgtagctctcttttatttcattgtttaatattagaagtgttttgggtctttatttagaagtctggtaagtttttgttaccagaaatatgccatgggaacttaactcttgtttataccaattagcctaagataataatgaatgaaataagataataatgaaaacaattattgaaacaatttataatcgttttcattataaaacaaaaaaccagtcctggacaagacaaccttccatcacaaggtgccctcacacacacctccacattcactcagactggaaccatgatttaaagtcgcagtttcaaagaacctattgacaayatttagtgaggatttgctgtgttatatttagggttgtctcgatctatctctctttctttttcttttttccatattccaaattgagattggcagtgaaggcattttgtcttccactctcagagctctcaccagatgaatctcagatcattatctccagcccgacatttctcctga

SEQ ID NO: 240054 - DNA, 582 bp, Homo sapiens
tgctgttattatccttagtttcaaaggaggaaatgagatatagagaggtgaagtaactttcacaggactatacaaccaggaagttgcggatccaggatttgaatgcaagtagtcagattctagaacctccatgctttaccattatgtaggaggaaattgatgcttggagaagtagaaaaactagtccatctgtgcaggacttcaggggcattggttaatgaccctatctctgattctcttatttccttttctagacattcacttctccagatcctcccatgtttactgtaaagtctaattcccatactaaatcctttaatcccctaatacatggctctgctttcctaactgaaccctgacacactcacagtactttccagctcayacataactttcatagacatgatctcatttattccaaagctttcctgggattcaaattattattattattattattatttatttatttatttatgagtctccccgagcaaaccctaagcctctcaagagtgaagatggtaaaagaagagagaaatgctcttcctgtagtgccctcaagtcttaagtgagaaaatagat

SEQ ID NO: 240055 - DNA, 634 bp, Homo sapiens
cttttccattttcgtggcaacagaaaaaggaagcagaacataagctctaataagaaaggtagttactcagacaggggtaaagggacyccagggggaactgaattgaagcctggaatgagaaatattaccatacttcataaatgctaagatgtcattgattttaagtctccctgctgctttatttgcagtaaggaagaaaatagtcctgccaactaaattgaattgttgactgtaaggcctaatctgatttcagagatatttaagtgggaataaaactttctgtctttgtattaaatatggtaactctgaggagagtattcagtcagttgccttctagttgtcttagcctcccgctcaacctgtctctaccctggagcacctaagagatggcttgaaaacaaccgcgtttacaggacttccaggagaatggttcttgttcttactgagagtaaatacagactgcttccttccacttcttcttagagagttaaatgaacccctgtagtcaaagatgactcactgcagccactagaacagaggttggccaactatggtccttgggccaaatctgctccaacacctgtttttatacactccagaagtttagaatggttttcacaggtgaacatttgca

SEQ ID NO: 240056 - DNA, 531 bp, Homo sapiens
tggcaaaagggaattcagataaaaatgagttaccttctttctctttattttcaaccatattgctttttaaaaatcccaattaaatctatctttcccactttacaaaaacaaatattttattattttgaaatagaaatttttcccaaaaagaagctattaatcaccttattaagttgaaaaacataaataatcaccctgtgtattttgatggcactttataaatcacaagggatttttcacaatacctaatttgtgttttgcaacaacataatgaagtagtcatggtaagatactgttttttgttttgcagtaaggtaaaattcaaataggttaaagaatttgctcaaggtcacacataaggtaagtagcagagacagtacttaaacccctgtcctgactccaaatccagttttctctcacatcacactgawaaactgacttaagtacatgggaaagtcaattcagtttatcagtgaatgaatgatctgcaagcccagcagtatttcctagcaaaccatagtcataaaagtt

SEQ ID NO: 240057 - DNA, 479 bp, Homo sapiens
aggaaattgttaacaccattagggaggagtaggtatctgagaaggctcaatagaataggtgatgtcttaaactgatttttaaaagataacaaagagtttcttctttctttcccttgaagacatgtaatctagatagaaggaggattactgaaactaagggagatacaaacaacattgttgtatccaatgactacaagcagtttagtaatagctagagagtgagataggaatcatgtagtaagagaaatgaagactggaattgaaagaatgaaggactttgtaggccagagtgaggaacatgaaatttacaccatgggtaatgcctggccagtgaaggtcaatcaacttgtacaattaaaaagatttatcagccccatttgaagattggattttgggaaaacaggctgcagctagggcagggaaaccarttagtagactactcaagcactccaagtacaatgttctatgtgggaagagtt

SEQ ID NO: 240058 - DNA, 298 bp, Homo sapiens
atacaaaacctagggtaaatatgtgagtatgcagaggataggtacactctatcaatctgagtgtaccggatacatacactcaycctgtatttttcaaccctcagcccctgggtcataccttaacaaagacccagcacttctcatcagtctctcaccaaccaagctgttaccaccttctgtgcatgagaatgacttccaatcaaagattctcactgctgcatctcacctactacgtgggggtgccacagagcagcctgccagcctttgcttcctttcatggagagatccttggacctgg

SEQ ID NO: 240059 - DNA, 549 bp, Homo sapiens
ctggatagtcttcccttcttttcagtaatcaaaatccaactcatctttaagtgtctaattcaaaagtcacaatccataggatggccaatactaacaagaagtacttattcaataaatttatttgagtgcctactgtttccaagaacctggacatagagccctgaagaaagagatgcagttcctggccttasggcatggcagcatcgactcctcttccaaactcctacagtctttactgtacctctgactcatttgtgaggtgggatatacttctttgtattgtgagccagtttttcaagagtgacctctcattttcccagccagatgagcggtaacttatgtgcagggagttggaaccaaagctaaagcagaaacacctcggtttgaatctcaactttgctatcattattttacctctctgcaactcagcatcctttcggatttccccaactttttatttggagaaatttcaagcctgaagaaaaatcgaacaatacaaagaacaccctatatacacgttacagagattcatcaatttgttttaccttt

SEQ ID NO: 240060 - DNA, 502 bp, Homo sapiens
gaaaattacaccaagagagtaaaataagcatgaatgcacatgtttctgtcactaaaacgacaaagcatttaaagtaaatctgataaaattacaaagacagtccaagtgcagtggctcatgcctatcatcccagcactttgggaggtcraggcaagaggattgcttgagccctggagtttgagaccagcctgggaaacatagtgagaccctgtctctacaagaaattttttaaaaattagccaggcatggtggtgcatgcctgagtaccaggtacttgggaggctgagatgggaggatgcttgagcccaggaggctgaagctgcagtgagctacgacagccactacactccagtctgggtgacagagtgagatattgtctcaaaaaaataaaaaaagaagataggaaatttaaaataagaatggaggcttccctgataaagtcatcagttagttgactcttacactgttatatgcttaatcatgctagcaaatcaaagcataa

SEQ ID NO: 240061 - DNA, 607 bp, Homo sapiens
tgatatgagctcgtctggtcagggacttgccatgctcgtctggacgtccaccgtgcctggcactggtagatgacagtgaacattttatgaatgattgtgggaatgatctgagcagtttctactttaacagagtctctgtgggcttatgagagtctcttccttcyggatctcaaagctttttttgcacagaatctggtaacccttctgtgtgtatatgtgtgtgtgagtgtgttattgcacatatggtttgctttgcagtttggggcagaggctggggatttttggagggctaggatcttgccttagctgtctttgtggtcctcaggagcgctgcacaggtctttccacaaagtggatgtgagttgagtcttagagctggaacgggccctgggaaccatgttacagatgagtggctccagggagaagacctgcgcagatcacatggtgcattagggccatgcctggcagtgcttgtgttgccctgggcctgaggtgtcccagttcaggcagctgagttgggtgctgcccaggaggtgaaggctgtctaacagcacaagcgggtttctcttgagaggcctgggatgggcagttgtcaggtaggagctga

SEQ ID NO: 240062 - DNA, 607 bp, Homo sapiens
tgatatgagctcgtctggtcagggacttgccatgctcgtctggacgtccaccgtgcctggcactggtagatgacagtgaacattttatgaatgattgtgggaatgatctgagcagtttctactttaacagagtctctgtgggcttatgagagtctcttccttctggatctcaaagctttttttgcacagaatctggtaacccttctgtgtgtatatgtgtgtgtgagtgtgttattgcacatatggtttgctttgcagtttggggcagaggctggggatttttggagggctaggatcttgccttagctgtctttgtggtcctcaggagcgctgcacaggtctttccacaaagtggatgtgagttgagtcttagagctggaacgggccctgggaaccatgttacagatgagtggctccagggagaagacctgcgcagatcacatggtgcattagggccatgcctggcagtgcttstgttgccctgggcctgaggtgtcccagttcaggcagctgagttgggtgctgcccaggaggtgaaggctgtctaacagcacaagcgggtttctcttgagaggcctgggatgggcagttgtcaggtaggagctga

SEQ ID NO: 240063 - DNA, 545 bp, Homo sapiens
tctggtggccaggtttcagtaacagtacgaagttatctgcaatccactatatgagttattcaaaatgttcttaacatctaaatgaaaatgctcagcatgtctcttatcttttctcaaggtgagataatcatagtcctattctataagaaattccccatattagttctacatagtcctcagcgtcatttatatggcacctgtaatagtaggtttcatacaactctttgttgtagtagcttttgatgaaagcttacaaaatgaaatcaaagtgtaattctgtgtgggactagatagtaagatccaacatgatttttttccagtggtctagcttaattcaacatatcacataaatagattttacagaaatgaatggattgcctgtccttccatcttccataaatataactttaaaaaataatcctgtaatttgcaatgacatgaataaacctggaggayattatgttaagtgaaattagccaaccaaagaaagacacataccatatgatctcacttatatgtgtaatctaaaaacagttaaactcata

SEQ ID NO: 240064 - DNA, 618 bp, Homo sapiens
ataatgtaacagtatttggaagagataatgacacaaggatatagtgatctgggagcatgaattagaaacagggtactatgtttctggtgtaaaatctaaattgtgctttctactagcgttactttttcaaatgggatgatataaagcactgtgggctataagcaacaatcttgggttgctaggcaaatagaccaattgatctttattattattattattattattattattattttttgagatgaagtcttgctcttgtygcccaggctgggtgcagtggcatgatcttggcttactgcaacctctgcctcctgggttcaagcacctgagcctcccgagtagctgggattacaggcatctgccaccacacctggctaatttttgtattttttgtagagacagatgtttcaccatgttggccaggctggtctcaaactcctgacctcaggtgatccgcccgcctttgcatcccaaaatgctgggattacaggtgtgagccacagcacccggtcccagttggtcttttaatattaaatttgtgcactattactgggtctggagttaatgatttcaaatagtttctaaaaataactgattaaatgtaagaaattataacta

SEQ ID NO: 240065 - DNA, 618 bp, Homo sapiens
ataatgtaacagtatttggaagagataatgacacaaggatatagtgatctgggagcatgaattagaaacagggtactatgtttctggtgtaaaatctaaattgtgctttctactagcgttactttttcaaatgggatgatataaagcactgtgggctataagcaacaatcttgggttgctaggcaaatagaccaattgatctttattattattattattattattattattattttttgagatgaagtcttgctcttgttgcccaggctgggtgcagtggcatgatcttggcttactgcaacctctgcctcctgggttcaagcacctgagcctcccgagtagctgggattacaggcatctgccaccacacctggctaatttttgtattttttgtagagacagatgtttcaccatgttggccaggctggtctcaaactcctgacctcaggtgatccgcccgcctttgcatcccaaaatgctgggattacakgtgtgagccacagcacccggtcccagttggtcttttaatattaaatttgtgcactattactgggtctggagttaatgatttcaaatagtttctaaaaataactgattaaatgtaagaaattataacta

SEQ ID NO: 240066 - DNA, 576 bp, Homo sapiens
aagctttggggttgggtaatggaggagaaaaaaattccagaggactcaggagaaaagtggacagggaggtaggagagtgcaatggtaaggggtaaaccaagagagcgaaccatttcagaagctaagagagaaggatcagctgtatggatgccactaatggaaatattaagataaacgagtaagaaacaaatgcctaaatactgccaaattcagagtgctttaagaaaacctgaagttttacatattctacaggttattcaaaaatcatttatccaatgctgagaaatttgaggcaaaactaccttactgataacattttwaattaatatgttttttcaaaactctgtagaattaggtattcagaggcataaaatgtgttatatcctttgacagtaaatgtctgcctgatttatcctgataaaataattaagatgtggaaaaaagctatatacttaaagatgatgactcaaacaatagaaattttctaaatacaattgtattaagtaacttatgacatcagctcaataaaacagtatatattgctatcaaaaatgatgacaaagacgatgcaagtat

SEQ ID NO: 240067 - DNA, 616 bp, Homo sapiens
ctgggtgtttggcaagtgtgctatctatgtggtatctaattatttttataagcttattgaaataaataggggtccatgagagaggcccttcttaaaattgacacttggacagtggtgtacattttttggggtccaaagacttgtacccaacatccctaaaactaaactgtcttctactctaaaactgtctatatcgcttgatatcattatctacttatgcctgaaatctagacacartcttaatgttccccttccttttagtacatactcacaatttttcatcaagtcctgtgattttacttactaaatatttggaaacttctctgatttccacctctctaccgccacccttgtttaggttctcctttttttctccacaggcagcaataacctcctaacaggtgccctttcttctgggctttgccttctgagttttgttctgcactcgttcccaacgttatctgtccaaacaaaatctgactgtgtggttcacatgctgcaaacccgccattggcttcctgttgcccacgggacaaagcccattatcttcaactttgcactcaagtttatgttctgactcttttgtatcatcttccagcacttcctaagctgggct

SEQ ID NO: 240068 - DNA, 616 bp, Homo sapiens
agtccaaatcctcacctctcatctcacctcacccctcacctaacccttaaaatcccactccaggcacacacactctcagcaggtcatttcattccaaatgtcaagaaatagaagccagtagacacgaagcccctcaactttccttccctccacaactcacctcatctagatcctcaccatttttctccttttctgcctgtctcagaaggaactatatgcctttasgaagctaaccccacatcttgattttgtccccggctgtctctgcttgttcattcatttaagacctccatctctacctggtgcctttaattttccccttgaccttatggccgctctcaagtacagctgccatctctctcttcattattcctattccgacttcctccctatcctctcttcaggcttctgccgtctggtgtccacctttaatactggaagataaatcccgactttcaagcatggcctgcaagaactcccagggccaagtgccgcttacttggtgccctcatctcctaccaacactccttccacacagactcctcgtcacgcactgtagttgaaccagcctgctcccctccattcccaaaacatcccctgcatccacaccttgcct

SEQ ID NO: 240069 - DNA, 592 bp, Homo sapiens
gctgctgattggtgcattttgcaatcctcttgtaagacagaaaagttctccaagtccccacccgacccagaagtccagctggcttcmcctctccgtagcaccacaatatggaaactactgtcaacaaatgtgaacctcagagagccaatccttcaagttgaatcctgagtcactcactgggtctaaatttaaaatagagccaagtagccctttgctgactagaggtcacacacataactctgagccctcagaaaatccacatttctgttcaactttgggactctcagagtcacttgaaccaaccaatcagagctcacctgcctcaaccaatcagggctcagctgtaccaatcaataggagctaagcaagtttgaatccttcatttgcataaatgaacctgggcaggaacttgtgctataaaacctgaaccctccctttgttctctagaacacatcttcattgtgcactaaaggctgcaatctccttggtttgcaaactgttcacaggaatagtctttcctcgaaattccttttcagagaacttttgttcatattatgaactcctctcctcttccccctttccactagcgtgg

SEQ ID NO: 240070 - DNA, 592 bp, Homo sapiens
gctgctgattggtgcattttgcaatcctcttgtaagacagaaaagttctccaagtccccacccgacccagaagtccagctggcttcayctctccgtagcaccacaatatggaaactactgtcaacaaatgtgaacctcagagagccaatccttcaagttgaatcctgagtcactcactgggtctaaatttaaaatagagccaagtagccctttgctgactagaggtcacacacataactctgagccctcagaaaatccacatttctgttcaactttgggactctcagagtcacttgaaccaaccaatcagagctcacctgcctcaaccaatcagggctcagctgtaccaatcaataggagctaagcaagtttgaatccttcatttgcataaatgaacctgggcaggaacttgtgctataaaacctgaaccctccctttgttctctagaacacatcttcattgtgcactaaaggctgcaatctccttggtttgcaaactgttcacaggaatagtctttcctcgaaattccttttcagagaacttttgttcatattatgaactcctctcctcttccccctttccactagcgtgg

SEQ ID NO: 240071 - DNA, 470 bp, Homo sapiens
tttgaatccttcatttgcataaatgaacctgggcaggaacttgtgctataaaacctgaaccctccctttgttctctagaacacatcttcattgtgcactaaaggctgcaatctccttggtttgcaaactgttcacaggaatagtctttcctcgaaattccttttcagagaacttttgttcataytatgaactcctctcctcttccccctttccactagcgtgggtcacactcagatttctagctgggtgatatccaaagatacaagacatgtgaaaaaaaaacagcatgtagggggaatccaaagctcggagaattttttaatttgtgcatgtaggatgtacgtgacaaatcaaggtaaaaatttcaagtagtcagaaatatgggccttaatgtaagaagaaatttgtttccaggctcagatctataaagaggccgttgagaatgtgtcaagggccttttagtgagggat

SEQ ID NO: 240072 - DNA, 629 bp, Homo sapiens
ttctgctacaggagaggaggaggaggagtaaagaagactgtcttgcaacttgtacaccagctcagccacagtaggatagggtgccaggcagagccctgatgcactcatccaggccctagctcccagatgacatttccagacacacccagggccagaagggaacccaccttgggccagcagggagaaaarcttattgccttgaagggaaggacatgggtctggctgggttcaccaactgctgactgaacagcccctgggccttgggtgaacatcagcaatagccaggcagtggtcactgtgggccttaggcaagacccagtgttgccctggctttaggtctgatccagtgcagtcccagtggtggtggccatatgggctcttgtgtcacccctgccccaggatccagggagctcagtatggagagagactccatttgtttgcaggaaggcaagagaaggggaaaagagtctctgcctggtaatgcagggaattctcttggatcttaccccagatcaccaagacagtgcttccacgcatctgccaagagtcacagcattactcggcttgaggtgccccctaatgcagatgcagctgcagtaaccaaagacttagattacaacacacaacac

SEQ ID NO: 240073 - DNA, 596 bp, Homo sapiens
ttgcattactgtacatttaataatttaacactgataagctatttagaaggcaacaactttatttacaactttattttcttaatggctatgatttatattaccctttccttttgaatttgctgaaagtttataataaccattgtgtgaatgtgtataaaattatagactcaaaattttttagaaacctccttaaaaacctcttggcaaatctatttcccaccatagcaattcacagcaacatggcttaacatagccccttagctattgcacatacatttggagcatcaagcttagtgttttatagacgattcttaatttggcagtaaatgtcccacattctatgcaatcccacaattggtctktattctgccctgtaaaatctgttttgccctttgaatcaacctccctccccactcgcttttgttctgttaaaatttctagtttccccccaacaaaaactcacatagttttttttggctgtcaaccatcattctagtagatttgttttatactccttcagtttctcaggagtgtccttcttaaagtttttgactcctggaactgaacacacttctgggggtgatataagcaacatg

SEQ ID NO: 240074 - DNA, 531 bp, Homo sapiens
tctgaattcatttatcaataatagcattaagtacaacaatcatttggaaggttttctaggagctctgaccatttttgtttgtatattatctctagataatgaaacaaggctgagagagacttttttttgamaaagatgattccatcctcattcttaagcatgttcttcattcacttagcttccgggacacttgccctctgaaggttttatccacctccttggcctctccttctgagctcctctttccctgcttgacccctgctgctccagggcccaaactttccacctacactctgtggcagagcaaagttcgccagtcctgtagctggaataccaacttcatactgaaaaatgcctccagctctgacttctctaagctccaattcaaagtgccaaaatgatttattttccagctttattggagtataattgacaaataaacatggcatatatttaatgcatacaatttgagtgttttgataaacattttcattgtaaaacgattaccacaatcaagctagttaacatatc

SEQ ID NO: 240075 - DNA, 477 bp, Homo sapiens
tgatggcaggattatatgttcttgaggtttaaaatagtgataacccagacttaggttgaaacaaacagcaacccctgtagcttctgtagaggaagtgaggcctgctttgatgggaattctcatttggacatgcaggaaacatgatgagtatttctcctgggcctctacctgtaatagtagcaaccctcagtggaaaaaaaggacacttttgtggaaggggtaacttttcttcctttttgcttctttcctcagggacattccactttcccaggcttttgtatgacctggtatggtttttgtgattatgacaggattttctgttcttatgcactgtgtgtaagttccctgtaagtctgaaccaagcctataatctttcagttttctgtaaatcttgamgcaggcccctccaaggctttgtgtttccaagtattggaattgtgatttgattgggaagatgtatgaatcagggcacatggc

SEQ ID NO: 240076 - DNA, 431 bp, Homo sapiens
aagctgggcacagtttttacacttgatcttagctgaaaggctgagaagtgatgggcacagtttttgtatgtttttctagtttctaatagctaccatcatctgtattgtctttcatctccactgagaatgtgaaccacctaagcacaggaattttgtctatcacctcccctccatcatgccatatatatcattgagaaagtgctcaataactgcttgtggaaaaaaattacataatttaataaaagaaaagaagaccgattttgatcttctcagactcacttattgcaaatcttaaatttgtgattgatatagttatttcaaagggtatcatgaatcattttaagcttaatgtccttaaattaaaagaaaattacsctgtcacaaagtttctactcaaagaagcgttaggatacattatatcaacaaagatc

SEQ ID NO: 240077 - DNA, 570 bp, Homo sapiens
ggtgggtgcagtggctcacacctgtaatcccagcactttgggaggccaaggcagaaggatcccttgagcccaggagtttgagaccagcctgggcagcaaaacaagactgtcactacaaagaaaaaattcaaataaataataaaagtggaccttttttgtaggaatccacacatttcagccatttgtgtaatattagacatatctaaatatctagaaatgtatgaatacatttatgttgttacatacagatatttggtggtctattgatagaaactggataaaatacaaacatttcttttatagcatgcttattcattacgggaactggattcatcataataaaataattcagatgtttcattataatgatcataactggttgttataagattattagcaacaacacctcccaaggatgaaaaaaaagttaaatgctgatrtataaaagcatggaaatgagatctttttatttagtagctggtatcttgttagcgcttttgtttttctgtttactgatgacagttgtgactgtactacaagtaataagtcaaggtcagggccaacggccca

SEQ ID NO: 240078 - DNA, 561 bp, Homo sapiens
atattttgtctttccagcttgttgctttctagttttttaaaaaaagtcttgttaggtttttgacagagattgcattggatgtatagattcgtttgaaaagatctgattttaatcttaaaagtatagagttttccaatttatgaacacaatatgtatcttcatttatttaggtctttgccgactgtaagacaaaggaggggaasgacgagcatttgccttaagctgtgtctgtgtctaagttgggtactattgtaatagaggacactacaaagcagaaactttgtgccactttttcagttagcatattatgtgatagtcattgctcctgaacatagggtttttttttttttggcattcttttaaacatttttggatggagaatgtagaattgtaaaattaaagaaataagttaacatgaaatcattctataccatgtttgactatttttaaaaaatgatcacatccacctattatcccaggtagagttgactatattactaacagtagccctgggcttgtgaatggtttacttagaaaatgaaatatgctttgggaggccaa

SEQ ID NO: 240079 - DNA, 616 bp, Homo sapiens
tagtacaacttgtgtccacatagtcatgtggtgagctaattagtatgtgagcatctttgtgaatgccaacttaactaccagattgcctttaaaaattggccagttgcggtggctcatgcctgtaatcccagaactttgggaggccaaggtgggaggatcacctgaggtcaggagttcaagaccagcctggccaacatagtgaaaccccatctctactaaaaatataaaaactagccaggtgtggtggtgtgcacctgtaatccagctactcaggaggctgaggaggagaatcatttgaacccgggagacagaggctgcagtgagccaagatcgcrccactgcactccgccactgcactccagcctgggcaacagagcaagactccgtctcaaaataataaataaataaataaataaatccataagaggtgatacttctaataaaacaaatatagagtagggttaactttcctattcataagaggtctctttaccatcagcctttcccccatcttgatcatctagtgtaggtagataaatcttcttaagacattgtttactcatgctgtgtcactattaaaagcctttaattgttttgcatttccaatagatgctaa

SEQ ID NO: 240080 - DNA, 356 bp, Homo sapiens
agagtctgtgtggagactggggaaccctctgctacttctttggtgctcctcgaagcagtaaatctggcatggtatggactatgaaagaggatgaacttgaatttactaatttcttaaagttgatcaagtatgccatatgtgcaaggtattctgctaagtgctgtagggaatgaagagttaaattaattcatatgtacttaatgaactggtgcatatatatattattatatatatattatgtaggtagtatacagttgtcctttggtaactcttggaaaccaaaatccttagatgctcaaatccctcatattaaatagtayagtatttgcatataacctatgaacatcctcctgtac

SEQ ID NO: 240081 - DNA, 484 bp, Homo sapiens
aagcccgtgacttgggttataaagctagtttaagttgatgttcaactcatctgttaactgctgacattttcacaggtgttcatgggacatgaatgtggaagctaaaatagaaccccagcagaayatacacagtgggtttctccggtagtcaccggggaagactcatagtttatataaagcatgatttgtaccttatttgcataagcattctcagttacagagccataggatgttagaatcggaagcacataatagattgtctagtgtagttccttgaaattgtggctcagagaaataaaaatgactcagctaagttttcacagctggtggatgacacaacccagagcagatcccagtttccttgcaagtggtctggagctgccttcctacttctctcataactcataggtttgctccaacctctagctgtcatttgatggaaagagcactagatcagaggacttagacttaagtcctgactatg

SEQ ID NO: 240082 - DNA, 484 bp, Homo sapiens
aagcccgtgacttgggttataaagctagtttaagttgatgttcaactcatctgttaactgctgacattttcacaggtgttcatgggacatgaatgtggaagctaaaatagaaccccagcagaatatacacagtgggtttctccggtagtcaccggggaagactcatagtttatataaagcatgatttgtaccttatttgcataagcattctcagttacagagccataggatgttagaatcggaagcacataatagattgtctagtgtagttccttgaaattgtggctcagagaawtaaaaatgactcagctaagttttcacagctggtggatgacacaacccagagcagatcccagtttccttgcaagtggtctggagctgccttcctacttctctcataactcataggtttgctccaacctctagctgtcatttgatggaaagagcactagatcagaggacttagacttaagtcctgactatg

SEQ ID NO: 240083 - DNA, 643 bp, Homo sapiens
gtcatctataatgttattttatcaacttattaaaaatagttaattttcatgtcatatgtgataaaaatctatttcttccttatacagcttattgctttttcttccctttttatgttgactgaaagtaccaggaagatactgaatactaatcatggcatgtatatacaaagagaaaggaaggattattttaaattatccaaataaataatttgacatttcaatctgtttgctattgtgaatgtacatatactttccttctgggagctccaaaggacaaacttggccgactccatgcataacagcgccagaatgcaaagctccaccagcacggagtttcaaattcacttcccactactcctttgaccagagactcctgtgggacttttctagcgggactatgcacaaaataaacagagctccagcccaagactctttagtctaccacataaaaccaggaaggaatgtttttacctcttctatggaaattcactacagccatcagttgcaccaytgcaattgcacacttcctactggatgcaacacatagtgagtactaatacgtgccaagccatgtatgttggttggcattgtggaaaacatgcagtctggtaagacatgattctaacatataagtgttaatcac

SEQ ID NO: 240084 - DNA, 540 bp, Homo sapiens
ggagtttggaaaccaagatctgagggccaggtacatttgttgctgttaagatattattgcttctttgtcctttcagtgggcgaaactaggaaatatrtatatatatatatatatatatatatatatatatatatatgtatactaagtcatacatacacatgcatctgtatttagttctgtatctgtctgtgcatgtattgaaattcatgtttataccattacctctcattgcaatccaacaaaattgagtcctttttccttttctttgtaacttccttcactgtaagaaatttgactagcagtgctgataatatacttactgatttattcaaacctagtatacatataaagtagtttcagttgctgatttatgcctctgtgagaaacacatttactaactagattacagtatttgtatataggatttttgtcttttggatctaaacttattttgataatacatttatttcctctcaaatttagttttcaagatgaccttctccagtatcagctatagtgagataattatcgcataaattg

SEQ ID NO: 240085 - DNA, 479 bp, Homo sapiens
  misc_feature (1)...(479): n = A,T,C or G
tcttcctttatctgtcttaaaattcagtagctttgacaatatcaatcaccttcatcagatccagaggtggctccccaagacctgatgttaccttatctcttaacaccacactatgcactcacatataccatgtacagtggctgagtgcaggcacctactttagaaaagggagaactggtgaacacagtaatttctgtagcaatggtgggatcctgttgggtaggattcagccaaaagaggaagttcctgatttaggtactcacccttaagtttggggggaactcttgtttattcatctccatgaccaccagcaccatcctcttgtctattatctcccatgggcactcttgaaaattgatattgatgagcatactatactttgtatttgctcaaggcaccagccagtktccagtcattcaagtttcgttgggcagtgggggtaatgggaatggtggggnactcccaaaagctnnnnnnnn

SEQ ID NO: 240086 - DNA, 601 bp, Homo sapiens
ttggactttccatcgtctgctgtcagaccttcagttttcacatggttctccatcataaagaaacactttcttctccaaatattcagcctagaagaggattccacagtagagagtcttggacgtccatccatcaggatcttctttatcatttctataaggaggtaagcaatctggggtgctgcatcagagggtggtcaagtgcagccrtgtactacagttggaattattgtttattctggcccactctattgcaattctctgtatgtacatgtgatttttctctcaagaattgtattgcaccgccttgaaacatggctttttgagtgggcctatctgagtccttcagccatggctggtatctcttactcggccatgttggcaatgtcttgtctgcatatttctaaactctatatatagggctgtagccaatcagggacagtctagagcttttcttccaagaacactttgtcatttaaatggcttgtctcccagagtagaaagaggagttctaagagagtataataactaacttcatgggtctatttaaatttcagccaaatgctctccctgtacttctaataattgacgataactaatgaag

SEQ ID NO: 240087 - DNA, 609 bp, Homo sapiens
atcaacaattataaaaagaaaattcggtgtatatatatatacacacacatatrtgtgtgtgtgtgtgtgtgtgtgtatatatataaacacacacatatatatatatgtgtgtgtgtgtgtatatatatatacacaccatggaatataactcagccatagaaaagaactaactcatgtcttttgcagcaacatagatggaattggaggccattatcttaaataactcagacacagaaaatcaaatactgcatgttctaagtgggaactgaattatttgtacacatggggacatagaaagtagaataatagacattagagacttgaaaggtgagagaccaggatggagatgagagatgaaagtacctaattggtacaatgtacactattcgggtgatggttacactaaaagcctagactttactactatgcaatatatccatgtgacaaaactgcccttgtaccccataaatccacaaaaagataacaaaatttaagttaaaataaaattattaaacaaaatttaaatttaatttaagttaaatacttgtaaagactttgcctatttgtgagcttagttactgcacacagtttcttgcagagagatttttg

SEQ ID NO: 240088 - DNA, 609 bp, Homo sapiens
atcaacaattataaaaagaaaattcggtgtatatatatatacacacacatatgtrtgtgtgtgtgtgtgtgtgtgtatatatataaacacacacatatatatatatgtgtgtgtgtgtgtatatatatatacacaccatggaatataactcagccatagaaaagaactaactcatgtcttttgcagcaacatagatggaattggaggccattatcttaaataactcagacacagaaaatcaaatactgcatgttctaagtgggaactgaattatttgtacacatggggacatagaaagtagaataatagacattagagacttgaaaggtgagagaccaggatggagatgagagatgaaagtacctaattggtacaatgtacactattcgggtgatggttacactaaaagcctagactttactactatgcaatatatccatgtgacaaaactgcccttgtaccccataaatccacaaaaagataacaaaatttaagttaaaataaaattattaaacaaaatttaaatttaatttaagttaaatacttgtaaagactttgcctatttgtgagcttagttactgcacacagtttcttgcagagagatttttg

SEQ ID NO: 240089 - DNA, 611 bp, Homo sapiens
cataatgaccacatgccagagtagaaatggccatacatggttatgatcatggagacaactgtaaaagaagtatgcagagtctaatcagataccataacaatctctgtaagaatggtagctccgatgggaaagtacaaaraaaatcctgaattcactcaggtagtagaaatcagttcaaggacattagctatgaatttggggaatggggggtttgaagactctcatctattcaaatgatggtaatgatgacagaagaatgatggacagtaagggtacaacttgatcttacaaaaaaccaaacctagctaaaggacatggtctctgaatttcctctcaccacagtgacaaaaacaagaagctcagtttacacaactgcacacaaatagactctccctggaatgctgttgactctgtactgcatcctaccctcaaatctctggcccataagtgatctcagttgccttgtaatgacaaaatcagcttgcctggcctgatgatgtgctactctccttgaaactaagtatccttaaaaatctcaggcaggtttggaataaaacacagatataatgaagtgaacaaagtccatagtatgaataccaatatgtgaaatt

SEQ ID NO: 240090 - DNA, 412 bp, Homo sapiens
tctcatttggatacctaagttgtggtacatatattttccaggcaccatctatcttraattgtaaattacactagtattcgatagataacccaggtaagttataaagatgggaagtgatcctccaatgctacacgttggcaaccatgccagaagaatagtaaaagcaaaagatgttccaggcaaacagcctcacacaaggctctatggcaagcagcctccgtttgatgtcaaattgccaaagcagacatttgggaacttgttatacttacgctattggaatataaaatatcactccatccccactctcaacatgtatacctgtatgacaaaatgtaaaacaacttcttataagccacagcagaagcttgcttcagaaagtaacaaaatgggatataagcaggaaattgttttt

SEQ ID NO: 240091 - DNA, 412 bp, Homo sapiens
tctcatttggatacctaagttgtggtacatatattttccaggcaccatctatcttaaattgtaaattacactagtattcgatagataacccaggtaagttataaagatgggaagtgatcctccaatgctacacgttggcaaccatgccagaagaatagtaaaagcaaaagatgttccaggcaaacagcctcacacaaggctctatggcaagcagcctccrtttgatgtcaaattgccaaagcagacatttgggaacttgttatacttacgctattggaatataaaatatcactccatccccactctcaacatgtatacctgtatgacaaaatgtaaaacaacttcttataagccacagcagaagcttgcttcagaaagtaacaaaatgggatataagcaggaaattgttttt

SEQ ID NO: 240092 - DNA, 412 bp, Homo sapiens
tctcatttggatacctaagttgtggtacatatattttccaggcaccatctatcttaaattgtaaattacactagtattcgatagataacccaggtaagttataaagatgggaagtgatcctccaatgctacacgttggcaaccatgccagaagaatagtaaaagcaaaagatgttccaggcaaacagcctcacacaaggctctatggcaagcagcctccgtttgatgtcaaattgccaaagcagacatttgggaacttgttatacttacgctattggaatataaaatatcactccatccccactctcaacatgtatacctgtatgacaaaatgtaaaacaacttcttataagccacagcagaagcttgcttcagaaagtaacraaatgggatataagcaggaaattgttttt

SEQ ID NO: 240093 - DNA, 545 bp, Homo sapiens
agggagggagaaggagagagagagaataactgggttaaataaacatagttgtaataattctacctgctccctagggctattatgagggtcaaatgagatgatacttgcttgcaaatgtattttgaatactcagagcattgaccaactacatgctgtctggtgctgaaggttagttgtttcattgacatcaccaatcttgtctctctgatatgactgtaagtaccttaaggatagatatcaactttagtgctttttctttatctccctacagtggtgagtatataataaaaatttagagcagctactgttttgtaataaattgtccctctccctcattcatatcttccacattttgcctcctttcatttcctggaaaacaccacgctctttcctgcctttgastctctcgctatggtgttcccaaagcctggaatcctgtttagcttgcccacattcctcctgccttcaatggctggctctttctcagccattagatttctgcatcaatgttacctcctcagtagagacttccctttcttccctag

SEQ ID NO: 240094 - DNA, 385 bp, Homo sapiens
tatgtattctgacaaatggaaaagkgttgtagtttatgagttaatctgtattgtgtcagcataaatgacttgcagaatcatcttccaaaaaactgagaagatagtaaaaattggaacatttagttcaaactgacttttaatctgttaaaattcatcagtgcaaaccatttcttcagtcaatgtctcctccacattgctattttctttatttgattatgacatttttgagattagtatctctgtttgggtcacttttcagttctgacacactcaaggtgtattaaatatttaatatgttcaataaatgtttattttaattcaataaagacataaaattttagtgttttattaaatattagaccctttaatgtgacgattatttagt

SEQ ID NO: 240095 - DNA, 557 bp, Homo sapiens
taagtataaaatgttgtaaaagaaaagcaagtaaaataaacacgtatagttatagctaacatgtgtgataaaatacagactttctgatagctattttaatgcataaatttatcttgtttaatttttaatattgagtttctataattagaacaatacagtaacttgaacgtctcttttctcaccaatactgaaaaaagatgcaaggttggataagtttctattgtttgmctcctaaatttcttctccctggtattttctaaattttattttactattcattcattcattggctcattaactcagtaatagtaccctatcctgtggtagaggtattatattcctagaataaagacctgaatatgacatattatttgggcttcaggaggctcacagtatgatcaatatgataagtaaacatcaattctagcagaatgaataaaaatgttgaattagatttctcagcaaagagatacagaaattcaaaagtagatgttagttctcattgcaaggctaaggaagacattacaatggaagctagaattccccttgaataattt

SEQ ID NO: 240096 - DNA, 557 bp, Homo sapiens
taagtataaaatgttgtaaaagaaaagcaagtaaaataaacacgtatagttatagctaacatgtgtgataaaatacagactttctgatagctattttaatgcataaatttatcttgtttaatttttaatattgagtttctataattagaacaatacagtaacttgaacgtctcttttctcaccaatactgaaaaaagatgcaaggttggataagtttctattgtttgactcctaaatttcttctccctggtattttctaaattttattttactattcattcattcattggctcattaactcagtaatagtaccctatcctgtggtagaggtattatattcctagaataaasacctgaatatgacatattatttgggcttcaggaggctcacagtatgatcaatatgataagtaaacatcaattctagcagaatgaataaaaatgttgaattagatttctcagcaaagagatacagaaattcaaaagtagatgttagttctcattgcaaggctaaggaagacattacaatggaagctagaattccccttgaataattt

SEQ ID NO: 240097 - DNA, 522 bp, Homo sapiens
aaatagacaactagataagtagtgttatcctactcaagggaagccatttaattaaaacatatttaaaagccatggaataaattaacttttcatgatgctgattaaatatgggtacattttccatagatcacacatacgcaaataaaattttgggaaaaatttaaaaatttgagtaacgttgagaggtgttttayggtttactttctttatgcctgttttgctgaaatctttattccataattgtcttacaagttattatttagattatctaattcataatatcagcaggtcaaaataattattaggttggtgcaaaagtaattgcattttggccattactttcaatggcaaaaacctcaattacattgcaagatatttaccatgtctttttcaaaatatattttgtgtgtgtgtgtttgtgtgtgtatctctgtgtttattttattgctttagattttgctatccatcttatacgtaatactaatgaggtgcttctttcctctcaaacttaatgcaatactt

SEQ ID NO: 240098 - DNA, 522 bp, Homo sapiens
aaatagacaactagataagtagtgttatcctactcaagggaagccatttaattaaaacatatttaaaagccatggaataaattaacttttcatgatgctgattaaatatgggtacattttccatagatcacacatacgcaaataaaattttgggaaaaatttaaaaatttgagtaacgttgagaggtgttttatggtttactttctttatgcctgttttgctgaaatctttattccataattgtcttacaagttattatttagattatctaattcataatatcagcaggtcaaaataattattaggttggtgcaaaagtaattgcattttggccattactttcaatggcaaaaacctcaattacattgcaagatatttaccatgtctttttcaaaatatattttgtgtgtgtgtgtttgtgtgtgtatctctgtgtttattttattgctttagattttgctatccatcttatacrtaatactaatgaggtgcttctttcctctcaaacttaatgcaatactt

SEQ ID NO: 240099 - DNA, 600 bp, Homo sapiens
cttatgttacgtttctactaaaatctatagatcactaatacacagaaaaaattcatgaatttcctaagatcataatcaatttatacaaaccttttggcaaaaaggtttatataaacctttttggcaaatatattaaatraatgattgaattatttactagtctgcatatctctgtaatgacatagaaattgttgttttctataacaaatcaatcaaaaccaatatctaatatattaacaactttgaaaatatgttttctatgggaaacataatttaagaccagcttacttcgttgactcccttgaaattagtcctacaatggaaaaaatatcacttccgtattttacaagtgtactgaagcaggcacaaggaaaaggtggtcttatttcaccaattgttgaataaaaatgggaactacatttttacctaagctatccttttttatatctttaaaattaagtagcattctgttttttttcaagtacaataatcactctttttttagtacaataatcaacatagtaaatacctgaaaatatcaagatgaatttgaaaattggtaatttttgtacctatagaaaatttagcatatattaaatt

SEQ ID NO: 240100 - DNA, 637 bp, Homo sapiens
caccaataacagacaaacagccaaatcatgagtgaactcccattgacaattgcttcaaagagaacaaaatacctaggaatccaacttacaagggatgtgaaagacctcttcaaggagaactacaaaccactgctcagtgaaataaaagaggatacaaacaaatggaagaacattccatgctcatgggtaggaagaatcaatatygtgaaaatggccatactgcccaaggtaatttatagattcaatgccatccctttcaagctaccaatgactttcttcacagaattggaaaaaactactttaaagttcatatggaaccaaaaaagagcctgcattgccaagtcaatcctaagccaaaagaacaaagctggaggcatcatgctacctgacttcaaactatactacaaggctacagtaaccaaaccatgatactggtaccaaaacagagatatagaccactggaacagaacagagaatttcttaatgactgaaattttatgagagagagagagaaaatctaaagtgtttaagtatcagaaatttttaattcagcaaattaaatatattttgttatacaagggtccagaaatttttatatctgccccccaggtgaacagaattagattaattttcatat

SEQ ID NO: 240101 - DNA, 637 bp, Homo sapiens
caccaataacagacaaacagccaaatcatgagtgaactcccattgacaattgcttcaaagagaacaaaatacctaggaatccaacttacaagggatgtgaaagacctcttcaaggagaactacaaaccactgctcagtgaaataaaagaggatacaaacaaatggaagaacattccatgctcatgggtaggaagaatcaatattgtgaaaatggccatactgcccaaggtaatttatagattcaatgccatccctttcaagctaccaatgactttcttcacagaattggaaaaaactactttaaagttcatatggaaccaaaaaagagcctgcattgccaagtcaatcctaagccaaaagaacaaagctggaggcatcatgctacctgacttcaaactatactacaaggctacagtaaccaaaccatgatactggtaccaaaacagagatatagaccactggaacagaacagagaatttcttaatgactgaaattttatgagagagagagagaaaatctaaagtgtytaagtatcagaaatttttaattcagcaaattaaatatattttgttatacaagggtccagaaatttttatatctgccccccaggtgaacagaattagattaattttcatat

SEQ ID NO: 240102 - DNA, 604 bp, Homo sapiens
tttgttatatgggtaaacttgtgtcatggggatttgttgtacagattatttcatcactcaggtgttaagcctagtaccaatcagttatttttcctgatcttctccctcctcccatcctccaccctctgataggcccattgtgggttgtttttctctatatgtccatgtgttctcattatttagctcccacttaaaagtgagaatattcagtatttggttttctgttcctatgtgtgtttgctaaggataatggcctccagcyccattcatgttcctgcaaaagacatgacctcattcctttatagctgtatagtattccaaggtgtatatgtaccacatttttcttacccagtctactattgatgtgcatttgggttgattccatgtctttcctattgtgactagtgttgcagtaagtgtacatgtacgtatgtctttataatagaatgatgtgtattcctttgggtgtatatccagtaatgggattggtgggtcgaatggtatttctgtttataggtctttgaggaatcatcacactgtcttctgcaatgattgaactaatttatgctcccaccaacagtgaataaacattcctttttctcca

SEQ ID NO: 240103 - DNA, 368 bp, Homo sapiens
  misc_feature (1)...(368): n = A,T,C or G
nnnnnnttttaaacctgcattgaaatcaaaattagcacttccaagaacttcaaaaaataaagccatgggatccataaggtccctataatatcaatagaacttgaaagtgccaacggtagtttcaggggagacactggaagatgmggtcaagataagctgtcagtggaatgtgtttgtgttcttgggcctgcagagagaagggagtcaagagtcccatcagagctccactaagcagggagggtttgtccaagactccctgagcaagccccacccccagctaccccagtcatatcctcgtgtcgatgactttatgaaaaaaaagtcataacccaataagatatgtaggaatctagggcagagcaacaggt

SEQ ID NO: 240104 - DNA, 368 bp, Homo sapiens
  misc_feature (1)...(368): n = A,T,C or G
nnnnnnttttaaacctgcattgaaatcaaaattagcacttccaagaacttcaaaaaataaagccatgggatccataaggtccctataatatcaatagaacttgaaagtgccaacggtagtttcaggggagacactggaagatgcggtcaagataagctgtcrgtggaatgtgtttgtgttcttgggcctgcagagagaagggagtcaagagtcccatcagagctccactaagcagggagggtttgtccaagactccctgagcaagccccacccccagctaccccagtcatatcctcgtgtcgatgactttatgaaaaaaaagtcataacccaataagatatgtaggaatctagggcagagcaacaggt

SEQ ID NO: 240105 - DNA, 559 bp, Homo sapiens
  misc_feature (1)...(559): n = A,T,C or G
tttaatgtactatatatagggattcttcacagatggaaatttcacaaaattattttaattatttttgagacagggtctcaccgtgtcacctaggctggaatgcagtggtataatcataactcattgtagactcaaacttctggactcaagcaattctcttaccttagcttccccgagtagtgagactacagccatgcactaccaagcccagaaaattntcaaaacattttttttctttttttttttttggagagacagggtctcactatgtttcccaggctggtcrcaaactcctggcctcaactgatcctcctgccttggcctcccaaagtgctgggctaacaggcatgagccactgtgcccagccccacaaaattgtttttataactcttcttattaaaaaaatcttacacaactaatgctttgacaaaaaaagattttggaaatgctttgtgacttactttatctcagggccatattttcttatttttataaagaagaggttatttcatgatttcacctatataaaatttttgtaagtatgataaataaaaaataa

SEQ ID NO: 240106 - DNA, 599 bp, Homo sapiens
tttcaaagcaccagttaattacaaaaagcatgcatatttatcctcacagtgagttaagtggtgagagagctagcaaatcatacatygcattccccaaagcatctgaacgtacttctagaaaacaaaccaaccaaaagggaaaataatgcaagagaagccgtattttctttgcttaggttggcaaagcagcagctctttgcagcaatgacaggcagggcagagtgtcgactgggaagcgagtcccaatcttgaataatggtgagcttgagtaatccttaatttacaatttaaaggatgaaaaaaagagactagtgaaatgtttgcttccccagataaggaacacccaagactccctgggtatccttcaaatgtagccaagaaaagtgttcttctaccctagtcagtaaatggaatgctaaaacatgatatctcattcaacatcagagctactacaactgacaatgacttcatggtatacatcaattcctattaagaaaaaatatattttaaatgcagaacttgagagggatcacaacagcatagcattattgctatgagtttcaaacatggtatttcatacaatgtgaaatatcaatcag

SEQ ID NO: 240107 - DNA, 582 bp, Homo sapiens
atttttcccttgcctccttctgtttccagaayggggttcccacccatttaatcacttttaagaaatgttcatttttttaaatctgccccataactgtccactgaagatagcaaccaataattgcactctttagtcacatgaaatttgctgtttaaaataagcttctaatcggacagggtcctcaaaacattatgattaatctacagacgatgtaatagccaagacagcaatgctcacatttctaaatgctgtttcattaataggattcatatcttgagtctgtgatattctcagctctactttacaggctgaacaaataaaattctaaatcatattaaggaaaggagcagctttgaaaattagagtctgttggaaataggagactctcttcaggcagccccaagaccctgctacctgacatttcacttccaaatgcgcttcagaaggtaccagtttgtgatacgaggaaaagcccacaggatgtttattttctcttacggaaaaaaaaaaaatgaaacaaacctcttctttctaacatgatgcggtatgggaataacagaaaaatcaataacaagcctgaaa

SEQ ID NO: 240108 - DNA, 496 bp, Homo sapiens
ccaggcagagggaaggtagaagccagtctgccttaggaggtagcagcaacaatagctccagcaaggccagttgcagataatggctccagaagtgacaatgctgagtgagagccactcagctcctgcgaaagaatagagttggcagtttgaggaatatcagctctgagggaacctttggactcctatggagtgatgattataacttctcatgtttcttaaatccaaggatttgcacaaactcttgttcctttagccctcctaacattttttttaaatctaaaattctggaattctctctcttatttcagaaacagaaaaataacctaaaaatgaagcctggattacatttytgcctcctttagtgagccgagattgcgccactgcactccagtctgggtgacagagcaagactccatctcaaaaaaaaaaaaaaaaaaaaaaaaagaaaattttctgcctcctttaaaaaccttgagtggtttctgtgtaatgtgat

SEQ ID NO: 240109 - DNA, 587 bp, Homo sapiens
ctatagagaatttccatttatcagtgggacagagaagtacctagttcatgtccagagtcaggcagggcctggtatgtcttaaaagtcttaaagggaggattgattatcattattacttagtgcaatggttctattaaaaatttaaaaaaggaaatcaaaaggccgcaaacttcaagatctacttaaacaagccaattttacacagtatgacttagatactaaaatcttttcttgaatttggaactctaaaggatattttggaaaataaaagctagggtgacaatatataaatagcacataaaatgctgaagattatgtttaattgatacaattctttatttgcacaaaatgcatagtcttagaatcaataaagcttagcaaatgatgtgtttaggcagacataatttcctgataataaatgcattattaaagtgagatagaaattacggttttaacgtgataaaaatgctcctcctggtcttgccactgttcacagaattaaaaaaaamatcagattcctaatcttgctattcaagttaaaaagtgattctctgcccctgactttacccacaacagtttttcaatac

SEQ ID NO: 240110 - DNA, 621 bp, Homo sapiens
tatcaccaggtcaaaaaattgtgactgaagcctaaagatatctaacrgaagctgagaaacagaaattcagagagcagtgtggaatgtctggaatgaatctccaagaggagaaaaaaatcagggaaaatcagccttttaaagctatggataacaagtccagagtgagagcaattagagaattacagcatgaagaatgatgacactatatcaaatgtccaggaaacttgagcagatataagaaggcaaaagataaaaaaaatttaaagcattctgagatgagtttcaaagtgataaaattattataggtgaggatacatgtaattgccttgccctaagggaacactctagaaatctcaggaattaggggaaatgcagcaagatgaggcaagttacaagaggccttggaaaaggcaggcagaacaataagagatcaagtccaggcttgggtttgatggtgacttcatgagaaattttttcctggatgggattatcaaacccaggaaggagagaatggacatgatttgcttgaacaatgtaggcctttggaagactcagaacttattgatttcatatctctcatgtgaaacctcatgagacatttaagaaaatatgtttaaaaaa

SEQ ID NO: 240111 - DNA, 521 bp, Homo sapiens
catagtgtgtgagagacataggggaagtgagtctggttttaaaatggaaagaaactggattaaggaatttaaaggagaaactgaagatgatgacaatgtaaactgctcataaactacagggctcaaatagaaaaagagggaactgaatgatttataggtgcctggaagtcactgtgacattagtgccctgattcctgatatcccaagtaccacctcctctatcctttgctccaattcacaaccataaaatattttgggatagttgagtatgtatagacaaatatgtagtatatgcaaaatatgagatatagtgttgagtaatcttacctgctccattacttatgctaagccaaatagcaaatacaaaatctgagattacttctaatattaaaccagctcttgaaagtgattggtccagcacaatagggtgaggccaatgagtacrtagcattctcctggtgtacagtaatgatcatgaatagggatgtaacatcatttaggccaataaaatgataaaatag

SEQ ID NO: 240112 - DNA, 585 bp, Homo sapiens
cctgaggttctgttcatttttgtttagtgtatattctccttgttgttcatattgagtaaattccactaatctacatattcatttaatctcttttctgtaattttcactctactattgattcaattaagtgatatttttattttggtaattttggttttcagttacataatttccatttggttcttttttataacttcttttttttcccctgagattttctgtttttcttcacttgtttcaagagattatataattgtctcctgaagcattcttatgatggaygcttcagtctccttctcagaaattccattatctaatttgtcttagtattggggtcagtggattgtcttttgtcagactggtttttctggttcatggtatgatgggttacagtcaactgcattttgaatattttgattattatgttaggagacttttaaccctattgaaaccttttattttagcaggtatgtatcctgtttaggtttagcttataggttttggactaattttgtgggctttagttccaatggcagttagtgttctgattttttataatgctaatgctgatctggtctgcttcat

SEQ ID NO: 240113 - DNA, 628 bp, Homo sapiens
actatatttctaaataatctgtgctgaacaaagggcctggaccctacctgtagcctagacagcactctctagctggaattgactaactgagtttagttgtttaaactaaagctataaccattaacctagagaaagatggaacagcagaagagagtaaaattcacatttatcaagtcatttcaatgtagtcaaaatacattcatacacacattttcttacttagccttcatattatctgtataagtaatatgagaaactgagatgcagagaagttacttaagtggctttttgacagttaccctggttactaaagggaaaaccattgcagtctatttctatatgacttgaaggrccattctatttctactgtattgccaggaggaaagagtttccttgaaagaaattggatgaagaagctatcataaaattttatcaccataataaacctctatagagttataggcttattagatagaaatgtaaagattccttaaaacagcaacaatggaacaatgacaatagttgtattgatgtcattaaatatggcaccactggtcatagtgtaaaggatagattgagggagattatggaagaaggtagagagaatggctaccaggaacagtcattg

SEQ ID NO: 240114 - DNA, 571 bp, Homo sapiens
aatatctatatgattatcctcaaccagggatatcactggttttgataactgtcctggttgatagcatgcataccattgaaaacagtgtgattattacgggtatactggcagagggtctcctaggattagtagcatagagagaggattatgttccttgtgtctggaggggaaattgacaaaggatcatcccacaaaagcagtatgttaagtggtggaaaatatgagataaaaaggctttttgtggtggaataataacataatactactcctatgggaacttatcattggggcttaaaaaaagtcttccaaatatactttctgaaatcagtctattcatatrtagaggctgctttatgtgcttgtgtgtgtgtgtgtgtgtgtgtgtgtgtgtgcatgcactcatatgcctatccctatgtttgtaaagtataagaaattgttttttaatgtgcagtgataacttgaatcttagtttcactcaaaattcatgtcaagtgagaaaaagttatttctctcaagataatgataatacagtgacaggaaaccaagtggaaacttgaagaattgaaga

SEQ ID NO: 240115 - DNA, 575 bp, Homo sapiens
atgactgttgaacatacatatgactcacatttctgtaggtctcaaaattcaacagaaataattcatggtaagaaaaaataaataaaaaaaggaattaaaaatgaaagtaggactaaccattcttatggaaaaagaagaaataagatttctatcttattgttggaaataataataaatagtcttctctgtcctgcccagggaaaaaaaagaacagggcaacactytgaccatccaacctcatgaaaccctaaaaccaagaaacctcttcagaattctagatttccttatttggctctgaattcaagagaaatgagaaaattgttgaagaagcagtgacacatgccttgccttatcagtgaggtactaagtttttttccaaggaaagtagagtttgaagcacagtgaaccaaaccccagaccaggactatgctgaaagcatgcatatcaaggtttcaatagccattgataaatagtctcaagtgtttataaagatccaatttgaactgcaaatgacagtgcaaaaataatcgatacccaattatctcagccaactatgttgagttgatagttaataa

SEQ ID NO: 240116 - DNA, 540 bp, Homo sapiens
tctgaattcaagagaaatgagaaaattgttgaagaagcagtgacacatgccttgccttatcagtgaggtactaagtttttttccaaggaaagtagagtttgaagcacagtgaaccaaaccccagaccaggactatgctgaaagcatgcatatcaaggtttcaatagccattgataaatagtctcaagtgtttataaagatccaatttgaactgcaaatgacagtgcaaaaataatcgatacccaattatctcagccaactatgttgagttgatagttaataaggacaatctaaagtttaatggcaagattagtgtgaaaagaaaccacatgttaaccacacctaaactgcttaaaagagagtgaaatgcttaacaaaacaaaaagatttgtgaagtgctgtccagytggaaactaaacaaaattcctcatttgtaagggcagcaatgatttaccaaaagaacaaagaccagcaatgtttcagcaacaagaaacttgtttgtgcattgccatgtcacgcatttaggaaaatagcaaacaca

SEQ ID NO: 240117 - DNA, 610 bp, Homo sapiens
taaatggtttactgttatgaattattttaatgctaccatgctaccaaccatgaagctctaacagctagcttaaattataacttccagatctttattcaacttaaaactttttactattattaaaacgaggtaactaataaatgatatttgactacttgaataattttaaggaaaagatacaggcatatgtcaccatacagttttaaattaacttttaaaatttttatatgtagactggctatcaagcaatgctatgtacaaatgtcttgakgattatatattttaaaatttgtttaagttctaaaaaaaaagtgtgcttatagaaaatatagctacaaaattattaatttttcagcttctagttctcttttgcccgaaaagcaagttgattattttggttaaaggtggtaattaatataaaaaattgagataatgctagctataatgcttccataggaataaaaatatgcatacaaattataagtagcttgtaattttaataagctgtaaaggttattaatatgataaatttagtaatatatatatgaatgctgattaatttatttcttaaagctaatgtttagagttttcattttaccctttatttccc

SEQ ID NO: 240118 - DNA, 571 bp, Homo sapiens
ttaatacatatattgtcattatttctatctgctacaggcagaattctcaagtggttgaaattatctttggtttaaattgtcagtagggaaggatttgaagaaggtagcaagatgagtctctctgttattcacctaggttaggccatgctagcaagcactgctgttcaaatgcgtttgactctgtgggagagtattgaaaaggaagctattgactgcacactgcagttgtagaaaaagaaaaatcaccattagatattcaatttaaattgaaaacaatatcattcaagagagaagggaatccatgcagcattgtggagaaaccagaacaggatgtccttatccttgattttaagacatttactagaagggccttaacagaaagagatgaatacctgttttcttcttgccttttttaatccctttgaaaaactgtgaatctaagaattcctcttttggctgtgtgcagacatgtggtaacacaggaaaccggattgttactgactcaagtccaaatactgcatwtaaagcaatgtgttctctaatgtatactggacggtggccatgtttcagg

SEQ ID NO: 240119 - DNA, 483 bp, Homo sapiens
gttgttagcttggttttagatattgcattatcaaataaaaatatttatccaagtgaaagtactccaaaaagcaataaacaaaatgtaatcaaactcaggagaggagtcatagttggagacagatatttaacagtcatcctttcaagaagtgagttaaaatcaacagaccaaaaaaaaaaaaatgtccttagaaaggaaaaagacaattgcagagaaaaaaatattaaacttagaaagtgaaatgatagtataaactcactgctggaacttgcccagaagttatttgtgtttcccccagcagtcatgacaacttygcatacagaggcaaaattgggaaattttattacgctcatgaagccaaaaaatctctccatggatgagaggaatgcaacatcccaactgattttgatctgggtttctataacttataaaacctatttgctctaatgaacagaagacaaagagagcaatttactgtgtaac

SEQ ID NO: 240120 - DNA, 567 bp, Homo sapiens
tttgaaatttaaggtcttgctcatttcacttatagagatcacacattaactgttttgtgtctgaagggtgaagttcttgcttcctatcagagtgccataaaacactcagagtggatacaacattagtgagatgtagaaaagttatacagatattttaaagtaattagcaggaaaaccaagctatgtattcttaatacttactcatttcctggaggcacgttgatggtgtcttcatttgatgctgcttttacctcagcatgacgcagatcagttgatcccaggcttctggattgaaaaatccagcaaactgtgtgaactaacattctctttcttttgctaagtaaacatttttaaaacactcatatatgayttttattatttaattgtaaatgctttcacacccaaatgtagaaaacaatcataagcacaaaacaaatggcaggcttctacaagaaaaaataggtagtaaacttacactgtctttttttcttaaaagttttgtcgagatgcaatttacattccatcaaattcagttttacaaattcagttgttattttcacagaattg

SEQ ID NO: 240121 - DNA, 573 bp, Homo sapiens
ttaaggtcttgctcatttcacttatagagatcacacattaactgttttgtgtctgaagggtgaagttcttgcttcctatcagagtgccataaaacactcagagtggatacaacattagtgagatgtagaaaagttatacagatattttaaagtaattagcaggaaaaccaagctatgtattcttaatacttactcatttcctggaggcacgttgatggtgtcttcatttgatgctgcttttacctcagcatgacgcagatcagttgatcccaggcttctggattgaaaaatccagcaaactgtgtgaactaacattctctttcttttgctaagtaaacatttttaaaacactcatatatgatttttattatttaattgtaaatgctttcacacccaaatgtagaaaacaatcataagcacaaaacaaatggcaggcttctacaagaaaaaataggtagtaaacttacactgtctttttttcttaaaagttttgtcgagatrcaatttacattccatcaaattcagttttacaaattcagttgttattttcacagaattgcacagccgtcatca

SEQ ID NO: 240122 - DNA, 610 bp, Homo sapiens
aagcttttccccattatctcatacaaaataacaacacccactatcaccaccacttattcagcctggacaaaattttaagcctcattgtgtctctaagagatatctcatacaacttgattgtgttaaccagtattaagatactgcctaactactttatcattgccataaaacatcactgtaaatatctccctctgatatgctgtctattattttacaaggaatgagagctttgacagtggccataggtaaggaaggaaggggaaagttrgagcatatctgcatatgcataaaacacagaaaatataactctctcgtagcagtttttacatttttgatgctgatcctgggagttgggatgacatgggatagtttatgtgattcctctataagccaggacctaatacaacacactgtttgcatttttccttcctcccaaactcttagtacttttatccatataaattagagttgtcacataatgtttgctcaaataaaggaatgtgctgtttgagtctaagagcagtcaagatgtcatggaatgtgcttttatgtttggggatgtggggtggaataggttttctaaaattctttccaaacaatattttgtgat

SEQ ID NO: 240123 - DNA, 573 bp, Homo sapiens
ctacttatatttttttctctcctttattaatttcttttggattttggaaataaacagatacttcttgttattccatttttaatttgttaatttattagatatgcattcttatactgttcttatagtggttactctagagatttcacattcatcttcaacttttacagtctaacatgaataattactactagcaattccctgatattgctagaatcttagaaaattttaactccatcttgtgccattatgaagacatttttcacagtttaaggatkacttagaacctatttctattcgtgtttatatagtcaatatccatttatatttacctgcacatttacttttccattgtcattcatttcttttgcatatctgtgtttccatctgaaaatattctccttgtgtctgaaggagtcattttaggatttcttttagtgctggtatcctggaaatacattttcctgggtttatttctctggaaattctttattgtatctatgtttctaaaccttatttttgctggttatagaatttctttcagcaccaaagattacattccattgccttctagct

SEQ ID NO: 240124 - DNA, 572 bp, Homo sapiens
aagtaaaagaagggacataataatgatagctgcagtagaaagtagaaattaatgagttggaaaacaaaccaataaacaaaccaaataatagaaaagacmaacaagcaaaaatagtactatttgagagattaataaagtagaaaaacctctggaaaagttgctaaaaagactaaaagataaatggtgtgaaacaatgttaggaatgtaatggagaaaacattcacagatgtagtagagatttatgaaagagaaaactgtggataatacgtgaaaataaattaaaaaaacagtatgatgaagtagattatttcctaattagattgtaatttatgaaaaacggactcaagaagaacaaaggtataggattagaaagaaaggatattgtcacaggtagataaaatgattttataataaagacgcaaaagaatctgctggttgcatattagaacttacattcagctctgtagctcaatgtaaaatcaaaacatcaaaattagtaatgtttctacatagaatcaaccaaaattagaaaatgcatttcttaaaaagtgatacaatttgtaaagctaaca

SEQ ID NO: 240125 - DNA, 581 bp, Homo sapiens
aaagcttctaaatgataaactgaaaatagtctctcccaactctatccctagccaatttccctctctagagagaattaactggcattatcagcttcttatataaatttccagaaatagttttcacataygtaagcctatgtacacatatatatatatattttctccttttccatagaaattgtagcacgtttagacactgttcaatgacttttttacttaatagaaaatactagagataatttcatatatgctcacagaaaaactttctaattttattttttgacagctccttactgtcgtacattgtattgatttattttgcaaccagtcttttgctatcatgaacatagctgctctaaatgagcatatgcaagactgttttgcatctatgtaagcatatctagaagaaataaaattgctatgtacaatggtatgcctttttgtaattttgctagattttataatgttgccttgcatacagcttcttccaaatttttgccaatatccataatgtagtgaataagactttctaaatttaatagatggataattcactcaaaagctgtgatggtttacatttc

SEQ ID NO: 240126 - DNA, 601 bp, Homo sapiens
tgagaaatttgagtcacagggaggcagagtgacttgctcaaggtcatacaatcggagaacagcagaacctagttctaaatccaggactgagacactgccaaggaagcataaatacactgcttctcactgtactcatctagagagrgaaaacaatactaaacagatcatcatgtacctaattacatcattgcaattgtggtaattgctatgaaggaagagtacaaggggctttgaggaactgtaactgggcctggggaaatactaagcccagtgtatggactggtgattgctgtgtaacaaaacaccccaaaatgcagtggcttaaaacagcaataatggatcatttctcgtaatgtcttggattggctgggctcagctaggtggttttccactcttcctggtgatacttggggccacacataacagctgcattcagctgagatgcccaagaaagctatccccattcatctggcagctggtgctactataggctggggcaccttggttctcttccacatggactctcttcctccagatatccaaccagcttcctcatagcatagtactgggttctaaggaaaagaaggtggaaactgccagc

SEQ ID NO: 240127 - DNA, 601 bp, Homo sapiens
tgagaaatttgagtcacagggaggcagagtgacttgctcaaggtcatacaatcggagaacagcagaacctagttctaaatccaggactgagacactgccaaggaagcataaatacactgcttctcactgtactcatctagagagagaaaacaatactaaacagatcatcatgtacctaattayatcattgcaattgtggtaattgctatgaaggaagagtacaaggggctttgaggaactgtaactgggcctggggaaatactaagcccagtgtatggactggtgattgctgtgtaacaaaacaccccaaaatgcagtggcttaaaacagcaataatggatcatttctcgtaatgtcttggattggctgggctcagctaggtggttttccactcttcctggtgatacttggggccacacataacagctgcattcagctgagatgcccaagaaagctatccccattcatctggcagctggtgctactataggctggggcaccttggttctcttccacatggactctcttcctccagatatccaaccagcttcctcatagcatagtactgggttctaaggaaaagaaggtggaaactgccagc

SEQ ID NO: 240128 - DNA, 601 bp, Homo sapiens
tgagaaatttgagtcacagggaggcagagtgacttgctcaaggtcatacaatcggagaacagcagaacctagttctaaatccaggactgagacactgccaaggaagcataaatacactgcttctcactgtactcatctagagagagaaaacaatactaaacagatcatcatgtacctaattacatcattgcaattgtggtaattgctatgaaggaagagtacarggggctttgaggaactgtaactgggcctggggaaatactaagcccagtgtatggactggtgattgctgtgtaacaaaacaccccaaaatgcagtggcttaaaacagcaataatggatcatttctcgtaatgtcttggattggctgggctcagctaggtggttttccactcttcctggtgatacttggggccacacataacagctgcattcagctgagatgcccaagaaagctatccccattcatctggcagctggtgctactataggctggggcaccttggttctcttccacatggactctcttcctccagatatccaaccagcttcctcatagcatagtactgggttctaaggaaaagaaggtggaaactgccagc

SEQ ID NO: 240129 - DNA, 459 bp, Homo sapiens
ttttgaaggtgtctaataaagacactgtgttgggaatccccaagaccaccttcggcctcaatgattgactagaactcacaaggctcagagaagctgttagactcacagttacagttattacagtaaaaggacacagattaaaatctgcaaggggaagaggcacatggggtgaaatccaggaaagaccaggcacaatcttycgggagtcctctcccaggggagcacggacactccacctaattctcccagcaacaatgtgtgcgaacacatgccaagtgttgccaaccagggaagcccacttgagccttgatgtccagggtcttattgggggtcagtgacataggcatgcgacacctaagtaactgacctcagccactcagacaccagcaccccagagcaaaaataggcattcaccataaactacattcttagcctaaactatctcaagtggaagtgcat

SEQ ID NO: 240130 - DNA, 581 bp, Homo sapiens
ccaggcatggttttaagcccttaaacagtcattaatttattgttcttaattttttttacatggtcacagtaagaaatacattttacmctataacccaccacatacacacacacacacaaacacacacacaccccaactggaataggtgttcaccattgctgtgtatgatagattctgatagttcgttgtctattgtaggaattaacaaacttttcctataaagggataataaatattttaggatttcagctaggtcctgtggtgactactcaactatgccattgtaccatgaaaacagccataaataaacattaagtgatcaaatgggcactgctaggttccaacaaaactttatttacaaaaacagacaacgggccgggtgcagtggctcacgcctgtaatcccagcactttgggaggctgaggcgggcggatcatgaggtcaggagatcaagaccatcctggctaacgtggtgaaaccccgtctctactaaaaatacaaaaaattagccgggcgtggtggcgggcacctgtagtcccagctacttgggaggctgaggcacaagaatggcgtgaacccag

SEQ ID NO: 240131 - DNA, 581 bp, Homo sapiens
ccaggcatggttttaagcccttaaacagtcattaatttattgttcttaattttttttacatggtcacagtaagaaatacattttaccctataacccaccacatacacacacacacacaaacacacacacaccccaactggaataggtgttcaccattgctgtgtatgatagattctgatagttcgttgtctattgtaggaattaacaaacttttcctataaagggataataaatatttyaggatttcagctaggtcctgtggtgactactcaactatgccattgtaccatgaaaacagccataaataaacattaagtgatcaaatgggcactgctaggttccaacaaaactttatttacaaaaacagacaacgggccgggtgcagtggctcacgcctgtaatcccagcactttgggaggctgaggcgggcggatcatgaggtcaggagatcaagaccatcctggctaacgtggtgaaaccccgtctctactaaaaatacaaaaaattagccgggcgtggtggcgggcacctgtagtcccagctacttgggaggctgaggcacaagaatggcgtgaacccag

SEQ ID NO: 240132 - DNA, 598 bp, Homo sapiens
atagtgataagcacatagaacttgaaaccatctgaaaaataatgcagaacaaaattgcttatctatattcactaggcacatatgtttattgataaaatgagaagtggaaaaatctgaattatgtaaaattatctctcctttaccttttcaaatttacataacataatcaaactcttcataatttagtaatgaacaacataatacttccttgcatatgcagtgtattgtgtgcataaaatcaatattaggtataaaaaatccatggcaataaggctagaaagaaagtgccatagtagtgattatctcatagcaaaaaagtatgacaatattttttccctctgactcttggatttctcaattttctagaaacaatgcagattgcttttataacatttaattctaaaccttttaacatttaagataagttttgaaatattccgtatacattctaattctgaaagcatttcttgtgattttgcatagagtttaggaacattaaaattctacttaaaaatttatcatgttttgtgataattytccattctttttttttaatcttgaaattttacaagcacagccacatcagagagggtgaaaa

SEQ ID NO: 240133 - DNA, 503 bp, Homo sapiens
aattctcccgttccctaatgttggtcataagttgcttcttgaaatactcccaaattttcattttctatcttctactaaaactmaacttgccattttttttgtcgctatgtcttcaattcattcttaatatttgttttggcttttagcttctgttgtcccctgccaatgcttctcccaaaatcacactctaccacacatccctgcctataagctttcatttatggtcttaaattatgtcctgcttcctggtctattcactcagatttatcactctgaacttctcatctccagttattcaaacttaaatttgttgacaactctttttccctttttcagtagacaggagcatcactatcattattacaaaatattgatttcaatgtgtactccaaagtgctgttaacatgttctctctttccacaaaatcaatattttataattcactacccaaagaagctgagattccttagcatagcaaagcacatcttaaaagacccagcaca

SEQ ID NO: 240134 - DNA, 344 bp, Homo sapiens
ctggcataatacatatgattaataaaatatgtgttgagacatattagtctctactttttaaaccaacattcaagtacatatggatasatttccttttcctttcaagggtctcaattatatagacaaagacaaaatgttatattctagcttttaaagagatattcattgtaagtttaaatatgagaatattgatatcgttcactggtctatttcattactcagagatagcctgaaacaaaaagaaaaaagaaagcatatttattaaaatatatcaccttacataaaattattttgactccatgcctacccttcgttaggatatatactaactaaatattatttta

SEQ ID NO: 240135 - DNA, 549 bp, Homo sapiens
cccatctacatcattggtgttaataccacctggtcaaggttatgtataataaaaatggtaataccattcaaccctgtgatcaagatgaaattattatggcataatacccatatatactttaaattgtaaatgagtacttgcaattaggtaatataatctcaagatgtgcatctatttgtggagtgagaaagtggagaaacaataggaaaacaaacaaatatgtgacttgaaaccatcaagaaattatcatctataatatgagatatgatgtggaattataaccatgtggtttgtgtgtgcatatttaagtgtatgtatatgcatatgtgtatatatatgtaatcacagtgtatgtgtatatttcatatatctgtgtgtgtgtgtgtactgcaacttccacattttctatttcctttataaatttattctacttcacaacatttagcaccaactgacgtaaatatatatgatgaraaaagaagagatccttagtctaggaaaatcagggaaatttccatattgaatattttaatcattaacattgacgat

SEQ ID NO: 240136 - DNA, 397 bp, Homo sapiens
gggggtgcccatcccacatttcccttcctcactttcctagcagaggttccccatgaatgccccgtccctgcagcaaacttctgactggacacccaggcatttccattcatcctctgaaatctaggcagaggttcacaaacctcaattttttttcttttaaatgaagtctcattctgttgtccaagctggagtgcagtggtgcgatctcagttcactgcaacctctacccccatgttcaagtgattctcctgccctagcctcccgagtagctgggattacagggtactgcaaccatgcccagctgatttttgtatttttagtagagagggggtttcaccaygttggtcaggctggtctagaaatcctgactcagtgatctgcctgcctcagcctccca

SEQ ID NO: 240137 - DNA, 565 bp, Homo sapiens
taccattttacactactattaacaaaatttgagtttagttgcttcacattctggccaatactcttaattatactcactytagtggttatgaaatagtactatgtcattgtggttccattttgcaatttgctaatcactaatgaatttcaacagttgctcttgacttattggctattcctgtgtctttttgcagagttgtaagagatggctatatattctggatataagtccttcaacaaatgaatatattacaaatatttttctgatgtctgtgactagaatccttttcgttttttagagacgagttctcactctgttgcccatgcgggtgttctggggcaccttcttagcttactacagctttgaactcctggactcaaacaaacctcccaccttggcctcctgaactgctagaattacaggcatgagcaaccgcacccagcctcattttcttactagttcttttgaagagcaaaattttttaattttgatgaagttcaattcatattgttttccctattcaatattagtagaattttgtttgtaagatacctttgacaacttc

SEQ ID NO: 240138 - DNA, 565 bp, Homo sapiens
taccattttacactactattaacaaaatttgagtttagttgcttcacattctggccaatactcttaattatactcactttagtggttatgaaatagtactatgtcattgtggttccattttgcaatttgctaatcactaatgaatttcaacagttgctcttgacttattggctattcctgtgtctttttgcagagttgtaagagatggctatatattctggatataagtccttcaacaaatgaatatattacaaatatttttctgatgtctgtgactagaatccttttcgttttttagagacgagktctcactctgttgcccatgcgggtgttctggggcaccttcttagcttactacagctttgaactcctggactcaaacaaacctcccaccttggcctcctgaactgctagaattacaggcatgagcaaccgcacccagcctcattttcttactagttcttttgaagagcaaaattttttaattttgatgaagttcaattcatattgttttccctattcaatattagtagaattttgtttgtaagatacctttgacaacttc

SEQ ID NO: 240139 - DNA, 576 bp, Homo sapiens
tcagtgtgttgaatttctgagtaatgtcagtttttcctcataatacagacaaaattattatttattaaccagattgtttattaatcaggactgtactgtacatgccacaatatttcttaactaaatacgagtgcatacattctcgctgacataactattattatacaagtacagtttgtgcattgtaaaaaaggtgtaaaaatcagaagagcaatttwaaaagtcatggtgatatcaacacccagatataatcagtattttcattttacagcatcttcctaacatttttattttgtattactaatttcctgttttgtgatattcactagtccagcattttcgaaggattgaagtatgatagaatacacatccacacttattagataataatatatttcccttcaataatgcattaattttaatcagacacaaacattttaatggtggctgagattattagcatccaatgtcttactctgcatgtgtgattaaatcagaaagagaacgaaaactaggggaaataaaataaacaatataaatttaaaggttcataattatcaaacaaggaaccgaagc

SEQ ID NO: 240140 - DNA, 566 bp, Homo sapiens
agcaaaccaactctaaagctagcagaaaataagttaagcaaaagcagagctgaactgaaggaaattgagatgtgagcatgcctatcaaagaatacaaaaccaaaagtttgttatttgaaagaataaatcagatttgatagctagctagatagatttttaaaaagagagagatccaaataaacacaatcagaaatgcaaaggtgacattaccactgaccccayagaaaagcaaaaatagtcagagaccattcaaacacctctgcacacaaactagaacacctacaagagatggataaattcctataaacatacaacctaagattgaaccacgaaaaaagtgaaatcgtgaacagatcaataacagttccaaaattgaatcagttatgaaaaaaaaaagaaaagaaaagaaagaaactaccaaccagaaaaggccctggaccagataaatttacagttaaattctaccagatgtgtaaagaagagctagtaccagccctactgaaaatattcctaaaactgaaggaggggggactcctccccaactcattctatgaggctaccatcat

SEQ ID NO: 240141 - DNA, 445 bp, Homo sapiens
ctcttccaggagctcccacaaaagtcccgagtttcactgtggttggaaggcttaagccaagtgcttactcttgaaccaatcactgtggcttaggctgcttcatgtgatccacacccggagctgagattgatccacaccctggctgagtgtgcygaatgcaagagtggttgacctgcatgtgaaaatctgaggccatcaccagcattgggggaatggatgcagagctctcaatgaatggcaagcatccatgtatcctccttgtcatctaaaccccttcgaaagccacaggtttacataagctgccctctcccctctacaaatacagacaatctctgtaaagtaggcctatttattggcaaataacagaaaagttgcttaaaactaatttcagaaaagaaaaatgattattttgtgttctattaccaaaacgtccaggaacggagcc

SEQ ID NO: 240142 - DNA, 439 bp, Homo sapiens
ttagcattcagctcctctttgctatgcaaatttttgcagccagcttgaatttctccctggaaaatgggttattcagacccatttttcaaacctttacactctgcttccctttttgaatataagttccagtttcaggtcatttctttgctgatgaatataagtatagggtgctagaagcagccaggccacatcttgaatgttttgctgcttagaaatttcttctaccagataccctaaatcattactctcaagtttaaagttccacagatctctagggcaggggcacaatgcctccaccctcttttctaatgcataacaaaagtgrcatttctccacttcccaataagttcctcatttctcctggactttattgttcatatcactatcagcattttggtcacaacaattgaataagtctctaggaagttccaggctccct

SEQ ID NO: 240143 - DNA, 518 bp, Homo sapiens
atgtattatggagtctccgcatagataatcatattttatgcaaataaaaataatttaattattcmtttctctgcctttatttttgtgcattattgcactagctacaaccttcagctaaaatgatgagtagcagtggggatttcagataactttgcattattcaataattcttcattaagtatgatgttagctatagaattttcataaatgatcaatattagttttctatggctgcattaatgtattaacacaaactgagtggcttaaacaacagaaatttgtgatctcacaattgggcttccagaactctgacatgaaggtacgggcagggccatggtccctctggagactccaggaggaaactgttttttgcctcttcccttttctggtggttccagacttgcagctgtatcattccaattcctgtctccatgatgacaatgcctcctcctcttctgtgtgtcgtgtttcttttgtgtgtatcttaagatgatgcttctcattagatttttgggccc

SEQ ID NO: 240144 - DNA, 518 bp, Homo sapiens
atgtattatggagtctccgcatagataatcatattttatgcaaataaaaataatttaattattcctttctctgcctttatttttgtgcattattgcactagctacaaccttcagctaaaatgatgagtagcagtggggatttcagataactttgcattattcaataattcttcattaagtatgatgttagctatagaattttcataaatgatcaatattagttttctatggctgcattaatgtattaacacaaactgagtggcttaaacaacagaaatttgtgatctcacaattgggcttccagaactctgacatgaaggtacgggcagggccatggtccctctggagactccaggaggaaactgttttttgcctcttcccttttctggtggttccagacttgcagctgtatcattccaattcctgtctccatgatgacaatgcctcctcctcttctgtgtgtcgtgtttcttttgtgtgtatcttaagatgatrcttctcattagatttttgggccc

SEQ ID NO: 240145 - DNA, 321 bp, Homo sapiens
gggtcccgacagcaagttggttgaccctgcrgccatgagcagaactctcaaagtcatgtcgcccaagtgagactcgcccatctatcctatctatcctgacccttgcctcctgggtcctaatgcctgtcagacaaacttccttttgcctctcttctccgaggctagtcccgcttctaaaaaccactcgctgtctctgatgcttttctagtttctcctataagaatgatttctagtataaactccaggactctgttaccttctttaggcacccgggctcaccaatcagaaagacataatttttgcccaaagccccatcgtagg

SEQ ID NO: 240146 - DNA, 321 bp, Homo sapiens
gggtcccgacagcaagttggttgaccctgcagccatgagcrgaactctcaaagtcatgtcgcccaagtgagactcgcccatctatcctatctatcctgacccttgcctcctgggtcctaatgcctgtcagacaaacttccttttgcctctcttctccgaggctagtcccgcttctaaaaaccactcgctgtctctgatgcttttctagtttctcctataagaatgatttctagtataaactccaggactctgttaccttctttaggcacccgggctcaccaatcagaaagacataatttttgcccaaagccccatcgtagg

SEQ ID NO: 240147 - DNA, 405 bp, Homo sapiens
tactttcacgtcatgttgatatctatctgggaaacaggagatttggataccagctgtacctctgaggtacaatgggccaaaacccttaatacttatttttttaatgtttgtagattcaaggagtgcatgtgcaggtttgttacatggatatattgtgtagtggaggggtttgggctcctagtgaagacattacctgaataaagaacattgtacccaataggtaattttcaaccctcatttccctcccatcttcccaacttttggtatcccaagtatctatttccctctgtattccccatgtgtacctgttctktatattctactttataattgagaacttgcagtgtttgattttctgtttctgagttattttacttgtgataatggcctccagctccatctgtg

SEQ ID NO: 240148 - DNA, 426 bp, Homo sapiens
tattggacgataaaatacaagttgaggggagttgccatattggtcctacccaaacccagtatagactaatcagtaaccaataaatccagccaagatgagcaggatctcctgattccaggtgattttaaatgcaagagcaagaaacattttttctgcaagccgatagaatttttatgttttttttttttagcaccataacaataaattacttctaattattaggccctttttaaaacttaaaaaatattttttggatttcaacagggcattgtttactaaatgagtaacagagttatattttgttcacrtttttaacagaagcatatttccgaagttttgccaactcattattaatgacaactgaatctttgaaaattataaccatatttataatttaaatatgattactcaggtagaaactctaga

SEQ ID NO: 240149 - DNA, 426 bp, Homo sapiens
tattggacgataaaatacaagttgaggggagttgccatattggtcctacccaaacccagtatagactaatcagtaaccaataaatccagccaagatgagcaggatctcctgattccaggtgattttaaatgcaagagcaagaaacattttttctgcaagccgatagaatttttatgttttttttttttagcaccataacaataaattacttctaattattaggccctttttaaaacttaaaaaatattttttggatttcaacagggcattgtttactaaatgagtaacagagttatattttgttcacatttttaacagaagcatatttcygaagttttgccaactcattattaatgacaactgaatctttgaaaattataaccatatttataatttaaatatgattactcaggtagaaactctaga

SEQ ID NO: 240150 - DNA, 598 bp, Homo sapiens
ttatcattgtgttccctggtagtaaccttccttcttttggaattaatactgctagtgcactagagcataagattacatgaataggaagcaaaattttttatagttggacactagcaaatagtgtgtggtgtcactcccrtttccactccttgattcttggaattgtgaactctgtctatggtagaaacagcaccatgcattggatgccgatttagagcatacgcagcctccaagagaaccttgcctcagtcctgcaaggtgttgccatctagatggcactgtaactgagttttcaaaaggctattccaccattctataggcagctgcttcagaatgataggaaacacagtaagaccagtgaaacccattgctacattcctttttctgtgaagtgaggtccttgatcagaagtaatgctgagtggaataccaaaatggtggatatgacattctgtaagtccacgaatggttgttttgacaaaagcatttcaagcagagaagacaaatctgtacccagagtaagtgtctattctagcaagaacaaaacaatgccccttccaagacgaaagtggtccaatgtaatcaacctgccaccaggt

SEQ ID NO: 240151 - DNA, 598 bp, Homo sapiens
ttatcattgtgttccctggtagtaaccttccttcttttggaattaatactgctagtgcactagagcataagattacatgaataggaagcaaaattttttatagttggacactagcaaatagtgtgtggtgtcactcccatttccactccttgattcttggaattgtgaactctgtctatggtagaaacagcaccatgyattggatgccgatttagagcatacgcagcctccaagagaaccttgcctcagtcctgcaaggtgttgccatctagatggcactgtaactgagttttcaaaaggctattccaccattctataggcagctgcttcagaatgataggaaacacagtaagaccagtgaaacccattgctacattcctttttctgtgaagtgaggtccttgatcagaagtaatgctgagtggaataccaaaatggtggatatgacattctgtaagtccacgaatggttgttttgacaaaagcatttcaagcagagaagacaaatctgtacccagagtaagtgtctattctagcaagaacaaaacaatgccccttccaagacgaaagtggtccaatgtaatcaacctgccaccaggt

SEQ ID NO: 240152 - DNA, 626 bp, Homo sapiens
tttggggatccattaggtcccctcttttctgcttagtgggcccatatacatgaatttacctaagggaaaatgttattgatcacttgacctccataagaacatactctgactagtggaccacagtgatgttttgggtctcttggaattagtgtcagttcagaaccagtgtttagcagtccctgaaagatctgattattttcttttccccaatgaacagttaccttgcaaaaggccatgagtccttttgggaagtctgggaaaaatattaacaatataaatttttgacagtgtaccagaatcctttctcaaagggacccagctgccactttattcaagagattctgggtctgtaaactagctcaagtyttggaattgattgagaggtagtaacactctgtctttatgattctggttaggcttttgttcacttaacctagtaagtttctgcttgtacagatcagataagaatttaataggctttccatctactttacttttggtaacacaataatcaacaagctaacactgcaggtcggtgcaaattattttgattactgctttgactctgctgttcattatggtaactgtgcccatcttgcctttggcagctgagtgttgccacatgg

SEQ ID NO: 240153 - DNA, 517 bp, Homo sapiens
ggtgcatgtcaccatgccaggctaatttttgtgttgttgtttttttttttttttgtaaagatgaggtttcaccatgttgcccaggatggtcttgaamtcatgagctcaagtcatatgctcccttcagccacccaaagtgttgagattacaggcatgagccaccatacctggccctaagtttttgtatattattgaaataaggttggtatacatctgaaatggattgttttaaattagaattttgattttaatacccaccaagaaataactccaaaatattaaacaagtgtaataaaaatatacaagaaatacctatttaacacaaaagaagactgttttggaggaagataggaaataaatggcataactcatatacaaaacaaagaacataatggcagaggtaaattctaccatatcattaattacattaaatataaatgaacttaacacttcgatcacatatggataacattttatatttactaaatagttagctctttttgtactgccacgaaat

SEQ ID NO: 240154 - DNA, 517 bp, Homo sapiens
ggtgcatgtcaccatgccaggctaatttttgtgttgttgtttttttttttttttgtaaagatgaggtttcaccatgttgcccaggatggtcttgaaatcatgagctcaagtcatatgctcccttcagccacccaaagtgttgagattacaggcatgagccaccatacctggccctaagtttttgtatattattgaaataaggttggtatacatctgaaatggattgttttaaattagaattttgattttaatacccaccaagaaataactccaaaatattaaacaagtgtaataaaaatatacaagaaatacctatttaacacaaaagaagactgttttggaggaagataggaaataaatggcataactcatatacaaaacaaagaacataatggcagaggtaaattmtaccatatcattaattacattaaatataaatgaacttaacacttcgatcacatatggataacattttatatttactaaatagttagctctttttgtactgccacgaaat

SEQ ID NO: 240155 - DNA, 495 bp, Homo sapiens
ttatagttctaaatcaacatattcaattaaatatgaggatataatctgatatttaattatattactttctaaaacataaataaaatatgagttttttagagttaatatttaaatataatgaaaataaaatatttatttagttatttagtaatttttagttaaaagatactttgacatcaaatctaactatttttatatgaggtggaaaaaactgaagactcaacaaggtcatgtgctttgtccaaggtgaacaaataaaaattsatttaatatgatctcattaattttgtaaatgaatctttttttaagcaaatgacatataagaaatactggatgaataatgagtttagagaattgttattctctctagaatgtgtttgtgtatgtatgtgtttctgcatatatacatttttaaattgtattcatacatatggatataatttaaaattgaattggatgttcatccaaagctgcatgtatacaatgattatatgg

SEQ ID NO: 240156 - DNA, 259 bp, Homo sapiens
actgaaaccaacttctgggcacgtttgcagtggcagcagcatcatcattgtctgcttcatggtgccagtgaagtggccatggagccaaggtctgaagcacaggcacatggggatgaaccaaggctccagagtctgggtggtggtggcaccagtgcctggggcacaggtcttcctgttgctactttggwaatgatgtccaaggcatagtgcttgtggaacaaccaagaggttgtgttctgaaacatgggcatacccagag

SEQ ID NO: 240157 - DNA, 644 bp, Homo sapiens
attaagcagaccactgtggacttcagtggctatctccatgtggctgatattgataacctccatactttttctttgttcctagacatttccacacatctcatgtctgccagtctttccagccaccatttctgtgcagtgattctgggcttttttgctccgtaatgttgcaaccagttcttaaatggaccctttatttctcccaagattattatcgttcatggataattacatatttgttattttgggggcaatatgtcttgtattatctactccaccatcttgctcgttgtttttttctttttcttttagagatggggtctcgctctgtcatctagactggagtacagtggtgcgatcatagctcactgtaacctcagactccaaggctcaagggatcctgccacgtcaggctcctgagtatctttgactactggtgtgtgctaccatccctgkctaatttattaaactattatagaaacagagtctcatcatgttgcccacactggtcttgaactcctggcctcaagtgactctcctgccttggcctcccaaaatgctgggattataggcatgagctgctgtgcctggccagagtttctaattcttcatatgacacacaatttttcttgctggcatgactacaa

SEQ ID NO: 240158 - DNA, 622 bp, Homo sapiens
cctgtgtagattacatgttcttctcttctccttagatataatccgtatactaacttatctgataaaattatcttcatatatatataattcttgaaaaaaatagtatatttttttctgcttttcaagtttacaggaatggaattatactggatatattaatttctgagctacatccgagttgatgcacaatgctgtgcttcattcaatttcattgctgtaataatccactgcataaacacatcaattatttttcagttctcccagggctggctatataatttgtgaagccctgttcaaaatgacagtatgaaacccctagttccatagtattaaaaaatttaagatggaaacagcagagccttaaaccaagtagaggatgccgaagtatgggcccctgaaagtccacacgggtcacatgctcatgaagttaatgcggattccattgttgatttacatgtgaattattatttttttwaattaccaacacagctgctaaatttctcctggaatacctgttccttggagagtttctctagatgctagagtttgtgtgccaaaaggtaggcccttgaaatttagtagctaatgaaaggttatttatcaaactgcttagtacaagtta

SEQ ID NO: 240159 - DNA, 622 bp, Homo sapiens
cctgtgtagattacatgttcttctcttctccttagatataatccgtatactaacttatctgataaaattatcttcatatatatataattcttgaaaaaaatagtatatttttttctgcttttcaagtttacaggaatggaattatactggatatattaatttctgagctacatccgagttgatgcacaatgctgtgcttcattcaatttcattgctgtaataatccactgcataaacacatcaattatttttcagttctcccagggctggctatataatttgtgaagccctgttcaaaatgacagtatgaaacccctagttccatagtattaaaaaatttaagatggaaacagcagagccttaaaccaagtagaggatgccgaagtatgggcccctgaaagtccacacgggtcacatgctcatgaagttaatgcggattccattgttgatttacatgtgaattattattttttttaattaccaacacagctgctaaatttctcctggaatacctgttccttggagagtttctctagatgcyagagtttgtgtgccaaaaggtaggcccttgaaatttagtagctaatgaaaggttatttatcaaactgcttagtacaagtta

SEQ ID NO: 240160 - DNA, 628 bp, Homo sapiens
taataaaaaatgaaggttttcttgctattatcacttttttcaataataatctatatatgctgcctctatattctgaatcctctattttctgattacacgaccttgcagtctcacttttatttgctaatctattaaaatttagttcttctgagaaataattaagcacctaatactaatgttagctaaatttgaatcttttaaacttggtttctctttgacatctctccattttactttcctttttaaagccacttttccctcatggtagcaggtaacagtgcrtattcctgatttgtttctttcctttcaacatgattccagagagtcacctcaccgatgaaagcactgttctttaaattttgccttgttttccttttttaaaaaaaaaaattggtagttgaattcagtatttccatagctgtaaatatcaaatcttacaaataactctcaatttgatgttgaaaatgtcactttgtaacctagaatttagttttcaggtatttgccaaatccatacttcttaccacacaaaatgtcacacaatttgatgatgactaaaatcacgtttccccatgcgattcctcgtgtagttaatggtacgagtattgtcaaaaatgtactgttaaggt

SEQ ID NO: 240161 - DNA, 628 bp, Homo sapiens
taataaaaaatgaaggttttcttgctattatcacttttttcaataataatctatatatgctgcctctatattctgaatcctctattttctgattacacgaccttgcagtctcacttttatttgctaatctattaaaatttagttcttctgagaaataattaagcacctaatactaatgttagctaaatttgaatcttttaaacttggtttctctttgacatctctccattttactttcctttttaaagccacttttccctcatggtagcaggtaacagtgcgtattcctgatttgtttctttcctttcaacatgattccagagagtcacctcaccgatgaaagcactgttytttaaattttgccttgttttccttttttaaaaaaaaaaattggtagttgaattcagtatttccatagctgtaaatatcaaatcttacaaataactctcaatttgatgttgaaaatgtcactttgtaacctagaatttagttttcaggtatttgccaaatccatacttcttaccacacaaaatgtcacacaatttgatgatgactaaaatcacgtttccccatgcgattcctcgtgtagttaatggtacgagtattgtcaaaaatgtactgttaaggt

SEQ ID NO: 240162 - DNA, 335 bp, Homo sapiens
atcatattcaacattactatcagtaagtaaaaatatttgttaatatttatatyttaaaatatttccttaaaaagtatttattttccattacagctcagagaacaccaattgtaggcaattcatagcatatgtttatagccagtattcagaaagaaaaaagaaaagagcatcaggcattttagaaatttcctgtgttgtttatagaccaatatttaggtgtcgaaaatctcagagaagaactttataaatcaatagagtgtttcaatggaattaaaaagaatagcttggttaataggtcattcctcaactgtgtagtaacaagataaatttaaata

SEQ ID NO: 240163 - DNA, 475 bp, Homo sapiens
aattttttttttttttgagatagggtgacacccagactggagttgcagtggtgtaatctyggttcattgcaacctctgcctccaggttcaagcaattgtcctgtctcagcctcctgagtaactgggattacagatgtgtgccaccacgccctgcaaatttttgtatttttagtagagacagggtttctccatgttggccaggctggtcttgaacttctgacctcaggtgatccacccacctcagcctcccaaagtgctgggattacaggcgtgagccaccacacctggccaagaatttttttaaagacatggatggaaattcatgttgaccagaaacttgtaaagaaagaaaggactttaaataggtaataaataaaactgttgtaaaatattctaattttttccttaattgatctaataaataactgctggcttgcaatattgaacgatttttatttatgaacaagtaaaatta

SEQ ID NO: 240164 - DNA, 644 bp, Homo sapiens
ttcattataatatcacattaacaattagttgtgattattgcctcctctatggtacagtttgtcatgaatccagtactactttacaatttaatattcccttaaaatagccatttttcaaggagtgaacatcagatgcgcaaatgataaaacatagatgtacacaaacatagcaagcaaatcagtgttcgaagttaagggaatctctagggtaaatttaagtgattcaatatgcccatagtacaggttgttaatcagccacrgacaatacttcagacagattcaactctctgtgtattcatttagaaagattgatgtagatttctgtaagcaaagaaaaataattatgaactcataaaatttccccaaaacagttaaaaataactttggcaacaacactctgaaatgattttatatatattttacatttaacaatttttatttaccataaatgcacagtatttaaatattatgaccacgtctttccacaaagtgtttaaaaaatatattagattaaatagttcaataaataaataataatatatacaaaaattatcatctcttgtctttcaaaaactcatctttggtttatgatacagacatgatatatacctcaattaaagaaggaaattaaatttgtcatagca

SEQ ID NO: 240165 - DNA, 594 bp, Homo sapiens
ttttcatagacattacattcttttactgggaatcagacaataagcaaccaaaaaaacagatatatgccagtggaggtaaatgttaagaaaaataagaatgatgagaatgccattttagacagcattatcataaaatatctatttattatatataatttcagtggagacacaaataaaatggaaagtgatccaagaaaatggctgaagaaaatactgaatgcagagggagccacaaatgcaaaggccctgtggtgggctcagcttctcatgtttcaggaatagcaaaagacsacatggtatctgaaggtgagtgagggaagcagattatgtagggcactgtgggctctgggttttagtctgaatgatataggaagcaactggaggatttcgaacaagagtgatgtgctctgtcttatatcttaacagaatctgtcatgtggactttaaactataggaagaaaagtatagatgtgtggtaacaacttacagtgctgtaaaaactaagatggtggtggcaagaactattttgattatgaatttactatcagttgcattgttcttatttttttagaatctataaacttatttttagac

SEQ ID NO: 240166 - DNA, 594 bp, Homo sapiens
ttttcatagacattacattcttttactgggaatcagacaataagcaaccaaaaaaacagatatatgccagtggaggtaaatgttaagaaaaataagaatgatgagaatgccattttagacagcattatcataaaatatctatttattatatataatttcagtggagacacaaataaaatggaaagtgatccaagaaaatggctgaagaaaatactgaatgcagagggagccacaaatgcaaaggccctgtggtgggctcagcttctcatgtttcaggaatagcaaaagaccacatggtatctgaaggtgagtgagggaagcagattatgtagggcactgtgggctctgggttttagtctgaatgatataggaagcaactggaggatttcgaacaaragtgatgtgctctgtcttatatcttaacagaatctgtcatgtggactttaaactataggaagaaaagtatagatgtgtggtaacaacttacagtgctgtaaaaactaagatggtggtggcaagaactattttgattatgaatttactatcagttgcattgttcttatttttttagaatctataaacttatttttagac

SEQ ID NO: 240167 - DNA, 608 bp, Homo sapiens
acatttcaaaagggctataagacagaacttgaaatgttctcaacacatagaaatgacaaatgctcaagatgaaggatacccttaaatcttttacttgatcattatactctgtatacatgtaaygaaacatcacatgtaccatgtgatgtacaaatgttcatgtacaaatattataaacatgtacaaatattataaactgctaaggttaaaactgcaagaaataattatacatggtctgtaagaattctaccataaatataaggattcatatatgttataaaattaaaaaagtataaatagatttaccttgataacactaagcaaaagaaaactgaggatactatataaatttcagacatagcatactgatcaaggataaatcaatattttacataatgaaaaagagtcaattatccatgaagaaatagaattcttaatatacatgcacataaacaaatagtaccaaaatagatgaggcaaaaatgaatggaactgctagtaaaaatggacaaatccattagatttcatcaggaattaagacagaaatcataaatatgctcaatatgtattaataaatattgagcatattaatattgagcatattaatc

SEQ ID NO: 240168 - DNA, 608 bp, Homo sapiens
acatttcaaaagggctataagacagaacttgaaatgttctcaacacatagaaatgacaaatgctcaagatgaaggatacccttaaatcttttacttgatcattatactctgtatacatgtaatgaaacatcacatgtaccatgtgatgtacaaatgttcatgtacaaatattataaacatgtacaaatattataaactgctaaggttaaaactgcaagaaataattatacatggtctgtaagaattctaccataaatataaggattcatatatgttataaaattaaaaaagtataaatagatttaccttgataacactaagcaaaagaaaactgaggatrctatataaatttcagacatagcatactgatcaaggataaatcaatattttacataatgaaaaagagtcaattatccatgaagaaatagaattcttaatatacatgcacataaacaaatagtaccaaaatagatgaggcaaaaatgaatggaactgctagtaaaaatggacaaatccattagatttcatcaggaattaagacagaaatcataaatatgctcaatatgtattaataaatattgagcatattaatattgagcatattaatc

SEQ ID NO: 240169 - DNA, 577 bp, Homo sapiens
ttgggtggagtgttccatagacgtctattaggtcaaactggtcaagctgtcaagytcaattcccaagtatctttttaagtcttccgccttgatgatctgtctaatgttttcaatgaagtattgagatctcccactattattgcatgattgtttaagccttcctgtaggccaagaagagcctgttttatgaatctaggtgctccaatgttggatgcatagatacataggataaattaagccttattgttagattgtaccctttaccattatgtaatacccttcataatctttcttaatatttgtaggtttacagtttgcttcatctaagaacagggacttctgatcttttttgatttccatttccatgttaagcctttctccatccgtttactttgagtctgtggatgctattacatgtgagatggatctcttgaaagcaacagattgttgggtcttgtcttttcatccagctgtccactctatgtcttttaagtagagtatttgagcccatttaaattcaaggttagtattgatacatgtgattttgatgctgtcattgtgttgttatcttattatt

SEQ ID NO: 240170 - DNA, 631 bp, Homo sapiens
tggctctcttaatctttctacagtacagccctactatatagctaaggagcctgaagctcaaagagcttaagctgcatgcctgaggtcacacagcaagtggcaaacccagacatcaaacccagctgagtgtggccctaaaacgagggtcctagccacagagccttatgtccagggcagaasggggttagtgcttccggggcaattccagcaggccacctggcaaagctccccacaggagggacacctgcagaggctctccatccagtgaacatggttcagaagcagacacaagtgggtgggtgatggccagcagacctgggtctccctgcagatgggcaccttggtgccccctgggtcagggctgggtgggtggagacagtgggggcaggggccaggaaaagccaggcctttgtattcctgtctctggtttccagttttattgtggaaaatacactggaccaattccccaaagtttgagattttatggtcctgttcgccaggtcccatctttggcctgaaggagaaccaagccttgttcagaagaagggcctcgaggcctaggtgctctgtgcaaggggtggtattctgtctagctggggaatggctggggcatcctcggaagcctgggcag

SEQ ID NO: 240171 - DNA, 648 bp, Homo sapiens
gctagagggacataaacagagaacagtcgtggggtagaagaacagtgaggtggcccatttcctttcagcttcctatattagaaaaacctaaagaaagactttttcaacctgctagatcctatagttttctacagaaatcactcaatgagcattgatggcctgaaatgaatttyggcttaaatggtacaaatgttcagaagcaggaaagctcagggcaggtttgaggaaattaagcagtccagtttggccaaaatatgtccttatctatgtacagcattggaaaggtcagctagagctagattatgaaaagtcctgaaggccagactatggagcttggggtttatttactctgtaggcaaagatagagtgagggaggtggtcataggtttaaacagaggtgtagcataatcaaaagggtactgtgggtgtttatgccaatagcaatgtgaagacctggctacagagaacaagagatctgacgcaagggtacaaatcacaaagcaatgaccatagttcaggcagatccctccaatttttctcataccttggcaactaacaaaagtgatctagaatagagcaagttcagatacttgttgcaaatatttgaagcctagaacatgtaagtactcaataaataatcaaatatca

SEQ ID NO: 240172 - DNA, 609 bp, Homo sapiens
tgcagtggtgcaatcatggctcactgcagccttgacttcctgggctcaagcaattctcccaaaacaacttcttgaggcagaatttgtccatttatagtgtgtgaaggggcagtataaactttagtgacaaagtacaaagtgtatctttgaagtcatgcttaattctctgtaatcaattatttgaatgccactgatggtgtaatctcaatatcataccaaatacaaagaaaaattcttcctgccctctaggaaacatagtagatagagatggtaatargaggactttggcatctgaattccttctcatgctactaaactgtgagtgttagcctggttttttccggatgccagaaggcgaggggatagatgagaagccatggcttccattatttttatttctgttttgtgagactgtatctgtcttctttgcatagcaatgaagaatcctgtagcattcagattcatggatggctgcaatgcttctcagaaaaatcaaggagtgtggagtgagggcttgctctacataggggtcagcaatatttttctataaaggttcagatagtgattattttggcctttgcaggccatgttgtctctgttgcagttact

SEQ ID NO: 240173 - DNA, 609 bp, Homo sapiens
tgcagtggtgcaatcatggctcactgcagccttgacttcctgggctcaagcaattctcccaaaacaacttcttgaggcagaatttgtccatttatagtgtgtgaaggggcagtataaactttagtgacaaagtacaaagtgtatctttgaagtcatgcttaattctctgtaatcaattatttgaatgccactgatggtgtaatctcaatatcataccaaatacaaagaaaaattcttcctgccctctaggaaacatagtagatagagatggtaataagaggactttggcatctgaattccttctcatgctactaaactgtgagtgttagcctggttttttccggatgccagaaggcgaggggatagatgagaagccatggcttccattatttttatttctgttttgtgagactgtatctgtcttctttgcatagcaatgaagaatcctgtagcattcagattcatggatggctgcaatgcttctcagaaaaatcaaggagtgtggagtgagggcttgctctacataggggtcagcaatatttttmtataaaggttcagatagtgattattttggcctttgcaggccatgttgtctctgttgcagttact

SEQ ID NO: 240174 - DNA, 610 bp, Homo sapiens
tgcagcagaacctgcgggaagggagactggcatcccagccgcaaggtggggcactgcattttcccaaaaatgatgaagccagcctgggcccttgagaaattctaagaakcagatcattgatgtccagctgcactggacttctaagtagagtgagaatgagtgtgggtcgtgtgtcatgtcactgagatttggcgttgtcaccacagcatgaccaactcatcccgcctagtggttcttccaaactttcacttttctgctaaccctctgccctagcccaatcccattcactctcacactttgcctcctcattgctgagcagatagaggccatcaggagaaaaagccctcaacttcgttttcaagcacatgggaacatttctgcttctaagcccacctttgccccatggaattggcatctccccacccccaggtccctgcttcctgtgccttccagctcccacccccttctcatcccaccccgcatgctcaggggcatggctccacgtaatcctcctctctcctgtatttcaacctctctctgtctctgctggctcactcctctcagcatctaaacctcagtttctcccatcttaaaaaaaaaaaaagacatc

SEQ ID NO: 240175 - DNA, 608 bp, Homo sapiens
agacgtcacaaacaacaagcattttggttaaccccaagggaaggagaaacaaacctccttaggaatatgattgctaaatatttgatgctcaaagtgaaatttgaacaagttccagtgtagagacagaggccttactagagaggtagaaccagataattgtggaatatgcttaggagaatcactagaacttggagatccaagatgaagaagaattcagccaagactggaacagagaacatttccttagccattccaygctgagtttttctcattctttagtgagaagaatttggtggtttatgccaaaatgcctttctataccatgtgtggtttgttgcataaaattagaagttaacaggaaatgaactggattggtcttattttatagcatgggttcaaaccctctcgatacctccttttgttatcttcataaagtcctgggttaaggacagcctccagctattattgtagcaagatacctgtgcagggtggaccccttcatgattgcagttcaaatcctggtgcccggagtttccaggtaagcagcaactctcacacaatgttgtctgggtgtgcggcatgtgtaacaatagtgcaccacacccaga

SEQ ID NO: 240176 - DNA, 608 bp, Homo sapiens
agacgtcacaaacaacaagcattttggttaaccccaagggaaggagaaacaaacctccttaggaatatgattgctaaatatttgatgctcaaagtgaaatttgaacaagttccagtgtagagacagaggccttactagagaggtagaaccagataattgtggaatatgcttaggagaatcactagaacttggagatccaagatgaagaagaattcagccaagactggaacagagaacatttccttagccattccacgctgagtttttctcattctttagtgagaagaatttggtggtttatgccaaaatgyctttctataccatgtgtggtttgttgcataaaattagaagttaacaggaaatgaactggattggtcttattttatagcatgggttcaaaccctctcgatacctccttttgttatcttcataaagtcctgggttaaggacagcctccagctattattgtagcaagatacctgtgcagggtggaccccttcatgattgcagttcaaatcctggtgcccggagtttccaggtaagcagcaactctcacacaatgttgtctgggtgtgcggcatgtgtaacaatagtgcaccacacccaga

SEQ ID NO: 240177 - DNA, 491 bp, Homo sapiens
  misc_feature (1)...(491): n = A,T,C or G
cttgcattgtgatgagtgcctataagttaaatgagccacttatcagtakatttgatagcaggataatagttatatcactgatacctaggcagtacatgacactcggtaaagaatagattaatcctcgtgctcttcatcttcctcctaatctctttacctgtgctgccctccagctttcaaagtgctctgagtcatcacttacacagtgttccttagctgccccttcagtgagccagtgtttctgtgccccagtgttcctgagagttagaacacagaaaacagagcaggctcttgcccacatcacagaacatctttgtctccctgtggatcccgcacatttgttcattagagctcangaattgccagagactggcttttgtggcaatggacactagattcttcagaagaatattggttgaaatcttcctgctgtgacaattccctgcatgcagggcaggagtgtgtgcttcttcccagcaaaggcagaggca

SEQ ID NO: 240178 - DNA, 491 bp, Homo sapiens
  misc_feature (1)...(491): n = A,T,C or G
cttgcattgtgatgagtgcctataagttaaatgagccacttatcagtagatttgatagcaggataatagttatatcactgatacctaggcagtacatgacactcggtaaagaatagattaatcctcgtgctcttcatcttcctcctaatctctttacctgtgctgccctccagctttcaaagtgctctgagtcatcacttacacagtgttccttagctgccccttcagtgagccagtgtttctgtgccccagtgttcctgagagttagaacacagaaaacagagcaggctcttgcccacatcacagaacatctttgtctccctgtggatcccgcacatttgttcattagagctcangaattgccagagactggcttttstggcaatggacactagattcttcagaagaatattggttgaaatcttcctgctgtgacaattccctgcatgcagggcaggagtgtgtgcttcttcccagcaaaggcagaggca

SEQ ID NO: 240179 - DNA, 597 bp, Homo sapiens
tgaaaaagtaaacaaataggatcacatcaagctaaaaatcttctgcccagccacaggaaataagaaagtgagtgttttttacaacttacagaatgggataaagtataaactcatctggcaggaaatcaatatcaagaatatacaaggaattgaaacatatcaacagcaaagaagcacaacaatctaattaaatataaacaaatgctctgaacagacatttctcaaaagaagacatacaaatgaccaacaaatatatgaaaaaatgttcaacaccactaatcagcaaggaaatgctaatcaaagccacagtgaggcatcatcttacttcagttaagatggctattatagaagagacaaaaataacaaatgctgacaaagacgtgaagaaaaggacttttttttttttgacagaatctcactctcygtccaggctggagtgcagtggtggtgtaatctggctccctctgcttctagggttcaaatagttctcctccctcagcctcctgagcagctggagaaaaaggaactcttatgcactgttggtaggaatgtaaattagagcagccagtatggagaacagtattgaaacacctcaag

SEQ ID NO: 240180 - DNA, 597 bp, Homo sapiens
tgaaaaagtaaacaaataggatcacatcaagctaaaaatcttctgcccagccacaggaaataagaaagtgagtgttttttacaacttacagaatgggataaagtataaactcatctggcaggaaatcaatatcaagaatatacaaggaattgaaacatatcaacagcaaagaagcacaacaatctaattaaatataaacaaatgctctgaacagacatttctcaaaagaagacatacaaatgaccaacaaatatatgaaaaaatgttcaacaccactaatcagcaaggaaatgctaatcaaagccacagtgaggcatcatcttacttcagttaagatggctattatagaagagacaaaaataacaaatgctgacaaagacgtgaagaaaaggacttttttttttttgacagaatctcactctccgtccaggctggagtgcagtggtggtgtaatctggctccctctgcttctagggttcaaatagttctcctccctcagcctcctgagcagctgragaaaaaggaactcttatgcactgttggtaggaatgtaaattagagcagccagtatggagaacagtattgaaacacctcaag

SEQ ID NO: 240181 - DNA, 452 bp, Homo sapiens
ttcttgtctttgtaaatccaaacttttattaaattttaacacagtctgtctgcgtggcttacagctataatcccagcactttgggaggctgaggtgggagaatcactaggtcaagaagwtgagaccttcctggacaatatggtgaaaccccatctctactaaaaatacaaaaattagctgggcatggtggcatgcacctgttgacctagccattcaggaggctgaggcaggagaatcacttgaacccaggaggcaggggttgcagtgagctgagattgcacaactgcattccagcctgatgacagagcgagacttcatctcaaaaaaaaaaaaaattaacacaatgtgtggaaaatataaaattagttagaagatatgtcttagaaattaaacttttagaagagttaatggtaagtggagaatgttaaatttaattttttattacatactta

SEQ ID NO: 240182 - DNA, 452 bp, Homo sapiens
ttcttgtctttgtaaatccaaacttttattaaattttaacacagtctgtctgcgtggcttacagctataatcccagcactttgggaggctgaggtgggagaatcactaggtcaagaagatgagaccttcctggmcaatatggtgaaaccccatctctactaaaaatacaaaaattagctgggcatggtggcatgcacctgttgacctagccattcaggaggctgaggcaggagaatcacttgaacccaggaggcaggggttgcagtgagctgagattgcacaactgcattccagcctgatgacagagcgagacttcatctcaaaaaaaaaaaaaattaacacaatgtgtggaaaatataaaattagttagaagatatgtcttagaaattaaacttttagaagagttaatggtaagtggagaatgttaaatttaattttttattacatactta

SEQ ID NO: 240183 - DNA, 452 bp, Homo sapiens
ttcttgtctttgtaaatccaaacttttattaaattttaacacagtctgtctgcgtggcttacagctataatcccagcactttgggaggctgaggtgggagaatcactaggtcaagaagatgagaccttcctggacmatatggtgaaaccccatctctactaaaaatacaaaaattagctgggcatggtggcatgcacctgttgacctagccattcaggaggctgaggcaggagaatcacttgaacccaggaggcaggggttgcagtgagctgagattgcacaactgcattccagcctgatgacagagcgagacttcatctcaaaaaaaaaaaaaattaacacaatgtgtggaaaatataaaattagttagaagatatgtcttagaaattaaacttttagaagagttaatggtaagtggagaatgttaaatttaattttttattacatactta

SEQ ID NO: 240184 - DNA, 452 bp, Homo sapiens
ttcttgtctttgtaaatccaaacttttattaaattttaacacagtctgtctgcgtggcttacagctataatcccagcactttgggaggctgaggtgggagaatcactaggtcaagaagatgagaccttcctggacaatatggtgaaaccccatctctactaaaaatacaaaaattagctgggcatggtggcatgcacctgttgacctagccattcaggaggctgaggcaggagaatcacttgaacccaggaggcagrggttgcagtgagctgagattgcacaactgcattccagcctgatgacagagcgagacttcatctcaaaaaaaaaaaaaattaacacaatgtgtggaaaatataaaattagttagaagatatgtcttagaaattaaacttttagaagagttaatggtaagtggagaatgttaaatttaattttttattacatactta

SEQ ID NO: 240185 - DNA, 642 bp, Homo sapiens
ttagaggttcagtctttagaggtttcactggtcaactccttggtcattttatctggaaaagttttaaagatcatggcatcttttgagttaaaaaatgtcttcagtgatctgggatgcaaactaatttactctcttcagagtggtttaatcatgtgaaacacagcaagagctgccctttttgtgtcttccctatcattaccaccagcaccagaaactccagttgtctcaagctcaaaataaaagccctaaggtacattgacttctcccatgctctgtgctgggtcccaaacatggtggtaaatattagagttcatacggtcatgactgactaggtgacaaaacagcacagaaactgtatctttcatactattcagacaggtttatgacaaaaacacaggtcagaatttgaaacattgtcatttttaatagtttttataaatatatttttaaattcactgatgaaatatgtatttattttgtgaaatagtaatttgaagtaaatatactttgtcaatgcctaattttaggtaattgtcaaatactttgcctcacatagttattatttttgtggtgagaagacatttactgtcttarcattttttcagaaatacaatacatgcattataatctcttcaacttatt

SEQ ID NO: 240186 - DNA, 327 bp, Homo sapiens
acattgacacaaacagtgtgaaaactaccctctttcttttttttcaagtttaccaacaacttttttaaacattttaacaggagtgagtttatatcttagagttgttttggtttgcctttccttgatgataattgactttgagccatattcatctrtctgccaagctatatgtatgtctttctttgaaaattatttatatatatcttttgcttatttttcatggttatttgttttttgttgtatagtcctttgagtttcttatatatttttgatattaactgcttttcacatgtgtaatttgcaaatattttcttccatttttcagtt

SEQ ID NO: 240187 - DNA, 327 bp, Homo sapiens
acattgacacaaacagtgtgaaaactaccctctttcttttttttcaagtttaccaacaacttttttaaacattttaacaggagtgagtttatatcttagagttgttttggtttgcctttccttgatgataattgactttgagccatattcatctatctgccaagctatatgtatgtctttctttgaaaattatttatatakatcttttgcttatttttcatggttatttgttttttgttgtatagtcctttgagtttcttatatatttttgatattaactgcttttcacatgtgtaatttgcaaatattttcttccatttttcagtt

SEQ ID NO: 240188 - DNA, 448 bp, Homo sapiens
tcaaagagttacctgcacccccatgtttattacagcactattcacaatagccaagatatggaatcaacaaaagtgtccatcaacagatgaatggataaagaaatgtgacatacatatataatggaatattatttagtcataataaagaacaaaatcctgttrtttgtggcaacaagaatgcaagtggagggcattatgttaggtgaaataagcctggcatagaaatataaacaccacataactacgtgttctcacttatgtatggaagctaaaatttttaatctcgtagaagtagatagtagagttttggttaccatatcctggaaagagtaggagaaagaagagtataagaaaaatgtgcttaatacatacaaaattacagctggagagaaggaagaagttctagttctctacagcactgttgggtgactgtagttaatgggaattt

SEQ ID NO: 240189 - DNA, 448 bp, Homo sapiens
tcaaagagttacctgcacccccatgtttattacagcactattcacaatagccaagatatggaatcaacaaaagtgtccatcaacagatgaatggataaagaaatgtgacatacatatataatggaatattatttagtcataataaagaacaaaatcctgttgtttgtggcaacaagaatgcaagtggagggcattatgttaggtgaaataagcctggcatagaaayataaacaccacataactacgtgttctcacttatgtatggaagctaaaatttttaatctcgtagaagtagatagtagagttttggttaccatatcctggaaagagtaggagaaagaagagtataagaaaaatgtgcttaatacatacaaaattacagctggagagaaggaagaagttctagttctctacagcactgttgggtgactgtagttaatgggaattt

SEQ ID NO: 240190 - DNA, 448 bp, Homo sapiens
tcaaagagttacctgcacccccatgtttattacagcactattcacaatagccaagatatggaatcaacaaaagtgtccatcaacagatgaatggataaagaaatgtgacatacatatataatggaatattatttagtcataataaagaacaaaatcctgttgtttgtggcaacaagaatgcaagtggagggcattatgttaggtgaaataagcctggcatagaaatataaacaccacataactacgtgttctcacttatgtatggaagctaaaatttttaatctcgtagaagtagatagtagagttttggttaccatatcctggaaagagtaggagaaagaagagtataagaaaaatgtgsttaatacatacaaaattacagctggagagaaggaagaagttctagttctctacagcactgttgggtgactgtagttaatgggaattt

SEQ ID NO: 240191 - DNA, 678 bp, Homo sapiens
aggtaatggatatgataatgactctgacttgatctttacgcattgcataaatatatcaaaatatcactctgtaccccataacatgtacatttattgtatgtcaattaaagtaaatttaaaagagaaaaaatgaggtaaaggtaaatgtacagaatttaattactttttcttctataaaacccgagtcagtaccaagaagagtcaatttattagttttctaaaataaaaaaaatcaaaatcaccaaaaaagagcaatatccaagaaaacattgaaaaggaaacacaacatttagtaagaatagaaaacttgggcactgtatcaccctgttcctagataccgatttactgatggccatttaaatagaattttattctatctaattcatttatactcccagagtttgaaattacattttacctacaataaatgagataacacttgtaaattatatggtactctgcctaacacacgttaataactcaatagatgttagcaataaacttttactatagtagtcaaagtattaatttctcacattgcaatttccttcaaagacataaatacaacctttctaatgactccttgttcatcaagatacctcttcaaattattctatttgtttcattcagtrtattatctgtgtataccgatattacactcttttctttttttgagat

SEQ ID NO: 240192 - DNA, 558 bp, Homo sapiens
agcatcaacgggtagctaccttgcttagaagcaaacaaaattaaccatgcttcaatagaaatcaggatatagatgtattaatacagaatgacaaatataactgtgacagaaataggaatgcctgtttatggtcatatacggccaatactttcattacagccaaactcatatatgcagmcaaataagaggcccctggatacacagggaatcagaataaaaaaagaagaactgaacatttaatagtcttctttcattcaatcaataattttttttaattaagcaactactatgtctgggtaaccttctaggtcctggggatacagaggtctctgcttacagaagtcatatgtaagtagcaggtgaagagtatgtgtttcacagaagtttattacaatatattaacaagagcaaaaaattttggaagcaatctaaatgttcattaataaagctccaattaaataacaataaatccaaataatgaaaaataatgcagccctttaagaataagcacttgcaagccgtaattcatgacatgggaaaattatcataatggaaaaa

SEQ ID NO: 240193 - DNA, 558 bp, Homo sapiens
agcatcaacgggtagctaccttgcttagaagcaaacaaaattaaccatgcttcaatagaaatcaggatatagatgtattaatacagaatgacaaatataactgtgacagaaataggaatgcctgtttatggtcatatacggccaatactttcattacagccaaactcatatatgcagccaaataagaggcccctggatacacagggaatcagaataaaaaaagaagaactgaacatttaatagtcttctttcattcaatcaataattttttttarttaagcaactactatgtctgggtaaccttctaggtcctggggatacagaggtctctgcttacagaagtcatatgtaagtagcaggtgaagagtatgtgtttcacagaagtttattacaatatattaacaagagcaaaaaattttggaagcaatctaaatgttcattaataaagctccaattaaataacaataaatccaaataatgaaaaataatgcagccctttaagaataagcacttgcaagccgtaattcatgacatgggaaaattatcataatggaaaaa

SEQ ID NO: 240194 - DNA, 558 bp, Homo sapiens
agcatcaacgggtagctaccttgcttagaagcaaacaaaattaaccatgcttcaatagaaatcaggatatagatgtattaatacagaatgacaaatataactgtgacagaaataggaatgcctgtttatggtcatatacggccaatactttcattacagccaaactcatatatgcagccaaataagaggcccctggatacacagggaatcagaataaaaaaagaagaactgaacatttaatagtcttctttcattcaatcaataattttttttaattaagcaactactatgtcygggtaaccttctaggtcctggggatacagaggtctctgcttacagaagtcatatgtaagtagcaggtgaagagtatgtgtttcacagaagtttattacaatatattaacaagagcaaaaaattttggaagcaatctaaatgttcattaataaagctccaattaaataacaataaatccaaataatgaaaaataatgcagccctttaagaataagcacttgcaagccgtaattcatgacatgggaaaattatcataatggaaaaa

SEQ ID NO: 240195 - DNA, 558 bp, Homo sapiens
agcatcaacgggtagctaccttgcttagaagcaaacaaaattaaccatgcttcaatagaaatcaggatatagatgtattaatacagaatgacaaatataactgtgacagaaataggaatgcctgtttatggtcatatacggccaatactttcattacagccaaactcatatatgcagccaaataagaggcccctggatacacagggaatcagaataaaaaaagaagaactgaacatttaatagtcttctttcattcaatcaataattttttttaattaagcaactactatgtctrggtaaccttctaggtcctggggatacagaggtctctgcttacagaagtcatatgtaagtagcaggtgaagagtatgtgtttcacagaagtttattacaatatattaacaagagcaaaaaattttggaagcaatctaaatgttcattaataaagctccaattaaataacaataaatccaaataatgaaaaataatgcagccctttaagaataagcacttgcaagccgtaattcatgacatgggaaaattatcataatggaaaaa

SEQ ID NO: 240196 - DNA, 579 bp, Homo sapiens
ggtgatctgctcacctcggcctcccaaatgctgggattacaggcgtgagccaccaygttaaaaagggaaacttcctatttgccctctttttttttgcagaaaatgaatggtctgagagataaattaatagaagaaagaggcaaaaaaaaattctgtaaaatgtaggggaaaaatcacagggtctcactcagttgcccagcatgaagtgcagtggtgtgatcatggctccttgcaaccttgaattctcaagcacaagtgattctcccctctaagcctatggagtagctgggatcacaggggcatgccaccatgcccacatacataggtatttgctggagaggagatggagactctctgtcctggatgtgagacaggtgtctggcatctgggtaaggatgacattccctcattgctaaagagtgaaagagaaaagtgtcatggatagtgcaagcagggacatgccctgacctagtgaggtccagaggcttatattgtgcttcataggggagtgggaagaagcgagtgtaggcaacccaggggaaataaatgacttaaaataaaagaaatagatcatcagaa

SEQ ID NO: 240197 - DNA, 579 bp, Homo sapiens
ggtgatctgctcacctcggcctcccaaatgctgggattacaggcgtgagccaccacgttaaaaagggaaacttcctatttgccctctttttttttgcagaaaatgaatggtctgagagataaattaatagaagaaagaggcaaaaaaaaattctgtaaaatgtaggggaaaaatcacagggtctcactcagttrcccagcatgaagtgcagtggtgtgatcatggctccttgcaaccttgaattctcaagcacaagtgattctcccctctaagcctatggagtagctgggatcacaggggcatgccaccatgcccacatacataggtatttgctggagaggagatggagactctctgtcctggatgtgagacaggtgtctggcatctgggtaaggatgacattccctcattgctaaagagtgaaagagaaaagtgtcatggatagtgcaagcagggacatgccctgacctagtgaggtccagaggcttatattgtgcttcataggggagtgggaagaagcgagtgtaggcaacccaggggaaataaatgacttaaaataaaagaaatagatcatcagaa

SEQ ID NO: 240198 - DNA, 579 bp, Homo sapiens
ggtgatctgctcacctcggcctcccaaatgctgggattacaggcgtgagccaccacgttaaaaagggaaacttcctatttgccctctttttttttgcagaaaatgaatggtctgagagataaattaatagaagaaagaggcaaaaaaaaattctgtaaaatgtaggggaaaaatcacagggtctcactcagttgcccagcatgaagtgcagtggtgtgatcatggctcmttgcaaccttgaattctcaagcacaagtgattctcccctctaagcctatggagtagctgggatcacaggggcatgccaccatgcccacatacataggtatttgctggagaggagatggagactctctgtcctggatgtgagacaggtgtctggcatctgggtaaggatgacattccctcattgctaaagagtgaaagagaaaagtgtcatggatagtgcaagcagggacatgccctgacctagtgaggtccagaggcttatattgtgcttcataggggagtgggaagaagcgagtgtaggcaacccaggggaaataaatgacttaaaataaaagaaatagatcatcagaa

SEQ ID NO: 240199 - DNA, 579 bp, Homo sapiens
ggtgatctgctcacctcggcctcccaaatgctgggattacaggcgtgagccaccacgttaaaaagggaaacttcctatttgccctctttttttttgcagaaaatgaatggtctgagagataaattaatagaagaaagaggcaaaaaaaaattctgtaaaatgtaggggaaaaatcacagggtctcactcagttgcccagcatgaagtgcagtggtgtgatcatggctccttgcaaccttgaattctcaagcacaagtgattctcccctctaagcctatggagtagctgggatcacaggggcatgccaccatgcccacatacatrggtatttgctggagaggagatggagactctctgtcctggatgtgagacaggtgtctggcatctgggtaaggatgacattccctcattgctaaagagtgaaagagaaaagtgtcatggatagtgcaagcagggacatgccctgacctagtgaggtccagaggcttatattgtgcttcataggggagtgggaagaagcgagtgtaggcaacccaggggaaataaatgacttaaaataaaagaaatagatcatcagaa

SEQ ID NO: 240200 - DNA, 478 bp, Homo sapiens
gaattaaaggactatatacatatatatatgaaggggagtgagatggttaataatgagtgtcaacttgataggattgagggatatgaagtattgatccagggtgtgtctgtgagagtgttgccaaaagagattaacatttgaktcagtgggctggggaaggcagacccacctttaatctggtgggcacaatctaatctgctgccagcaaatataaagcaggcagaaaaatttgaaaaggagagactggcctagcttcccagcctacatctttctcccatgctggtttcttcatgccctcaaacattggaatacaaagatctcctttctcatcagtttgcagacagcccattgtgtaacttatgatcctgtaagttaataaactcccctttataaataaatatatatatgtgtgtgtgtgtgtgcatatatatgtatgtgtgtgcgtatgtatatatatatgtatatatcctgttagttc

SEQ ID NO: 240201 - DNA, 478 bp, Homo sapiens
gaattaaaggactatatacatatatatatgaaggggagtgagatggttaataatgagtgtcaacttgataggattgagggatatgaagtattgatccagggtgtgtctgtgagagtgttgccaaaagagattaacatttgagtcagtgggctggggaaggcagacccacctttaatctggtgggcacaatctaatctgctgccagcaaatataaagcaggcagaaaaatttgaaaaggagagactggcctagcttcccagcctacatctttctcccatgctggtttcttcatgccctcaaacattggaatacaaagatctcctttctcatcagtttgcagacagcccaytgtgtaacttatgatcctgtaagttaataaactcccctttataaataaatatatatatgtgtgtgtgtgtgtgcatatatatgtatgtgtgtgcgtatgtatatatatatgtatatatcctgttagttc

SEQ ID NO: 240202 - DNA, 536 bp, Homo sapiens
tatcgtcattgttgagttccattatatgactgtgtcaccatttttccattgatgagtaaaatgatttcctatttttggctgttatcccacagccctgaacagtaagtctgcatttgtgatttgcaggtatgcatgggcacacccacttctgctggaggatccctgggtggggtggagactccagggcacctgtgctctgcttcagtgtggaggcttctgtgttgtgttctgggagcacagtggcttggcctccgccaccagcagcagcttgaagagttcctgctgttccacatgsttgccaacaattggcctcttcagttttttttttttttttttaagttttcagtgcctgcctggacttgtgttttcatttagattttggtttcttagaactttcgttattctcttcacagcttaacaatgcatttgaaaagatttgttttcatgtggagtattcagttttgtaataggagggttgttcaaggcatcagtctgccactctgctagaaacagaattctcccacgcatttcttttt

SEQ ID NO: 240203 - DNA, 546 bp, Homo sapiens
ggctgccccaatgctccttctggtgcctctatctgctgagggaagttctcaaactcagtcaggtttggaaagtcatcgggagattttcctagagaaggccagggaggttccacagaacgataagcatctttcgccctcatccccagcagaaaagacgtgacaatgcctgtcctgactgaataaagaagagagataagtccagctgaggagtctgtgttatgggataatyggaatttgtacagcaaaagagaagctattctcagtatttcaaggagaaattattcaagttgaataaattagagtctaaaccacagtctttccgaagcctatggagtgttattcatgaagcaggtactagacacaggggattctcaggtgctacttcagaagccaggatgcacctgcccctggtggtatgtgctgaacaccgtgtgatgatcctcagtcctgtctgggaagcccagggctgggggtgctgatgctatcagctgcctgcagcacatctccaggtgattctccagtccacacctaactgcatgtgtttta

SEQ ID NO: 240204 - DNA, 482 bp, Homo sapiens
gacagttcttggcatgaaaggtttaaagagctatgcaaaacaaattcatttgacactaatgaatcatcgctcatgagaggcaaggagtttagtgactctgtacctaatacccttgacaaacaccttgcaaaayagatttgtgaggacagcacctgcatctttgaagagccctgtaaaggctcttctctgtatgtcagatctaatggtgagaactgcagtcactcagttacaaaagttaaatacaatttggaataattggatcatgaagtggcaggggccaagtggtagcactcaaccctcaaaggcacggtgggcgtagctaccgtaatgggcagaaaagacaaagcagcaatctgaacagtctgactcatgtagagctctggcattggctaactaatcacagtgttcctggaagtgaaactgacaggaagaataatgcattcctacttaatttatgttatgaggaaacttaaggtcaaaca

SEQ ID NO: 240205 - DNA, 482 bp, Homo sapiens
gacagttcttggcatgaaaggtttaaagagctatgcaaaacaaattcatttgacactaatgaatcatcgctcatgagaggcaaggagtttagtgactctgtacctaatacccttgacaaacaccttgcaaaatagatttgtgaggacagcacctgcatctttgaagagccctgtaaaggctcttctctgtatgtcagatctaatggtgagaactgcagtcactcagttacaaaagttaaatacaatttggaataattggatcatgaagtggcaggggccaagtggtagcactcaaccctcaaaggcacggtgggcrtagctaccgtaatgggcagaaaagacaaagcagcaatctgaacagtctgactcatgtagagctctggcattggctaactaatcacagtgttcctggaagtgaaactgacaggaagaataatgcattcctacttaatttatgttatgaggaaacttaaggtcaaaca

SEQ ID NO: 240206 - DNA, 593 bp, Homo sapiens
taatgggcagaaaagacaaagcagcaatctgaacagtctgactcatgtagagctctggcattggctaactaatcacagtgttcctggaagtgaaactgacaggaagaataatgcattcctacttaatttatgttatgaggaaacttaaggtcaaacagataaaagactaactggaatcataaaaacagagattcatggcccctcaatcaatttccagccttgagccagtttacagacccagaaccccttgaatgaaggggaggctgggtccccctgaggtgtccatggcagataggaatgctgctttgaggctttggcaagcctccataggtgaatcatggtgcaggcctctagtattttgcagcaaggmccggtcatcttctccagttaactactctccttttcacagacagctcttgtcctacactgggcttttgtggaaactgaacatttgactatgagtcaacaagtcaccatgcgacctgaactgcctatcgtgaactgggtgctttctcactcatgtagccataaagtgggtcatgcacagcagcattccatcatcaaatgcaaatggtgtataagtgattgggctc

SEQ ID NO: 240207 - DNA, 593 bp, Homo sapiens
taatgggcagaaaagacaaagcagcaatctgaacagtctgactcatgtagagctctggcattggctaactaatcacagtgttcctggaagtgaaactgacaggaagaataatgcattcctacttaatttatgttatgaggaaacttaaggtcaaacagataaaagactaactggaatcataaaaacagagattcatggcccctcaatcaatttccagccttgagccagtttacagacccagaaccccttgaatgaaggggaggctgggtccccctgaggtgtccatggcagataggaatgctgctttgaggctttggcaagcctccataggtgaatcatggtgcaggcctctagtattttgcagcaaggacyggtcatcttctccagttaactactctccttttcacagacagctcttgtcctacactgggcttttgtggaaactgaacatttgactatgagtcaacaagtcaccatgcgacctgaactgcctatcgtgaactgggtgctttctcactcatgtagccataaagtgggtcatgcacagcagcattccatcatcaaatgcaaatggtgtataagtgattgggctc

SEQ ID NO: 240208 - DNA, 593 bp, Homo sapiens
taatgggcagaaaagacaaagcagcaatctgaacagtctgactcatgtagagctctggcattggctaactaatcacagtgttcctggaagtgaaactgacaggaagaataatgcattcctacttaatttatgttatgaggaaacttaaggtcaaacagataaaagactaactggaatcataaaaacagagattcatggcccctcaatcaatttccagccttgagccagtttacagacccagaaccccttgaatgaaggggaggctgggtccccctgaggtgtccatggcagataggaatgctgctttgaggctttggcaagcctccataggtgaatcatggtgcaggcctctagtattttgcagcaaggaccggtcatcttctccagttaactactctccttttcacagacagctcttgtcctacactgggcttttgtggaaactgaacatttgactatgagtcaacaagtcaccatgcgacctgaactgyctatcgtgaactgggtgctttctcactcatgtagccataaagtgggtcatgcacagcagcattccatcatcaaatgcaaatggtgtataagtgattgggctc

SEQ ID NO: 240209 - DNA, 558 bp, Homo sapiens
cacttaaaagctttgccgcattcttcacatttgtacagtttctcttcagtatgaactatcatatgcttagtaaggcttgaggaatagtaaaagcctttgccacattcttcacatttgtaggattcctctccactatgagttatcttatgttcattcagttttgaggatagtttaaagactttgccacattcttcatatctgtarggtttctctccaatatgaattatcttatgtacattaaggtctaaagacttcttaaaagctttgccacattcttgacatttgtagtgtttctcttcagcatgaactatgttattttgaataaggtttgaggaacagtaaaatgctttgccacatttttcacaatggtatggtttctctccagtatgaattttcttatatatagtaagatttgaagacccttaaaagctttgattcattcttgacatttgtagtgcttctctccagtatgaactatcatgtttagtaaagcttaaggaccagtaaaaggctttaccacattcttcacagttgtagggtttctcttcagtatgaatt

SEQ ID NO: 240210 - DNA, 558 bp, Homo sapiens
cacttaaaagctttgccgcattcttcacatttgtacagtttctcttcagtatgaactatcatatgcttagtaaggcttgaggaatagtaaaagcctttgccacattcttcacatttgtaggattcctctccactatgagttatcttatgttcattcagttttgaggatagtttaaagactttgccacattcttcatatctgtaaggtttctctccaatatgaattatcttatgtacattaaggtctaaagacttcttaaaagctttgccacattcttgacatttgtagtgtttctcttcagcatgaactatgttattttgaataagstttgaggaacagtaaaatgctttgccacatttttcacaatggtatggtttctctccagtatgaattttcttatatatagtaagatttgaagacccttaaaagctttgattcattcttgacatttgtagtgcttctctccagtatgaactatcatgtttagtaaagcttaaggaccagtaaaaggctttaccacattcttcacagttgtagggtttctcttcagtatgaatt

SEQ ID NO: 240211 - DNA, 558 bp, Homo sapiens
cacttaaaagctttgccgcattcttcacatttgtacagtttctcttcagtatgaactatcatatgcttagtaaggcttgaggaatagtaaaagcctttgccacattcttcacatttgtaggattcctctccactatgagttatcttatgttcattcagttttgaggatagtttaaagactttgccacattcttcatatctgtaaggtttctctccaatatgaattatcttatgtacattaaggtctaaagacttcttaaaagctttgccacattcttgacatttgtagtgtttctcttcagcatgaactatgttattttgaataaggtttgaggaacagtaaaatgctttgccacatttttcacaatkgtatggtttctctccagtatgaattttcttatatatagtaagatttgaagacccttaaaagctttgattcattcttgacatttgtagtgcttctctccagtatgaactatcatgtttagtaaagcttaaggaccagtaaaaggctttaccacattcttcacagttgtagggtttctcttcagtatgaatt

SEQ ID NO: 240212 - DNA, 558 bp, Homo sapiens
cacttaaaagctttgccgcattcttcacatttgtacagtttctcttcagtatgaactatcatatgcttagtaaggcttgaggaatagtaaaagcctttgccacattcttcacatttgtaggattcctctccactatgagttatcttatgttcattcagttttgaggatagtttaaagactttgccacattcttcatatctgtaaggtttctctccaatatgaattatcttatgtacattaaggtctaaagacttcttaaaagctttgccacattcttgacatttgtagtgtttctcttcagcatgaactatgttattttgaataaggtttgaggaacagtaaaatgctttgccacatttttcacaatggtatggtttctctccagtatgaattttcttatatatagtaagatttgaagacccttaaaagctttgattcattcttgacatttgtagtgcttctctccagtatgaactatcatgtttagtaaagcttaaggaccagtaaaaggctttaccacattcttcacakttgtagggtttctcttcagtatgaatt

SEQ ID NO: 240213 - DNA, 532 bp, Homo sapiens
gatcccccgcttactaatcatggacagggcctcacttgcttttgctaaggtacataaagtttccaaatggactccagggaaggcacggatgctgtgaggcagctggaggccatgcatgaaaattattccattcagtctcagatttactcagcatcccatggaaggtgtgatgagcatatgggcctggatgcagagcaggatgtgttaatatggacttgctttaatctgaatatgaaaggtgagaccctggcagcagctcaggatgcttctggaaggacccagaatgcacactgcaacaccaggtagaaaatgaaggcgggcctgccagattgcatcatgccgacgagaggttctcctccagattccatcctggcatcaggtggcaagagggtggcctgtctctatgagcagttgggagaaatggctttgaagtrgcatgaaaaccccagctgaagagaagacaaagtgtacattaagagaacaaaatgaaggggctggatggataggtttatttttgaaatttaaactctct

SEQ ID NO: 240214 - DNA, 555 bp, Homo sapiens
cagggcctcacttgcttttgctaaggtacataaagtttccaaatggactccagggaaggcacggatgctgtgaggcagctggaggccatgcatgaaaattattccattcagtctcagatttactcagcatcccatggaaggtgtgatgagcatatgggcctggatgcagagcaggatgtgttaatatggacttgctttaatctgaatatgaaaggtgagaccctggcagcagctcaggatgcttctggaaggacccagaatgcacactgcaacaccaggtagaaaatgaaggcgggcctgccagattgcatcatgccgacgagaggttctcctccagattccatcctggcatcaggtggcaagagggtggcctgtctctatgagcagttgggagaaatggctttgaagtagcatgaaaaccccagctgaagagaagacaaagtgtacattaagagaacaaaatgaaggggctggatggataggtttatttttgaaatttaaactctctgaagtaaagttatcatmgttacctgcttgtttttacttgtatttatg

SEQ ID NO: 240215 - DNA, 309 bp, Homo sapiens
ctttgttttaatggtatgtagcctcacaagcagacttcctgctgccccatttggagagccctggaagtggaggaggagacgcagcaggctccagcagagaggagtacctgcacagcccacaccagagtgtcgcttcctgtggctcactttttatatatatttatgggcatgctttaaagtatgtgtaccaatttttttcccacrtggcctgtgcagaaaaatagcccataaaaaatcctccagagtcatcatataggttcataaatttagagctggaagaatcctaggatgtcgggtgggacattctct

SEQ ID NO: 240216 - DNA, 512 bp, Homo sapiens
ttggtatctctaattcaaaaatttcgatttgatttttgttgaggattttgtgtacctggtctcaagtacagcatcaggcatgttgtaagcacctcagtaactgtgcattagattaatccaagaatttatctaactctttgtatatttggagaagaaattacctatgctgttatttctattgctttttttatctaaagtgatatatccargttagatgcttttataactaggtatttgggaaacaaatattgtaaatgggagctattataataatccagaacttggattttaaaagcaacagtgtggaaaatttacctttcacaatgaaactggcatttgaccttttattaacaaatatattttgttcatatcaatggaatatgaacagcaatgtcacaacatgcctatacatgcaatattgtaataagtaaatattattgtatttagaattgtattagttaaaaaattgcaaatgtaataagtcctggaatgcacagtatgtcactgtattt

SEQ ID NO: 240217 - DNA, 534 bp, Homo sapiens
tatattctttttaacattttcactcattgctgtaatgctttgttttctctaaaggttatatgttacctgyacaatcagaaaattaaaataaagatttaattttgctaagaaaatggatgttcttctggttaggatgtttcacagggaagacagaatcagagtggaagctgaaaccaggcaaagcccatcagggccaggtgtctggggagcagcttcaagggagagaaaggagtgaagggaagagggaagcctgagaagtggggtgcaaggaagaatgaggcctagtagttcaggcagcaggttgaaaacacctgctccccacacctgcacatgaaataggtgaaatagagaggctcaggtccatgctctgaggaaggcaaaaggtatgatagtgagtcacaagcaagaatttggggtgtggaatctcgactctaagccctttccacttttcaggcatcttctgcaaccactggagggtgttggaccccagagtaaagcagttgttttatttggagattaaaggcaataatcacc

SEQ ID NO: 240218 - DNA, 626 bp, Homo sapiens
tccattgcctagcttggagattccactctttgttaacacaaactgcttatttcccttgcaaggggaatgcatgataattcctcacttcttttttctctgttctaacatcacactgctgctgactgaagctagtaatggataggtcaacaccatcacttaagctaaataaatgggaagttttgatgtctctaatttaggggctttaagaccacaaaaaataaagtacaacctgtatacaatggtctaatccacactccatttaattaagataactgtctgactatcctcctattcagtattctcatttgaatatgctttgatcataaagatattttatttttgttattatttcccaaatggcactgttaacagaattcagtaacccccaacaaataccagggcccctcaacagaggcattactgacattgtggtcaggataattctttgatgttgggaatggggggttgccctatgcattataggatggttagaaacatccctggctgacccactaaataccrgtagcacccctccacctccagtcatgacaacccaaagtgtctctggacattgccaaacgttccagtgggagtaggggtgcgggtgttggggggagtacaaaatc

SEQ ID NO: 240219 - DNA, 560 bp, Homo sapiens
aaacagaagtaaaaaatgtactctactytcagactttgtcattttatgggatttaaattttaattactccatggaaggtttttaattatttttttagaaacttaacctttctgcccgatctcgtcgtataaaatgaggaccttagtagtatttaacagaagcttaaatgagctaattcatttctaagttttcagaacagtacctggcctacagtaagcactcaatacttgttagctcttaccattaccagctactaacaggatgttcctctaaagccaccttggatccaggaaggttgaactttaaaatggtaattccttccctattgcttgatacccagagaaaaaccacccacactaaaaaagggatagagagaaaaggaaaagggcttaagatctttgtttctgcttcgtgactctaaggacccagaccccacaaatgtgcaggacaactctagggcccatggggagaagagtggacagttgtggacatacatggagccagtcaggggcttgcttcaaagtcacagctccccagctgggttgggaatgatggattga

SEQ ID NO: 240220 - DNA, 570 bp, Homo sapiens
attttctgcagcaatgaagcatagagtaggaggatttgaagcatagaacagatgagatatgaaggagccaaattatgacatattttgtaatactctgaaaagcagattatatattttcagaatggatattaaaaaatgtaccataatgagtacaacatagacactgatccagcaaaacattttcaagtcatagcactgaagcagggtccagcaggacacttctgggccaatttgagacttagtggttgctagattgtgggacagttcatttgggttctgaaagcagaagtcaggctggttccagagtagggcaaggagaagttgaaggggtaaggagagcagtaatttgccaaatggtgtctggtatatattggttaaataagaactctgttatttttatcattatatattttattattcataytaatattatatagtgtatatttttgttgactttgctgttccttgttagagttgaaatcaagggagaacaatcaattttaaacatgatagaatgatcatttatgcatcattgctctggtatcaggaggaagaaagaatggaagaaag

SEQ ID NO: 240221 - DNA, 590 bp, Homo sapiens
catgtttaaagtttatgtaataaatttgtgttgggggttaaatttatcttcttgtttaaatttaaaattcttaagcctttattttatgaccaaactatctataaaatgtatgaaaatattctaataattctctgttatagagcatcaacctattgttttatcaatgccttctactttttcttttgtattcttggtcaaaagcggattgggtatggtttcccttggacgggtagggttctacttatctgctctttgctctggacttttaactagtgatactaatttcttctttcacatgacaatctgggccaggctgtttcccagaacttggcctaagtggtctaaacagcctagtactaggtcttgatggcaaatrtaggtttctgactgtttgcccttttcccattcctctggaatggtggctatacttcaggttagctttttccttattatgaagcatgaaggtcacccttcctcactggggaagtaaaatggtcagagaatcagagggaaggaagaagtcttattcaggactctaattcaggacgctaattccagcttactggaggattactgggcattaaacagga

SEQ ID NO: 240222 - DNA, 531 bp, Homo sapiens
tggtgtctagactgaaaaatgtttagtattgagaaataaaagtccgtaagataagattagtgttatgcagtagaaagayagtgagcagagaatttaaaaaaaaaaaaacaccactgggtttaaatcctcaagaatgtcataaccatgtggtcttgggtaagtatttaaactttttttccttgtaaaatgaactcactgcagagttgttgtgagagtaaaggcaaagttactagttgggtattttgtaccaaaagatacacaatgatagattatatcatattccttattattgccataaaaattatttcaacagtgtatgctatttctctattcctttaatcaaaactcagatactgaaatattctgaatatatactttgctcacaaaacattttgcaaagctgttacatattcaagaccagagagcaaagcctttaaactgtaggaatatttataaaggcagtctttaccactaaacgtaaactagtgagtctccactttaccacctaagttcagaaatgatacacatatt

SEQ ID NO: 240223 - DNA, 569 bp, Homo sapiens
aactctgtgccctctcatcaatttgtttttaaaaaccatatataaggaatttatgcaaaatatacatgtttataacttaaataaggtatagctatggaaaactatatacctgcacatacatttacagtatatttactactatggattctaaaattgttaaaagcaatctcaactggtgccttgttatgcagcatttttaggttttatcyattgtttatttgcagttacattatttaccatttaaatatttaataaatgtagtgaacaattttaccacttaaataacaaacattgaatcaccagctgtacaagaataaattgttaacgcatataacaccctcaggagaggcgtcatttcaccagccagcaacatgctgcagatggtaagacctaaaaaacagcaacatcaatattggcaataatagtaataatgtctactgagtttttgtaaagttccacgcacttgcaatatactaaaagttggatcttcacaacaaacgtatgatacagaaaaagaaatagaagctcagaggagataagcaactttctcaccatcatacagttagtca

SEQ ID NO: 240224 - DNA, 569 bp, Homo sapiens
aactctgtgccctctcatcaatttgtttttaaaaaccatatataaggaatttatgcaaaatatacatgtttataacttaaataaggtatagctatggaaaactatatacctgcacatacatttacagtatatttactactatggattctaaaattgttaaaagcaatctcaactggtgccttgttatgcagcatttttaggttttatctattgtttatttgcagttacattatttaccatttaaatatttaataaatgtagtgaacaattttaccacttaaataacaaacattgaatcaccagctgtacaagaataaattgttaacgcatataacaccctcaggagaggcgtcatttcaccagccagcaacatgctgcagatggtaagacctaaaaaacagcaacatcaatattggcaataatagtaataatgtctactgagtttttgtaaagttccaygcacttgcaatatactaaaagttggatcttcacaacaaacgtatgatacagaaaaagaaatagaagctcagaggagataagcaactttctcaccatcatacagttagtca

SEQ ID NO: 240225 - DNA, 453 bp, Homo sapiens
acagtaaacagtatatacatgaagtatgagaattcaatacttatagagttatawctgtcctgaggtgaaggtcaatgtgtgtgtttgtttgcaagatagtttatgttgtaaatttattaattaatttgcacctattttatagccgttctggacatacacatgggcagaagatgtagccgccttgtgtgaaaatttgagaggtatttaactgtctctgctgataagccccatggcctaaaatgttcacactatataatctgacctttatttttaatgaacataaagactaagcattataatgttatctagaaactaatgtatagttgtccaataacagctgataataaattcactaaaattagcttattaaataagtttccaatgaataaatcaacccttctgggggatataaaatggcagcaataattgttgagaagtgtttcaaaacattcc

SEQ ID NO: 240226 - DNA, 545 bp, Homo sapiens
atagaatgagaggactcagacctgagtagtaaaasatacgtgtgtgtgttgggtatacacatacatgtacctacatacacactgcttctttatttcaacgtctcaacatttctaaagtcctggaagtaatgaggtatggtagagaaatgacaaaagtgctgttcaataacaatgaagtcagtaccattaatatttagaatatcaacacctaaaagggccatagtaagcaacagggtgatagatggatgaaataagggtgtatttgtgtgtgtgtgtttctctctgtgtgtgtgtctatgtgtgtgggtctgtgtgtatgtgagagttagtgtgatggattagtgtttagcttaatttatgtgatgctaactgaagcatttgagaagccctttctgatgagattctgcctgatgatgagaggacttgttaactcagatcatttgttctggtatcaacatgaccaagaacctctagccccattctcagcacggttgtactcttcctgctttacctttataatatttctccccacctcctagtcatat

SEQ ID NO: 240227 - DNA, 445 bp, Homo sapiens
ccgcatgcttaggatctccataggcaagagtttggtgaggcaagactgtcttatacaaaagtttttccctatcctagaacaaaaattaaaaatgaaacaagcaaattctcatgtattgaaaattgcctgtgaatcyggtacttgaggtaccttgtgtgggtcacattgaatagtcatagtcatcccttaatattcatggaagaatagttcaaggagcttcacaaatgtcaaaatttgtggatgctcaagttcctgatataaaatgatgtaatatttgcatgtaatataggcacaaccttccaaatagtataaataatctctagattacttataatacctaatacaatgtaagtgccacatacatagttgttatactgtattgtttagggaataatgacaagaggaaaaagtccgtacatattcagtacagatgggattttttaat

SEQ ID NO: 240228 - DNA, 445 bp, Homo sapiens
ccgcatgcttaggatctccataggcaagagtttggtgaggcaagactgtcttatacaaaagtttttccctatcctagaacaaaaattaaaaatgaaacaagcaaattctcatgtattgaaaattgcctgtgaatctggtacttgaggtaccttgygtgggtcacattgaatagtcatagtcatcccttaatattcatggaagaatagttcaaggagcttcacaaatgtcaaaatttgtggatgctcaagttcctgatataaaatgatgtaatatttgcatgtaatataggcacaaccttccaaatagtataaataatctctagattacttataatacctaatacaatgtaagtgccacatacatagttgttatactgtattgtttagggaataatgacaagaggaaaaagtccgtacatattcagtacagatgggattttttaat

SEQ ID NO: 240229 - DNA, 557 bp, Homo sapiens
aatttcctattgctactttaatacattaataactacttagaggcttaaaacactttttttatttttaacayatatttatgacctcacaatatcatagttcataggtttgtgttggctcagctagtttctctgctcaaagttttacaggcagaaatcagtgtcaacagactgtgtcatcaagagactccagaaagaatctgattccaaagtcagtccagttttcaaaaaaatccagttccttgagggaagaagacttacagtcaccatttccttattggctgtcagctgggggctgtcttctgctcttacaagcccctttctaattcttacatgtggtccctttaaactcaaaatctgtccaacgttcctgctctcttctgcttccagctggagaaagttgtttgcttttaagggtacatgtgattagattgctcccgtctgaataatataaactaatctcaggttctaaggtaagaccagtgacctcagttgtattttcaaagtctattttgccacgagatataaacattcaaaggtttcagggattagagtgtgga

SEQ ID NO: 240230 - DNA, 557 bp, Homo sapiens
aatttcctattgctactttaatacattaataactacttagaggcttaaaacactttttttatttttaacacatatttatgacctcacaatatcatagttcataggtttgtgttggctcagctagtttctctgctcaaagttttacaggcagaaatcagtgtcaacagactgtgtcatcaagagactccagaaagaatctgattccaaagtcagtccagttttcaaaaaaatccagttccttgagggaagaagacttacagtcaccatttccttrttggctgtcagctgggggctgtcttctgctcttacaagcccctttctaattcttacatgtggtccctttaaactcaaaatctgtccaacgttcctgctctcttctgcttccagctggagaaagttgtttgcttttaagggtacatgtgattagattgctcccgtctgaataatataaactaatctcaggttctaaggtaagaccagtgacctcagttgtattttcaaagtctattttgccacgagatataaacattcaaaggtttcagggattagagtgtgga

SEQ ID NO: 240231 - DNA, 557 bp, Homo sapiens
aatttcctattgctactttaatacattaataactacttagaggcttaaaacactttttttatttttaacacatatttatgacctcacaatatcatagttcataggtttgtgttggctcagctagtttctctgctcaaagttttacaggcagaaatcagtgtcaacagactgtgtcatcaagagactccagaaagaatctgattccaaagtcagtccagttttcaaaaaaatccagttccttgagggaagaagacttacagtcaccatttccttattggctgtcagctgggggctgtcttctgctcttacaagcccctttctaattcttacatgtggtccctttaaactcaaaatctgtccaacgttcctgctctcttctgcttccagctggagaaagttgtttgcttttaagggtacatgtgattagattgctcccgtctgaataatataaactaatctcaggttctaaggtaagaccagtgacctcagttgtattttcaaagtctattttgccacragatataaacattcaaaggtttcagggattagagtgtgga

SEQ ID NO: 240232 - DNA, 603 bp, Homo sapiens
tcatataagcaataactgaaattaatccaaaattatgttgatggaaatggtctgaattttgctttatgatttaagttagctttggaagttttgcataccacttttcctgtcttttgggttgtatcttacttttgcacatgaggaagtaggagacatttcctcatgtgcttcttatttgggaagaaaaagtatagaaaatgacactcttcctctcactacttcatgaggaatgaggagcagagtctgtttcttgctttaataatggcattctatacacattaayaaaaatgattccaaatatatcacatttgtcaattggattaatttcataaaaataaatgaataggaactaaaggaaaattatgacagaagcatatttttttttgtccgttagaaattcctcgagaaggtagaatgttttacacttatagctcagggaaagaatgttcacatggcaaaagtggtttgtgccaatctccctcaatctgttgttttgagaaaccatgcaaccatgtggttggtaaactgtagcagagactgcacatgattttctgttataaagacaagatttccaggactccctttctgtggagatatttccat

SEQ ID NO: 240233 - DNA, 610 bp, Homo sapiens
aggatacgccattttcactttacaatagaggacattggaatatcagggctctaaactgtattctcactcaaggcccaggcaactttaaatcactccagcatgaacagtttcctcattgggaggcaccatcagaatgtcttaaatgaaaagatatattttagcacataccagtagctcatactgtgctaaaacttgtctgaccctttgataaaataatgcagaataattcacataccttgtaaaaggagtgcacagatgtacggcaagctttgccacatggaagcaaattgatcctggcctttttttggaagaacagtcataaaaaattacaaagtgttgaatgtccaaagcttcataccagctaycagtcatggcagcagtctgtttagtcacagtgataacatcagctgttgcctgtgaagtgggagctaatttttcattttagctttgatattccacagaagggatccaagcatcagtgatgttcaatgttaatggaatagcatcccaaagagctcctgccttcatgaaatatttttgagaagaacaagtagtttttcttctgttattatgggatattgtttcaactgtataatcttgacaagttttg

SEQ ID NO: 240234 - DNA, 610 bp, Homo sapiens
aggatacgccattttcactttacaatagaggacattggaatatcagggctctaaactgtattctcactcaaggcccaggcaactttaaatcactccagcatgaacagtttcctcattgggaggcaccatcagaatgtcttaaatgaaaagatatattttagcacataccagtagctcatactgtgctaaaacttgtctgaccctttgataaaataatgcagaataattcacataccttgtaaaaggagtgcacagatgtacggcaagctttgccacatggaagcaaattgatcctggcctttttttggaagaacagtcataaaaaattacaaagtgttgaatgtccaaagcttcataccagctaccagtcatggcagcagtctstttagtcacagtgataacatcagctgttgcctgtgaagtgggagctaatttttcattttagctttgatattccacagaagggatccaagcatcagtgatgttcaatgttaatggaatagcatcccaaagagctcctgccttcatgaaatatttttgagaagaacaagtagtttttcttctgttattatgggatattgtttcaactgtataatcttgacaagttttg

SEQ ID NO: 240235 - DNA, 458 bp, Homo sapiens
atgaactaagctacctaccacatgtatatatagtagtaggaagacttagtatcataagtttcatacatatatgtattgcaacaaaatgtaaaayaaaaagacacttttaagaagagcaaggtggcatgatatatactattttttattaacatacattatcattactaattacaaaatgtttaagacagtgtggaatagttccagggatataaattaatgaaaagtaatagagaaagacatatgcatattatcatttgatgacctatttaattgtgatgctgggtcaattgttttcctatagaacttaaaagaaaaccaaataagtgccttatctcatgcaaaaatataaattctacattgattaataatctgtgtattcaaaatttacgtgtgtaaagccacattacttgaaaagttaaacttagtgttttgagttggctagggaacaagaatcaatg

SEQ ID NO: 240236 - DNA, 545 bp, Homo sapiens
ttgccagtgacagatcctttgaccacatgatactgaccagcaagtttaggttgtactggtttgtgaatgtaagcatatttcaggtatcttctacaggattccatagatactgatttccaggtgtcatgttggtcactattcatccactcctatcacaacaacttgatgatgttttttcttcctctatccactgccagccagttgctacagaaagtcaaattccatttttaattatgttaatcagctaattctatattaaatatgaagactacatttttcagagatgttctgccctgagacttactgtagtgtttccattaatcatcatcagcttctgtacctctagcaatcctaccttttaaatatatttgttrcatactatttagaataccaatagttctttctgtgtgatggtttaagaaagctgttgccattgccagtggtataatgttcaattacgataattatccaattaatctattaacttatagcctataaatcatgaacttaatggtaactgtagttgtatattggtcaattgagac

SEQ ID NO: 240237 - DNA, 406 bp, Homo sapiens
attctaaaaacaacacaatttcaagagactcgcattagatctaaagactcagattgaaagttaaaggatagaaaaagatattccataccagtatcaaccaaaaagagagctatggtggtaatatcaaastaattttataactggtatatgaggaagagggaggtatatattttaaaaagtgtcaattcattaagaaggtgtaattataaacatatattctcaaaacaacatagtcctaaaataatctgaagcaagtactgacaaacttgaaggtaagaatagatagttctacattaatagatggagacttgaatacctcactttcaataatggatagaacatctagacagaagttcagttaaaaaaatacatgagttaaaaacatataaaccaactgatcctaaca

SEQ ID NO: 240238 - DNA, 587 bp, Homo sapiens
cctggctaacacggtgacaccccgtctctactaaaaatacaaaaaattagccgggcgtggtggtgggcgcctggagtcccagctactggggaggctgaagtaggagaatggtgtgaacccgggaggcggagcttgcagtgagccaagatcgtgccactgcactccagcctggacgacagagtgagactccgtctccaaaaaaaaaaaaaagaaattcacgtttcattctagaaaattttgttcaattatttcattggtgaattccttacctctgttttctatttctgaaacccctattaacccctattagttaaacactggaatttgaggactcgttttaatttttgatacatttttcctcctctttttcatctctctttttgttctactccataggaattttttaagtgggttgcaaaaaataatcactttatttgatattatagttgtagatatagagtatattttctttaagaaatgaaaaactaagaagaaaatgccactcaacatcgctggcatagcaawaggtcagcaggaaaaaaaaatactgtgataaacttgtctctttaataccaagaataaattct

SEQ ID NO: 240239 - DNA, 599 bp, Homo sapiens
tttttcaaatgctgaaagagaactgtcagctattaactctgtatcatgtgaaaatatcctttaaaaatgaaaaagaaatcaaaatattctcagattaataaaacaaagagaatttttcttaccaggtctattcttaaagaatggccaaagtaagcrtccagaaacaaacaaacaaaaaaatagtaatcataaccgaagaagccttggaactttgaaaaagaaagggcaaaatgggcaaaaatagcagtaaatacaatagattaatctttaactcataagtttccttaatatttgatggttgaagcaaaaattataatacctgttgatgtggtgctcaatgtatgaagaagaaatacttctttttgtaggtgaggaaggacctaaatggaagtaaaattttaatattcatttaaagtggtaaaatgtcaacatcgatgaactgtgaaaagttacatatgtcatatatatatatacagtaatacctagaagaatcactaagaaaattgtacagaataacatactcaaatacactataaataattctaaatgaaactcttaaccatattcaaataatttctaaaaagtcaggaaaagagtaa

SEQ ID NO: 240240 - DNA, 574 bp, Homo sapiens
gctatgctattattataatagcttccacaatataataatggaaaagtcatctccctccggcctgagaaagaatggctttcaggaaaatgtttataatatcccttaccagcaccattgaggataccccactttcctgatttctagcctttaactccaactaaaattgggatcttctcttttcctgtccactaagtcagggaggtgaatgccaaaacacacttgcttaggccttatgaatctcctgagttattccccttgtaaagctctattcatctataaggacctttatccctgcagtgagagtattcattcataatccatcaaatgtaagtgttatgagctatgtactgggaattcagaagcaagagttgaaaagtgtgaaagttcagaagaaaataaactttgactgggatattcaaagactaattggtaggtgaattgttcctctagatatttataaaagtagacaatgtagacaattaatacagatgarcatgcacaccatatacatatacaaggactggagtctcacaagattatgtcaaaaaatttcgcccatataaaatagaaatca

SEQ ID NO: 240241 - DNA, 574 bp, Homo sapiens
gctatgctattattataatagcttccacaatataataatggaaaagtcatctccctccggcctgagaaagaatggctttcaggaaaatgtttataatatcccttaccagcaccattgaggataccccactttcctgatttctagcctttaactccaactaaaattgggatcttctcttttcctgtccactaagtcagggaggtgaatgccaaaacacacttgcttaggccttatgaatctcctgagttattccccttgtaaagctctattcatctataaggacctttatccctgcagtgagagtattcattcataatccatcaaatgtaagtgttatgagctatgtactgggaattcagaagcaagagttgaaaagtgtgaaagttcagaagaaaataaactttgactgggatattcaaagactaattggtaggtgaattgttcctctagatatttataaaagtagacaatgtagacaattaatacagatgagcatgcacaccatatacatatacaaggactggagtctcacaagattatgtcaaaaaatttcrcccatataaaatagaaatca

SEQ ID NO: 240242 - DNA, 599 bp, Homo sapiens
cccgccacaccaacatttcttggcataataattattcctccctacaaccaaacttttgatttagtcatttttaaagtataaatttaagtatattttgtttgaaaacttcagtggcaccctatatcctatttaagttaaaacttaaatttgctatactgaaccataaaaatatttcttgtcctgacattgctcatgtagccttgcattttacaaacttttatttttcaaagaccactctgaataactttccattaccagtccagcttggtggctcaggcccataatcccagccttttgggaggccgagggggcagatcacttgaggtcaggagttcgagaccagcctggccaatatggcgaaatcagtctccactaaaaatacaaaaaattagctgggcgtggtggcgtccacctrtggtcttagctacttgggaggctgaggcacaagtattgcttgaacctgggaggcggaggttgcagtgagccaagattgtgccactgcaccactccagcctgggcaacggaggaagaccctgtctcaaaaaaataaaaataaaaaagttttcattaccagcccaacttattatctgtagcctgta

SEQ ID NO: 240243 - DNA, 571 bp, Homo sapiens
atattcaggctacctataatgcctcttaaaaacatctcacttgagggtttggctaatatgccacctcctctaggaaatatttcctaattttgaggaaagctgctccttatatgtgttctcatagaatctataacttaaccaaatgttctttaccatgcatgacaattgcttattagcttgtcagactcttccactggcaacaaatactgtaatatttcctcacccagatcagtttgatttatatggcacaattatctgttaaatacatgaataatcatactttattaacattataatacagaaaaaggagtgataaactattgacaatggmgatcagtattaagggtttgggttccaatgagaagcagagaaatgggccataccactgttactgaagctctaatacatccaccaactacaaagtatgaactaagaaaatgccatacagtgtctgctactgagcaaacaaaaacacctcttcaatgaattttttcataattaatatgtgagcctctgaatttagtgaaaatatgttcactgatatgtgatatgaaggaagcttccctagagt

SEQ ID NO: 240244 - DNA, 511 bp, Homo sapiens
tacttcttttgtgtgtgtttgcatttccactgaattcctgaaagcagagagtaggacttctccatcctggatatttcagtgttttaagagttcagtgaaaatttattaactgaatatctattggagtccaggagaaagtgtactctgccattttaggagataagcagcaggacttacctaattattatttgacagaaattatatttttactttaaagtcactagattttgttgaattctagtacttgtgtgatgcttaaccatcaatagtcaaataatattaattttactttacagttaaaagaaaggggaaaagggaaaagaaagagaggtaaaactagataaaaattgtaggtaaagacaccaacaaagggctcaaatagctgtgtgtaaaaatgcaaaactgatttttcattgttttttaaagtcttacatcaatgaatagaaaggatagaaaatakagttgatctaatagaaaccgttcttctctacttccttgtactatccaccaa

SEQ ID NO: 240245 - DNA, 505 bp, Homo sapiens
tcaaacccaaaagtgagtttaactaataacaaaatggttggatttactggtttccaatggactgcaacagaatactctcccttcaaagttgggtcgtgctatctgtagtcatggtatcctttaagtttccctgtaaaattcagatttagagtcatttgttgcactgacctctatagttatttcaccactattttgttttttattcttgttctgaaaagtagtttgccctttgccccctcccttattaagttccgtcactggaacaccatcagtcatcattgcttttttgctgcctatataattttctttatatatatatatatatatatacctatatctatctatctatatgcatctatctagatacatagacagatatctggatagayagatagatagatagatagatagatagatagatagatagatatagatagataaatagatagacagatacatatatttatctttttggcatcctgagaagtttggcatgttttatgta

SEQ ID NO: 240246 - DNA, 598 bp, Homo sapiens
gtagactcgaatctcctcccttttgaaggggttgtcacagttaatagatgttatgaaatctaatatcctgtcttcttctcaagccccacacatatgctcatccagacaggtaccaaattgctagacacgagcaaggtctgcatgaccttcacagaaactaaactgtgtaagagaaatagacagaaaactgccctaatctctactttactcacccagaagaatctataaataaatacatttgackgtagtaaggaatactacatgcggttcttaaactaatgtccattgctgtcctgggagggagaaaagttatggcaaattatctttaagaatatcatgctaggagtgttgtttgcctgtttgtattcctttaactgagaacaccacaatggtattgtcagtacctcctcagactggcaactgggaagtgataactcacctaggtattgttcaaactctcagaaaagcgtatcagactctgtcagaggtcatagctattcttttcaaaatgatggaacatgactgtcactttttccattttttgttcagttcctatgatctacgtcagctcatcttatttccaatattttgtacctgc

SEQ ID NO: 240247 - DNA, 606 bp, Homo sapiens
aaaattatattcttccatctagatgagcgacagagggaaatctgataaagatgccgtaagtccacagaaatcagagatttcctcttggtttctgtgtaataattgacaaaatccctggatgcttctagcaaatgttactgcaacataaatgcttcataaaaggcagatgcaacatgagatgcaggttcacttcaggcttcagacacttttaataygactactgcccacctgcttgaacccttaagacttttcttccttgaaaataaaattttgctgtgttatagatagtagttcaaaaatatcttaatatgtaataattgtaggtcccatttattccctcttaactgtacatgaatcatcaactcctttgggaaatattttgtgatgtaaatgctgtaaccttttctgggctatttggcattactgtgtgagagagcataactctgacctcatacagtgaagcatcagtaacttaacagattgacagggctgggaccaaatgcacagaaatctttgacatgtaagaggctattttggtagctttcatcgtgcttgacattcttttgacctatgtcgctatttattttttctataatgatgtcatca

SEQ ID NO: 240248 - DNA, 606 bp, Homo sapiens
aaaattatattcttccatctagatgagcgacagagggaaatctgataaagatgccgtaagtccacagaaatcagagatttcctcttggtttctgtgtaataattgacaaaatccctggatgcttctagcaaatgttactgcaacataaatgcttcataaaaggcagatgcaacatgagatgcaggttcacttcaggcttcagacacttttaatacgactactgcccacctgcttgaacccttaagacttttcttccttgaaaataaaattttgctgtgttatagatagtagttcaaaaatatcttaatatgtaataattgtaggtcccatttattccctcttaactgtacatgaatcatcaactcctttgggaaatrttttgtgatgtaaatgctgtaaccttttctgggctatttggcattactgtgtgagagagcataactctgacctcatacagtgaagcatcagtaacttaacagattgacagggctgggaccaaatgcacagaaatctttgacatgtaagaggctattttggtagctttcatcgtgcttgacattcttttgacctatgtcgctatttattttttctataatgatgtcatca

SEQ ID NO: 240249 - DNA, 257 bp, Homo sapiens
ttacttatggagaattaataatgatcaactgagattgaatcagcctcatgaatattatatggttactttcgcattacaattataattaaaaggctacttggctcatacttttttatttacccaaatttgtttgattcaagtaagtttatttatttargtaggttttttttatttttttaaaacctcagtaacgtaccaaagcatttcatctacagatcagattatctccatctatggcatttcactcaagccaagta

SEQ ID NO: 240250 - DNA, 619 bp, Homo sapiens
gaacttggtctatagaaatagagaaatctccttgaaatttctagagaacaagaaatgaaaaaataaacaatgagagaagtaacatgaagccaaatatatatttatggaatcaaactctgattcctattagtagaacctgtatctaataaaattgaataataaaatatgcaatacctaaaaaaggaaatgaccrtagacctgcttaataaataatgatttattttctcgaagatgacacacatcaaatttgagtttgatatgaagttgaaagaaattgcgaacttgttagatgacagaatttggagtaaaaaagctcttaacaggctagaaaattgagcctaattttaacattgcactagatacaacttaagtgacaagatgaaaggtttttttttttttaactgggctttaaagtaggagaagcatgtgtgtgtttgtgtgtctgtatatatgtgtgtgatacacatatatatggagtgataacatgatcattaagtgtcaagtaatatgtgaacaatttatatgaattatcccatttcatacttatgactacctgagactataattactcctattaattctaccaaagcagacactgaatttcagagtggtaagtgat

SEQ ID NO: 240251 - DNA, 619 bp, Homo sapiens
gaacttggtctatagaaatagagaaatctccttgaaatttctagagaacaagaaatgaaaaaataaacaatgagagaagtaacatgaagccaaatatatatttatggaatcaaactctgattcctattagtagaacctgtatctaataaaattgaataataaaatatgcaatacctaaaaaaggaaatgaccatagacctgcttaataaataatgatttattttctcgaagatgacacacatcaaatttgagtttgatatgaagttgaaaraaattgcgaacttgttagatgacagaatttggagtaaaaaagctcttaacaggctagaaaattgagcctaattttaacattgcactagatacaacttaagtgacaagatgaaaggtttttttttttttaactgggctttaaagtaggagaagcatgtgtgtgtttgtgtgtctgtatatatgtgtgtgatacacatatatatggagtgataacatgatcattaagtgtcaagtaatatgtgaacaatttatatgaattatcccatttcatacttatgactacctgagactataattactcctattaattctaccaaagcagacactgaatttcagagtggtaagtgat

SEQ ID NO: 240252 - DNA, 425 bp, Homo sapiens
gcagtaaccacaataactaatataaattcagctcttcttgcacatttattacagtaataagtatatatagttgttctcataaaaccttctttgatggaaggttcactattttaatttctattttacaggtgagaacattgagaatcaaagagattatgtaattttctgaaggttctacagttagtggatatgctctatagaagcaaaggtgaacaagagaaccaaagttcttaatgcccctgaaccccaggcccaatccctacaaaatatacagcyttttggatcaaactgctgatgtctgcaggcagcatgtcagctgggaaatgtcaccacctctacatttccagaactgtgttaatactcacaacctgtacaaccaccaccaccactccaattaaagcctatcaatgtatcaggctttgtgc

SEQ ID NO: 240253 - DNA, 589 bp, Homo sapiens
caaacacacaaacatatgaactgatatttttgagatctactcattttatctctttactttgactgaagaataagaatattttctagaattattcatttaattattaaaaaatattttatctttgattgttaagcatcccattaaacttcaggaagtctttttcagaaagaatttttaaaactattttaatataatattgctacattaaataaagaaaaagattttgaacaaagaaaatagaatatttgtttataatagctacctctttatgcaaaaaattttttaaactgtagaatttagagaacactttctgaaaaagttatcatgtttcacacctcttaatgaatagcagatgttgacaatgaattttaatttctctattttatgtttattacatatatattttaatcaaactggaaaagtgaaagcaattgtgaagtcttaagagctttaaaagaaggttatttcgagtatgaagtagatgaatgcagtttttcattgtgacaacagtgccacctagtgttttatctaaaactataaaataaaaatttaaatttyggctgcaaataataagcctttatttatacat

SEQ ID NO: 240254 - DNA, 402 bp, Homo sapiens
gaattcatcagttgatcaaaaacatttgagtgacaatttcatagtgaaccatgatcaatattgtaagctacaatttatataaaacatggcatttgaacaaactgcactcacaattatatgaaaaaataaatggctgacataacaatatatccgctatgtgtcaaatagatagacaggcaatacagcttaaagttgtgcttataaatatggacattggtggctgtgtagaaactagatagagagaagagtgaaggcgctccaggtggagaaaaagtaagggaaaaagtctggagatggatgtgtgtgtttgtactgcctgcgaagtggtcagtagggaamtaggcttatataaaaacatctgactcttttccttaggcttatgttcacttggttatcaagaaa

SEQ ID NO: 240255 - DNA, 608 bp, Homo sapiens
tataaagttatcaggctgtggatcaggaggatggtattttcctctctaatgataaacaaattctacttccagaatcccatttatttatagacwtctcatttgaaaaacaatgtagacaaattgggaagcagtcagaagaaatgcaatgctgtgattaagcggctgatgagcagggaccttcaaatagtcaagaaattaagcctaaatgtaaaaatctggctaagcaacagcacaggatgaatgtaactgctataaaagaataaaagctgatgaaagattgtattgaaattagggcaagtgggaccgtatttgaaaatctgtttctttgtcttctaaatgatatcactgttatgaaattgtcttggcagagacataacacatcatgtagagtttgattcaattaaaacttttcctgaccaggaaacacactctggttccaacagtagtgaagaagaaggccattcacagtcctgagatctgcacagttcttgggagttagatgatagtgcccagaataatgtcgcaaccaagatagtgaaataaataataataaaaataaatccctatgtatgtgtcaggtgctgttttgaatactttacttgtattaa

SEQ ID NO: 240256 - DNA, 545 bp, Homo sapiens
gaaaaaaatgtttaaggaaaacaaaatatttaacttgaccaatttctgaggcattggggtaataaattagtgtgaagactaaaactataaggaaaattagcacagtcttttgcacctttcaattttggtgacatttgaaaatgaaggcgtgtaaaaagagaggcaactgcagaatcacttgcagcaaccatctcctttctaaattctttctcatgtcctttccttcttgtttttgttttaaaagcttgggggcagttaaaggaacactcagggaaaagtataggtatttgagagagaatgcaaattaaaacttactatgtatatttttatgatgtttaattctccaaactaaaatcaccaaaaatagtttagggtgttgaagcacatgagtttgctttttgcagtttaattcaattaaatgtttatttcttcaaccaaacatactcattataagtacctcaaaaagagtagtttgatgtaattaagtcttttgrtacaactttttgttatttttctcaacagagagacgttaaaattccaaaatt

SEQ ID NO: 240257 - DNA, 433 bp, Homo sapiens
gagactgaaatttattttattcctaccttaaaatcttgaagtaggtcaccagggcagctaggactgccccatgtccattgctcctggaggtttcagggggttcaaacttctattttgatgctccacgaaaatgactattaccctatctgctctcgagccagtggwagggggaagggatgaacgtgccctatttgtatcaggggaatagaaagaaagctgtagatgtcttttctcttcacacccattgggaagacttcagtcccatggtcacatcttcttgcaaaagaggttgggaaaggtagtcactgcctgggttttccatgcatccagctagaacatcggggatcctttattaaaggaagggggagagaatggttgttggggaaccacagcagtctcacccacagattctgagaggaatgaggtgctgtgt

SEQ ID NO: 240258 - DNA, 491 bp, Homo sapiens
tgagaaaggaggctgggcaagccacatccccttttcagrccttagtttccccaggggtaacacccaagtgttccacaagaaaaactaatgtccctcctggatctgacattcaggaaatgccattatccatctctgagctgctgttacagctgaggagatcacctcctttgcctgcatccccctcccacacccctgcccaggagtatcatatgtcaagacagaaccactgtggctgaagaatcagaggagattcccgactcccggcggaccccatactacatggaggtcaaacagtgcctctgcttaagctcagctaagagaagggcatttccatcaattttataggcctaacttcctccacctgttctttccccaccttcccacataagaaaaaaggtgaggagaaagaaaacaagagagttgccgctttcccctttgtccaagggcctttgtcagcctttgctattcctaactacctaatgccccacgtg

SEQ ID NO: 240259 - DNA, 492 bp, Homo sapiens
ttagcatctagggagttcacagtctgatgggggaggctgctagactggaagcagagacatatagcaataaacaacctgggatggccaagtggaattggactctgaacaagagcaacaacaatttgagtattttgtgattttcctttgggtaggggtggagttttagggtccaacttattgaagggatagagttgtcatataatggaatgaaamctcaacttggggggcctgggttcaaattctggctctgccatatcttggttaacaatgtgagtctttgtgttttgacctggtaaaataaaataatagcatgtacccaatagatgtattatgacctgatgttttcctggcagtccccaaaccgcttttcagatctgggagagtcttcagtggaaacagggagggttggaagggagagagagttcttcagagacatggaggatagtacagccaacttccccctgtccagggagctgccaggagggtttgatg

SEQ ID NO: 240260 - DNA, 563 bp, Homo sapiens
gtgttaaactgtgccaagctggattaaagaacaaaactgtgttcttgtaatttatcaacctgcttgggattgtctgcaggagagccggggcctccctggcaaccttccaatattaacagggcagccccaaaaacataygagattgcaaaataagttgggctctttagatttcactgcatttattattggcatgtcctatattaattcacccaccagcaggagctaagctacagttcacgtgcccagaaacaacctaaagaagcagaaagctgagcatctctgaacccctcttccttccatgtttcctgcctgggtcctctccccctcaacacatcccttcctctaccccattttggtgtaggacaacacagaggagcaggctccctcttgccttaacccagatctctaataaacttcctggggatgcaaagtctatttggccctctcatttcttcttcccagggactcacttcctattccttttctccaaaagtagtactctgttcccagctaccccattctttttcattctcctgttaaggcggctttagtcaaagaagcca

SEQ ID NO: 240261 - DNA, 537 bp, Homo sapiens
tacttggaacagtgcctggcacatattgaacaatatatacgtgtgagctattagtggtagtagtagaaatagtggtatttttctaagcatggagaggaccatacttaggaaaataccactgaggaccctcttaactgatactcctttctaacaaccatctcttaagttagacattaatttggggaatctccacatgatctcatttgtcccttgcaacaatcctaccaggcagtcagsatagacattatgattacaaccactttgcataaaggggaactgaggcacagatgttatgaagtggtttctggtctgatggggttttcattgtaccttacagccacactgcattcaggcgaggggtcacaagaatcttggaggagagggttttggatgatgatagctgataagttcaggactggccttcccacctggcccttatgcatgttgggatcatactgctgggaaaataaaccacggtggggaaggaagatctcattccaggcttgcataactagacggggtccacatgaaatggca

SEQ ID NO: 240262 - DNA, 537 bp, Homo sapiens
tacttggaacagtgcctggcacatattgaacaatatatacgtgtgagctattagtggtagtagtagaaatagtggtatttttctaagcatggagaggaccatacttaggaaaataccactgaggaccctcttaactgatactcctttctaacaaccatctcttaagttagacattaatttggggaatctccacatgatctcatttgtcccttgcaacaatcctaccaggcagtcagcatagayattatgattacaaccactttgcataaaggggaactgaggcacagatgttatgaagtggtttctggtctgatggggttttcattgtaccttacagccacactgcattcaggcgaggggtcacaagaatcttggaggagagggttttggatgatgatagctgataagttcaggactggccttcccacctggcccttatgcatgttgggatcatactgctgggaaaataaaccacggtggggaaggaagatctcattccaggcttgcataactagacggggtccacatgaaatggca

SEQ ID NO: 240263 - DNA, 537 bp, Homo sapiens
tacttggaacagtgcctggcacatattgaacaatatatacgtgtgagctattagtggtagtagtagaaatagtggtatttttctaagcatggagaggaccatacttaggaaaataccactgaggaccctcttaactgatactcctttctaacaaccatctcttaagttagacattaatttggggaatctccacatgatctcatttgtcccttgcaacaatcctaccaggcagtcagcatagacattatgattacaaccactttgcataaaggggaactgaggcacagatgttatgaagtggtttctggtctgatggggttttcattgtaccttacagccacactgcattcaggcgaggggtcacaagaatcttggagsagagggttttggatgatgatagctgataagttcaggactggccttcccacctggcccttatgcatgttgggatcatactgctgggaaaataaaccacggtggggaaggaagatctcattccaggcttgcataactagacggggtccacatgaaatggca

SEQ ID NO: 240264 - DNA, 488 bp, Homo sapiens
taaaagccaaagctctctcaatgacctgcaagaccctacgtgaccgccatctccaccgccatggcttccctatcctctttgtcttcctcctccccctcacccctctatggccacagtggcctcctggctgtccctcctgcacaccatgcacatacccctcaccttacaggtgaggcccatatatccggacgagacaaggatgtgaggcatcactcaaagcttgaagagaagtcagccagatcgaagccagggaagccgggaagtcagggagggaacagagggccagaaagtcaaggartctcccctgccccaggcaggttggcagtagcaggagcttaatgcccattctctgagcccaggagcaagtctctggtggcaggcttctctgatgttccagtcctgacagggctaatgggtgctatgagcaaacccaggcctggctgtgaggggcagctgctaagagtgggccatatgctgtggcctgtgcc

SEQ ID NO: 240265 - DNA, 587 bp, Homo sapiens
gtgttatctcatttggcccagtgacacatagtctgttgttcctctgggcttcaaatggccccttgagcccctgaagcaacaggaccatggtaacaaaaggaaagctcacacctactgagacaccttgcgtcacagtgcatgtttgcacactcagtctccctaacgccattctgatggcagatttgctaacttggccyagtgcctgtgtgtctctccttcccttattacacactcatcttccagacaggtgcattcacatccactgcaggccctgcaccttacactcagccccagtttctgcccatcatacagaggacagagtcacaaacatgacacaggctcagggaaggcatgagtggctgtcatccctgattccctcttttttctttgaaacccctgtggggtcccacatagatgcagctgcctggttctaagctagtgcttttcaaactgttgtgctcccaggattccttcataggaagggtctctggagtagggggcaggccagggccctggaaattctgtgcaggtggaaacagcaaaatttatacggtcccctcgctagcccctgcttgctggttccatcc

SEQ ID NO: 240266 - DNA, 587 bp, Homo sapiens
gtgttatctcatttggcccagtgacacatagtctgttgttcctctgggcttcaaatggccccttgagcccctgaagcaacaggaccatggtaacaaaaggaaagctcacacctactgagacaccttgcgtcacagtgcatgtttgcacactcagtctccctaacgccattctgatggcagatttgctaacttggcccagtgcctgtgtgtctstccttcccttattacacactcatcttccagacaggtgcattcacatccactgcaggccctgcaccttacactcagccccagtttctgcccatcatacagaggacagagtcacaaacatgacacaggctcagggaaggcatgagtggctgtcatccctgattccctcttttttctttgaaacccctgtggggtcccacatagatgcagctgcctggttctaagctagtgcttttcaaactgttgtgctcccaggattccttcataggaagggtctctggagtagggggcaggccagggccctggaaattctgtgcaggtggaaacagcaaaatttatacggtcccctcgctagcccctgcttgctggttccatcc

SEQ ID NO: 240267 - DNA, 587 bp, Homo sapiens
gtgttatctcatttggcccagtgacacatagtctgttgttcctctgggcttcaaatggccccttgagcccctgaagcaacaggaccatggtaacaaaaggaaagctcacacctactgagacaccttgcgtcacagtgcatgtttgcacactcagtctccctaacgccattctgatggcagatttgctaacttggcccagtgcctgtgtgtctctccttcccttattacacactcatcttccagacaggtgcattcacatccactgcaggccctgcaccttacactcagccccagtttctgcccatcatacagaggacagagtcacaaacatgacacaggctcagggaaggcatgagtggctgtcatccctgattcccycttttttctttgaaacccctgtggggtcccacatagatgcagctgcctggttctaagctagtgcttttcaaactgttgtgctcccaggattccttcataggaagggtctctggagtagggggcaggccagggccctggaaattctgtgcaggtggaaacagcaaaatttatacggtcccctcgctagcccctgcttgctggttccatcc

SEQ ID NO: 240268 - DNA, 576 bp, Homo sapiens
gagcagcataggaggtgagcatgcaggtctgcaaccagacctcccaaattcagatccaggctctaccattcactaagccgggtgagcttggcaacttacttaatcctctatacctcagttttcccctctggaaagtgggatcatagtagtatttatttcatagaggtgttggaagaactcattgaacaaatatttattggtcaccagctggagagagagcagggaacagaataaaattagcataggattaaataagatgttacatgaaaaatgcttagtacagggccaagttcatagcayacagtaagtgtccacaatggttcttattgttgtctaattgaagcctattatttgacagtgaagaaactgaggcccagagggagctaggcattcacccaaggtcacacagcaaattagagaccagactgggactagcatccaggtttcctgatgttcaagccgtgcacagggcgttttatacttcaccaactacttctacttggaaagggggtgaactgggagatgaggagtcagagaaagtgggtggggagcaggaggaaaacaggcctgatctgc

SEQ ID NO: 240269 - DNA, 619 bp, Homo sapiens
ttggtttatcagagtgtgtttacagtaagtgggaaataactctaagtatggtttctaagctcaggatagtcagttcagctcggtttgaaggcagaggattgagctcttgctttgggtcacatactgtttttggctctgggaatgtatgaatgaggcatagtccttgttcccaagaagctcacacttactgggaaagacagccatttgcatctgttggtcccctgggtttactacgttctgtgtctggagtttgctgtgggtggtgttgagtgtatcaagggtagagaagagccctgggcttcaggggaggctttcagaggcagtgacacctagccaagtgctgagaacaaacaggaaaaacagcagttgatggggctgtttctgcagagagggcagtatgccaaagtcaggggtctgggggacacagtcagccamgtgctggaagggggtggtaggggagggctaagcaggagccaggctgggggggcttttatattccatgcccaagggtttgggcttcatcctgaacaccaaggatttaatcaggagagtgacattaattagattcgagtctagcccagggcttttcaacctgtctggtgagggcctgggttttaag

SEQ ID NO: 240270 - DNA, 619 bp, Homo sapiens
ttggtttatcagagtgtgtttacagtaagtgggaaataactctaagtatggtttctaagctcaggatagtcagttcagctcggtttgaaggcagaggattgagctcttgctttgggtcacatactgtttttggctctgggaatgtatgaatgaggcatagtccttgttcccaagaagctcacacttactgggaaagacagccatttgcatctgttggtcccctgggtttactacgttctgtgtctggagtttgctgtgggtggtgttgagtgtatcaagggtagagaagagccctgggcttcaggggaggctttcagaggcagtgacacctagccaagtgctgagaacaaacaggaaaaacagcagttgatggggctgtttctgcagagagggcagtatgccaaagtcaggggtctgggggacacagtcagccaagtgctggaagggggtggtaggggagggctaagcaggagccaggctggrggggcttttatattccatgcccaagggtttgggcttcatcctgaacaccaaggatttaatcaggagagtgacattaattagattcgagtctagcccagggcttttcaacctgtctggtgagggcctgggttttaag

SEQ ID NO: 240271 - DNA, 418 bp, Homo sapiens
ggtagccagcgctaaccaaagtttatttatttattgagacagagtcttgctcttgttgcctaggctgaagtggaatggcgtgatcttggcttactataacctccgccccccaggttcaagctattctcctgcctcagcctcctgagtagctggaattacaggtgtctgccaccatgcctggctaatttttgtatttttagtagagacagggtttcaccatgttggccaggctggtctcgaacttctgacctcaggtaatctgcccgcctcggyctcccaaagtgctgggattacaggcatgagccaccacacctggcctaaccaaaggattttatttgctctccctggaacgtgaagtgccctcaatcctgactggctgaattcaggttggcatcagctgtcgtcaggatgacagcaa

SEQ ID NO: 240272 - DNA, 605 bp, Homo sapiens
aattctgaagatattcccctattttagggttaaattaaaagcacactcacattttgcttcctattagcaccatacaactggcaagaggagaaggaggttgtgaaattcaaatcaagaaatgttttcacttgctggaaactatggtaaagctctgagggaaaaaagaatgaaaagctctttcttaagaaaaaaaaagcttggattttccctacttagagtggactattgagtatgtaaataaattggttaacctctctgatactatgcaaagaaacctcacccacacagtagacttggggatttttttaaatggtggtagtgcacagattgtatccttaatttcaacctaagcaacgcatgtagagtgcccatcagatagtaggtgtactgctaagcccctgacaatacacacttgataatgaaagaaattaaatgaaaaatcgttctccaaactgatgaccaaattagatcttatcaattyacggacaaagtcaggagagagaaagaggaaactagtatgttcacacatacctcagtgatggttcaaagttcagattaaaatctacatcctttttcaagaagtgctgtgctgatatttggtaccg

SEQ ID NO: 240273 - DNA, 512 bp, Homo sapiens
tggaacttgatgttaaaaaataattttaaaaatcaattttaaagatgctcatgcctgtaatcccagcactttgggaggccgaagcgggtagatcacctgaagttrggagttcaagaccagcctgaccaacatggagaaaccctgtctctactaaaaatacaaaattagctgggcgtggtggcacttgcctgtaatcccatctactcgggaggctgaggcaggagaatcacttgaacccagtaggcggaggtcatggtgagctgagattgtgccattgtactccagcctgggcaataagagtgaaactccgtcccgggagaaaaaaaaatcctcctttggtgcctctgtgggccattctagattatggtaaatagaattaagtacacaggtaaccttctttatgtccttcattatttttctgaacctaatttcacatgttatgttcttatgttgttattttgagacaaggtcatgctgtgtcaccaagtctggagtgcactgatgcaattact

SEQ ID NO: 240274 - DNA, 527 bp, Homo sapiens
aactatgaagagcttttcaatactcagctagtaacaaaacattatttccactttgatgagcagcaatatattattgaaataggcgccaaagcaatggctgaatgtcgcaataggaagaaaatgtaaacatctatatgtgcatgcagggtcttaggtcttagctgattccagctgctggtgtctggctttctctggcatcatggaacccaaaagtccaaataactaagatttttcactggttgttgtacacacacagcttcagactgtacagaaaattctggtacctcttatttgctattatgtgtcaggccaacaatatgacacatagaaaactagtataatccactgwgtgaccttgttaggtagacagaccaaaataaatggaataaaccagctgaatcttttagactcaatctaccataatcaaagcatgtactaaggatcctcttagcacacacccagactgataaattaataaaaccagtcccttcctcttgccacctgacataaaggcaggaattacaata

SEQ ID NO: 240275 - DNA, 583 bp, Homo sapiens
gaattctaggggataggcacaagagaacaagtttcaactttgccaaaagccttaaatctatatcccactgtcctatttctaatcactcctacattctgtctctttttctttttctttttttttttttttttttttttttgagatggagtctcactctgtcaccaggctggagtgcagtactgtgatctcgcctcactgcaacctccacctcccggattcaagtgattctcctgcctcagcctctcgagcagctggtactacaggcgctcactaccacacccagctaatttttatatttttagtagagacagagtttcactacgttggccaggatsgtctggatctcttgacctcgtgatctgcctgcctcagcctcccaaagtgctgggattacaggcgtgatctgtttcattttataagaagctaagaaggcccatttctgagtgctggaaatgcattatcttacctcagactgagcacattcaaatttgaccaaagttgctgcaagttcacttcgagcattttgagccacattccgatagtggtttaactgctcccgcgtgaccgggacttccgaaagatg

SEQ ID NO: 240276 - DNA, 535 bp, Homo sapiens
aaattaccaacataaagaaattcataggaaactaaataataatagagattttgtatactattgaagttgtttcaatttactctaaattgttccaaattaagaatgttaattgtaaatccccatggtaaccactaagttaatatcttttgaaaatacagaaaaggaaagcagagggtaaacacagtgatatgctacaaaatagcaactaaacacaaaagaaggcrataattgaggaaattaggaacaaaggaggtataagacatacagaaaacaaaagcaaaatggtaggagtaagcccctctttatcagtaattacattaaatacaaatgaattaaactctccaatccaaagaaagagattgacagaatggatttttaaaaaatgatccaactatattgtccacaagatactcactttagaacaaaatacacaatgagttgaaatgaaaggatgggagaaaatattccatgtaagtaataaccaaaggagatctgaggcaaatatacttatatcagacaaaatagactttaagtc

SEQ ID NO: 240277 - DNA, 535 bp, Homo sapiens
aaattaccaacataaagaaattcataggaaactaaataataatagagattttgtatactattgaagttgtttcaatttactctaaattgttccaaattaagaatgttaattgtaaatccccatggtaaccactaagttaatatcttttgaaaatacagaaaaggaaagcagagggtaaacacagtgatatgctacaaaatagcaactaaacacaaaagaaggcaataattgaggaaattaggaacaaaggaggtataagacatacagaaaacaaaagcaaaatggtaggagtaagcccctctttatcagtaattacattaaatacaaatgaattaaactctccaatccaaagaaagagattgacagaatggatttttaaaaaatgatccaactatattgtccacaagatactcactttagawcaaaatacacaatgagttgaaatgaaaggatgggagaaaatattccatgtaagtaataaccaaaggagatctgaggcaaatatacttatatcagacaaaatagactttaagtc

SEQ ID NO: 240278 - DNA, 478 bp, Homo sapiens
aaatttatgtttttaatttgttatatatgtatatttttatcatactttaagttctagggtacatgtgcacaatgtgcaggaataaaatttatgtttttaaaatttattctacattatgaattctacattagaaaaataaaccatagcctcatcacaggcacttaaatacactgaagctgccaaaacaatctatcgttttgcctacgtacttatcaacttcctcatagcaaactgggagaaaaaagcaatggaatgaataaaatgatagccacaaaaatcraggtgggagaaatacttattatatgtccataaaaaattttaattaatgcaaagtattaacaccaatgattgcagtaatacagatcttacaaatgatagttttagtctgaacaggactatccaaaagttaattttctatagtaacagtttttaaataaaatatcaattcctgaaacacataaaatggtccatgagtata

SEQ ID NO: 240279 - DNA, 478 bp, Homo sapiens
aaatttatgtttttaatttgttatatatgtatatttttatcatactttaagttctagggtacatgtgcacaatgtgcaggaataaaatttatgtttttaaaatttattctacattatgaattctacattagaaaaataaaccatagcctcatcacaggcacttaaatacactgaagctgccaaaacaatctatcgttttgcctacgtacttatcaacttcctcatagcaaactgggagaaaaaagcaatggaatgaataaaatgatagccacaaaaatcaaggtgggagaaatacttattatatgtccataaaaaattttaattaatgcaaagtattaacaccaatgattgcagtaatacagatcttacaaatgatagttttagtctgaacaggactatccaaaagttaattttctatagtaacagtttttaaataaaatwtcaattcctgaaacacataaaatggtccatgagtata

SEQ ID NO: 240280 - DNA, 611 bp, Homo sapiens
ggatgaatatccaattttccattatgtacttattgtacattgcatgcctgtaccaaaatatttcatgtaccycataaatgtatacacctgctatgtacccacaaaaattaaatttaaaaacaatacattgttatccactatagtcaccatattgcacaatagatctgttgaattcattcctcctgtacaatgcaattttgtaccctttgaccaacatctacccaatcctcctggtaaccatcattctactctgtacttctatgtgttcagccttcttagacctccacatacaagtgagattatgcagtatctggctttctgtgcctggattattttactcagtataatgtcctcccggttcattcatgttgtcacaaatgatactttttttattttttaaggttgtatactattctattgtgtatgtgtaccacattttcttcatccactcatgtgtcgatggatacttaagttaattccacatcttggctgttgtgaataatgctacaataaatatgggagtacagataactcattgacacactgatttgatatctttttaatatatgcccagaaatagcattactgaatcatatggtaattctattttt

SEQ ID NO: 240281 - DNA, 580 bp, Homo sapiens
gcatttctctgatgatcagtgataattagcatttttatatatctgttggccatttgtatgtcttcttttgagaaatgtctatttagatcctttgtcaatttttcattagggttccttgttttcttattattgtgttgtttgagttcctaagatattttggacattagcctcttatcaaatgtatagtttgcagataatttctcccattttgtaggttatcacttcactctgttgactttcttttgctgtgcagaagctttttaggttgatgctattccatttgtgttttgttgcttttcttgcctgtgctttagagtcatatcataaaatattattgcccagaccaatgtcttggagttattcccctgttttcttctaggagttctatagtgctaggtcttacatttaagtctaacttattttgagtttatatttttatatggtatgaaataagggcctaakatcaatcttgtggacattcagttttctcaacaccattttttgaagagactgttctttccccatgtgtgttcctggcacctttgttgaaagtcaattgactataatatgtagatttatt

SEQ ID NO: 240282 - DNA, 569 bp, Homo sapiens
gactgttctttccccatgtgtgttcctggcacctttgttgaaagtcaattgactataatatgtagatttatttatgggctctttattctgtgtaattggtctatgtgtctgcgtttatgccagtaccatggtgtttcgattgctatagctatgtagtataatttgaagtcaggtaatgtgatatctcctgccttgcttttttygatcaagattattttggcttttcagagttttttgtgattccatacagatttgagagttgtttttctatttctgtgggaaaatgtcataggaattttgatagagattgcattcaatatgtacatcactttggatagtatggacatttcaaacatattactttttccaatccatgaacatgagatatctttccatttatttgtggcttcttcaatcgctttcatcaatgttttgtagttttcagtgtaaagatcattcacctctttgtttaaatttacatctaagtattttttgttgctattataaataggattgttttcttgatttctttttttgtatagtttgttgttgatgtgtagaaatgctac

SEQ ID NO: 240283 - DNA, 569 bp, Homo sapiens
gactgttctttccccatgtgtgttcctggcacctttgttgaaagtcaattgactataatatgtagatttatttatgggctctttattctgtgtaattggtctatgtgtctgcgtttatgccagtaccatggtgtttcgattgctatagctatgtagtataatttgaagtcaggtaatgtgatatctcctgccttgctttttttgatcaagattattttggcttttcagagttttttgtgattccatacagatttgagagttgtttttctatttctgtgggaaaatgtcataggaattttgatagagattgcattcaatatgtacatcactttggatagtatggacatttcaaacatattactttttccaatccatgaacatgagatatctttccatttatttgtggcttcttcaatygctttcatcaatgttttgtagttttcagtgtaaagatcattcacctctttgtttaaatttacatctaagtattttttgttgctattataaataggattgttttcttgatttctttttttgtatagtttgttgttgatgtgtagaaatgctac

SEQ ID NO: 240284 - DNA, 569 bp, Homo sapiens
gactgttctttccccatgtgtgttcctggcacctttgttgaaagtcaattgactataatatgtagatttatttatgggctctttattctgtgtaattggtctatgtgtctgcgtttatgccagtaccatggtgtttcgattgctatagctatgtagtataatttgaagtcaggtaatgtgatatctcctgccttgctttttttgatcaagattattttggcttttcagagttttttgtgattccatacagatttgagagttgtttttctatttctgtgggaaaatgtcataggaattttgatagagattgcattcaatatgtacatcactttggatagtatggacatttcaaacatattactttttccaatccatgaacatgagatatctttccatttatttgtggcttcttcaatcgytttcatcaatgttttgtagttttcagtgtaaagatcattcacctctttgtttaaatttacatctaagtattttttgttgctattataaataggattgttttcttgatttctttttttgtatagtttgttgttgatgtgtagaaatgctac

SEQ ID NO: 240285 - DNA, 595 bp, Homo sapiens
tttccaatccatgaacatgagatatctttccatttatttgtggcttcttcaatcgctttcatcaatgttttgtagttttcagtgtaaagatcattcacctctttgtttaaatttacatctaagtattttttgttgctattataaataggattgttttcttgatttctttttttgtatagtttgttgttgatgtgtagaaatgctactgaattttgtatgttcacattgtatcctgcaactttactaaattcatttatgaattctaaattttttggcagagttattggtgttttctatatataagatcatgtcaactgcaaacagaaacaatttaacttcttcctttccaattttcatgccttttatttctttcttttgcctaattgctctggctaggacatccagtactatgttgaatagaagttctgagagtgggcacccttgtatgaagtttyccacaacatctcttatctttttattagctatatattaatacggatgtttcttcttcatcaggagtttgaaaaatatgtcttttctctatattgttcttaatcagtcttcctagaagtatttcaatttcaaaaagtagcaa

SEQ ID NO: 240286 - DNA, 480 bp, Homo sapiens
cttcctagaagtatttcaatttcaaaaagtagcaacaactgtgggagttcagtcaggctggtgggaaaaattttaaagatagttwtaagaaatcgacacaaaccttcatggaaggctgggggtgttgtatagcttcagtaatagatctgaatgaaggcggcctaatccttccttgagtaaacagcttaaagtaggtgcaaaggaatgtaagggagtttatctaaataacttgtttactcatgtggtcctgaagccaacctttgatcattcacaggcaggatggctctctctcgggggagggtgaccaggttaattaccctctatttgtgttgactaaaagcccctgtcatttaatgttttttcaataaatgctggcagggctagctagtcagggctcgtggctgccagaactctttctgtgcacggcccagccccctagcggctctttcactgaataattggtgtctgagtacattattc

SEQ ID NO: 240287 - DNA, 480 bp, Homo sapiens
cttcctagaagtatttcaatttcaaaaagtagcaacaactgtgggagttcagtcaggctggtgggaaaaattttaaagatagttttaagaaatcgacacaaaccttcatggaaggctgggggtgttgtatagcttcagtaatagatctgaatgaaggcggcctaatccttccttgagtaaayagcttaaagtaggtgcaaaggaatgtaagggagtttatctaaataacttgtttactcatgtggtcctgaagccaacctttgatcattcacaggcaggatggctctctctcgggggagggtgaccaggttaattaccctctatttgtgttgactaaaagcccctgtcatttaatgttttttcaataaatgctggcagggctagctagtcagggctcgtggctgccagaactctttctgtgcacggcccagccccctagcggctctttcactgaataattggtgtctgagtacattattc

SEQ ID NO: 240288 - DNA, 352 bp, Homo sapiens
agaccatcaggacaaacacgtggatacatggaggggaacaacacacaccaggacctctcagggggacagggggtaggagaccatsaagacaaacacgtgggtacatggaggggaacaacacacaccagggcctctcagggggacagggggtaggagaccatcaggacaaacacgtgggtacatggaggggaacaacacacaccaggacctctcagggggacagggggtaggagaccatgaagacaaacacgtgggtacatggaggggaacaacacacaccagggcctctcagggggacagggggtaggagaccatcaggacaaacacgtgggtacatggaggggagcaacac

SEQ ID NO: 240289 - DNA, 352 bp, Homo sapiens
agaccatcaggacaaacacgtggatacatggaggggaacaacacacaccaggacctctcagggggacagggggtaggagaccatgargacaaacacgtgggtacatggaggggaacaacacacaccagggcctctcagggggacagggggtaggagaccatcaggacaaacacgtgggtacatggaggggaacaacacacaccaggacctctcagggggacagggggtaggagaccatgaagacaaacacgtgggtacatggaggggaacaacacacaccagggcctctcagggggacagggggtaggagaccatcaggacaaacacgtgggtacatggaggggagcaacac

SEQ ID NO: 240290 - DNA, 352 bp, Homo sapiens
agaccatcaggacaaacacgtggatacatggaggggaacaacacacaccaggacctctcagggggacagggggtaggagaccatgaagacaaacacgtgggtacatggaggggaacaacacacaccagggcctctcagggggacagggggtaggagaccatcaggacaaacacgtgggtacatggaggggaacaacacacaccaggacctctcagggggacagggggtaggagaccatsaagacaaacacgtgggtacatggaggggaacaacacacaccagggcctctcagggggacagggggtaggagaccatcaggacaaacacgtgggtacatggaggggagcaacac

SEQ ID NO: 240291 - DNA, 352 bp, Homo sapiens
agaccatcaggacaaacacgtggatacatggaggggaacaacacacaccaggacctctcagggggacagggggtaggagaccatgaagacaaacacgtgggtacatggaggggaacaacacacaccagggcctctcagggggacagggggtaggagaccatcaggacaaacacgtgggtacatggaggggaacaacacacaccaggacctctcagggggacagggggtaggagaccatgargacaaacacgtgggtacatggaggggaacaacacacaccagggcctctcagggggacagggggtaggagaccatcaggacaaacacgtgggtacatggaggggagcaacac

SEQ ID NO: 240292 - DNA, 398 bp, Homo sapiens
ttctctaacaactgtcttcagtgaaacgctcccaccttgtggatttttaggttattgaaattaaccagtcttctgggtgcagcacaccaacatggcacatgtatacatatgtaacaaacctgcactttgtgcacatgtaccctaaaacttaaagtataataaaaaataaaataaaaagctacacaaattwaaaaaaaaagaaatcaacctaattcctagattaccacctcttgattcaaatgctttaaatctaggcttttcatctgagtctttctttttagttattctgtttatcttcaaaacactcctgctttgaatcattcaaaatctacctccctccctctgtttgactaccatcaatttttttgctcattcctaatgcattaatctattagctg

SEQ ID NO: 240293 - DNA, 571 bp, Homo sapiens
ggcacatgtatacatatgtaacaaacctgcactttgtgcacatgtaccctaaaacttaaagtataataaaaaataaaataaaaagctacacaaattaaaaaaaaaagaaatcaacctaattcctagattaccacctcttgattcaaatgctttaaatctaggcttttcatctgagtctttctttttagttattctgtttatcttcaaaacactcctgctttgaatcattcaaaatctacctccctccctctgtttgactaccatcaatttttttgctcattcctaatgcattaatctattagctgtgaatatccaaaaaccctcatttcactgaatctttgacagacccctttgcatcctcttgttcttctaattatttcctcagamactttatgttctcttttctttacaagcatgccatagtttatatacaatgtgtgtattgtttttatatatacctatatatagcctctttttaaaagcactgtacaccatgctttgaaatatattctaaaatcaggtagcatgaaaatggaaacataacatactaaaacatatgggatgcaacaaa

SEQ ID NO: 240294 - DNA, 571 bp, Homo sapiens
ggcacatgtatacatatgtaacaaacctgcactttgtgcacatgtaccctaaaacttaaagtataataaaaaataaaataaaaagctacacaaattaaaaaaaaaagaaatcaacctaattcctagattaccacctcttgattcaaatgctttaaatctaggcttttcatctgagtctttctttttagttattctgtttatcttcaaaacactcctgctttgaatcattcaaaatctacctccctccctctgtttgactaccatcaatttttttgctcattcctaatgcattaatctattagctgtgaatatccaaaaaccctcatttcactgaatctttgacagacccctttgcatcctcttgttcttctaattatttcctcagacactttatgttctcttttctttacaagcatgccatagtttatatayaatgtgtgtattgtttttatatatacctatatatagcctctttttaaaagcactgtacaccatgctttgaaatatattctaaaatcaggtagcatgaaaatggaaacataacatactaaaacatatgggatgcaacaaa

SEQ ID NO: 240295 - DNA, 571 bp, Homo sapiens
ggcacatgtatacatatgtaacaaacctgcactttgtgcacatgtaccctaaaacttaaagtataataaaaaataaaataaaaagctacacaaattaaaaaaaaaagaaatcaacctaattcctagattaccacctcttgattcaaatgctttaaatctaggcttttcatctgagtctttctttttagttattctgtttatcttcaaaacactcctgctttgaatcattcaaaatctacctccctccctctgtttgactaccatcaatttttttgctcattcctaatgcattaatctattagctgtgaatatccaaaaaccctcatttcactgaatctttgacagacccctttgcatcctcttgttcttctaattatttcctcagacactttatgttctcttttctttacaagcatgccatagtttatatacaatgtgtgtattgtttttatatatacctatatatagcctctttttaaaagcactrtacaccatgctttgaaatatattctaaaatcaggtagcatgaaaatggaaacataacatactaaaacatatgggatgcaacaaa

SEQ ID NO: 240296 - DNA, 539 bp, Homo sapiens
gcctgtgtgtgtaccaacaatcaaagctacatctgtgacacaacaggacactgctatgggcagtctcagtgttgtaactactactatgaacattggtggttctggctsgcgtggaccatcaccatcatcctgagctgctgctgtgtctgccaccacagccaagccagccctcaagtccagcagtagcaacatgaaatcaacctgcctgcctatccagaagcccgcaattactcagtgctaccattttatttcaccaaactatttattaccttcttatgaggaagtggtgaactaacctccacctgtttccctccctgtctgtccattgtggatgagctctgagccctgttttcctgtgaagattctttgaattgcggccattctattcacatgaactctcacatctggagcacagatggccctctcaaggtaatttattgtatgcattgactgtttaccaaacaaatgtcttactatgtactcaggtatattcagcagcattgtcgactgcagtcccctatgcttgccagaagatactg

SEQ ID NO: 240297 - DNA, 539 bp, Homo sapiens
gcctgtgtgtgtaccaacaatcaaagctacatctgtgacacaacaggacactgctatgggcagtctcagtgttgtaactactactatgaacattggtggttctggctcgcgtggaccatcaccatcatcctgagctgctgctgtgtctgccaccacagccaagccagccctcaagtccagcagtagcaacatgaaatcaacctgmctgcctatccagaagcccgcaattactcagtgctaccattttatttcaccaaactatttattaccttcttatgaggaagtggtgaactaacctccacctgtttccctccctgtctgtccattgtggatgagctctgagccctgttttcctgtgaagattctttgaattgcggccattctattcacatgaactctcacatctggagcacagatggccctctcaaggtaatttattgtatgcattgactgtttaccaaacaaatgtcttactatgtactcaggtatattcagcagcattgtcgactgcagtcccctatgcttgccagaagatactg

SEQ ID NO: 240298 - DNA, 385 bp, Homo sapiens
gaaaaaagggcagcagccccagtcagagacctatagataaaacccccatctccctggaacagagcacctaggggaaagggcgsctgtgggcacagcttcagcagacttaaagcatctttgaaaagcctgatggctctgaagagagcagcagatctcccagcacagtattcgagctctgataagggtcagactgcctcctcaagtgggtccctgacccccgtgtatcctgactgggagacacctcccagtaggtgccaacaggcacctcatacaggagagctctggctggcatctggtgggtgcccctcttggacaaaacttccagaggaagaaacaggcagcaatctttgctgttctccagcctccgctggtgatgcccaggcaa

SEQ ID NO: 240299 - DNA, 356 bp, Homo sapiens
gcagcagccccagtcagagacctatagataaaacccccatctccctggaacagagcacctaggggaaagggcgcctgtgggcacagcttcagcagacttaaagcatctttgaaaagcctgatggctctgaagagagcagcagatctcccagcacagtattcgagctctgataagggtcagactgcctcctcaagtgggtccctracccccgtgtatcctgactgggagacacctcccagtaggtgccaacaggcacctcatacaggagagctctggctggcatctggtgggtgcccctcttggacaaaacttccagaggaagaaacaggcagcaatctttgctgttctccagcctc

SEQ ID NO: 240300 - DNA, 385 bp, Homo sapiens
gaaaaaagggcagcagccccagtcagagacctatagataaaacccccatctccctggaacagagcacctaggggaaagggcgcctgtgggcacagcttcagcagacttaaagcatctttgaaaagcctgatggctctgaagagagcagcagatctcccagcacagtattcgagctctgataagggtcagactgcctcctcaagtgggtccctgacccccgtgtatcctgactgggagacacctcccagtaggtgccaacaggcacctcatacaggagagctctggctggcatctggtgggtgcccctctkggacaaaacttccagaggaagaaacaggcagcaatctttgctgttctccagcctccgctggtgatgcccaggcaa

SEQ ID NO: 240301 - DNA, 587 bp, Homo sapiens
gtccagggctcaagtgattctcctgcttcagcctctcaagtagctggaattacagggttcccaccaccacatttggctaatttcttttattttttgtatagatggggtcttcttatgttgcccaggttggtctcaaattcctaggctyaagtgattccgcccacctctgcctcccaaagtgctgggattacgggcatgagccagcgcatctggccaccttattttctattactggctcaatgtaatggctccatctcaggaacagccaatgaaagagatgcacaggacaaggtaagtggggaggggcacagagcttccatgccctctgttgggcacactaccctcccaggacctccttgtgtttagcaacacagaagctctccaaaccctgctgtttgggtgtttatggaggcatgattgataaaatcattggccattggtagttaagtcaatctccagttccttttgcctcctggagttcagcaggtgaggctgaaagttccaagcctcaaaaaatgtggttggggccaggtgcggtggctcactcctgtaatcctagcagtttggaaggctgaggcacatggacc

SEQ ID NO: 240302 - DNA, 587 bp, Homo sapiens
gtccagggctcaagtgattctcctgcttcagcctctcaagtagctggaattacagggttcccaccaccacatttggctaatttcttttattttttgtatagatggggtcttcttatgttgcccaggttggtctcaaattcctaggcttaagtgattccgcccacctctgcctcccaaagtgctgggattacgggcatgagccagygcatctggccaccttattttctattactggctcaatgtaatggctccatctcaggaacagccaatgaaagagatgcacaggacaaggtaagtggggaggggcacagagcttccatgccctctgttgggcacactaccctcccaggacctccttgtgtttagcaacacagaagctctccaaaccctgctgtttgggtgtttatggaggcatgattgataaaatcattggccattggtagttaagtcaatctccagttccttttgcctcctggagttcagcaggtgaggctgaaagttccaagcctcaaaaaatgtggttggggccaggtgcggtggctcactcctgtaatcctagcagtttggaaggctgaggcacatggacc

SEQ ID NO: 240303 - DNA, 587 bp, Homo sapiens
gtccagggctcaagtgattctcctgcttcagcctctcaagtagctggaattacagggttcccaccaccacatttggctaatttcttttattttttgtatagatggggtcttcttatgttgcccaggttggtctcaaattcctaggcttaagtgattccgcccacctctgcctcccaaagtgctgggattacgggcatgagccagcgcatctggccaccttattttctattactggctcaatgtaatggctccatctcaggaacagccaatgaaagagatgcacaggacaaggtaagtggggaggggcacagagcttccatgccctctgttgggcacactaccctcccaggacctccttgtgtttagcaacacagaagctctccaaaccctgctgtttgggtgtttatggaggcatgattgataaaatcaytggccattggtagttaagtcaatctccagttccttttgcctcctggagttcagcaggtgaggctgaaagttccaagcctcaaaaaatgtggttggggccaggtgcggtggctcactcctgtaatcctagcagtttggaaggctgaggcacatggacc

SEQ ID NO: 240304 - DNA, 552 bp, Homo sapiens
aaatcaacacaggtgtctatcaactgacaaatggatgaagaaaatgtagtgtatatatacaatggaatactactcagccttaataggaaggaaaacctgatatatgtgacaacatgaattaacccagaagatatcacgctaagtgaaataagccaggcacgaaaagacaaatatcacatgatctcactgatatgtggaatctaaaaaagttgaattcatagaagtagagaatggaatggtgattatcagaggctagkagttgggggtagacatggaaaaggtagatgttgataaaagggttcaaagtttcagttagacaaagtttcagtgaactattgcacagaatggtgactgtaataaataacaaggtattgtatgtttcaaaatgactaacagagtagattttaaatgttttcaccacaaaaaagatatgtatgtcaataagatagacctaatctttccacaatttaaacatgtatcaaaacattacattgtaccccataaatagatacaattattatttgtcaatttaaaatttttcactaatttata

SEQ ID NO: 240305 - DNA, 594 bp, Homo sapiens
tgggggctcctgcacttcgacacaggcagcgggagggttttctccccattccctctgcactcccaacttgagctatactttttaagaaagtgattcaccctgcctttgcccccttccccagaacagaacacgttgatcgtgggcgatatttttcattgtgccaaaaagttgccatgaccgtcattaaacctgtttaacaccaaataataaggaaaataaaataaaaaattcgggcttggcgcagaaactcactccaaataaattacctaycaaaacatttacataatggtggaaatattccaaaattcaatattttgggatttatacacaaaagataaacaaattagaggccaagaggctgccggaagggaaaaacggggcctggaatggccgacgtgaggaatgagctgggcctaaagaggccactggcaggcaggagctggacctgccgaagtggccgaaaggcaggagctttggactggggaggccgcagtgaggcgagagctagctgggcgtggagagtccgctgtgaggccgaggccgaggccgggcccgtgcaggccttcgagaggcaggaggccgggcctgcaaagg

SEQ ID NO: 240306 - DNA, 557 bp, Homo sapiens
ttgaagttgctgtgagctgtgattgcaccagtgtactccagcctgggcaataaagcaagaccttgtttcaaaaagaaagaaagaaatgagcatggtgggaatggggacagatggcagtgttaagtagagtggtcagggttggcctcatagtgaatattragcaaaagtttgaagcaggtgatggagctggccaaggtgctgagggaagagcattgtaggctgagtcaacaggataaaggcattaggaggaaactctctggtgtgtctgaggctctggaaggaggccagtggagcaaagagatagagggagcgaagtcagcgaggaggccagggagttgctgggctgggatcggtacagatcgtgtaagccctgggacgctattgctggggctttggcttttactctgactaaaatgggaaccaccgagggcttctgagcagagaggcgacatgatccgtctcctgatttaaaagcacgacctggctgccgagttgagaaagactatgggaagatttgggtagaagcatgggggccaagctgtggcaacatcccggtg

SEQ ID NO: 240307 - DNA, 591 bp, Homo sapiens
aaaattataatgttcccaacacaaagaaaagataaatattcaaggtgatgaatatccaaattactctgatttgatcattacacattgtatacatgtatcaaaaatatcacatgtaccccaaaacatgtacaactatgatacatcaataaaaaacaacaaaaaaaccaaaagaatagaaatcaaaaataaatacataaatacataaaatagggataataatacctcccttgyttgcttgctcccttgctccatttgtaagaaataagtgatataatataggtaaaaatacttaacctcatgcctaccacatagtatagcacaataaatgttatttattataatctgaggcctacctacataagtgactttcaagtatagaaaattatttctcaaattttaaatactccctgattctcaggtatggtaattagacctggctttaggtaaagctctcatgtctacacttggatttaatcacttaagtatatttcccagtgccccccccaaaaaaaattgctcctaggtggacacactaatcaaagacttcctgagaaatgcaggaagaagttttgtcctctgaccacgctacgc

SEQ ID NO: 240308 - DNA, 591 bp, Homo sapiens
aaaattataatgttcccaacacaaagaaaagataaatattcaaggtgatgaatatccaaattactctgatttgatcattacacattgtatacatgtatcaaaaatatcacatgtaccccaaaacatgtacaactatgatacatcaataaaaaacaacaaaaaaaccaaaagaatagaaatcaaaaataaatacataaatacataaaatagggataataatacctcccttgtttgcttgctcccttgctccatttgtaagaaataagtgatataatataggtaaaaatacttaacctcatrcctaccacatagtatagcacaataaatgttatttattataatctgaggcctacctacataagtgactttcaagtatagaaaattatttctcaaattttaaatactccctgattctcaggtatggtaattagacctggctttaggtaaagctctcatgtctacacttggatttaatcacttaagtatatttcccagtgccccccccaaaaaaaattgctcctaggtggacacactaatcaaagacttcctgagaaatgcaggaagaagttttgtcctctgaccacgctacgc

SEQ ID NO: 240309 - DNA, 591 bp, Homo sapiens
aaaattataatgttcccaacacaaagaaaagataaatattcaaggtgatgaatatccaaattactctgatttgatcattacacattgtatacatgtatcaaaaatatcacatgtaccccaaaacatgtacaactatgatacatcaataaaaaacaacaaaaaaaccaaaagaatagaaatcaaaaataaatacataaatacataaaatagggataataatacctcccttgtttgcttgctcccttgctccatttgtaagaaataagtgatataatataggtaaaaatacttaacctcatgcctaccacatagtatagcacaataaaygttatttattataatctgaggcctacctacataagtgactttcaagtatagaaaattatttctcaaattttaaatactccctgattctcaggtatggtaattagacctggctttaggtaaagctctcatgtctacacttggatttaatcacttaagtatatttcccagtgccccccccaaaaaaaattgctcctaggtggacacactaatcaaagacttcctgagaaatgcaggaagaagttttgtcctctgaccacgctacgc

SEQ ID NO: 240310 - DNA, 634 bp, Homo sapiens
ctcacgcctgtcagcccagcactttgggaggccaaagcaagcaaatcgcttgagatcagcagttcaagaagtgtaacaaatcctctacaatataagtagagtgaaaagagatagctacagtgatgagggaaggcactatagtgatgtggcatttgagtatagccataaaagaggataaatattacaatacatgaatatagggtctaaagaagtcttttcaagtagattgtaaaatatttcaaaaatggtaagtttggtgtatgttgaagcatacagattgtctacatcctaaaaatcattttggtgaataaaggaaaataagaaaggtagtcaatattcatttgttgcctatcattagaaacttctcaaaggtatatgagaattattaaataaatttaggaagccagtgaaggtatgggtcccgggaattgaggatgaagccagtaattagggaagatgccccatctataagtgygatgtatcaaatggaggaaaagaaaaacggagggaaggagttcccttaagagaagattgaaatagagcagacttggggggctacacagaggaactgggactacacagttccagctttaaggctatagaaacagaaatagaaatactggtaagtaaaaac

SEQ ID NO: 240311 - DNA, 541 bp, Homo sapiens
taattcactcattgccagtcacagaccttggctcaccgatttactaagtatagattttatttctatccctcacctacctgttttgccaagggaactaagaaaagagcatcatcaaaaattcagataggtatagttctcacaagatgaaccagatccagtacggcatcactgcagacatacacacagagctgcataaaacaggaagagagctgctaatcacagccccagagggtagtggccaaagtgatgccttggagatccgagaatgccagactgagatcacacggsctggggaattaccgcctatggtcattttggttttcccgggatagccatgttaattgggtgaaataaagcatatttgattttcttatgacaaaaaagggcttttgccattgtctacagatgatactttaaatctttattttatgactaaaggtgaattccagagcaacattaaatgttgtccctttaaatttttaatcatttacataacgattaccataatattcaatttaaacataaaatgtaattgaaagta

SEQ ID NO: 240312 - DNA, 602 bp, Homo sapiens
gatttgatgtgagtcagagaagtttcccctaagaaagcaacactgaagctgagatctaaagggtaaacagcagttaactgagtggagaacaaaggttttcctgcagggggaacaatctgctccccgaggccagagtggggccttgggagttgtgcctgaaaccacattgtgaggaagtgaggggaagcattgtgcagataatgctgaaataagtagtggaagatgcttcctaagagaatgagaaatccaagactactaagcagaagaatgatttgaccagatttcacatttgtaaatatcactatggttacaatgtatagaatggattttaaggaattcaaattggatacaggtgagtcaattasaaagcaacatgcttgccaaggcaagaaatttgattacttaaactagatatgggagttttggaaataagtagataaatttgtcatatatttgagataataaatcaccatgacttgatggtagacttagttggagatgccctcactaatgcaccatctaatgcttcaagtctaataattattcaattcctccagagccaccaatccaatggttctaccatatttatgctgtcattcact

SEQ ID NO: 240313 - DNA, 621 bp, Homo sapiens
aatcatgcttttactttctgcttatgactcaattgtttgtactgacattaacatcccaaatccttagcatggcctacaaggccctgagcaatgtggcacctgctgaagcctgctgcctcatttaataactctttgtctctttcccagatccagccactctaacattttttagctcctggaccaagacaagctcttcccagaacctgacctttgtacctgttctttattcctggagtatttttcccctgacaaattacttatcatctatcataattcaggttaaatggcactaactcagggaaggcttccctaactgcctcccttctccaaccaaattaggaacaattatatggccacatagtatcgaatcaagtttataattttaaaataattgggagattttgttgtttaacacttgttttcactataagactgtaattacatgcaagtaagaaccatgcctgtttgttcactcctgccacagtcagaatagtgcctggaatatgcagtaagggctgaacaarcactaaataaatgaacaagtgaataaatggatattgtctcatttttagaacagagtactgaatggatcatgaacactatctggtatgtcacgtaggt

SEQ ID NO: 240314 - DNA, 554 bp, Homo sapiens
tgttttttgaccttatacatttgtgctttagtataacaaaatgatatagacaaaggtaacttttaatagaaccagtcactaaattaaaaaaatgacaaattcttctgcttagctaagcaacagagaaggtaaaatactaattcaattcatcaatttaagcaatactcattaagagccaagtatgtgcttactgaataagctgctaaggtttggtggttacagagtgtgcggtgaaatgatgtctacatcacagtccaacattcacagagtttaaaagcctaccaagaatcaagacagacacaaatacctaacatagacgtytgtatatgataagagagccagagtacaatttaggagaagaaattgtatggaaggaaggttcatttccattagaccagaaaagacagcacatttgaaggcctgaataagaaatattctggataagatattgtggctgctaccagaatggctcttgatgatctctacctcttggtatttatacccttatataatctctttcctatagtgtaagctggtcccaggtacttgtttct

SEQ ID NO: 240315 - DNA, 421 bp, Homo sapiens
aaatgttccctgtggagtttatagccagaatccagctctcaaacaggtttcagcctgaactcacacaatctgtgtggcttccaaatttgcaagctgagaatttaattcaaagtggtctcaggttgayagcagtccaaaatgctaggtaggaaaaaaaatcctctctggacaaataaatcatcaaagcaagctcataagagcaggtttcaaaggtcatgagcttctaacacacacacaaaaatcacacacacaaaatgggggtagcagcaacatgggtagcgtattcaaacttgaaaagactttaaatatttgtattattagatgtagattatgaaacacatattttaatgtggttaatttttttaaggaatcaaaactatgagtaaagaccaagaaaattgtgctggatggccacttccac

SEQ ID NO: 240316 - DNA, 565 bp, Homo sapiens
acaaatgtaattcattacattaactaattaaaggagctaaatcacatcaccaccacaataatgcagaaaaccacatttgatacaactcaatattcatgtctgcctaacaaacatctcatgatactaggaaaagaggaagggatayattattttcatgtataaagcactaaccattgtagcatgccaatatactcaaaattcaatgaaattcctatcaaaatcttagcattcctcttagtcctcaacaaagcatttctaaaatgtgtatagaagaccaaagggccaaaagagtcaacttctgaagaagcgcaaaaagaaagttgaggaaatcttaaaacatgttattgagcttaaagttgcaaaaataaactcatgtaccataattcatgagtagaaaaatagactagtggaataacataaaaataaaaacaatgcttacataaaatgttgtaactgatttggatgtcattagaaatcagtaagtaaatagatggacaatgtaatgaaagatgctaggcaaataatgtggtagggagaataatggccctcaaagatgcccatgcct

SEQ ID NO: 240317 - DNA, 577 bp, Homo sapiens
acaaatgtaattcattacattaactaattaaaggagctaaatcacatcaccaccacaataatgcagaaaaccacatttgatacaactcaatattcatgtctgcctaacaaacatctcatgatactaggaaaagaggaagggatatattattttcatgtataaagcastaaccattgtagcatgccaatatactcaaaattcaatgaaattcctatcaaaatcttagcattcctcttagtcctcaacaaagcatttctaaaatgtgtatagaagaccaaagggccaaaagagtcaacttctgaagaagcgcaaaaagaaagttgaggaaatcttaaaacatgttattgagcttaaagttgcaaaaataaactcatgtaccataattcatgagtagaaaaatagactagtggaataacataaaaataaaaacaatgcttacataaaatgttgtaactgatttggatgtcattagaaatcagtaagtaaatagatggacaatgtaatgaaagatgctaggcaaataatgtggtagggagaataatggccctcaaagatgcccatgcctaaccctggaacc

SEQ ID NO: 240318 - DNA, 577 bp, Homo sapiens
acaaatgtaattcattacattaactaattaaaggagctaaatcacatcaccaccacaataatgcagaaaaccacatttgatacaactcaatattcatgtctgcctaacaaacatctcatgatactaggaaaagaggaagggatatattattttcatgtataaagcactaaccattgtagcatgcsaatatactcaaaattcaatgaaattcctatcaaaatcttagcattcctcttagtcctcaacaaagcatttctaaaatgtgtatagaagaccaaagggccaaaagagtcaacttctgaagaagcgcaaaaagaaagttgaggaaatcttaaaacatgttattgagcttaaagttgcaaaaataaactcatgtaccataattcatgagtagaaaaatagactagtggaataacataaaaataaaaacaatgcttacataaaatgttgtaactgatttggatgtcattagaaatcagtaagtaaatagatggacaatgtaatgaaagatgctaggcaaataatgtggtagggagaataatggccctcaaagatgcccatgcctaaccctggaacc

SEQ ID NO: 240319 - DNA, 612 bp, Homo sapiens
acaaatgtaattcattacattaactaattaaaggagctaaatcacatcaccaccacaataatgcagaaaaccacatttgatacaactcaatattcatgtctgcctaacaaacatctcatgatactaggaaaagaggaagggatatattattttcatgtataaagcactaaccattgtagcatgccaatatactcaaaattcaatgaaattcctatcaaaatcttagcattcctcttagtcctcaacaaagcatttctaaaatgtgtatagaagaccaaagggccaaaagagtcaacttctgaagaagygcaaaaagaaagttgaggaaatcttaaaacatgttattgagcttaaagttgcaaaaataaactcatgtaccataattcatgagtagaaaaatagactagtggaataacataaaaataaaaacaatgcttacataaaatgttgtaactgatttggatgtcattagaaatcagtaagtaaatagatggacaatgtaatgaaagatgctaggcaaataatgtggtagggagaataatggccctcaaagatgcccatgcctaaccctggaacctgtgaatatgttacactgaatgcaataaaggctta

SEQ ID NO: 240320 - DNA, 612 bp, Homo sapiens
acaaatgtaattcattacattaactaattaaaggagctaaatcacatcaccaccacaataatgcagaaaaccacatttgatacaactcaatattcatgtctgcctaacaaacatctcatgatactaggaaaagaggaagggatatattattttcatgtataaagcactaaccattgtagcatgccaatatactcaaaattcaatgaaattcctatcaaaatcttagcattcctcttagtcctcaacaaagcatttctaaaatgtgtatagaagaccaaagggccaaaagagtcaacttctgaagaagcgsaaaaagaaagttgaggaaatcttaaaacatgttattgagcttaaagttgcaaaaataaactcatgtaccataattcatgagtagaaaaatagactagtggaataacataaaaataaaaacaatgcttacataaaatgttgtaactgatttggatgtcattagaaatcagtaagtaaatagatggacaatgtaatgaaagatgctaggcaaataatgtggtagggagaataatggccctcaaagatgcccatgcctaaccctggaacctgtgaatatgttacactgaatgcaataaaggctta

SEQ ID NO: 240321 - DNA, 612 bp, Homo sapiens
acaaatgtaattcattacattaactaattaaaggagctaaatcacatcaccaccacaataatgcagaaaaccacatttgatacaactcaatattcatgtctgcctaacaaacatctcatgatactaggaaaagaggaagggatatattattttcatgtataaagcactaaccattgtagcatgccaatatactcaaaattcaatgaaattcctatcaaaatcttagcattcctcttagtcctcaacaaagcatttctaaaatgtgtatagaagaccaaagggccaaaagagtcaacttctgaagaagcgcaaaaagaaagttgaggaaatcttaaaacatgttattgagcttaaagttgcaaaaataaactcatgtaccataattcatgagtagaaaaayagactagtggaataacataaaaataaaaacaatgcttacataaaatgttgtaactgatttggatgtcattagaaatcagtaagtaaatagatggacaatgtaatgaaagatgctaggcaaataatgtggtagggagaataatggccctcaaagatgcccatgcctaaccctggaacctgtgaatatgttacactgaatgcaataaaggctta

SEQ ID NO: 240322 - DNA, 619 bp, Homo sapiens
ctagtggaataacataaaaataaaaacaatgcttacataaaatgttgtaactgatttggatgtcattagaaatcagtaagtaaatagatggacaatgtaatgaaagatgctaggcaaataatgtggtagggagaataatggccctcaaagatgcccatgcctaaccctggaacctgtgaatatgttacactgaatgcaataaaggcttatcagatgtgattaaggatgcaaaccgagatggagagatcttcctgggttacccagatgggcccagtctaatcacatgagttcttaaaaatggagaacctttcttagctgagtccagagagagatgtgacaatgaaagaatggtcagagaaatgtgacattgccagctttaaaaagagagaggagaggcaatgagaaaaggaatgctgatgttctctagaagatagaaaaggccaggatatggattctaccctagccrccataaagaaacatgcctgtcgacaacttgattttagttcactaaaattcatgcctgatttctgacttgtgtacactgtaagatgacaagtttgtgttattttaggtcacttagtttgtagaaatttgttacagcagtaatagaacaagtggt

SEQ ID NO: 240323 - DNA, 619 bp, Homo sapiens
ctagtggaataacataaaaataaaaacaatgcttacataaaatgttgtaactgatttggatgtcattagaaatcagtaagtaaatagatggacaatgtaatgaaagatgctaggcaaataatgtggtagggagaataatggccctcaaagatgcccatgcctaaccctggaacctgtgaatatgttacactgaatgcaataaaggcttatcagatgtgattaaggatgcaaaccgagatggagagatcttcctgggttacccagatgggcccagtctaatcacatgagttcttaaaaatggagaacctttcttagctgagtccagagagagatgtgacaatgaaagaatggtcagagaaatgtgacattgccagctttaaaaagagagaggagaggcaatgagaaaaggaatgctgatgttctctagaagatagaaaaggccaggatatggattctaccctagccaccataaagaaacatgmctgtcgacaacttgattttagttcactaaaattcatgcctgatttctgacttgtgtacactgtaagatgacaagtttgtgttattttaggtcacttagtttgtagaaatttgttacagcagtaatagaacaagtggt

SEQ ID NO: 240324 - DNA, 450 bp, Homo sapiens
aagttcaggtagctgggactgtaggtatacatgatgatacttggctaatttttaaattgttttgtagacacggggtctcactttgttggccaggctggtgtcaaactaatggcctcaagtgacccttccacccctgcctcccatcctcgaggcatgtgccaccacaaggagcacttgttcaattttctaaaaaaaaaatttctaaagtaaggctgtgggatgatggcaggaagataaaagaaaaacagaagaataagttaaaatgacttattcacrcatattcttttgacagcaagaagaacttttagtatgtacattccttacaaacaaacaaaaggcagataaacaatgttgtataggaacttcaacacacactgtacaatattcccactttgctgacataagttatggaaatttcatggtttacttcagtgtcgctaccagtatttt

SEQ ID NO: 240325 - DNA, 633 bp, Homo sapiens
ttatacacaatttaaccacccctcatagtataagaaagtgcccatttcactgcacctttgccagcacagggtattataatttcrtaagccattttttgtttgattattttaaatagacaaaagacctcatattactttacttgtcacatttcaacatctttcctcagcttattagctctatttcttttctgtctgtaaatggttgttgtgcttttgttctttgagacagggtcttgctctgtcatccggctggactgtagtggcataatcatgcctcactgcagccttgacctcccaggctcaaacttccgcattccgattagctgggactacaagtgtgcaccaccacccccagctaacttttttcttcttttggatagagacagggtctcactctgttgtccagaccggtctctagctcctggccttaagcaatcctcctgcattagcttctcaaattgctggaatttcaggcctgagccaccatgcctggccagggctagtcctatattctctagagttctctttactctgtgctagccaatctctcattatgctgttcacctgttataatgaataattctctgtattaaattttaccactttaaacttttgagtggtttatgcttcctg

SEQ ID NO: 240326 - DNA, 454 bp, Homo sapiens
aagttcaggtagctgggactgtaggtatacatgatgatacttggctaatttttaaattgttttgtagacacggggtctcactttgttggccaggctggtgtcaaactaatggcctcaagtgacccttccacccctgcctcccatcctcgaggcatgtgccaccacaaggagcacttgttcaattttctaaaaaaaaaatttctaaagtaaggctgtgggatgatggcaggaagataaaagaaaaacagaagaataagttaaaatgacttattcacacatattcttttgacagcaagaagaacttttagtatgtacattycttacaaacaaacaaaaggcagataaacaatgttgtataggaacttcaacacacactgtacaatattcccactttgctgacataagttatggaaatttcatggtttacttcagtgtcgctaccagtattttgctt

SEQ ID NO: 240327 - DNA, 620 bp, Homo sapiens
gcagcttctgtggaacgagggtttatttttttggttagaactggaataaaagctagcatgtttatttctaggcctactcaggtaaaaaatcagtgcgagcttagcgctgtgatgagtgtgcctgcaaagatggtagagtagatgacgggttgggccaggggattaattagtacgggaaggatataaccaacattttcggggtatgggcccgatagcttatttagctgaccttactttaggatggggtgtgataggtggcacggagaattttggattctcagggatgggttcgattctcatagtcctagaaataaggggrtttaaactcctattatttactctatcaaagtaactcttttatcagacatatttcttaggtttgagggggaatgctggagattgtaatgggtatggagacatatcatataagtaatgctagggtgagtggtaggaagttttttcataggaggtgtatgagttggtcgtagcggaatcgggggtatgctgttcgaatgcataagaacagggaggtcagaagtagggtcttggtgacaaaatatgttgtgtagagttcaggggagagtgcgttatatgttgttcctaggaagattgtagtggtg

SEQ ID NO: 240328 - DNA, 464 bp, Homo sapiens
catttcatataactgtctaaacaayggtttaaggtctacacaagattgtgaagtgaacctgcaggattaggagggtaaggattcccacctaggtgggctcacttgctctgccatacctgggtaggatcccagcctgcttctgtgattgtcaggaggcaccaaaaaggctaccctaggttttctgtcattcggcccaaacatttcctctgctgggcaaatgtggaaaagaggcattaagctggtgctcccacaactgaaaggaaagcaattctctttctgttgtggttccttcctctttggactcttttcttccattccagcctatccccttcttggaaaagctgttctaccaatagcagggaagaaacagcgccgtgtacctgatacgctaccctgggcacaggcgatcagaccagggatagacacctgaactgatctgggcagatgccctcttctggccattg

SEQ ID NO: 240329 - DNA, 477 bp, Homo sapiens
ctagaaaataccccatttcatataactgtctaaacaacggtttaaggtctacacaasattgtgaagtgaacctgcaggattaggagggtaaggattcccacctaggtgggctcacttgctctgccatacctgggtaggatcccagcctgcttctgtgattgtcaggaggcaccaaaaaggctaccctaggttttctgtcattcggcccaaacatttcctctgctgggcaaatgtggaaaagaggcattaagctggtgctcccacaactgaaaggaaagcaattctctttctgttgtggttccttcctctttggactcttttcttccattccagcctatccccttcttggaaaagctgttctaccaatagcagggaagaaacagcgccgtgtacctgatacgctaccctgggcacaggcgatcagaccagggatagacacctgaactgatctgggcagatgccctcttctggccattg

SEQ ID NO: 240330 - DNA, 453 bp, Homo sapiens
actgtctaaacaacggtttaaggtctacacaagattgtgaagtgaacctgcaggattargagggtaaggattcccacctaggtgggctcacttgctctgccatacctgggtaggatcccagcctgcttctgtgattgtcaggaggcaccaaaaaggctaccctaggttttctgtcattcggcccaaacatttcctctgctgggcaaatgtggaaaagaggcattaagctggtgctcccacaactgaaaggaaagcaattctctttctgttgtggttccttcctctttggactcttttcttccattccagcctatccccttcttggaaaagctgttctaccaatagcagggaagaaacagcgccgtgtacctgatacgctaccctgggcacaggcgatcagaccagggatagacacctgaactgatctgggcagatgccctcttctggccattg

SEQ ID NO: 240331 - DNA, 459 bp, Homo sapiens
catataactgtctaaacaacggtttaaggtctacacaagattgtgaagtgaacctgcaggattaggagggtaaggattcccacctaggtgggctcacttgctctgccatacctgggtaggatcccagcctgcttctgtgattgtcaggaggcaccaaaaaggctaccctaggttttctgtcattckgcccaaacatttcctctgctgggcaaatgtggaaaagaggcattaagctggtgctcccacaactgaaaggaaagcaattctctttctgttgtggttccttcctctttggactcttttcttccattccagcctatccccttcttggaaaagctgttctaccaatagcagggaagaaacagcgccgtgtacctgatacgctaccctgggcacaggcgatcagaccagggatagacacctgaactgatctgggcagatgccctcttctggccattg

SEQ ID NO: 240332 - DNA, 582 bp, Homo sapiens
aagctttttttaactctctaagggaaggtacttttgtttgacttactatttactattgattagggcccagactctgccaagttacatgttaatttttgtctggtagagatacaaatgatttttgtcctgtaaaaagattttattgctccacaggacattaatgagtgaggtttccaaattagcaaacttatgtcagcatgctgtttctgatggtctatccaaatctttctccttccaattctcttttcaaacagctttaccatcctctggttctttcttttgtgaagtaaacagatctttatacacactccctatagacttatataagaatcatgttttcactttttgaaaatgatgctttgacaattccactgaacgggctggggaaaattttatgagaattgttggatcctgctcagaagcaaaaagataaaaccaggctatcctctatcatggctgatctggggttcattcccagaaatgagggtcttggatcagggtcaaatatgtgggtggggtgggctcaattrctgagatacccatctcatgaggaaggatgggacccatattatgggaaacaaa

SEQ ID NO: 240333 - DNA, 401 bp, Homo sapiens
gggacccatattatgggaaacaaaacaggaagaatgagagtgaaaagattaatcctttcactaaattgggaaaacaggagaaagtgttgttggataaagaaggaactttagcacaatgagcagagacaagacggtaaatgttccttatccagtaatctctgatgaaaggccagtgctcacatcattagtaatgtccagaamtgataatatcagtagtagcaatactcacaatgtaaataagtagctctcatgttttgattgccaatagtgctagcaaccttacatgtatcactctttaccccagccctgttaattggtactatgatgaagaaagagactcaaagaaaataaatgactcactcgcgtatttttacacagctagaattgctacagaaaggatt

SEQ ID NO: 240334 - DNA, 418 bp, Homo sapiens
gaattccccctgattttgagtgtgaatgggtacaaaagaccaggggttgttaacmaaaagcctggaacattcaggtgaatggctgttctgcagggaaggagggaaacagcagggggagatggatggtcaaccttcaaaggccttacacagtcccggccaggataatcttcgcctctcccttctgctggggaaaagtctggattgctaagaccagggtctctatagtggcatctccaacactcaggccgagcttcatggctgggttcctgttttttcatttgctcatgcccctcagtggtatcatctgactcagctcctttccctcctgttgggccagtacttacagtgggtctcctgatgaagctgaggtcatgggttcatgagcccaattatcaccatgctgaccgcaccactaacc

SEQ ID NO: 240335 - DNA, 432 bp, Homo sapiens
gaattccccctgattttgagtgtgaatgggtacaaaagaccaggggttgttaaccaaaagcctggaacattcaggtgaayggctgttctgcagggaaggagggaaacagcagggggagatggatggtcaaccttcaaaggccttacacagtcccggccaggataatcttcgcctctcccttctgctggggaaaagtctggattgctaagaccagggtctctatagtggcatctccaacactcaggccgagcttcatggctgggttcctgttttttcatttgctcatgcccctcagtggtatcatctgactcagctcctttccctcctgttgggccagtacttacagtgggtctcctgatgaagctgaggtcatgggttcatgagcccaattatcaccatgctgaccgcaccactaacctggctccgtgtagt

SEQ ID NO: 240336 - DNA, 431 bp, Homo sapiens
gaattccccctgattttgagtgtgaatgggtacaaaagaccaggggttgttaaccaaaagcctggaacattcaggtgaatggctgttctgcagggaaggagggaaacagcagggkgagatggatggtcaaccttcaaaggccttacacagtcccggccaggataatcttcgcctctcccttctgctggggaaaagtctggattgctaagaccagggtctctatagtggcatctccaacactcaggccgagcttcatggctgggttcctgttttttcatttgctcatgcccctcagtggtatcatctgactcagctcctttccctcctgttgggccagtacttacagtgggtctcctgatgaagctgaggtcatgggttcatgagcccaattatcaccatgctgaccgcaccactaacctggctccgtgtag

SEQ ID NO: 240337 - DNA, 432 bp, Homo sapiens
gaattccccctgattttgagtgtgaatgggtacaaaagaccaggggttgttaaccaaaagcctggaacattcaggtgaatggctgttctgcagggaaggagggaaacagcagggggagatggatggtcaaccttcaaaggccttacacagtccyggccaggataatcttcgcctctcccttctgctggggaaaagtctggattgctaagaccagggtctctatagtggcatctccaacactcaggccgagcttcatggctgggttcctgttttttcatttgctcatgcccctcagtggtatcatctgactcagctcctttccctcctgttgggccagtacttacagtgggtctcctgatgaagctgaggtcatgggttcatgagcccaattatcaccatgctgaccgcaccactaacctggctccgtgtagt

SEQ ID NO: 240338 - DNA, 432 bp, Homo sapiens
gaattccccctgattttgagtgtgaatgggtacaaaagaccaggggttgttaaccaaaagcctggaacattcaggtgaatggctgttctgcagggaaggagggaaacagcagggggagatggatggtcaaccttcaaaggccttacacagtcccrgccaggataatcttcgcctctcccttctgctggggaaaagtctggattgctaagaccagggtctctatagtggcatctccaacactcaggccgagcttcatggctgggttcctgttttttcatttgctcatgcccctcagtggtatcatctgactcagctcctttccctcctgttgggccagtacttacagtgggtctcctgatgaagctgaggtcatgggttcatgagcccaattatcaccatgctgaccgcaccactaacctggctccgtgtagt

SEQ ID NO: 240339 - DNA, 380 bp, Homo sapiens
gaattccccctgattttgagtgtgaatgggtacaaaagaccaggggttgttaaccaaaagcctggaacattcaggtgaatggctgttctgcagggaaggagggaaacagcagggggagatggatggtcaaccttcaaaggccttacacagtcccggccaggataatcttcgcctctcccttctgctggggaaaagtctggattgctaagaccagggtctctatagtggcatctccaacactcaggccgagcttcatggctgggttcctgttttttcatttgctcatgcccctcagtggtatcatctgactcagctcctttccctcctgttgggccagtacttacaktgggtctcctgatgaagctgaggtcatgggttca

SEQ ID NO: 240340 - DNA, 372 bp, Homo sapiens
gcaccaatgccctcagtcctgagagtgagggctggtctcatgaawccattcacacagatggaagtccatcctcacagcggtcaggcctcacacaacatcgggcatgttggtaggcatatgcctaagtttctgtgcaatgaatgcatgccttactggtgatgcatcaatagcaaggcattcaggggagagagtaccctgcctcagtgcctagcatgagacatacatccaggaccatgtttttattcccatcttatggatgagaaaactgaggttcagaaagggtaggcaaaatcccctagctcacctggctggaagggggcagaacttccctgtacgtgctgagaacaccactgttcgagcagaggggaaacc

SEQ ID NO: 240341 - DNA, 372 bp, Homo sapiens
gcaccaatgccctcagtcctgagagtgagggctggtctcatgaatccattcacacagatggaagtccatcctcacagcggtcaggcctcacacaacatcgggcatgttggtaggcatatgcctaagtttctgtgcaatgaatgcatgccttactggtgatgcrtcaatagcaaggcattcaggggagagagtaccctgcctcagtgcctagcatgagacatacatccaggaccatgtttttattcccatcttatggatgagaaaactgaggttcagaaagggtaggcaaaatcccctagctcacctggctggaagggggcagaacttccctgtacgtgctgagaacaccactgttcgagcagaggggaaacc

SEQ ID NO: 240342 - DNA, 372 bp, Homo sapiens
gcaccaatgccctcagtcctgagagtgagggctggtctcatgaatccattcacacagatggaagtccatcctcacagcggtcaggcctcacacaacatcgggcatgttggtaggcatatgcctaagtttctgtgcaatgaatgcatgccttactggtgatgcatcaatagcaaggcattcaggggagagagtaccctgcctcagtgcctagcatgagacatrcatccaggaccatgtttttattcccatcttatggatgagaaaactgaggttcagaaagggtaggcaaaatcccctagctcacctggctggaagggggcagaacttccctgtacgtgctgagaacaccactgttcgagcagaggggaaacc

SEQ ID NO: 240343 - DNA, 610 bp, Homo sapiens
tatttccttatcaatgttctatcaacaaggggcaggaggtgtcacctccttgggaatcagagttggcccctcaggtaggtgtttggagcttcctggtaggggctggggacaaagtgtggatggggcacctgctggacctgtggcgagatcatcagggrttgctattggtctcagcaagggagtgaggctgaccagttctcagctgcatttcagagaaggatgaaatgccctaatcagaagtcagctcccctcatgaccctggagggaattctgcccactcacagactctttcttattctgggcctctgctgttatctgggtatagctccctgtcacagtcagtttggggactgatcctccaggaaagtcctgggacctctcggcaggctgagtgcttctcctttgtgactcccctgccatggcggttgtgccccttcttaccttctacagacacgacttttcatgggcctcttcctttctccccaccggtaaatcaccacccttcaaaggcaggaactgtctctatttcatcttagtatcctacgggcctggcccagagtagatgctccaaaaaacttgtcctgaactgaatgggcgtgaagctggggcc

SEQ ID NO: 240344 - DNA, 610 bp, Homo sapiens
tatttccttatcaatgttctatcaacaaggggcaggaggtgtcacctccttgggaatcagagttggcccctcaggtaggtgtttggagcttcctggtaggggctggggacaaagtgtggatggggcacctgctggacctgtggcgagatcatcaggggttgctattggtctcagcaagggagtgaggctgaccagttctcagctgcatttcagagaaggatgaaatgccctaatcagaagtcagctcccctcatgaccctggagggaattctgcccactcacagactctttcttattctgggcctctgctgttatctgggtatagctccctgtcacagtcagtttggggactgatcctccaggaaagtcctgggacctctyggcaggctgagtgcttctcctttgtgactcccctgccatggcggttgtgccccttcttaccttctacagacacgacttttcatgggcctcttcctttctccccaccggtaaatcaccacccttcaaaggcaggaactgtctctatttcatcttagtatcctacgggcctggcccagagtagatgctccaaaaaacttgtcctgaactgaatgggcgtgaagctggggcc

SEQ ID NO: 240345 - DNA, 610 bp, Homo sapiens
tatttccttatcaatgttctatcaacaaggggcaggaggtgtcacctccttgggaatcagagttggcccctcaggtaggtgtttggagcttcctggtaggggctggggacaaagtgtggatggggcacctgctggacctgtggcgagatcatcaggggttgctattggtctcagcaagggagtgaggctgaccagttctcagctgcatttcagagaaggatgaaatgccctaatcagaagtcagctcccctcatgaccctggagggaattctgcccactcacagactctttcttattctgggcctctgctgttatctgggtatagctccctgtcacagtcagtttggggactgatcctccaggaaagtcctgggacctctcggcaggctgartgcttctcctttgtgactcccctgccatggcggttgtgccccttcttaccttctacagacacgacttttcatgggcctcttcctttctccccaccggtaaatcaccacccttcaaaggcaggaactgtctctatttcatcttagtatcctacgggcctggcccagagtagatgctccaaaaaacttgtcctgaactgaatgggcgtgaagctggggcc

SEQ ID NO: 240346 - DNA, 610 bp, Homo sapiens
tatttccttatcaatgttctatcaacaaggggcaggaggtgtcacctccttgggaatcagagttggcccctcaggtaggtgtttggagcttcctggtaggggctggggacaaagtgtggatggggcacctgctggacctgtggcgagatcatcaggggttgctattggtctcagcaagggagtgaggctgaccagttctcagctgcatttcagagaaggatgaaatgccctaatcagaagtcagctcccctcatgaccctggagggaattctgcccactcacagactctttcttattctgggcctctgctgttatctgggtatagctccctgtcacagtcagtttggggactgatcctccaggaaagtcctgggacctctcggcaggctgagtscttctcctttgtgactcccctgccatggcggttgtgccccttcttaccttctacagacacgacttttcatgggcctcttcctttctccccaccggtaaatcaccacccttcaaaggcaggaactgtctctatttcatcttagtatcctacgggcctggcccagagtagatgctccaaaaaacttgtcctgaactgaatgggcgtgaagctggggcc

SEQ ID NO: 240347 - DNA, 433 bp, Homo sapiens
gagcaccagggttcttggtctagcacacacttggataaaatgacacagacacacctggagtggttttaaggagcgaaaagtttaatatacaagaaagaaggaaggaagaagaaaacagctccccagtacagagacagagggagaggggatttgaacagagagaaaaccccggtggggagaagggatgtggggggagggcgtgtgtgtggtgtaatcagctagttatatgaggaggctggaggaggcggtgctggcttgcatagggctcagaggattggtttgaccaggcakgtcattcacatagcctgcgaaaaagctggccctcacagtctagccttttaagatgcaaatgcagggcgccatgatgttctacacacgtggggatatgtgggggcggccatgttgccagccacctgttggggcaaggaagaaa

SEQ ID NO: 240348 - DNA, 652 bp, Homo sapiens
atcttatagaaatttaggttaaatacagaccaagagccttcaaagccctcagtaagttgcaatacttaatttctgyaacagctaaggactgcaaaaccccactctgcatcaactgaacgcaaatcagccactttaattaaggtaagccctaagtagaccaatggggacttaaacccacaaacacttagttaacagctaagcaccctgaatgcaactgggcttcaatgctgacttctgcccgccgccgggaaaaaaggcgggagaagccccggcaggtttgaagctgcttcttcgaatttgcaattcaatatgaaaatcacctcagagctggtaaaaagaggcttaacccctgtctttagattaacagtccaatgcttcactcagccattttacctcacccccattgatgttctccgaccgttgactattctctacaaaccacaaagacattggaacactatacctattattcggcgcatgagctggagtcctaggcacagctctaagcctccttattcgagccgaactgggccagccaggcaaccttctaggtaacgaccacatctacaacgttatcgtcacagcccatgcatttgtaataatcttcttcatagtaatacccatcataatcggaggctttggcaactgacta

SEQ ID NO: 240349 - DNA, 652 bp, Homo sapiens
atcttatagaaatttaggttaaatacagaccaagagccttcaaagccctcagtaagttgcaatacttaatttctgcaacagctaaggactgcaaaaccccactctgcatcaactgaacgcaaatcagccactttaattaaggtaagccctaagtagaccaatggggacttaaacccacaaacacttagttaacagctaagcaccctgaatgcaactgggcttcaatgctgacttctgcccgccgccgggaaaaaaggcgggagaagccccggcaggtttgaagctgcttcttcgaatttgcaattcaatatgaaaatcacctcrgagctggtaaaaagaggcttaacccctgtctttagattaacagtccaatgcttcactcagccattttacctcacccccattgatgttctccgaccgttgactattctctacaaaccacaaagacattggaacactatacctattattcggcgcatgagctggagtcctaggcacagctctaagcctccttattcgagccgaactgggccagccaggcaaccttctaggtaacgaccacatctacaacgttatcgtcacagcccatgcatttgtaataatcttcttcatagtaatacccatcataatcggaggctttggcaactgacta

SEQ ID NO: 240350 - DNA, 528 bp, Homo sapiens
gccaacaggtggtattttccatttagcggggtctgggtttctacaraacaactcagggacatatgttaagatgttatctctagtttctatagggaaacaaacattttgtggctctaattttctttttttttttaattatactttaagttttagggtacatgtgcacaacgtgcaggtctgttacgtatgcatacatgtaccatgttggtgtgctgcacccattaactcgtcatttaagattagtttgtggctctaattttcttgactattgttttaagctattattaccttcttacttatcagggtgctcatctacttcttgaggctagccaggtggctggaattttccttggagggactcaagagtttcctttatttttcatgccttaaatgggtctgttctccctcttcaaagctcaagctcttaaggactatgctattgttagatttttcgtattggagcagtccttccctcctactcaagaacaccccttcttcagacagcctggctgggtcttcatcctggga

SEQ ID NO: 240351 - DNA, 522 bp, Homo sapiens
aggtggtattttccatttagcggggtctgggtttctacaaaacaactcagggacatatgttaagatgttatctctagtttctatagggaaacaaacattttgtggctctaattttctttttttttttaattatactttaagttttagggtacatgtgcacaacgtgcaggtctgttacgtatgyatacatgtaccatgttggtgtgctgcacccattaactcgtcatttaagattagtttgtggctctaattttcttgactattgttttaagctattattaccttcttacttatcagggtgctcatctacttcttgaggctagccaggtggctggaattttccttggagggactcaagagtttcctttatttttcatgccttaaatgggtctgttctccctcttcaaagctcaagctcttaaggactatgctattgttagatttttcgtattggagcagtccttccctcctactcaagaacaccccttcttcagacagcctggctgggtcttcatcctggga

SEQ ID NO: 240352 - DNA, 543 bp, Homo sapiens
tcacatgctggataagaggtacctgggctctccacttacaagaagagagcatggttacatttataatcaccattcccaacaygctgtgagtgcaggcagctaccaggaggagaacaaaggaaataaccaggacacccatctctaaacctgttaatttaatcacacggaacacttctatttaaaattcccgagggttaagatgtaagaatgcttatcaaggtaaatgctgttcacactgcttggagtgtcaggcctagatctctatccatcagaaacaacaatatcaataacaacaacagcaacatgatgatggggcaatttctgaaaagcaccatgtattttatcgatacatgtccgttgcagaaaatccaggtgaatccaaagaagaaataaatgtcttccacaatcccatagcccagagctaactaaccactataaagaacccagcgtggttttaactaatggatcaaaagatgctcatcaaaggctctgagctttcctgagtgctaacaggaaacatccagcatcactggtctctccaag

SEQ ID NO: 240353 - DNA, 466 bp, Homo sapiens
acccagcgtggttttaactaatggatcaaaagatgctcatcaaaggctctgagctttcctgagtgctaacaggaaacatccagcatcactggtctctccaaggctgcaggtgtctttgcccatagtgcctgttttgtgtcagggaaagaatcaacctgggagccaagcccaggaatcaggatgaccaagacatactggacaaggagggaacaaacccatccaaggacactcaaggacaaatcaagcaaatgaatttaagggagacctgctcatggtctgctttgctgctcagcatggctgggaggcacagtggaagatcatgcatcctkcccctgggactcctctgccagagcctgagagctttctcctgcacacaggctaggggtagggcagttggaattgatccatgccttctagctagactgtgggtcccctcagtcttgggcatggtgacagcccagcatca

SEQ ID NO: 240354 - DNA, 348 bp, Homo sapiens
tgataacatcctgtgattgctttgttcttcgtcttttatgttcttcctagatgggctcagaacatacaagaattaagtacacatcttattttccagtgataatgctaccggcaaattctgttgtttgtataaacatcagccatgtttatataactaaactagtgttttgttttgtcaattcagcaagaaattagaccamatggtggcttaatgctgcattgatttggctatcaatttgttttcacttttctgcaaaatatttaatacattattaaattgaattatgctgatgccacagttgttcttatctcaattgtcttaaaattcatttaatttttttttcctttg

SEQ ID NO: 240355 - DNA, 348 bp, Homo sapiens
tgataacatcctgtgattgctttgttcttcgtcttttatgttcttcctagatgggctcagaacatacaagaattaagtacacatcttattttccagtgataatgctaccggcaaattctgttgtttgtataaacatcagccatgtttatataactaaactagtgttttgttttgtcaattcagcaagaaattagaccacatggtggcttaatgctgcattgatttggctatcaatttgttttcacttttctgcaaaatawttaatacattattaaattgaattatgctgatgccacagttgttcttatctcaattgtcttaaaattcatttaatttttttttcctttg

SEQ ID NO: 240356 - DNA, 348 bp, Homo sapiens
tgataacatcctgtgattgctttgttcttcgtcttttatgttcttcctagatgggctcagaacatacaagaattaagtacacatcttattttccagtgataatgctaccggcaaattctgttgtttgtataaacatcagccatgtttatataactaaactagtgttttgttttgtcaattcagcaagaaattagaccacatggtggcttaatgctgcattgatttggctatcaatttgttttcacttttctgcaaaatatttaatacattattaaattgaattrtgctgatgccacagttgttcttatctcaattgtcttaaaattcatttaatttttttttcctttg

SEQ ID NO: 240357 - DNA, 348 bp, Homo sapiens
tgataacatcctgtgattgctttgttcttcgtcttttatgttcttcctagatgggctcagaacatacaagaattaagtacacatcttattttccagtgataatgctaccggcaaattctgttgtttgtataaacatcagccatgtttatataactaaactagtgttttgttttgtcaattcagcaagaaattagaccacatggtggcttaatgctgcattgatttggctatcaatttgttttcacttttctgcaaaatatttaatacattattaaattgaattatgctgatgccacagttgttcttatctcaaktgtcttaaaattcatttaatttttttttcctttg

SEQ ID NO: 240358 - DNA, 571 bp, Homo sapiens
ggattgcaatttcataccatccttgaagttagagagagccacrtgactcatttagccaatgaactgtgagcagaatgacatgtcacttccagcagaagctttaagaatctgagagacattcatacgttttccatgtgctgtagccttatacccaaagcctgggtcccaagtgaccatgacaggcagagctccctgttgagccacagagatttagagaatggctgttaacacagcataatccagcccatcctgactaatctgatattaacatgtataataaagaattctatcaatgctgagggaagatgattagttaaggtcctaggttgcaagtctcaaaacctcttctaaggattgtagacaggaaattaaatgacttctagtccctagagttcccaatctcctaccatcccatcctaatatgacagaagtaattcttgagttgcttctgaaaccagagcttccctcagaacccttagcctgccagatggcttcttggagagccctcactcacttttctccttctgctattgctgctcattcattccagcttttaaaaattcatctttat

SEQ ID NO: 240359 - DNA, 536 bp, Homo sapiens
ggtaggattgcaatttcataccatccttgaagttagagagagccacatgactcatttagccaatgaactgtgarcagaatgacatgtcacttccagcagaagctttaagaatctgagagacattcatacgttttccatgtgctgtagccttatacccaaagcctgggtcccaagtgaccatgacaggcagagctccctgttgagccacagagatttagagaatggctgttaacacagcataatccagcccatcctgactaatctgatattaacatgtataataaagaattctatcaatgctgagggaagatgattagttaaggtcctaggttgcaagtctcaaaacctcttctaaggattgtagacaggaaattaaatgacttctagtccctagagttcccaatctcctaccatcccatcctaatatgacagaagtaattcttgagttgcttctgaaaccagagcttccctcagaacccttagcctgccagatggcttcttggagagccctcactcacttttctccttctgctatt

SEQ ID NO: 240360 - DNA, 567 bp, Homo sapiens
tgcaatttcataccatccttgaagttagagagagccacatgactcatttagccaatgaactgtgagcagaatgacatgtcacttccagcwgaagctttaagaatctgagagacattcatacgttttccatgtgctgtagccttatacccaaagcctgggtcccaagtgaccatgacaggcagagctccctgttgagccacagagatttagagaatggctgttaacacagcataatccagcccatcctgactaatctgatattaacatgtataataaagaattctatcaatgctgagggaagatgattagttaaggtcctaggttgcaagtctcaaaacctcttctaaggattgtagacaggaaattaaatgacttctagtccctagagttcccaatctcctaccatcccatcctaatatgacagaagtaattcttgagttgcttctgaaaccagagcttccctcagaacccttagcctgccagatggcttcttggagagccctcactcacttttctccttctgctattgctgctcattcattccagcttttaaaaattcatctttat

SEQ ID NO: 240361 - DNA, 514 bp, Homo sapiens
gcaatttcataccatccttgaagttagagagagccacatgactcatttagccaatgaactgtgagcagaatgacatgtcacttccagcagaagctttaasaatctgagagacattcatacgttttccatgtgctgtagccttatacccaaagcctgggtcccaagtgaccatgacaggcagagctccctgttgagccacagagatttagagaatggctgttaacacagcataatccagcccatcctgactaatctgatattaacatgtataataaagaattctatcaatgctgagggaagatgattagttaaggtcctaggttgcaagtctcaaaacctcttctaaggattgtagacaggaaattaaatgacttctagtccctagagttcccaatctcctaccatcccatcctaatatgacagaagtaattcttgagttgcttctgaaaccagagcttccctcagaacccttagcctgccagatggcttcttggagagccctcactcacttttc

SEQ ID NO: 240362 - DNA, 536 bp, Homo sapiens
ggtaggattgcaatttcataccatccttgaagttagagagagccacatgactcatttagccaatgaactgtgagcagaatgacatgtcacttccagcagaagctttaagaatctgagagacattcataygttttccatgtgctgtagccttatacccaaagcctgggtcccaagtgaccatgacaggcagagctccctgttgagccacagagatttagagaatggctgttaacacagcataatccagcccatcctgactaatctgatattaacatgtataataaagaattctatcaatgctgagggaagatgattagttaaggtcctaggttgcaagtctcaaaacctcttctaaggattgtagacaggaaattaaatgacttctagtccctagagttcccaatctcctaccatcccatcctaatatgacagaagtaattcttgagttgcttctgaaaccagagcttccctcagaacccttagcctgccagatggcttcttggagagccctcactcacttttctccttctgctatt

SEQ ID NO: 240363 - DNA, 567 bp, Homo sapiens
tgcaatttcataccatccttgaagttagagagagccacatgactcatttagccaatgaactgtgagcagaatgacatgtcacttccagcagaagctttaagaatctgagagacattcatacrttttccatgtgctgtagccttatacccaaagcctgggtcccaagtgaccatgacaggcagagctccctgttgagccacagagatttagagaatggctgttaacacagcataatccagcccatcctgactaatctgatattaacatgtataataaagaattctatcaatgctgagggaagatgattagttaaggtcctaggttgcaagtctcaaaacctcttctaaggattgtagacaggaaattaaatgacttctagtccctagagttcccaatctcctaccatcccatcctaatatgacagaagtaattcttgagttgcttctgaaaccagagcttccctcagaacccttagcctgccagatggcttcttggagagccctcactcacttttctccttctgctattgctgctcattcattccagcttttaaaaattcatctttat

SEQ ID NO: 240364 - DNA, 549 bp, Homo sapiens
ggtaggattgcaatttcataccatccttgaagttagagagagccacatgactcatttagccaatgaactgtgagcagaatgacatgtcacttccagcagaagctttaagaatctgagagacattcatacgttttccaygtgctgtagccttatacccaaagcctgggtcccaagtgaccatgacaggcagagctccctgttgagccacagagatttagagaatggctgttaacacagcataatccagcccatcctgactaatctgatattaacatgtataataaagaattctatcaatgctgagggaagatgattagttaaggtcctaggttgcaagtctcaaaacctcttctaaggattgtagacaggaaattaaatgacttctagtccctagagttcccaatctcctaccatcccatcctaatatgacagaagtaattcttgagttgcttctgaaaccagagcttccctcagaacccttagcctgccagatggcttcttggagagccctcactcacttttctccttctgctattgctgctcattcat

SEQ ID NO: 240365 - DNA, 569 bp, Homo sapiens
attgcaatttcataccatccttgaagttagagagagccacatgactcatttagccaatgaactgtgagcagaatgacatgtcacttccagcagaagctttaagaatctgagagacattcatacgttttccatgtgctgtrgccttatacccaaagcctgggtcccaagtgaccatgacaggcagagctccctgttgagccacagagatttagagaatggctgttaacacagcataatccagcccatcctgactaatctgatattaacatgtataataaagaattctatcaatgctgagggaagatgattagttaaggtcctaggttgcaagtctcaaaacctcttctaaggattgtagacaggaaattaaatgacttctagtccctagagttcccaatctcctaccatcccatcctaatatgacagaagtaattcttgagttgcttctgaaaccagagcttccctcagaacccttagcctgccagatggcttcttggagagccctcactcacttttctccttctgctattgctgctcattcattccagcttttaaaaattcatctttat

SEQ ID NO: 240366 - DNA, 566 bp, Homo sapiens
gcaatttcataccatccttgaagttagagagagccacatgactcatttagccaatgaactgtgagcagaatgacatgtcacttccagcagaagctttaagaatctgagagacattcatacgttttccatgtgctgtagccttatacccaaagcctgggtcccaagtgaccatgacaggcagagctccmtgttgagccacagagatttagagaatggctgttaacacagcataatccagcccatcctgactaatctgatattaacatgtataataaagaattctatcaatgctgagggaagatgattagttaaggtcctaggttgcaagtctcaaaacctcttctaaggattgtagacaggaaattaaatgacttctagtccctagagttcccaatctcctaccatcccatcctaatatgacagaagtaattcttgagttgcttctgaaaccagagcttccctcagaacccttagcctgccagatggcttcttggagagccctcactcacttttctccttctgctattgctgctcattcattccagcttttaaaaattcatctttat

SEQ ID NO: 240367 - DNA, 560 bp, Homo sapiens
tctagagacatggtaggattgcaatttcataccatccttgaagttagagagagccacatgactcatttagccaatgaactgtgagcagaatgacatgtcacttccagcagaagctttaagaatctgagagacattcatacgttttccatgtgctgtagccttatacccaaagcctgggtcccaagtgaccatgacaggcagagctccctgktgagccacagagatttagagaatggctgttaacacagcataatccagcccatcctgactaatctgatattaacatgtataataaagaattctatcaatgctgagggaagatgattagttaaggtcctaggttgcaagtctcaaaacctcttctaaggattgtagacaggaaattaaatgacttctagtccctagagttcccaatctcctaccatcccatcctaatatgacagaagtaattcttgagttgcttctgaaaccagagcttccctcagaacccttagcctgccagatggcttcttggagagccctcactcacttttctccttctgctattgctgctcattcat

SEQ ID NO: 240368 - DNA, 566 bp, Homo sapiens
gcaatttcataccatccttgaagttagagagagccacatgactcatttagccaatgaactgtgagcagaatgacatgtcacttccagcagaagctttaagaatctgagagacattcatacgttttccatgtgctgtagccttatacccaaagcctgggtcccaagtgaccatgacaggcagagctccctgttgagccacagagatttagagaatggctgttaacacarcataatccagcccatcctgactaatctgatattaacatgtataataaagaattctatcaatgctgagggaagatgattagttaaggtcctaggttgcaagtctcaaaacctcttctaaggattgtagacaggaaattaaatgacttctagtccctagagttcccaatctcctaccatcccatcctaatatgacagaagtaattcttgagttgcttctgaaaccagagcttccctcagaacccttagcctgccagatggcttcttggagagccctcactcacttttctccttctgctattgctgctcattcattccagcttttaaaaattcatctttat

SEQ ID NO: 240369 - DNA, 571 bp, Homo sapiens
ggattgcaatttcataccatccttgaagttagagagagccacatgactcatttagccaatgaactgtgagcagaatgacatgtcacttccagcagaagctttaagaatctgagagacattcatacgttttccatgtgctgtagccttatacccaaagcctgggtcccaagtgaccatgacaggcagagctccctgttgagccacagagatttagagaatggctgttaacacagcataatcyagcccatcctgactaatctgatattaacatgtataataaagaattctatcaatgctgagggaagatgattagttaaggtcctaggttgcaagtctcaaaacctcttctaaggattgtagacaggaaattaaatgacttctagtccctagagttcccaatctcctaccatcccatcctaatatgacagaagtaattcttgagttgcttctgaaaccagagcttccctcagaacccttagcctgccagatggcttcttggagagccctcactcacttttctccttctgctattgctgctcattcattccagcttttaaaaattcatctttat

SEQ ID NO: 240370 - DNA, 568 bp, Homo sapiens
ttgcaatttcataccatccttgaagttagagagagccacatgactcatttagccaatgaactgtgagcagaatgacatgtcacttccagcagaagctttaagaatctgagagacattcatacgttttccatgtgctgtagccttatacccaaagcctgggtcccaagtgaccatgacaggcagagctccctgttgagccacagagatttagagaatggctgttaacacagcataatccagcccatcctgactaatctgatattaacatgtataataaagaattctatcaatkctgagggaagatgattagttaaggtcctaggttgcaagtctcaaaacctcttctaaggattgtagacaggaaattaaatgacttctagtccctagagttcccaatctcctaccatcccatcctaatatgacagaagtaattcttgagttgcttctgaaaccagagcttccctcagaacccttagcctgccagatggcttcttggagagccctcactcacttttctccttctgctattgctgctcattcattccagcttttaaaaattcatctttat

SEQ ID NO: 240371 - DNA, 566 bp, Homo sapiens
gcaatttcataccatccttgaagttagagagagccacatgactcatttagccaatgaactgtgagcagaatgacatgtcacttccagcagaagctttaagaatctgagagacattcatacgttttccatgtgctgtagccttatacccaaagcctgggtcccaagtgaccatgacaggcagagctccctgttgagccacagagatttagagaatggctgttaacacagcataatccagcccatcctgactaatctgatattaacatgtataataaagaattctatcaatgctgagggaagatgattagttaaggtcctaggytgcaagtctcaaaacctcttctaaggattgtagacaggaaattaaatgacttctagtccctagagttcccaatctcctaccatcccatcctaatatgacagaagtaattcttgagttgcttctgaaaccagagcttccctcagaacccttagcctgccagatggcttcttggagagccctcactcacttttctccttctgctattgctgctcattcattccagcttttaaaaattcatctttat

SEQ ID NO: 240372 - DNA, 571 bp, Homo sapiens
ggattgcaatttcataccatccttgaagttagagagagccacatgactcatttagccaatgaactgtgagcagaatgacatgtcacttccagcagaagctttaagaatctgagagacattcatacgttttccatgtgctgtagccttatacccaaagcctgggtcccaagtgaccatgacaggcagagctccctgttgagccacagagatttagagaatggctgttaacacagcataatccagcccatcctgactaatctgatattaacatgtataataaagaattctatcaatgctgagggaagatgattagttaaggtcctaggttgcaagtctcaaaacctcttctaaggattgtagacaggaaattaaatgacytctagtccctagagttcccaatctcctaccatcccatcctaatatgacagaagtaattcttgagttgcttctgaaaccagagcttccctcagaacccttagcctgccagatggcttcttggagagccctcactcacttttctccttctgctattgctgctcattcattccagcttttaaaaattcatctttat

SEQ ID NO: 240373 - DNA, 280 bp, Homo sapiens
tggttaataagtcactgtgaactgggaggggagatttttcaggagtgccacagggctctccctttaatcacatacactccctgctttcattggaaagtgtayaatgatgtcagagtgccccagaatggagctagttggaagactgccgtcatagggatgccttagtgaatcaatcaggttttaatttctggctctcaactttgtagatgtaaaagttgatttatcaatatgtgagaaaggatgaatctttctgaaggttatgtcatcacactcactaagc

SEQ ID NO: 240374 - DNA, 280 bp, Homo sapiens
tggttaataagtcactgtgaactgggaggggagatttttcaggagtgccacagggctctccctttaatcacatacactccctgctttcattggaaagtgtataatgatgtcagagtgccccagaatggagctagttggaagactgccgtcatagggatgccttagtgaatyaatcaggttttaatttctggctctcaactttgtagatgtaaaagttgatttatcaatatgtgagaaaggatgaatctttctgaaggttatgtcatcacactcactaagc

SEQ ID NO: 240375 - DNA, 280 bp, Homo sapiens
tggttaataagtcactgtgaactgggaggggagatttttcaggagtgccacagggctctccctttaatcacatacactccctgctttcattggaaagtgtataatgatgtcagagtgccccagaatggagctagttggaagactgccgtcatagggatgccttagtgaatcaatmaggttttaatttctggctctcaactttgtagatgtaaaagttgatttatcaatatgtgagaaaggatgaatctttctgaaggttatgtcatcacactcactaagc

SEQ ID NO: 240376 - DNA, 302 bp, Homo sapiens
cagaccagcctggccaacatggtgaaatcttgtctctcctacaaatacaaaaactagccaggcttggttgcgcactcctgtaattccagctacttgggaggctgaggcaggagaatctcttgaacctgagaggcagaggttgcagtgagccaagatcatgccactgcactccaactggggcaasagagtgacactccatctcaaaataaataaataagaaagcagaaactaataaattagaaaacagaaacatagaactaatttataaatcaaagcactatgccttgaaaagagggagaaaa

SEQ ID NO: 240377 - DNA, 302 bp, Homo sapiens
cagaccagcctggccaacatggtgaaatcttgtctctcctacaaatacaaaaactagccaggcttggttgcgcactcctgtaattccagctacttgggaggctgaggcaggagaatctcttgaacctgagaggcagaggttgcagtgagccaagatcatgccactgcactccaactggggcaacagagtracactccatctcaaaataaataaataagaaagcagaaactaataaattagaaaacagaaacatagaactaatttataaatcaaagcactatgccttgaaaagagggagaaaa

SEQ ID NO: 240378 - DNA, 302 bp, Homo sapiens
cagaccagcctggccaacatggtgaaatcttgtctctcctacaaatacaaaaactagccaggcttggttgcgcactcctgtaattccagctacttgggaggctgaggcaggagaatctcttgaacctgagaggcagaggttgcagtgagccaagatcatgccactgcactccaactggggcaacagagtgasactccatctcaaaataaataaataagaaagcagaaactaataaattagaaaacagaaacatagaactaatttataaatcaaagcactatgccttgaaaagagggagaaaa

SEQ ID NO: 240379 - DNA, 355 bp, Homo sapiens
tgctatcttttcaaatgactgcagttcccagtgacatcatttttctcctccctggaagtctgaggggcagttcacttatctcctcccctcccctactcctcaccccacactcaaaacctgtctatgctcctttcattctcatatgacagatttcagatggcattcttatttccctgatttctttttgagatagcttgcatttccctmctctatataaagccaccgtttatcaaatgcctacatggaccaagcagtccacaagggcttcacagacagttttactaaactcatgccaaaactttcaggttttatagataaagatctataccttatagataaaggtatctataaggta

SEQ ID NO: 240380 - DNA, 256 bp, Homo sapiens
tgaaggtagagaatctggtggggaagcaagcaaatgcccatcacatgcactttcctccaacagagcgactcagatgctataaaacttgctaacgcagtctcagggtctgatcacagtaacatacaatccaggttttagtcatcagaaatcrcagtcctattgtcttctgcacagacccaaacacacttggaggtcatgttcaatatgaatacctcacagagaaggaaatttacacacgagaagtacatctgcagaa

SEQ ID NO: 240381 - DNA, 566 bp, Homo sapiens
tcttaccacataaaacatatatcactcatgtagcaaattatgtaagtgtttgaaatcatttcaaagctaygtaacacacatcgaatacttccatcaaatgtccatatagactatcatgtaatcaaagaatagactccttttttccccaacagatgcctcttttttctttttcttgccttatagaactggctagattctccagcacaacattgaataaaaatgcagatattcttgtcttgttcttgagcttaggacaaaatcattcatgcctttcaccattaaatgtaattttagctgtagagttttcatagatactcttcatcaggttcaggaagttccttctattccctcttagctgagagtttttatcaggaatggttgttggattttgtcaatgcttctccttcatctattgagatcaatcacatggtttttagtttgtttatatggtgaaatacagtgattgattttgggatgtcaaatgaactttgtgttcctgcaataaatcctacttggtcatgatgtattattttaaaaatatattgttagatttgatttgctgattt

SEQ ID NO: 240382 - DNA, 431 bp, Homo sapiens
agtttcaggtcttgcttttagatcttattccattttgagttaatttttatatatggtatatggtaagggtccaactttattcttctgcatgtagatatccagttttcccaacaacatttgttaaagaggccattctttccccattttgtaggtttgacacccttgtcaaagaccatttgacaatatatttatttctgaggtttctattctgtttcactggtctatttgtctttctttagtccartgctatactgttttgattactgtagctttgcaatgtgttttgaaattaggaagtgtggggccttcagctttgtttttctttctcagatttgttttggctatttggggtcctttgagattccatataaatattagaatggctttttctatttctgcaaaatgtgccattggggttttgatagggattg

SEQ ID NO: 240383 - DNA, 531 bp, Homo sapiens
taacacatagcaaagaacaggggagaagagagaatgagcttgacatttgcaaaaagtagaaagcaggtgttatgttagcttagaatgctgtaacaaaataccagaaaacggtacggtttaaataacaggaatttatttctcaccattctggaggctggaaaccccaagatcaaggtaccagccagccttttggttcccccttgagggctctcttcttggcttgctcatggttgccttcttgctgtgtactcacttgacagagagaaagagaggaagtaagctttctggtttctcttcttataagggcactaatcccatcatgagcactccaccctggtaacttcatccaaatctaatccttcccaatggcygcatctccaagtaccatcacattaaaggttagggcttctacatttaaatttcgagggtgacacaattgagttcatagcagtgagtatgtctagaacctgggaatccagggagatagtggcaggagatgaagctaagaagtagggggaaaactgtatgttc

SEQ ID NO: 240384 - DNA, 501 bp, Homo sapiens
aaagacagcactcccaagctttagagacaaaagagcaccccagagaaagaagataaccaaagaggcattaacttggtgacaaaacctaggctgtttgagtgtgattttattcagcaagaaagtttgtactttgatgtcctttctctttataaacacttactgttggtcttccccatactggcttcaaccagcatatctgaactaatgatttctacctctccaattctagctttaagccttctctgaaaatccaaaccagaaatgccatctgattattggtaatcatcaagggaatttcctccttttattctaaaatcagtttctaaaactgagtatcctgtctctgcttcctaaacccaccttcctttctccttcagtctgcgccattattaatggagccactcactcgggctagcaccttcagtcatatctgagttccatttccygaactctatcaagtcaaccatcaattcctcaggcatccattgtcttcttatccat

SEQ ID NO: 240385 - DNA, 618 bp, Homo sapiens
tttgtcaaaaaaaaaggactatgaaatagaggttttcaaatgtatggaatgttagcattttgagttccagtaattcaggtctccaaataattttttataagtcaccacatcataagagatacatcttaaaactttgacattacacacacttaggaatttcattcatttttttcttcagttcttgttaaaagaactgttaaaatgttaaaattgagcccgttcactcaatgagcccttccacaatcccttccagactgcccacttaaagacttttctaagaacccttttttagttcactttatatgtcaatttgactgggccatgggatgcctcaatatctgattaaacattatctctgggtatgtctgygaaggtgtttctggaagatattagcatttgcattggtgggctgaataaagcggatggtcctccttagcatgaaggcctgcataaaacaaaaaagcagaggaaagctggattccctctccctctgccttactgcatacgctgaacatcaatctgctactgtgctcaccattcctggttctcaggaatggtagaaccttaagactagaactgtaatctacaccaacagttctctcaggccttcaaattaca

SEQ ID NO: 240386 - DNA, 698 bp, Homo sapiens
ttgtaaaatgaataaacattaactttagaagccagtttcttaggagtagtgggattagtggcatgcacaggatttagctgagagtaactatgttaatgaaatcttgtataaagagaagtaaacataattcctactagaggaaaggggagcaagctgggaatcaggagctgaaaatkcaacctgtccatggtgcattcacaagggccaaatgtttcaactcaggctaagaccacagaaagctcttaatgctattcagtagagatttacatggtagggattgtaaagagaagtcaaatcaatttatcaaagcatattattttatcatctgcatgacttcttttggaaataatgttttctagtcacctagcatagcttagtattttatctcatagccctgggtagtagcgtgttggttggcttatcatatgcatacacacacacacagtggtaaatgatcctcaagcctactttacatgtatgaaaacaggcacaaagggtcaaaatgctttgcccacagcttcataacataacatcaggagtcatgacgtgggccttgttcttctgtgacacaagcctgcatttagtcttcagttaatgcacactacaaaggagcggtgtgatgaggtaatgaagtaggttatagatccgcttttgagatcctaagcgctgcccaactttaggcaaattacttacctctc

SEQ ID NO: 240387 - DNA, 392 bp, Homo sapiens
acatacataaaatacaaagcatacataaaatacaaaatcaaacatacataaaatacaaaagactaaacagctatttaaaggaatcagacaacaaccaaggtagcctggacttgagggattaatctccaggagggaagggatgtacatttaggtaagccccacatttactaccatttttttctttgatacatttgccaattcccaggatggtacataaaaaacaaacaatttgagtcttaaaattcacagtttcaaaattatacttagaaaaatttggattcagaactcycaagccaaccagaaattgaggaaccaaaatcaaggggaaaacaaaatcacgttcagcttggattttacccattaggaatgggctgaatggagcaagaagtaga

SEQ ID NO: 240388 - DNA, 486 bp, Homo sapiens
gttggcttatgcaagtcaaagtgaaatataaataagtaaggcaactacctggataaacctagaacaataaactttcctcactattgtctacataatcagcttaatattttactttgttatcacacagtgcatgggaccgatgatgttwaaaaatatggagtcacattgcaaacaatcattgtgttctggcctgcagtgtgaactacagtctggtgtttttgactggcaggaaaatacaaaagaagctaccatttaattctgcttaaggttataattcaataagtcacaacacctcctgaggccactaaaccaaagtcctggtggttattcaatttatgactttttgtcaatctttctctcaatttatttctaaaccactattgacataagatctaaaaattggattaaaaaaaaacccaaaggccatgtggatacctgttttaaggctgtcagtgaaagccacttttatgaatatactatacccat

SEQ ID NO: 240389 - DNA, 583 bp, Homo sapiens
ttctgtgactgtattgtttattataagtttctggttcactagtactgtaatgtgccacaattacttaagctatatctttaattaagcattaataaaatatgagttggataattattctagcaattttattatataattagtgaataagttaacataaaattgcattatgagatttcatataaaatttagtatgtacatatgagtagcttaatttaatgacaaatcatcctcaaaaaaacaaaaataagagggacttttctgagtcagtgttcccttatttctagaaatgattctcaagaagaaaaacttaaaataatcaattctgaaatgttagaagtgaaagtaactgtgtacatctgtggtttttgttttcacactgtaccaggggctctgcttcccaaactcctctactagaagaactgtcacacgtaggttacagtacacctttgttatagagatggggtcacattcaaagccaaggagcatttaagctatctgaycagtcatcccacctttcagaagtaaggctggctccccagctttcaattagtactggtctctctctcctacttacttcagctac

SEQ ID NO: 240390 - DNA, 577 bp, Homo sapiens
gtgatatgatttttatcttattaatatggtgaattgtattagcataccttctaatagtaaagcattactgtattcctgagataaaccccattattggtgctgctttattcttttaatcccatacttaagcacattctgtagttttaaaggttttgtaatagtggtggcacctacacttgctgctgtaaccaaaatgtttatgcatatgtgtgtgagtgaaagtgtgtgttattttcaggtttagatttcaaagtgatactgttcctattaaaatatgaaaaaatgaagatttttctttcttctgcatgtcrttaaaaagacagacaaaaagcaaaccctgaaggtttaaaaatacttacatgtgaaatcatttgaggcctgattttaatcaatttcctctatgattatccatctatttggatttttcctccctttctgccctcatttagataaaatatattttcagataattctctgatctgtagattctttcaaatgtgtttgtatgcagttttgcaaagtatacttttccgactcttaagtttcttttacatctctagctatttcctggtattcc

SEQ ID NO: 240391 - DNA, 430 bp, Homo sapiens
aaatacaacagcttgtagagagaaaaataaaaccttcacagttatgatcacagaaaaattgggacgttgataacagaccaagaaggaaaatagacactgtgaaaacatartgaaaatcataaagtacaggggaaaaaagagcaagtacaacaaagaaatatagttaaaaattaatgtagaaaaaaatagcagacataaaaagcatataaggatatctaaatatgcataatgagtatcccaaagagaagaattgaaatggtagatcataaaaatatttacagatataactcaagaaaccttgccagaaaaaaaaaagcttgaatctatagacattaaaggacatattttcacaggggcattaacacaaaaggctgtacaccaagagataccctacctagtaaagctattggaatgagaagaaagtagccat

SEQ ID NO: 240392 - DNA, 470 bp, Homo sapiens
aaaaaaaatatatctgtagaaactctaccagaaaatttttacaacaacaaattctagaaaatttcagcatacaaaatcaacataaaaaatcaatagtgtttctatacattaacaactaattatccaaaaaataaattcagaaaataatcacatctacaatagcatcaaaaacaataaaattcttaggaataaacctacccaagaaggtgaaagatctatgtaatgaaaaccataaaatgttaatgaaagaaattgaatgggacacaagtaaatggaamgatagcacatgttcatgggtcagaagaatcattgtcaatctcgccataacatgcaaagcaaccaataacttcagtgcaatctctataaaattccaatggcaattttacagaaatagaaaaaccgattctaaaatttctgcagaaccagcaaaggccacaaatatctaaagcaatcttgagcaaggagaccat

SEQ ID NO: 240393 - DNA, 485 bp, Homo sapiens
taacattatagttggagattaacatttgtctctcattaattgatagaaaaggcaggcagaaaatcagtagagttgtagacaacataaatagcacaatcaaccaaattattgtaatagacatttaaaagaacactcaaccctaaaacagcaaaatatacattattttcaagtacacataaaacattcaccaatatagacaatattgtgggtcttgaactattttttaccaattttgagagaactgaattcattaaaagaaaatgtcatttgaccagaatattaaagtagaaagcaatagaatatagaaaacctgcaaagatttagaaattaaatcatattattctaaaaaaatatatggagcgaagaaaaaataaaaatggaaaatattttaactgaatgataataaaagaacaacatatcaaatttgtgataggtmgtgataggagggaaatccacagcattaaatgcttatgtagaaagaagaa

SEQ ID NO: 240394 - DNA, 419 bp, Homo sapiens
gaattccatggtattccacggtatattctatttcatgatgaattggaaggctctatagaggaggcaaaattttacttcctcccttttaggacttctcagatgggcctgaggattaaattgagataagacagatcaacaggagaaaattatacaaatctgtttaatacaarttttacatggcatgggagccctcataaagaaatgaagactcaaagacacagttagacatgaacacttacatactgagttagagtagtaaattatgaaaatgtgacaaggcaaaggggtttgggctaaggtagttaactgtgtagagaaggggctaggaagataaagattagtctaacaatgtttgtttgtacaaattttcctcatccttaatttcctgtccttgctgatgaaaatgatgctttcctcct

SEQ ID NO: 240395 - DNA, 486 bp, Homo sapiens
tggttgaaatcttcaacaaaggagctgaaaaaacatattggggaaagaataatctcttcaataaatgatgtgggggaaaactggatagtcacatgcaaaagaataaaatttggaaccttatgatataccatacgcaaaaatcaactcaaaatgaatgaagggcttaaacataagacctgaaactataaagctcctagaagaaaatttagggaataagctccatggcattgatctgggcaatgatttttttggatatgatataaaaggayaggcaacaaaagcaaaaatagaccagtaggaccatattaaactaaaaagcttctgcacagcaaaggaaacaataaagaaaattaaaaggcatcctacagaatgggagaaaatatttgcaaaccatatatctgaatggggatcagtatccaaaatatgtaaggaacacatacaactcaatagccaaaaaaaaaaaagaaacccagttaaaacaggcaa

SEQ ID NO: 240396 - DNA, 246 bp, Homo sapiens
tgcatcttgtgtctcagtcaactgaggcaggacaaaccccacctgcgcggggggacctcaatctccatttatgatggtaagtcatcggttttcaccagttcccaggggcacccacactggtgcatttggtaagctccaggagaaaayttacacccctttccatttgattttgttaataattggcttttctaaacacatgtttcatttttggagtgaataaaatgtgttaatattgtaaattaagcc

SEQ ID NO: 240397 - DNA, 506 bp, Homo sapiens
aatcataagtgtttatgcactgaataacagagatttttaaaaataaagtaaaaggtgcaggatctgcaagaagaaatcaacaaatccacagctagaggttttaataccattctttaaataatttgtttgaaaaggagayagaaaatcttcaaggatgtagaagagttgaacaacactgtcaatcaacttgacctaattgacattaatagaacactctacccaataatagtagaatatgctatttagaatatataatagtagaatatgtaaaagaaattacatttcttttttcatgtccatatgggacactgaccatggtaaaccaattctgaaatataaaacaagtctcgatacatttataagaattaaagtcatacaaagcatgttctctcaccaaaacagaaaaatatctggaaagttttcaaagatttaaaaagtaaatactgcacttttcaataataaattagtcaaagtagacattaaaaggaaattagaaaatattttta

SEQ ID NO: 240398 - DNA, 391 bp, Homo sapiens
ctccagtccactgctcactcctgcaaaatctaaaygcctgggtctccctgggctctcagcattatctcctcaattcagggagtccatggccttctccacctgggtcaccccttgctagagcctggaaactctggcagaagtaagctaggcgaccacagggctcattttattgactgcccaactcccagggatcaccttccttcattgcctgatgtccagtgtcttcaaagctattgttttacatattttgttgctttgtttttcttgtttttgttcaggtgagagggtgactttgttttctatttattactccactatgggcagaagtgaaagtcttatttttgctctttaaaagatgagtcagcaatgttcctgcttcctgtagtctctg

SEQ ID NO: 240399 - DNA, 297 bp, Homo sapiens
taaatgtaaattgttaatcctgaaaaaaattcacaatctggtttaacggaacattgcagagtcaaggaaagaatgtgtgcatggggtcggtaatatcctgagtttatttaaatgggttttgcaaaactagctcatgccagcacaatcttttattcttctccgcttcagcctattttatctttttagtgtcttgttcaggcaaattcctttccccacaggggtgacgtccctattgacacagcacagagaaggaagttggtgatctgtgacatyccaaaaaggagttcctggtactca

SEQ ID NO: 240400 - DNA, 433 bp, Homo sapiens
ggtgcgcgcccctagggtgcgcgcgagctaagaccgcggcccggggcggggtgtccccggccccgccccctgcagccctaccggagccagygcgcctgcgtcgcgggcgcacgataacaggagttcccggcgtctccgccccttacccggcgtgccccgcgcccggaggcgctgacgtggccgccgtcagagccgccatcttgtgggagcaaaaccaacgcctggctcggagcagcagcctctgaggtgagggcgaggggcgcgggccggtgtgggccgcagagacgttggagccggcgggggctggggactggcctcggggcgacttgaggttcgcgaagggcacgtcgacccccgcggcggcggcggcgacagggccgggccgggggcggacgcagacgggccgggctgaggctggggcccggccggagtc

SEQ ID NO: 240401 - DNA, 580 bp, Homo sapiens
agggatgcaatctcagaattacaggaggatgttggagccctaggaagtgtccccatgctcacctcctcctggaagccctcccagatgatcccgaaggcagccactgacagcagtccagttctgcagggaggaacactgacctagtcccccagaccttggaagttgctccaggaggtcatgcccctgggatccagggctccagatccaagcaagactccgacagggacctgagtgccctgtcctgaggcatccatccctaggggttcagaggcagaaagggggatccatgaggggaggagactgggaaagagggctgagctgtccaggggagggggtggggcctgtggggggcggtggtgccactgtagggcagagggaactagggctcatcccaggtcgacagctggaccccagggtgggactgcttcccccaggacccaggttgaggctgtgtctcccagascccagggcagggccgtgtcttcttatattccaggatggggcacatcctcagctcagtccaggctcagggtctgtacttgttttacctgggcccgcagcccagggtgctccaacgtct

SEQ ID NO: 240402 - DNA, 580 bp, Homo sapiens
agggatgcaatctcagaattacaggaggatgttggagccctaggaagtgtccccatgctcacctcctcctggaagccctcccagatgatcccgaaggcagccactgacagcagtccagttctgcagggaggaacactgacctagtcccccagaccttggaagttgctccaggaggtcatgcccctgggatccagggctccagatccaagcaagactccgacagggacctgagtgccctgtcctgaggcatccatccctaggggttcagaggcagaaagggggatccatgaggggaggagactgggaaagagggctgagctgtccaggggagggggtggggcctgtggggggcggtggtgccactgtagggcagagggaactagggctcatcccaggtcgacagctggaccccagggtgggactgcttcccccaggacccaggttgaggctgtgtctcccagaccccagggcarggccgtgtcttcttatattccaggatggggcacatcctcagctcagtccaggctcagggtctgtacttgttttacctgggcccgcagcccagggtgctccaacgtct

SEQ ID NO: 240403 - DNA, 645 bp, Homo sapiens
tatacagattgagacagaattctgtcaccagaaagaattgtgttctttgttctgtggcttctcttcattagatgtgtgtgttgcctttataaatcccaaagattgtttagcaacctgagactgtgatccgagtgggtgatgcatgtcatgtgctttattaccatcaaactcaaggacgacagaaaaaagaacagtcacaatctgtttgttggaactgttgccttccccttacccagagccaacacgtagcttctcctgtcttccatgctaacacaggcaaccaactcacagccaacgagacaggaataatgcagggtggatgcaggagaatagaaaactccaggcagcagtttcacatgactagcaaaaggaaactattgaaataggttcagaagctagggactgataagaccctgaaaaaccagggtgtaggccaaaccggctaagacaaactggatgcaccatggcactggatttgatataggacctcattatatgcttgtgaacatattgaatcacatacccacsagtgcggtaaagatacaagcccgaaaacctgcagcgtgactcactctcttgatattcaagtgcatgctaccctttactgagtgtgtacttttactttgctataaatctcagttcttt

SEQ ID NO: 240404 - DNA, 412 bp, Homo sapiens
ttgaagtgaccacattacttgtgtctgttcaggcagatttataaggctaaactcaccattttttttccttctatcacaaagtacccagcatcttcctatgacaaatgcaaatgtgctcagggcttctgagaaaccaattgttttagaagccacagggaaggaacaatgttatctttttcaaaaatctataccttattcctaatttcatgggttccaaccctctgcagattgtggaaacattgatttatagtggctgacctcatggtgctcwccacttacctgcaggcaatactatctttgaaacaaacaaaaaatataaaaacttaaaaaattattctagttccaaagactagtgaaaaaaaatcagaatgaagtgtaggtgtgtggctggttgcatttccccaaaacagcc

SEQ ID NO: 240405 - DNA, 578 bp, Homo sapiens
accacttactattacataatatctcctctacttttctttttttttttttccttttattgctctgaagaagtagcaagatgctaattccaacagcacaaggaaaacgacctataatcttaaaaattaaataccaggaagtaatgactaacgattatctttacagagaagaatctggagcccagaaaggtgaagcgattagacacaagatcacatggccagtgagctgcaagctttcctgaccttaaatcaagtgatctatcccctcctctgtggattttttaattaatctgcattacaacccaagtagaatgagtcaagcggataatatgtaatgcctttttggaccagaaaaaaattggggcaatttggtaattggaccacagatggctttggtgataaattagcaaaagattccaggcattcttgctgctggataccatgcattagatggtgtcacctcagaagcttaagactaaattttctacccagaagattctgggtagaattatttttcagataaaaatgcctttwtttacttagcacagtatgagactacagaaggcagtgaggtgtggcat

SEQ ID NO: 240406 - DNA, 382 bp, Homo sapiens
acaggattggcatccccaggtgactattatgcactttgaagtatagaggaaarcacttcaactttttcaagagaaacagtatattttgtgactgcagatcacatgggcatagaagtttagatgaaataatccaaagacatgggattctgatttttcaggtgatctgttaatccctgaagtgcatctggaggttagcccatcggttctgcaaatcttcataatttccatagttactgtagtaaccatggttagtacctttcctttgtccagcaggtgggaatttcggtcttttactgctctctgtcagctgtcatgacatgccacatgagttgagtttattcacaggttttccatgtgacccaaagtacattttgtaggttaa

SEQ ID NO: 240407 - DNA, 382 bp, Homo sapiens
acaggattggcatccccaggtgactattatgcactttgaagtatagaggaaagcacttcaactttttcaagagaaacagtatattttgtgactgcagatcacatgggcatagaagtttagatgaaataatccaaagacaygggattctgatttttcaggtgatctgttaatccctgaagtgcatctggaggttagcccatcggttctgcaaatcttcataatttccatagttactgtagtaaccatggttagtacctttcctttgtccagcaggtgggaatttcggtcttttactgctctctgtcagctgtcatgacatgccacatgagttgagtttattcacaggttttccatgtgacccaaagtacattttgtaggttaa

SEQ ID NO: 240408 - DNA, 382 bp, Homo sapiens
acaggattggcatccccaggtgactattatgcactttgaagtatagaggaaagcacttcaactttttcaagagaaacagtatattttgtgactgcagatcacatgggcatagaagtttagatgaaataatccaaagacatgggattctgatttttcaggtgatctgttaatccctgaagtgcatctggaggttagcccatcggttctgcaaatcttcataatttccatagttactgtagtaaccatggttagtayctttcctttgtccagcaggtgggaatttcggtcttttactgctctctgtcagctgtcatgacatgccacatgagttgagtttattcacaggttttccatgtgacccaaagtacattttgtaggttaa

SEQ ID NO: 240409 - DNA, 394 bp, Homo sapiens
gtttaaaaagaacctgatattatcctaggggtttcattgtattatggtgtgttttatgttttatccacagaggacagatgctgaaatgattacacaagtaaaatcatgtgaccatttttataatgtgtgagaattttttaattttgaaaacaacctaataatcattatgctgccaggtagtaaaaaattaataaatttctggtcrcttcacttttattaaagtataatttaggaaagaacacagcttagggaattttcacaaactgagcacacatgtgtaaccagcacccaaatcaagaaataaaatattaccagtatccctaagtccttttctcactcacttgctttgttttcaggttttagctattataaatatagcttttgtggatattaa

SEQ ID NO: 240410 - DNA, 651 bp, Homo sapiens
atttcccagcctgccttgtaaataagcgtgatcatgtgacaattctagcctgtgtaatgcaagcagaagtcatgtgtacttcttccatgcctgatgcataagaattctctatcgattgtttctctgtgttctgctctcctctggggcttgatgtaattgagaacagtacattttgacaccaaatgccaaagcagcatcacaagatgaaaggagcccaggtccctggtccgtgaattagaagaccttatatgagtgagaaataaactgctattacattaagacactgagatttgggagtactgcccaaactaatatgctgtcagtaaatatccctttgcttaagttgctagagtgaatctctaaacctcgaaggcaaaccgagccagatcacaacaaaaattgttccaaagttytgtgagagcacacatattttcacaatatactaccaaacaacttttcaaatatttgtgatttgtcttctccagcaacaaatagaacccattctacacactgttcttcctgctggcaaccaacgtgccctactcataataggtgtttaatatgtgctccttgactatgactacagttggaccacaaggtggtgatttgtccataatctcaggttgaaggtgctggaaaaactatttttta

SEQ ID NO: 240411 - DNA, 651 bp, Homo sapiens
atttcccagcctgccttgtaaataagcgtgatcatgtgacaattctagcctgtgtaatgcaagcagaagtcatgtgtacttcttccatgcctgatgcataagaattctctatcgattgtttctctgtgttctgctctcctctggggcttgatgtaattgagaacagtacattttgacaccaaatgccaaagcagcatcacaagatgaaaggagcccaggtccctggtccgtgaattagaagaccttatatgagtgagaaataaactgctattacattaagacactgagatttgggagtactgcccaaactaatatgctgtcagtaaatatccctttgcttaagttgctagagtgaatctctaaacctcgaaggcaaaccgagccagatcacaacaaaaattgttccaaagttctgtgagagcacacatattttcacmatatactaccaaacaacttttcaaatatttgtgatttgtcttctccagcaacaaatagaacccattctacacactgttcttcctgctggcaaccaacgtgccctactcataataggtgtttaatatgtgctccttgactatgactacagttggaccacaaggtggtgatttgtccataatctcaggttgaaggtgctggaaaaactatttttta

SEQ ID NO: 240412 - DNA, 651 bp, Homo sapiens
atttcccagcctgccttgtaaataagcgtgatcatgtgacaattctagcctgtgtaatgcaagcagaagtcatgtgtacttcttccatgcctgatgcataagaattctctatcgattgtttctctgtgttctgctctcctctggggcttgatgtaattgagaacagtacattttgacaccaaatgccaaagcagcatcacaagatgaaaggagcccaggtccctggtccgtgaattagaagaccttatatgagtgagaaataaactgctattacattaagacactgagatttgggagtactgcccaaactaatatgctgtcagtaaatatccctttgcttaagttgctagagtgaatctctaaacctcgaaggcaaaccgagccagatcacaacaaaaattgttccaaagttctgtgagagcacacatattttcacaatatactaccaaacaacttttcaaatatttgtgatttgtcttctccagcaacaaatagaacccattctacacactgttcttcctgctggcawccaacgtgccctactcataataggtgtttaatatgtgctccttgactatgactacagttggaccacaaggtggtgatttgtccataatctcaggttgaaggtgctggaaaaactatttttta

SEQ ID NO: 240413 - DNA, 526 bp, Homo sapiens
tggttcagtctttagggggtacatcatagtttgaatcccattgtggactgttagcccagccctaaaatagttggtgtttgtggctaatccctcataggagtgtcacacaatctagttgtctgtctcattcagtctggaaagctggttcaattgtatcaacaatgcattgtctaaaccacagccagtaagcaacaaggctcaaatgctttttgcaatagttgttaggcacataaacatagtgtttgatctgctttccctcacgtataaaatgaagggttaaacgaatgtctttctaggatcmgttcgcgctgattacagacaaatgggagtgctccatgtaaacaagtccagaaagtttttgtgatagatttaatatatagtgcatgtgaggccgtgactgtcagcagaaggaaagtcttcacaaagcaggcaataatacattgaggtaaatttacaatgaggcttataatttcaagaggtttaaaggaagaggtttataaagaaaaccacaggatgtgcaatgaaa

SEQ ID NO: 240414 - DNA, 583 bp, Homo sapiens
catccacataattcaactttttgaacctcatttttctcatctatgtaatccagatgtcaactagaaatacctggacccttgagatgtagataagatccactcaaatccccataatgtaccctgtagaagtcttaacccttcccaatattcctttaaattctaggagtggagctagattttcrttttacttctggatacagttttctacttctaccaaaactttccagttaataaattatgtctccttcctacccaaacaatcattcttcacaatggttactcaagtgtaaaattcagccaactcccttgatttcccttcaccaaaaaactcttaccattcacccaaggcatctgtgactagaatgtattttcctgaagatgtcacaggtgccaggaggggatttatgttgcaaacacaaagaactttaagtaagcacttgctttgaggagtcatttcatcccctcatcactgggcacgggcggtggcctcttcctgcccagcctcacatttcttgccagatcctcgccaccttcttttatctgccccttggtttctttagtatctcctcctctcatgggtgtg

SEQ ID NO: 240415 - DNA, 583 bp, Homo sapiens
ttcatgtggtttttgttatttattctattgatatatttattatagtaattgattttcagatgttaaaacaactttgcattcctggggtaaatcctacttggttatgatgaaaatcctttttatatgtgactggattcagtttgctactattttgatgagcatttttttgccatatttgtaagggatcacaatctgtagttttcttttcttgtggtatytctgtcttttcttcatgtcagggtgacacaggcctcaatgaattagttgggaagtgattcttcctcttccattttttggaagagtttctgaaggactggaattatttatttaaacattagtagaactaatcaggattagtagaattcatcagtatttattttgcagaaagttttaaaattactaattcaatctctttactgctattgaggctctctgataaatttttaaattctgttatgtactttttagctccagaatttctgtttggttctttcttcttattatttttatctctttattgatattctttatttgatgattcaccattctaacactttcctttagttctttagatatggtttct

SEQ ID NO: 240416 - DNA, 583 bp, Homo sapiens
ttcatgtggtttttgttatttattctattgatatatttattatagtaattgattttcagatgttaaaacaactttgcattcctggggtaaatcctacttggttatgatgaaaatcctttttatatgtgactggattcagtttgctactattttgatgagcatttttttgccatatttgtaagggatcacaatctgtagttttcttttcttgtggtatttctgtcttttcttcatgtcagggtgacacaggcctcaatgaattagttgggaagtgattcttcctcttccattttttggaagagtttctgaaggactggaattatttatttaaacattagtagaactaatcaggattagtagaattcatcagtatttattttgcagaaagttttaaaattactaattcaatctctttactgctattgaggctctctgataaatttttaaattctgttatgtactttttagctccagaatttctgtttggttctttcttcttattatttttatctctttrttgatattctttatttgatgattcaccattctaacactttcctttagttctttagatatggtttct

SEQ ID NO: 240417 - DNA, 506 bp, Homo sapiens
ctatgactagtccgtgacttcattatttgccaaggtagtccacataaaagttcttccttaagggaattccaaagctacttccttgtagcgttggttcataatccacattctcctttctgaggccaaattaatctatcttccatgtgagaacccttcaaacatttgaaaatagttatcatgccccctggaccttcctagagtaagcattcttagttctttcagatgttttcattgaatttggcacttctttcccatgccttcctgattacacctctctgaacattactggagaacaatacattataacatccaggtctgctctgattatttcagagtagtattgcatgctcacttcccgtatctcccacattttaaaagctattcttctattagcacatcttaaaatcattttagcattttktggaagtcatagatctcacattgattaatagtgaacctacaattagctaaaatttctaggttcttctaaaatacactcataatcc

SEQ ID NO: 240418 - DNA, 595 bp, Homo sapiens
tgtcgaatttgatgagcacacatagagctagactaaatggatggggtgctgaggctgggcttccataccttaagtacctacgaatcatgtgagtgattaaaagatttcttaggtcaggcctaatttctaatcatctctcactcaagccagcatatggccactgtatgagttcaagagtgagcatttttttgaaacgcagttaagacttcagtttcctgcaccgaagaactaagtcactggcaacttgtcatgctagagaaaaaggcaggggacaattccatctcaggtatcatcacttcacgttgcttaccctacctacctaaatccagctagcatgtttgctcagccccacgtcagctagagtagaaattacttatccacttctcctctacacaaacctctctttatgagtacarataaggaaaacaagcctgccaaatgacagtttgtcattgcaggagccatggccagaatccacatttcccatatctaatgagtgtgactccagccatgttcttcatttacatttatatcgttcacaggaatccatgtagccctgacttttgtgggcattgttatatcaactccaccccca

SEQ ID NO: 240419 - DNA, 411 bp, Homo sapiens
tccattttcctctgagctctgtaaaatatatcacatgttctcttagcatttggtatttccactggaaagtctagtacctgggaagctccatttgatcctccttcctttataatgtttttcccccttgtctaaaagtttataggacttttcctttatcctataaattcagaaatttcactagatgtgatttattttcagtaatcttgtctgtcattcagtgagagttaacaatctgaacactaaaacttttctgcaaatcaaaaatatgtttgcctgttttcctccatctcctctgttctcttcttctcaaactcttattacataggtrtaagacactctaggtctctcaacacttcttaccctcccttcctttacttctttctctttgctctgggataattccttgaattc

SEQ ID NO: 240420 - DNA, 380 bp, Homo sapiens
ggagttttcctgcacaagctctctttttttgcctgctgccatccatgtaagacctgacttgatgctccttgctttctgccatgattgtgaagcctacctaaccatgcggaactgtaagtccaataaacctctttctgttgtaaattgcccagtctcacgtatgtctttatcagcaatgtraaaacaaactaatacaacagtacaatatgacagtagagaattgttcctacctgattaatgtaccattactgcatttaaaatgtttgcaatgaatgcagcaaaaatggcaaagcccaacctgatttttaacaaggctgtattttaaattgtgattttcagtggtatataccctatttctctccagattacacatcccacac

SEQ ID NO: 240421 - DNA, 633 bp, Homo sapiens
ctattttcatccatcccctcaatgacatacctgatgctctttatctaattgatgacatgtcagtcttaggatgtttcacaccttctttcatgagtagggtagtgttagaacasttagaatggaaattctttaccttcccattatttgcaaaacaggctttacttgggatcttacctatacatctggttggcccaaaatggtgttggcttatgtctgttgtcatggaatacttgttaatagcatcccctttccctgtgaaaaggccatggtttgaatgttaaatgatagaggcaccgcagctttgccatgctggtaccaagatgtcctaattacatggaccaagatgttgactttaaagtattttttggcctgtgtctataaagagctcatgacatcacaaactgaaacaactggcttatcatgaagattcattagctaggtgcaaagacaagtcagaaatagggttcatttccctctacttttcatgatgatcttctgcttaatatgaggtatgggttattgtggggatggagtgaaactcatctagaggataattgtaaagagtgctgcactgtgattttgagatgtcacatcacatattcccataatgtttgtggtcattagatgcacaaa

SEQ ID NO: 240422 - DNA, 579 bp, Homo sapiens
tccagtctctaaaactgaaaataaatttctgttgtttataagtctatggtactttcttatagcagtctsaactaagacactacctgaattttcctccctgatcccagttgtgaccagccatacacatttgtaaatgtgttcatggtagagactgcggccttaagcctataggtgtagatttcatgaacttggtctacctcaactttgctatttttgcagagaagagttgggccgctctatctatttctgtacccatcaccaatctttctatctcccatgtgattcaaaaatcattagtgtctggcagattgtattttccaaacatgactgtgcttatatctcccattttatgtgatcttcttacactgtaattttgacactcctcccattgaatgttagagtttatgtgccctgtccttgaacatggacagaaccttctcattgccatgaccaataaagtatagtatacatgctatgtgatacccaagaatatatcataaaaatgctatgcatttctgtctttggaacacttggtcttggaacccagctccatgcagaagaaacaaactaacccacaca

SEQ ID NO: 240423 - DNA, 579 bp, Homo sapiens
tccagtctctaaaactgaaaataaatttctgttgtttataagtctatggtactttcttatagcagtctcaactaagacactacctgaattttcctccctgatcccagttgtgaccagccatacacatttgtaaatgtgttcatggtagagactgcggccttaagcctataggtgtagatttcatgaacttggtctacctcaactttgctatttttgcagagaagagttgggccgctctatctatttctgtacccatcaccaatctttctatctcccatgtgattcaaaaatcattagtgtctggcagattgtattttccaaacatgactgtgcttatatctcccattttatgtgatcttcttacactgtaattttgacactcctyccattgaatgttagagtttatgtgccctgtccttgaacatggacagaaccttctcattgccatgaccaataaagtatagtatacatgctatgtgatacccaagaatatatcataaaaatgctatgcatttctgtctttggaacacttggtcttggaacccagctccatgcagaagaaacaaactaacccacaca

SEQ ID NO: 240424 - DNA, 520 bp, Homo sapiens
gtaggagaactggattcagtttcacctatacctgtagtttcactacagcacactgccttatacaattaaaagagttacttttccgtggagatggcacacagatatggattcatggacacaaacatctagaatctgcacgttctttcttactaaactgattttccagtttttacatcttcamggggaattttcttgtttcttgctcatttgtaacatagtaagtttggttgcagctttgtgcatgatgcatacatggtcgcccagttaaggtgaccacaatcttatattatcacaatattctatacatggcatgctggctagcttccctgtctcctgcagatctgctgtctaatccccttcactctactctctgttgccctataaaactgacaaaatcccacacgtgagcaagaagtcatggaacccaaaggtcccaagttctgctttttccaatcatactgtggtagtaactgaaatcagtttttcaaaagagtcaaaattaggtagtgggatatgatga

SEQ ID NO: 240425 - DNA, 511 bp, Homo sapiens
tacaggcatgagccaccacacccagcatactttgtttttttaattaacaataatttaaatactgcatgccactctcttcttgctttcatgacttctgatgataaatgtgatgtaattcttatctttactcttctgttgwtatggtggtatttttctctggcttcttttaagatttttcttctttgtctttgattttctgtgggttaaatatgatgcacctaaatgcagagctttggttttggggctttgtttttatttattctgcctgatgatctctgaacttcttggattgatgtaggccattaactttggaaagttctcagatattattagtttaaatctttcttctgttctgctgtctctttattcttctagtatttcagttacatatatattacatcttgtgaaattgccctatagttcttggatgttctgtttttattgttctttttttctctttgcaattcagtttggaaggttggtattgacctattttaaagttcactgattc

SEQ ID NO: 240426 - DNA, 617 bp, Homo sapiens
gtattttctgctactcgagaattctggccatcaggctatggaacgttgagcatggttgcacacactcacatgcactcacgcgtacacacactttcatagagttattacttttttaaagtctaatgcctagagtggtctggaatgaatgctgacatactgtgagaaataaagaatgagaccggacccacgagtaaccaaatgagcatttcaccagtcagagtgagtgaccaaaggacagctaagaccgttgcattccaccttcccctctggccaagtttgcttcccaatctaagtttggcttctcggtcttccctgaccttcactatcaaaccaagkcttcacaggagatgaaacacctttctgtgaaacacagtagatgttcaccaggtagatgcagggagagggattgccagccaaagcagcagcaatgaagtcacggggctgggaatggagccacatgttggggagttataattagttcattactctaaaaaatagagttactcaactcaaaaaaaaaataaggatggacagatagaccaagttcacctcaagaggaattcatatgttaggtaggagtttgaaattaaatagctatcaaaggtttcaatcaagga

SEQ ID NO: 240427 - DNA, 521 bp, Homo sapiens
gaattctggccatcaggctatggaacgttgagcatggttgcacacactcacatgcactcacgcgtacacacactttcatagagttattacttttttaaagtctaatgcctagagtggtctggaatgaatgctgacatactgtgagaaataaagaatgagaccggacccacgagtaaccaaatgagcatttcaccagtcagagtgagtgaccaaaggacagctaagaccgttgcattccaccttcccctctggccaagtttgcttcccaatctaagtttggcttctcggtcttccctgaccttcactatcaaaccaagtcttcacaggagatgaaacacctttctgtgaaayacagtagatgttcaccaggtagatgcagggagagggattgccagccaaagcagcagcaatgaagtcacggggctgggaatggagccacatgttggggagttataattagttcattactctaaaaaatagagttactcaactcaaaaaaaaaataaggatggacagataga

SEQ ID NO: 240428 - DNA, 613 bp, Homo sapiens
aagcttttgggtacacaagagtaagaaaaagagaaaaatgagataagatgaacagtgaggtgtatgttctggtgttgcccatttagaggcaacaatgagagtagatgcattggcttccagtcacacgccctgatgttctccctttttccctgataagcagcagctcaataagagatttgcccaagtgtttgttattttgcagcctgacagggaggcactttcaaaaggtttgctttcttcttttgcaggactactaggcatgtagagaaactctctagatgctcagtgtattcatttgttattamttccataacaaataactgctaatggagtggcttatataacacaaatgcattatctttaagtttttaaagtcagatgtgcaacatggatctcactgggctagaatcaaggtgttgtcagggctatgttcttttctggtagctctagaggggcatctgtttccctgctcatttggtttttgacagaattcagttccttttgattgtgaccaagattccttgtgaccttccagctgagagccatctccagcttctaggggcccctgtcttccttgacttgtggcctcctttctccatattcaaagccagca

SEQ ID NO: 240429 - DNA, 520 bp, Homo sapiens
ggtaacctctttctgctgtgacatttaattaaagccagaaggaaagtgagagggaaaatggccatgtccattgcatgaggggaaggggtatctcccaaagttcattctaggcacagccatggggctgtcctggagcacaagatgaatgctctttgctgtatgctgagatcgtctcagaagaaaagatcacacagtggtatttcagagctgaaatggttttctcagctcctttttcctaatttgctggagactagttcagagaaagtaattagagttgctttggtaatgtgtttgctttaccactttcaattaaggacaagaataaagtgaragaaagagagagagagagtgcacaacagtgaaagtacattttaatgctcccaccagtcctccatgcaaacttgcacattattttcttggttattttaaactaatgagtccccaagttgtttcattttaagcagctttgttaaggtataattaacatataataagttgcacatacttaaactgtgcaatt

SEQ ID NO: 240430 - DNA, 580 bp, Homo sapiens
agaataaagtgaaagaaagagagagagagagtgcacaacagtgaaagtacattttaatgctcccaccagtcctccatgcaaacttgcacattattttcttggttattttaaactaatgagtccccaagttgtttcattttaagcagctttgttaaggtataattaacatataataagttgcacatacttaaactgtgcaattttgataagttttgacatatacataaatgatgaaaccactactgcaatcaagataatgaataygcccacgattctaaaaggttatctgtgttttttgaaaacccatcctctagcccctcctgcccctacaggcactctgaaacagacaaccacttgctttctgtcgctataggttagtttacattggtagaattttatgtaaatgcagccatgcagcatgtactcttttttgtatcatctggaattatcttgagattcatctgtggttttttatgtatcaatagtttattacttttcattgctgagtggtcttaagttttcaagattacaaaatcaaatatttctttaattttgagacgtggtcattgtatcattttct

SEQ ID NO: 240431 - DNA, 194 bp, Homo sapiens
cctggtgtatatgttcaacattttatttatccagtctttactattgatggccatttaggtctattccatgtctttgttaatgtgaatagtgctgcagtgaacatatgtgtgcgtgtgtctttataatagaacaatktatattcctttggatatatacccagtaatgggattgctgggtctaatggtagttctgt

SEQ ID NO: 240432 - DNA, 487 bp, Homo sapiens
gaattctcttgaccaatctattttcttgatttttaaaagtcaatgtactctcaaagaaacaaractattattcgtagattctgttatttgaaaatatttactggtcatttttaccttacaccaagtgatctccagctcatggaaaaatatgtaaagttgcccagcttcattaagcttaaactcttctgaaggagaaaagaagcaatggagtagggacattaaagcaggagtttggtgatatggctgagacttctacttgcacactgtggtagctgtgtggagactggattgaaaaaggggcaatgacagaagcttaaattagtatcaaatatggcaatcctataattttaagggtccttgaaataagagtgtataatagttctcattatttccccaagaaatctgtgcacttggccttgtgtggaaagcgctatagttaccaagtggtgggggtgggaaggtgaattttcaacaacatttggaatta

SEQ ID NO: 240433 - DNA, 503 bp, Homo sapiens
gaattctcttgaccaatctattttcttgatttttaaaagtcaatgtactctcaaagaaacaagactattattcgtagattctgttatttgaaaatatttactgrtcatttttaccttacaccaagtgatctccagctcatggaaaaatatgtaaagttgcccagcttcattaagcttaaactcttctgaaggagaaaagaagcaatggagtagggacattaaagcaggagtttggtgatatggctgagacttctacttgcacactgtggtagctgtgtggagactggattgaaaaaggggcaatgacagaagcttaaattagtatcaaatatggcaatcctataattttaagggtccttgaaataagagtgtataatagttctcattatttccccaagaaatctgtgcacttggccttgtgtggaaagcgctatagttaccaagtggtgggggtgggaaggtgaattttcaacaacatttggaattactacactttaaaggta

SEQ ID NO: 240434 - DNA, 504 bp, Homo sapiens
agaattctcttgaccaatctattttcttgatttttaaaagtcaatgtactctcaaagaaacaagactattattcgtagattctgttatttgaaaatatttactggtcatttttaccttacaccaagtgatctccagytcatggaaaaatatgtaaagttgcccagcttcattaagcttaaactcttctgaaggagaaaagaagcaatggagtagggacattaaagcaggagtttggtgatatggctgagacttctacttgcacactgtggtagctgtgtggagactggattgaaaaaggggcaatgacagaagcttaaattagtatcaaatatggcaatcctataattttaagggtccttgaaataagagtgtataatagttctcattatttccccaagaaatctgtgcacttggccttgtgtggaaagcgctatagttaccaagtggtgggggtgggaaggtgaattttcaacaacatttggaattactacactttaaaggta

SEQ ID NO: 240435 - DNA, 503 bp, Homo sapiens
gaattctcttgaccaatctattttcttgatttttaaaagtcaatgtactctcaaagaaacaagactattattcgtagattctgttatttgaaaatatttactggtcatttttaccttacaccaagtgatctccagctcatggaaaaatatgtaaagttgcccagcttcattaagcttaaactcttctgaaggagaaaagaagcaatggagtagggacattaaagcaggagtttggtgatatggctgagacttctacttgcacactgtggtagctgtgtggagactggattgaaaaargggcaatgacagaagcttaaattagtatcaaatatggcaatcctataattttaagggtccttgaaataagagtgtataatagttctcattatttccccaagaaatctgtgcacttggccttgtgtggaaagcgctatagttaccaagtggtgggggtgggaaggtgaattttcaacaacatttggaattactacactttaaaggta

SEQ ID NO: 240436 - DNA, 581 bp, Homo sapiens
tttttcttcttctctgttgtttataggagcaaatcactggacggagatcaagcagtttatggtgccaagaaaccagagaggctgcagaggctcagagcrccatggaagaaagctttctgcttgccagcaccgtccccaactgcccctgctgaggggctgcctttggagctggcacacgggatccctggggtcagcacagggtggcccatgcatacacccagccccaacaggacgcctggctcagtgttggcaacaaccgcctccccagggacccctctatgccctggcctggctgcttccccagcctcagctccaatgggcggggggggttccttttgtttcagcgtgcaggtgaccttatgctggtgtctcatagaataaagagaatgtgttcgtgggagaaacactggcaggataagacttcctgcctgcactgtgctcttcagagagcacgttcctattttgagctctttctttcttgccactgccctgccccagcaggaaaggacctctgcacgttctcattctccggttctgcagaggctgaatcagagactggaaggctagggcaccggttgcgc

SEQ ID NO: 240437 - DNA, 581 bp, Homo sapiens
tttttcttcttctctgttgtttataggagcaaatcactggacggagatcaagcagtttatggtgccaagaaaccagagaggctgcagaggctcagagcaccatggaagaaagctttctgcttgccagcaccgtccccaactgcccctgctgaggggctgcctttggagctggcacacgggatccctggggtcagcacagggtggcccatgcatacacccagccccaacaggacgcctggctcagtgttggcaacaaccgcctccccagggacccctctatgccctggcctggctgcttccccagcctcagctccaatgggcggggggggttccttttgtttcagcgtgcaggtgaccttatgctggtgtctcatagaataaagagaatgtgttcgtgggagaaacactggcaggataagacttcctgcctgcactgtgctcttcagagagcacgttcctattttgagctctttctttcttgccactgccctgccccagcaggaaaggacctctgcacgttctcattctccrgttctgcagaggctgaatcagagactggaaggctagggcaccggttgcgc

SEQ ID NO: 240438 - DNA, 587 bp, Homo sapiens
cagctactggcctggagccagtgctgtcgacaggaggaagtgggctgsggcttggcttctaaggctgtaggggctgataagtggccaagcaggaccctgctcatgcagccttgacccagaggcatccctgcaggctggcgggtggaggggctgacctcactgccctcgggctcgtctggcctcctctggcctcgccctctctggcgggtccccttccctctgggtgctccaagtgctggtgaatccaacctgctctctccagccaacccctctcctctcacctcctgacatacaactgtccacctgacatgttcaaacgtcactgccccaccaggcctgctcatccggcaaactccccagctcagctgatgtaggcacggctttgctaacctcagctccagaggtggcgggggaggagggtcagctagggaagccccagctgtgacagagacactttttcctcctctctctagatctcaggaaagctcagagacccaggacccacctaggaaggtggctgttttcaaggaagaggggcagttggtaacttgccagtcacagactggactggcggggaaaggttggaa

SEQ ID NO: 240439 - DNA, 206 bp, Homo sapiens
gatcaccaccccccatgtcctccctaggactttgctggccactggggatgccatmtccccttctgtgcagttgtgagatataggacatgtttggggccaccagcatccatcccatctctgcatgcagggtctgcttggagaatagacccaacacagcccaaactttgtcccaaagacatttggaacaagagatgggaccttgataa

SEQ ID NO: 240440 - DNA, 444 bp, Homo sapiens
cttgcagttcaacactagcatgttactagttttggctggtaaaataagatcatttccagattgaggaggtagaaattacacccacgattctcttatatctctttcccaactatcaaagatgctgcatgtttcagagggtgctgcgctaaaatggtggagatgctatcatccaggaatatggactgaaactatgcagactagagttcagwctgtgtgagcatatgataaggaaatgaagtttaagattaatttgttataatagcaaaatctagcattctgattaacactgagcaactgctggatgcaatgttattatatttaataaattatttttttcaaaatttgtgatgtagcccataatgagaaaaatacttgaattttttgcctttaattcttttttttcaaggtggatgtaattctacaataaataaagggactgaattc

SEQ ID NO: 240441 - DNA, 635 bp, Homo sapiens
gcatgaagggtgagattgttaaaaattcttcaatttgtacgttgaaagcttcatcattatgcactgacttcatctcttgcaatgctttttaatttcaagtcttattacaaataataacatagtttcattaattttattttcattagtatttgtctgttatatcttcttttgttgtttttctttcctgtctatatccctggtttagaaatgtctcctacacacagcatacagatggattttttaaattttgaggttgacaatatttgtcttttaatttaccttgttgggaattcatcagttttcttaaatttgtggattcgttataaattctgattggatgtatgttgaatcttcccatcctgatctcatatcttttatctccctattatatttttcacctctgattctctaaactccctgtctgatatttcctccagctctactagttcaagaatcctctctttggctatatccatcttccatttaatacataacaggagttcttaattttagttatataatttgtatttttatttctaaattttctactttttttctttaaaagctatgyctaggcattttgttgttgttgttgttgacacagagtctcattctgtcacacaggctggagtgca

SEQ ID NO: 240442 - DNA, 367 bp, Homo sapiens
caggctgaacatgcaggctgaccacagsaacagaccataccacactgggagaatctgcctgggagaagaatgagttctccactaagaaattaagctaagaggagataggactattttttaagtggttgaaggggaaattaaagggagggggaggaattgggggagggttaatgggtttgagggttagcttttcattttgcattgaagagtcagttaacaatggttacaaaaggaaattaaaaggctggaagtagttgaggtttttgttatttctgaagttatgaaacatgccagtattgcacaggcatgtgtttaatgtggtataacaatgtgacagcctttgtggatggtctctggaaccctttga

SEQ ID NO: 240443 - DNA, 609 bp, Homo sapiens
ggctgagatggaaggaaggattgctggagcacaggagtttaaaattgcagtgagctgtgatcatgccactacactccagcctgggtgacagagtgagaccccaactcaaaaaaatattgtatctagcaacaaatacaaagggttttataccatgagcaagtgaggtttatttcaggaatgcaaggttgattaacaaaaaaaacctaatcaatataatttaccatattaacaaactgaaaggaaaactatatgattgtttcagtagatgcagaaaaagcatttaccaaaattcagtcattcctgataaaaaatcctcagcaatatataagtagaaggcaatatcctcaatttaataaaaggtatctactaaaaactaaagctaacatcatacttaatggtaaaagactaaatgccttccctctaagattgggagcaagacaagcatgtccactctcaccgtttccatttaacattatactggaagtcctggccagtacaataaggcaagtacaataaatgaacgatatccagattggaaagaaagtcaaatgatcttcattggtgatatagtcacctatagaaaaatmtaatggatgcaatccacaaaaa

SEQ ID NO: 240444 - DNA, 489 bp, Homo sapiens
ggcttcctgtttctgcagtaagcactccctttgggagagtccaatgagaaaaaaggaaagaacctcattaggtccctccacgtcaacactgactgtgttaaccctaattactgcacctgaattattcttttccagttgcaaagaaggaaatctctaaggtctttwttaaaacctacaaaacttctaaagaatggtaaaatgggaaggcttttttgcattggcaggagcataaataattcctgagggcatctgaactccaaccaggtcagcccagcccagcttccccaacatcccccttgccagggaagaggcagagaatagtaactcaagtttatagagactgtattgttgcctttgatcttcagcaccaccccattgaggtaagcattagctcatacctttggacaagggcaagtcagaaagtgagagggaaagtgagaaaggcatttggaaaaaacagggaggaggacttggtcattgcttcattca

SEQ ID NO: 240445 - DNA, 416 bp, Homo sapiens
gggctgtacttgggatgggtgcagggctgtcgggggtaaaaggatcatggtggctcatgtgctgagacacatacttgaggagtagggacaggagccagaagagcagctggaggctgttgcagtggtctaggcgagaagggacagtgactctgactagggtggtggtgacagggtgagaggtgatcaggccatcaggattgggtgtgtgctttgaatgagcagccaccttgatatgctaatgcactgatgtggagtgagagagaaaagcccaggataactccatttggttttggcttgaataagtagaaataacggagttatcaccagtggatgaggggaagactgaaggtgcrgcacgggagggaaggacaagaattactttttggacacatggtgctaagtcttgagctgcccgc

SEQ ID NO: 240446 - DNA, 512 bp, Homo sapiens
ttgtctactttttccaaatgaagcattaggaataaaaaagtttatcaaggtaaaacttcccttactgagtctgaattgtacttaaatcaatttaaaaacaaatatagttacacctagtaatataagatagcacacacggccattacactgagagatacagaaagtattgaatttagtatttttcttgtaatgaaagattggtataagtaagtaacagttgtatggttaggttgggaatatttagaatgagaggctgagaaactgcatttatatttcacttccaacaggagtcacttaagagaaagacatgaagagagggcagggaatgtgccttaatcatgtttgttagccctgttccttagcacagtgtttacaaggtcagtgtttctgaataaagtgtttgctggaagagagtgaatgaatayacaaagcagtgactcagacttattctggttatgctgcaaagcaaaggggcaggacatagggaaggcagttgatccaataatgattga

SEQ ID NO: 240447 - DNA, 549 bp, Homo sapiens
aagtaagtatttaactatgaacacatcttaactgaaaacgctaaaggaagttttttggacagaaggaaaataatcctagaaggcagcacaaaaattcaagaaagaaggaagatccatagaaaaggtatataagtgagtaaagtaaaatcaattttgactggcaaaaccaaaatgtaataaacttttgagtttaaaatgtgtagtatgattttaaatatatatatactacatacacaatagcacaaaagaagattaaaaataaagtgttcaaaggtcattacattggtggtagtaaaaggactggagtttatggaaactttcatacatttccattttttatgctttaagatatccactttgaaatagtagcaaaagaatacatagctaatggaataacaaaggggaaaataatatctaaagaagacaaaaacataaaatacagaaagattagaaagaaaaaaakaactctcaatcaccatagataacaattgaatggcagaaaatttaaaagaaattgtagatatattactagaattaatacatgaattc

SEQ ID NO: 240448 - DNA, 488 bp, Homo sapiens
atataaaatgacattttcttttaaaaatgtacaataacaataaaagccaaaaatactaaggaataatttcaatcaggttgtgcaaagcctccacacagaaaaaaatacaataataatagagataattttaagtgcctccatttatttaaatggaggtgtatatgccatatttatgatttgacaaacttagtattataaagatgtcaattttccacaaattartctatttaactgttttcccagtcaaaatctcagaagttattttttaagtatatgagcatcaaccaacaacaaggtttcaaaatgtatataaaaatacaaagaaccaagcaatcttaatgatgctgaaagctggacatccgcttccaaaattcaagatttattgtaaaactacagtaattcagactatgaagtattggtacaagtatagacaaatagaccaaaattgaagatttagagacaaacccatatatacacgatttatgtga

SEQ ID NO: 240449 - DNA, 473 bp, Homo sapiens
agctccctctcttacctttgcttccccagttctctgcacaaaccccttgacaatggaggcaggcttcccactacattataaccctcttcttcccgagaagacatctgctatctcctgtttatttgcctggaactgtaatggtgaccttcatgttggaagagaaaaccagcttataaataaggggaaaaatcaggaattagtggttttttaaatattatatccaacgataaaatacaaaaagtaatgtcatataaatactagaatactaagacttcatgtatgccttaaaacagtgaattgaactacttaaaatctttrtttcctttatatcaacctgaggctacagagacaatttcttataaacttgtttccagaaactgtatgtactgtatgtgccctttattctgataccataaaaatcaagatgaacctacattctcttttttttttttttttttttttttttgagatgg

SEQ ID NO: 240450 - DNA, 497 bp, Homo sapiens
cctggatggcaattcatttgatcagcttttgacaggattgattctactgaatgcttcatctagtccttatattgtcagtctgtggacaycaccttttcaggagttgagaacctgttccacaaccaataagtagcagtttgcacctggttgtcatacataaggatccaagggctgtcattttggagtgttaaaattaatgctattttataccaaccttgataaattctgttttaaagcattcaaagggaattctatcctgctatgccataatttattgtgtaaatgtacgtaagtctcacgttacatcccacaataaagtcaaacaatctattttatagctcaagcgcttcggtgattctgcaaatgttttaaaaaagattcccatgttcagaataattcaaaaactcctaatgatctgaaatctaaacaatcagattattgtgatgcattttagaaaaagattggtagaataagggtacaaggtaaatttagattgg

SEQ ID NO: 240451 - DNA, 447 bp, Homo sapiens
ttactcagcaagcatttgttgagtgtcaccatgggccaggcactttgctaggttctgagcttacattgataaaagaatgtggatctagtctttccttcctggaacctgctagaaagatacacagtgcaaggaaaagctacacttcccccttgctttgccttcatagaaggcaactgagatgtattgccttctattgttcaagcttagactgcatgactcaaatttcaccccttataaaggctaaacttccttaagcatcatgcacaaggctaattttcaatgttttcattccttgcctcttaagggactattttgagggactattttgtaatgcatagttctcctttgagtcctctccaagttctcaaracaaattcagaggctgaaaacttgttcagaactctgatatcgaagtgtctccttgctgagtgttttagaaggattact

SEQ ID NO: 240452 - DNA, 644 bp, Homo sapiens
cagggtctcactctatgtatgtatgtatgtatgtatgtatgtatgtacgtacgtatctatctatctatctatctatctgtctatctatctatctatctatctatctatctatctatctatgtatctagagacagggtctcactctgttgcccaggctggagtgcagtggcacaatcatggctcactatagcctcaaactcctgggctcaagcaatcttgctgccccagactcctgagtaaataggactacaggtacatgccatcacatccagctaattattaattttttttttttttttttttttttttttttttggtagagacagagccttgctatgttgcccaggctggtctcgaaatcctggtcttaggtaatcctctcacctcagactcccaaatattctagggctcagctcttggtcatcttctctatctaaactccctggggcaggtattattaattattattatccccattatacagatggaaactttgagatacagacagattcaaacgtatgtaatcaagacttcagaggccatgctcttaacctcttcaccattctgtcttctttggctttccatttaagaggcagggcatagctgcrcacattccacattctagtgccttcagtaactgagaa

SEQ ID NO: 240453 - DNA, 549 bp, Homo sapiens
aaaaacctgggtaagtctggagtcatctgttgtgggaccagagaaatcatgcatgctgcttttkaccacacagaccatgatggggaagtactgcatctgatcagcaagagagacagggtctttggccaaaatggagggctcttttctaaccatgttctcagctgttggataggggacgacgactgattttgctgagtggtttgaaaagcctaggggaggccaagtaggggagacttactgccaggactatctctccaagctcagttcctggggcttccaccctcacattctagaggaaagcatattgccactcagccaagttgtgtgatgtgattactagtgaaacgtgatcagctctgggggccctcggctcttggctgtcaatgcaggatgatactgggctacaggagaaagaggtaaggaagacagagtattcccccatgaataggatggaatggattaaagtagaagagaaagtaaagtgaactacctcatttgtcatgtggggaagttcaggcctagagaggtgatgtgcttctctaccacctg

SEQ ID NO: 240454 - DNA, 596 bp, Homo sapiens
agggaaaagggactctgagaatacaaaaacctgggtaagtctggagtcatctgttgtgggaccagagaaatcatgcatgctgcttttgaccacacagaccatgatggggaagtactgcatctgatcagcaagagagacagggtctttggccaaaatggagggctcttttctaaccatgttctcagctgttggataggggacgacgactgattttgctgagtggtttgaaaagcctaggggaggccaagtaggggagacttactgccaggactatctctccaagctcagttcctggggcttccaccctcacattctagaggaaagcatattgccactcagccaagttgtgtgatgtgattactagtgaaacgtgatcagctctgggggccctcggctcttggctgtcaatgcaggatgatactgggctacaggagaaagaggtaaggaagacagagtattcccccatgaataggatggaatggattaaagtagaagagaaagtraagtgaactacctcatttgtcatgtggggaagttcaggcctagagaggtgatgtgcttctctaccacctgggcaagactcctgggaaagatct

SEQ ID NO: 240455 - DNA, 470 bp, Homo sapiens
gagggattgagggagaaggaaagccgagaatctatgtcatttaatagatcatgctttgggtgtcaagtctaagaattctttggctagtcctacgtcccaaagaatatgttctccagttttgttttgtttttttaagttttatagttttactttccacatttaaacccaggatcacccaggcacagtggctcacacctgtaatcccagcactttgggaggccaaggcaggaggattgcttaaatccaggagtttgagaccagcctgggcagcatagtgaggcttggcctctaaaaaaaaaaaagttacctgkgaagtctcagctacttggaaggctgaggtcggagggtcggagggttgcttgagtacaggaggtcaaggctacagtgagctatgattgcaccactgcactccagcgtgggcaacagagtgagaccttatctcaaaaatgtacatgaattagtaagtacat

SEQ ID NO: 240456 - DNA, 523 bp, Homo sapiens
gaattcctttaaaaactgccacatcctgtgaaaattatcttcaaaaataaatccatkcttcattttgatattatttcaaaatctgtcgcctgagcaataatgttttaatttacatctatatactcctgcacaaaataaatacttgtaaaattgctctgtcaaattggaagtggatcactgataccttcattttctcagttattcatgttaggggaaagaagctcatggttctgtaagatattctacttcaatgcaaaaattgggagaattatttcaattaattaacaaatccatggtgagctgagagttgaaggctgtgccctatgctggcagtctcaaataaagcagctaagagagaggagagaaaccttaggctccagcagaagccttcctgtctctgatataccagctcaggataactctgttaaggagtcattttgctgaacaaatctgcagagccatcacaaagagagtaagaaaaaaaacatacacctattttaaaaattgtttgtggcctaagaac

SEQ ID NO: 240457 - DNA, 500 bp, Homo sapiens
gaattctctgattttatcagattccatgacaaagcatggcaatgcagggagaggtggcccccgcccactgggtgcctcctttatttccccaccccttgatttgttctgcatcatgaagagcctggtgcatatatatatatgtgggtcccccacctatatgtataagatctggctacagccctggtgtataccattagcccatttcactcgtaagaggtatgaggccagagcaagccctggaagcmggcttggagctatttgggctatttgggtgttagatgcacttctagaagggggcatctgttctagctgggcacatcacgttggcagtatggattcttatcctgtggggcagagccagaggtcagagtaaagtcttctaaagtgtcggtccagggtaggggctcctcttacctagaccaaagagtggtattgtctctagacataaggttctttttcaaattgtatttctattccaagggtttaagttgaaaatgaat

SEQ ID NO: 240458 - DNA, 465 bp, Homo sapiens
agattccatgacaaagcatggcaatgcagggagaggtggcccccgcccactgggtgcctcctttatttccccaccccttgatttgttctgcatcatgaagagcctggtgcatatatatatatgtgggtcccccacctatatgtataagatctggctacagccctggtgtataccattagcccatttcactcgtaagaggtatgaggccagagcaagccctggaagccggcttggagctatttgggctatttgggtgttagatgcacttctagaagggggcatctgttctagctgggcacatcacgttggcagtatggattcttatcctgtggggcagagccagaggtcagagtaaagtcttctaaagtgtcggtccagsgtaggggctcctcttacctagaccaaagagtggtattgtctctagacataaggttctttttcaaattgtatttctattccaagggt

SEQ ID NO: 240459 - DNA, 458 bp, Homo sapiens
aagcttcactactaccacgacggccaggccgtgcgctacttccactccagcgccaactacactgtgttacaggcgcgtgccagcgacagcgggcgctaccagtgctcgggcaccatgcgcatcccggtggagagcgcgcccatgttctccgctaaggtggctgtgacagtgcaaggtgggagagaccaggggccccgggagggaggcaaatgagcattgagaaattctgggacaggagctcggcgagaaaagaaggggcggaagttcaaatagctgccacttggagggtttctcttagactatggacgctgtctcctctcctttgccgtgaagcagcgcttgatccgccgcctgcttggaggctggtccctttccccgacgcacaycctggcttctcactctggctggggactcccacagagagggcagctctggcaggggcaggggccactgtggga

SEQ ID NO: 240460 - DNA, 601 bp, Homo sapiens
tatttatcatatataatatatataatataatgatagctacctactaggcatttccacttcaaaacttttttttggcagggcacagtggctcatgcctgtaatcccagaactatgggaggccmaggatgtcaggagtttgagaccagcctggccaacttggcaaaaccccatctctactaaaaatacaaaaattagccaggcatggtggcgtgtagtcccagcaactcaggaggctgaagcaggagaatcacttgaacctgagagatggagggtgcagtgaacagagatcatgccactgcactccagcttgggcaacagagtgagactctgtctaaaaaataaaacacacatacgcatatttttttttctaaaacaaaattcacttatttctcccaaatgtactcttctttctctaagatctactaagacaaaatccttcaaattaatgtatctaccattcccatccaatcaataaagttcttgcacgtttcttttcctcttgccaattactagcagtagaaaaccttcaggcaagtcatttaatttccccatgccttggttttctcaaccataaaataggaataataatagtacaacggcc

SEQ ID NO: 240461 - DNA, 574 bp, Homo sapiens
ttaaattaaaggaaacataatgtgtatatttgcatcctttcttgggagaaggcccaaaggtttttatcagaggtttgaaacctcaaccgtgttggtgcctcctaaattgtgtcttttgtcaagacctgtcttctgagttccagggccatgtgtctcactgcctacwggaaatcttcacctgaaaccttcacagctacctcaaactcaataacatcaaaagctgaaatcattgtctctccctcccaaagcctgctcatcttcccatttttcttttgtccatgaaagctactgccatcctccttatcacccaaattagaaatccgagcatcacccagacctctcccccttcatcacccctcagccaatcactcaccaagtcttgtccatccttccttcctaacttctctcctggatgcttccattgcatatccactttttaaacagagtggctcttgtctcaactagactgttgaaataatcttctaacttttccctccaccttccatctctctcccctctaactcattccttggactgctgtcagagtacttttcataaaatataaaacagatct

SEQ ID NO: 240462 - DNA, 600 bp, Homo sapiens
ctctggatggattcaaatagagcttcttaaattaaaggaaacataatgtgtatatttgcatcctttcttgggagaaggcccaaaggtttttatcagaggtttgaaacctcaaccgtgttggtgcctcctaaattgtgtcttttgtcaagacctgtcttctgagttccagggccatgtgtctcactgcctactggaaatcttcacctgaaaccttcacagctacctcaaactcaataacatcaaaagctgaaatyattgtctctccctcccaaagcctgctcatcttcccatttttcttttgtccatgaaagctactgccatcctccttatcacccaaattagaaatccgagcatcacccagacctctcccccttcatcacccctcagccaatcactcaccaagtcttgtccatccttccttcctaacttctctcctggatgcttccattgcatatccactttttaaacagagtggctcttgtctcaactagactgttgaaataatcttctaacttttccctccaccttccatctctctcccctctaactcattccttggactgctgtcagagtacttttcataaaatataaaacagatct

SEQ ID NO: 240463 - DNA, 606 bp, Homo sapiens
cttaacctaggatctctggatggattcaaatagagcttcttaaattaaaggaaacataatgtgtatatttgcatcctttcttgggagaaggcccaaaggtttttatcagaggtttgaaacctcaaccgtgttggtgcctcctaaattgtgtcttttgtcaagacctgtcttctgagttccagggccatgtgtctcactgcctactggaaatcttcacctgaaaccttcacagctacctcaaactcaataacatcaaaagctgaaatcattrtctctccctcccaaagcctgctcatcttcccatttttcttttgtccatgaaagctactgccatcctccttatcacccaaattagaaatccgagcatcacccagacctctcccccttcatcacccctcagccaatcactcaccaagtcttgtccatccttccttcctaacttctctcctggatgcttccattgcatatccactttttaaacagagtggctcttgtctcaactagactgttgaaataatcttctaacttttccctccaccttccatctctctcccctctaactcattccttggactgctgtcagagtacttttcataaaatataaaa

SEQ ID NO: 240464 - DNA, 527 bp, Homo sapiens
caaatagagcttcttaaattaaaggaaacataatgtgtatatttgcatcctttcttgggagaaggcccaaaggtttttatcagaggtttgaaacctcaaccgtgttggtgcctcctaaattgtgtcttttgtcaagacctgtcttctgagttccagggccatgtgtctcactgcctactggaaatcttcacctgaaaccttcacagctacctcaaactcaataacatcaaaagctgaaatcattgtctctccctcccaaagcmtgctcatcttcccatttttcttttgtccatgaaagctactgccatcctccttatcacccaaattagaaatccgagcatcacccagacctctcccccttcatcacccctcagccaatcactcaccaagtcttgtccatccttccttcctaacttctctcctggatgcttccattgcatatccactttttaaacagagtggctcttgtctcaactagactgttgaaataatcttctaacttttccctccaccttccatctctctcc

SEQ ID NO: 240465 - DNA, 596 bp, Homo sapiens
cttaacctaggatctctggatggattcaaatagagcttcttaaattaaaggaaacataatgtgtatatttgcatcctttcttgggagaaggcccaaaggtttttatcagaggtttgaaacctcaaccgtgttggtgcctcctaaattgtgtcttttgtcaagacctgtcttctgagttccagggccatgtgtctcactgcctactggaaatcttcacctgaaaccttcacagctacctcaaactcaataacatcaaaagctgaaatcattgtctctccctcccaaagcctgctcatcttcccatttttcttttgtccatgaaagctactgccatcctccttatcacccaaattagaaatccgagcatcacccagacctctcccccttcatcacccctcagccaatcactcaccaagtcttgtccatccttccttcctaacttctctcctggatgcttccattgcatatccactttttaaacagagtggctcttgtctcaamtagactgttgaaataatcttctaacttttccctccaccttccatctctctcccctctaactcattccttggactgctgtcagagtacttttcata

SEQ ID NO: 240466 - DNA, 589 bp, Homo sapiens
ctctggatggattcaaatagagcttcttaaattaaaggaaacataatgtgtatatttgcatcctttcttgggagaaggcccaaaggtttttatcagaggtttgaaacctcaaccgtgttggtgcctcctaaattgtgtcttttgtcaagacctgtcttctgagttccagggccatgtgtctcactgcctactggaaatcttcacctgaaaccttcacagctacctcaaactcaataacatcaaaagctgaaatcattgtctctccctcccaaagcctgctcatcttcccatttttcttttgtccatgaaagctactgccatcctccttatcacccaaattagaaatccgagcatcacccagacctctcccccttcatcacccctcagccaatcactcaccaagtcttgtccatccttccttcctaacttctctcctggatgcttccattgcatatccactttttaaacagagtggctcttgtctcaactagactgttgaaataatcttcyaacttttccctccaccttccatctctctcccctctaactcattccttggactgctgtcagagtacttttcataaaatat

SEQ ID NO: 240467 - DNA, 579 bp, Homo sapiens
gactggtcctctgtcaagcaggtgtagatggataaaagagttagaataactgcaaatgacacttgaatgaaatgaagctttcatttatttaacattcaataaatacttgttgaagattgactgcatgctagggttaactttaggagaaattgcagtaccaaccctcgtaagttgagaaacagcatgattttaggattatttgccatttgggatgaatattactgataagctctccattttaggcatacagaggacttatatatagtcgggctgatatgaggctggttgttggatttttgttttcaacttaactctcttaagtctctctccagacccctgcatttaggttgaactgatgmtgtggtttctttagcacagaaagtcaggaaattgccttgctaagttcccacagtcaagttggctgtccctttgtgagggccattgctctgggctctttctgacgctatccctggcaggtcccagaggcaatggtatacaaatgctatattggttactgtgaagttataggaaaaggtgaagcctacatatcaagtgctatagaattccatttatttaggt

SEQ ID NO: 240468 - DNA, 608 bp, Homo sapiens
tctgaattcctgctggggcacttcttgtctctgtgacctttctgatcaatacactggacacaaggttgtaaaaaaattcatgatgcgatgtatgagaaaccctaggcacatagatagctagttatcattatctgtcaagccttgctatgctatcaaactcaactgtaaagtatgcacccacccacctttctcatgtagccttcaagtcaatacaaccttggagagtcctcatgacagtggagggcaagagaggactttatggctgagcaggggtccaaggtattcacactatagggtcaggatttaagagcatgagttctgaagaagctgtctcaagtcaaaccttaattttactctttactagttgcaagatgttgaacaagtcagaacctctctaagactcagtctccttgacagtgaaagagacagtgaaactagatctacctggtgactttgttgtaactgttgagagcagagcgtctggctcagggtttgcacagtgccagggagagccattgccttggctgtgaggcaggggaaraaatattccacttaaagacgctttataagtcaacttgctaaaattatgcccaaatggaatatgtgct

SEQ ID NO: 240469 - DNA, 537 bp, Homo sapiens
agccggttgtggttaactatcacttatccacaacaatagcaagcaagttgaagtattctgatcacaatttaagtgagtttgcctttggaatgtacctccgtgcttctaggagaagatgcacttgtccagtgtttcaggaatgcaccatacttcatgataaatgatgaacgcaggaggtgttgggagcaccacaggtgtaagggttggctagggggatgctgcagtgccccatgcttcatcagtcccctaaatccactccaaattaaaatcatgataatgtgctttgatatggagaatggacatttttctctcaygaaatgtgtagatggaggctcctttagagatttttgccacttttggcatgttgatcttgaacacgcaatctacatgaaaagtgtgcttgtgagcccaagcaacatgaagacaagtgccttgtgctcctctttctaacccaaccgttacctaatcctctccctgtgatgtttcaagagccactcctggttgggggcaattctacctactcctgcatgccatggt

SEQ ID NO: 240470 - DNA, 602 bp, Homo sapiens
cttgcgaaaaaagtgaccagaaaccatccaaggaaaccacactgggattccaggaggggttggtcacagagggggtgttcacagaagggttggtcacagaatacaggcaaattacatgcatcctagatgtgcccaggaggatagcttgatcccgggaaggcaaggcggcagtgagccacagtcacgccattgcactccagcctgggcaacagagcaagactctgtctcaaaaaaaaaaaaaaaaaatcatggtggtatcttttaaaaattctgaggttcagatcacaaccaagactgatgaaattacaacatcgagggatgggcctccggtattggtgcttcttgacactatccaggtgattctaggrggcagtcaggactggaaggctttgttttaaggaaaagtcctatttaacatcctagtacacttgggattcaaatgcatcataaactttaatgatgctagagaggttgttgctttgcagaatactctctctcccccaatctttttctatttcttgaatgtggttttagctacaaactactacaagtagaaaaagtatggtctatatttaaaatttgtccccatgcctctgttctaa

SEQ ID NO: 240471 - DNA, 419 bp, Homo sapiens
accacgcccagctaagtatgtacagctttttttatgtcaataagacctcaataaagtagttttraaaaaataagtaacattggcaacaatggaaaaagcatctttataaatgctaataatatttattttttaatgtcctacaagttacaaagcactttcatttacatcattccacctaatctgttcaaagtagtaactattctgtccttgagataattcaacagaagcatcacgcaggacagacgatagctaaggccctttccaacaccaacaatctcagaatgtgggctgctttaccaccttgaatttgaattgctaatttttaaaagaaagggaattttaaattaaaactttaacccatggtcagtaagaaggctgaattggatttactgaagtagaaagcaatttgattttaactc

SEQ ID NO: 240472 - DNA, 647 bp, Homo sapiens
atgaataaattccaactgtctgaaacgcatctttcccacttttttctcttcctctaaattaaaaggactgatattccaaagagaaaaaaatcaatgtccagtgcaaaaaactatgagataaacatgctatttccgaagaggatttatttttggagtcagaaggatgtagctttaaattccagttatgctttatgtaaactcaggggagttaatttctgcttcttattttcttccttcaaaaatacggggctaataaatatcgacatataataggtactcagtgaatggcacctattgtgtatttattttgatctttgtgtaaagyatatgttgcttaagtctttaggatttaattcttaagggacataaaccccaaataaataaaatatacagttctaaataagcagacatgtcccaagctaattggaagggagcatagagaaggtgtttccagtcaataaatcactttcttgttcaattaaactaatttcttttaaatggacaacctcttcttagattcatgaatctttagaaagaaaattaacattgacctaccaattcatgacccctcaaaatgaggttgctcctttaaggaaatcattctctgaacaactgagaatttgaataaaaatggaagcaatgaccca

SEQ ID NO: 240473 - DNA, 579 bp, Homo sapiens
atagcatctttgtgcataagacattttttaaaattacttagatttcccacaggtttagaagtgaaatttaagggttaaaggttatgaacacttttaactgcttaatatatgttcaaaattgaatttccaaatagttgcaccaatttacattcccacttgtgcactgatgcagatgattcttctccatctcaatgacaagaggactaattgagaatatagttakctgttggaattattttcctctaaactggtctttgctataactgatatgattctctcctttattctttcctgtatgcttagcgttaccatcagcttgaaataaaaaagaaattggagaccttagctaggaaggagcgaatccagaggtttaaggtaaggagttatataactctcttttacttcatagtattattttatgattttaaaaaaaacagtgaaactatgattccagttccctgggacactttacttttggttaaaacatagttgaagtcaatgatggttcaccaagcctaaatcttagccatcatcattacagaagattgtgacaaatataggagctgtttgtacaaaata

SEQ ID NO: 240474 - DNA, 523 bp, Homo sapiens
ttcaaaattctgcccctttcccccccatttcctaatttttagtaacacttctttcactatgtgtccaagtttggatgataaatttcatggtcaccctacttgatgtccagaattcaccagggcttcgtgaagaagatggagaggagttattrcccaacactatcaacaagaacaggccctttgacactatactgtttgtgtgggcatggataaaagagatttcagtgaaaacttagtatatcaattcaatgctaaatgttgcaaatatataatgactgatgggttaaccactcaatgggcttgctgtttctttatcagctcagttgtacttgcctgagaaatctgaaaagaaatgagaaggaaagtcataagcaactggtgaaggaaatcagaaagaagagctttagttatgcaggggcatgaggccttgttcctgttcttcaaatggaactgaattttcatggaaggttttgatacttacttgaggatagcagaaagggccgagaaaccttattaaagtttc

SEQ ID NO: 240475 - DNA, 523 bp, Homo sapiens
ttcaaaattctgcccctttcccccccatttcctaatttttagtaacacttctttcactatgtgtccaagtttggatgataaatttcatggtcaccctacttgatgtccagaattcaccagggcttcgtgaagaagatggagaggagttattacccaacactatcaacaagaacaggccctttgacactatactgtttgtgtgggcatggataaaagagatttcagtgaaaacttagtatatcaattcaatgctaaatgttgcaaatatataatgactgatgggttaaccactcaatgggcttgctgtttctttatcagctcagttgtacttgcctgagaaatctgaaaagaaatgagaaggaaagtcataagcaacyggtgaaggaaatcagaaagaagagctttagttatgcaggggcatgaggccttgttcctgttcttcaaatggaactgaattttcatggaaggttttgatacttacttgaggatagcagaaagggccgagaaaccttattaaagtttc

SEQ ID NO: 240476 - DNA, 564 bp, Homo sapiens
gagggaatcacacagaatgctacacaaaaagttaaaggcactggaatccattttgacaaagcccagggaagccaagaacagcctaagaataccagcctacgacagcagccccaactccaggcctgtctaccagcaggctaaggttcctatcaaacctggccagaattatttcaggagctagayggacctgaacctgaaaattcagggccccagaaactcttggtgaaaaaccctggggaaaaggaagctatcttccagacaggcctgatttacctgccattacctgttctcttggtgctggctggtcctgaggttagctccaaccttgaaagggagagggaagggcccattttctctcctagcttcttaccaggcctgtgatcctccagctaagtaaaaccttgcaggcatttctgggctaccagggatgcttctttaagaggcttccatgagctaggccatatcccaggaagtggggacacattgcaaggcatttgatagacctagttaggaaccagcagagaagctggcttatacctctgagcaagagacttaacaaaagga

SEQ ID NO: 240477 - DNA, 404 bp, Homo sapiens
ccttaaagcaattgtattttttagccttgttgcttttatacgcygtgttgatgtaacatttactttctcacagttatttgtaaggcaactttagcaatagaacatgtaaaaacataaagaatctttctgggagtcagcacacaatccgtctatgtcaggactatgtgcgactaaaggataccttgggaagaacattcagaggcatgcagttcttggttgcaacctcagaaagttaaagttgcacatcatacactttggtttcccatagaaatccgttatgaattgaccatttattaatctccccaactcttaatgtggctcttcactttatgaattatgatcacacggtggaggccaacttcatctctaagatcactttcatgaaaaataaaataccaagacag

SEQ ID NO: 240478 - DNA, 582 bp, Homo sapiens
ttatttttacttttcatagagatgacatctggctgtgtttcccagactggtctcgaactcctagcctcaagcaatcctctcgcctgggcctcccagagtgctgggattacaggcatgagtcactgctctgggcctcactaaatgttatccttgatgaatgtcctaacaggatgttatccctctggtaactcggaaatcagagcaggccacctggagccttatttacatgaggtctcctgaaagacactgacagccactgggggatagcaattaattctcttaaacaaaggatgttagacaaaggctgtccccaacaagaaggggtggagggaagcgaggagggaaatggaaagacaaggaacctgtgtccttgttctgagaagcccagttcttgatttgagtacagggcctggagcatgcttctgactgtaaaacggaaagaaccaaactgtccttgtgsgtgtattgggattggagaacagggaagaaggtacaggagaaaagataccaaaaagatttctggccaggcacggtgatcatgcctgtaatcccagcactttgagagtcctaggcaggcagata

SEQ ID NO: 240479 - DNA, 575 bp, Homo sapiens
aagcttttccaaattgttttctggaagttgcaatgaaattaaatctgattccccaaatctccttgtggggatcgtttagcaaataaaaaatgtctaagtgagtaacaatttccttccaaacttccaaatgaaattttttgctataatgtcacaaaaattattacctgaatttatcttgcaggcaaattagatgatgttttacattctttcccccatgaaatcactttcaagaattaagtcagaaagagaagaggccaattttagcagcaatttgctcttgctgtagctggattttggttaaaactgcctgaagtaaacttaatacacactaatatcaggatccacctcttaaaatttcaggttccaygtacaaaattccaactgaatctgccaaatatgcaaagccccagtgaaaggtattagttttgacagtgtgaagttattggtagcttaacactctgaaaatgaagtacctatattctttggccaaatatctttccttgtgataacttggaaacttcaggatagaacatgagaactttgccatgagcattcaagttctcacaaagcaaggc

SEQ ID NO: 240480 - DNA, 612 bp, Homo sapiens
caccaagccatgagggatctgccttcaggtccactcccaccaggctccacctccagcactggggattacaattcaacatgaagtttgggcgaggacaaatatccaaaatatatcctggacttttgttgttaaatacttaggtatggccatgaaattgaattgtcttcaatagaatgagaccagaagtgataaacastacagcttgtttttacttcaaacaccttgcacctgcaatcctccaagctcttttacttcccactggtatagaactttagaattcacatgctagagtataggaggcataaaaagggaggagcatggctctcttcaacaccagccttatctccaattaattgtggtaaagaaatagccttctttttcaattttgtatgttctgtgatctcagaaatttctctatttttcccatttattttggaaaaacagacaattcttccctgaactcatttcttatttgaaatatcttgctaacagtagatattacaaacttaacactgcctagaatagcagattttcaaccacttattttagagactcaggttcactgagtacatggctaacttctaaattgtcgcaggttccagttttaccaaa

SEQ ID NO: 240481 - DNA, 665 bp, Homo sapiens
gcttgagataccatttattcactgccttctactctactgttaagcagacaccacatattttcaccttgttattagtactcaacttctggcaggagttaatttatcatgaggtaattgtagctgctataaggaacacactaaaaaatgacttaaacatgatatagtttctttttgttcatataaagtacaaaatgaaccttcttgaccagcaggcagatctccaggtagtgattcacatactcctgctctgtccatccttgtggctttgccatctttaacactgtgctctyaacagcattgagctagcaaaaagggaattgtaattgagagcacggtataggtcagtctacagctggtatgtatcgctttgcttcacatcctgtgggctagaaattatacagaaggccacatctcacttaaaagaggctgggaaaatatagcaaaactgtgttcctagaaagaggaggaaattgtgaaaagctagcagtttttctcacagtcagaaaatatccaacttactattccactgagtcatattctaatgttattgatttttgcttttttgaaacaattttttaaagttactatgatactgaactctatactagagtactacacaaattctaacttaccctatagttaataagttactggcaccactcaaa

SEQ ID NO: 240482 - DNA, 506 bp, Homo sapiens
agtccccaactccagagccatggactggtcctggtccgaggcctgttaggaactgggccatgcagcaggaggttagcggtgcctgagctctgcctcctgtcagatcagcagcagcattagagtctyataggagcgggaatcctattgtgaactgcatatgcaagggatccaggttggacactccttataagaatctaatgcctgatgatctgaggtggaacagtttcatcctgaaaccatccccaaaccaagtccatggaaatattgtcttttgtgaaaccagtccttggtgccaaaaagaatggggatggctgctctaaatgctcaataactggaggaccatgaatatccctgctctcacgatacgacaacctggtagaggagacacgattaacatacatgaaatgatgcatttgtgagaaaaagactaggaagtctacacagccctatacctgcttgagtttttcttgttgttagggagaaatcaagactagtcttcacaccat

SEQ ID NO: 240483 - DNA, 506 bp, Homo sapiens
agtccccaactccagagccatggactggtcctggtccgaggcctgttaggaactgggccatgcagcaggaggttagcggtgcctgagctctgcctcctgtcagatcagcagcagcattagagtctcataggagcgggaatcctattgtgaactgcayatgcaagggatccaggttggacactccttataagaatctaatgcctgatgatctgaggtggaacagtttcatcctgaaaccatccccaaaccaagtccatggaaatattgtcttttgtgaaaccagtccttggtgccaaaaagaatggggatggctgctctaaatgctcaataactggaggaccatgaatatccctgctctcacgatacgacaacctggtagaggagacacgattaacatacatgaaatgatgcatttgtgagaaaaagactaggaagtctacacagccctatacctgcttgagtttttcttgttgttagggagaaatcaagactagtcttcacaccat

SEQ ID NO: 240484 - DNA, 533 bp, Homo sapiens
catagcctatgctctcaaagtctctcatttaagcagatggcaattgcattctttcagttactcaggccaaaatccttgctgtcaccttgactcttcctttatctcattttatctcatacctcacatccaatctatcagcaaatcctattaactataccttcaaaatacaccaagaatcaggccagtcctcaccctcctatacttttccccagcgtagccaacattgcatttctctgaattactgcaatagcattttaacttactttctgtagcttctgcccttctcatcctgagcagccacctatgtctattttcaacaaatcatccagaaagatcattttaaagcctaagttagatcatgtcacttctttgccccaaattttctaattgctwtcatctgattcaggataaaggccatgttcctgataggggtgtataggatctgccatcctgctgcctctctaaattcatcttttactacttttccccatgctctgtttgttcttttcatgaaggcatagtatacatcatgt

SEQ ID NO: 240485 - DNA, 551 bp, Homo sapiens
gggccccttgggggtctccccttctccaagaaaaacctgaggaacctcaagtaacatggtctccagactttcaacaccccctgagaatagcttcttcatgtccctgtaagtggttcccagaccttagtataaatcacaatcgactggggtgcttggtaaaaatactgattttgggggcctcatcctggagggaggtggggaacatgtgtactttttcagcaagtggagaaagcaaaccccaaacagtgtgtttcctaaatgctgtgccttcagaagacagtgccaaatggggctatttgcagttgtattggggaatgtatattcaaaaggtttaaatgacatcatttgagcagtaactcatagaacactaggatagtctccattacccttgaaaaaatgaccaaggctcattaaaagcaaatttaagctagaaaatatacaaattaaccaacsatagttttgaaacgcttttcttgctaacatattacatctgctaggctggaggcttggaattaccgcatgaggcatgtgcagaattgcaagggccaaga

SEQ ID NO: 240486 - DNA, 633 bp, Homo sapiens
gcctcattctggaaatcctgccaatgacaagaacctgcgctgtgtgctgcttactacaccaaggatgatgctaagagcattataggtaccaactcacttggtcctcataaccaccccccagtgagcaagcactcctctctccatagcccatatgaagagactggaggatagggagaggtatggcatgtcaaaaggcagagccaggacttgaagagtccctgttctttcctctcttcccgggctggaggtttgtgaagggcctgggaagctgcatcttctaagctagtgcaggcagtctagagaccacacctggagagtctgagctctgaggctggggatgctcatcacagcccacctgccctgacacaccagggaggtgtccgtttagaaatttaacctcctctgtaaaatgccccagggacccctatctccttgggatcataatcttctcagtgacacagtagaggctgcagagaagagtgagtccagtagggccacaytggtttagtctgatgagcattgcccacactcagcactgtgggaagaccaccatcgtctttgtccgcatcagcaaactttggatgaaccattgagtgccgaattccactgggcactggggacacagaaaggata

SEQ ID NO: 240487 - DNA, 633 bp, Homo sapiens
gcctcattctggaaatcctgccaatgacaagaacctgcgctgtgtgctgcttactacaccaaggatgatgctaagagcattataggtaccaactcacttggtcctcataaccaccccccagtgagcaagcactcctctctccatagcccatatgaagagactggaggatagggagaggtatggcatgtcaaaaggcagagccaggacttgaagagtccctgttctttcctctcttcccgggctggaggtttgtgaagggcctgggaagctgcatcttctaagctagtgcaggcagtctagagaccacacctggagagtctgagctctgaggctggggatgctcatcacagcccacctgccctgacacaccagggaggtgtccgtttagaaatttaacctcctctgtaaaatgccccagggacccctatctccttgggatcataatcttctcagtgacacagtagaggctgcagagaagagtgagtccagtagggccacattggtttagtctgatgagcattgcccacactcagcactgtgggaagaccaccatcgtctttgtcygcatcagcaaactttggatgaaccattgagtgccgaattccactgggcactggggacacagaaaggata

SEQ ID NO: 240488 - DNA, 574 bp, Homo sapiens
tgcagaagagccagggaaaatgcttctcttttccactgatcaacyagttgattgaagcaaataatgataatagccaatacttacatactgtttactatgccatgctctgagttaagttgtcacatataataactcaatccttaccataactatctgctataggtactattattgtgctcatttcatgaaggagaatgctgagaaacagagcacgttggtaacttgcccaaggtcacagagctggagagtggtggggtcccaaacttaggcagcctggctccagagtttgtgctcttagccattacaggcactgcttctcaaaggatgctggacctggggctcactagaaaagcatggagacaggattattttggttctatttctagctctgccatttactaggattggtttatcatcaagataattaggacataaatatctatttcctgtgagggaagtatgtaaaatgcatggatcctcccactgcatgataatcaagtactttcgcatatggtctcttttctccaaacatatctcattgcccattcaatatgttcctctgggcatcacaacc

SEQ ID NO: 240489 - DNA, 410 bp, Homo sapiens
agatctttttgaagcctgagacgttyctgaaccacacagtgtgtgtgtctgcccttcttttttcctctacccaacctggagatcctccgtgtctcccataaacttcctgttggaatgaccctctggtttcctcttttccaggcgtctctaggacagttaacccttctcctccttagtcactgtgacttactgcttgcaccttttctcagccaggcaatggcacatttcaacactgtttgaaggttcctgtgcttccctccctcctaaaggaacctgaattgattaacacaagttttgcagcagcagcaataaaaaaaaaaaaagttgtaaaagcctggggaaaacataaatagtgacagaaatgaaacaaagatacagacaacttgggtttcaagaaagagaaaaaatac

SEQ ID NO: 240490 - DNA, 591 bp, Homo sapiens
catgagaaatttgaatcaaaacatttgtggaacccaaagcatgccatggaactcagggtactcttgagttccaaggaggacaactggaaaccccacccaaagtttatgcaggccacttctttcacagaggtcttgtctccagcaggcatctctgaaagacataatgggcagtcactagtgactattcatgcaccctccctggtttgacaaagttgcccatagctcactaaaaccacaattttcatgattaatttttttctttacctctgtctagtgcactgggtactaagaactttacatgcatgttctcacttagttctttaaawaaaaccctgttcagcagatattatcattgtttccattcctattctacagttgaaggagttgagatagagaagtcacaaagatggggcatggcagagcggagattttccttgtgctgactaactccaaagcctgcccacattggcagatgatgagggcttcctgaaaccagcttgttgggcttaacagtaaaaaaatgcagcctgagattcacttttatatttatttctttattttgactttgacaataataaagacaagaatata

SEQ ID NO: 240491 - DNA, 384 bp, Homo sapiens
gcgctatggagtttggactacattctgttgagttgaagggagcttctgcagttgagagctagggcaggaggacagagacagctggcctcagggacrgagaagtcagctagaacatttctctccattcccttgctcaaactactccctgggacagaagggatggtgcaagacagagaaggggatgaggttgaagtggttagcagcaggagggaagttcaaaatatttagcagccggaatgatgtggacgttgaccaaccaggtggacatcagctttaaccagtcaacacagagatgctggtatgagctaactggacactagctctgattggctttagagggcagcattgacttagggtaccaaaatggttccccaggaccttaac

SEQ ID NO: 240492 - DNA, 384 bp, Homo sapiens
gcgctatggagtttggactacattctgttgagttgaagggagcttctgcagttgagagctagggcaggaggacagagacagctggcctcagggacggagaagtcagctagaacatttctctccattcccttgctcaaactactccctgggacagaagggatggtgcaagacagagaaggggatgaggttgaagtggttagcagcaggagggaagttcaaaatatttagcagccggaatgatgtggacrttgaccaaccaggtggacatcagctttaaccagtcaacacagagatgctggtatgagctaactggacactagctctgattggctttagagggcagcattgacttagggtaccaaaatggttccccaggaccttaac

SEQ ID NO: 240493 - DNA, 581 bp, Homo sapiens
gtcaccaggcctccaggccccactggcatcatgggagccgggacagcctgccctcccccagctcccactgagcccctaattctgcctgccctgcctgaccagcaccaccagccaccatggtcactgccgcctcttggagacagggaggcagaggctccgagagacacatgccagctcggggttgcagcgagtgggtggcggctctgggtttgcagtgcaaggtggctgagccctgggtcattctccctccacagagctaagccaccctttattcctgaccaccatccctccctgactgctcacctctgccctcagaacttcctcagtcagggcaagaaacrgcctccccctcagaaatctcagacccccaatcctggactgctgtgggtggaggttctcggaggtcccctcccctgatggtttcaggacagttctcctctggcttagcagtccccagaggagtcccaggggtcgggtctccaggccccaagccccaaccagggaaagtccacttctgtctcattatgggggtctcctttttgaagagatgtctgcccctcattgctcagtgactgaagcag

SEQ ID NO: 240494 - DNA, 532 bp, Homo sapiens
gccagagctcccttagggagagatgagttgcttgtccctgtgggaaaacaaatggagacgaagggaccatttggaggggaggctgtgatggggrcgcagctcatgctcctgccattcaatgactctgtacgttaggctacttcatgtccacatcttctctggaggtggcttcagtgagcctgagggtgcctgcacagtgcagcctggagactctgcatccgagagaggatgcttctcacttgccttctgcctgggatggagagtaggctgggctggagtgtgaatcctgccctgccacttactccctgggagccttggccatctcacctgggaactggggacaatgtttggtccgtcctcactgggccttatcagggttaaatgagagggcgagtgcaagcacttagcacagagagacagtagatgctcaataaatgtgaactgtgattatcggccagttgttaagattttcttccttcaaagcatgaaaattcatgcaaaactcctgagctggaatccaggatgtgaattc

SEQ ID NO: 240495 - DNA, 532 bp, Homo sapiens
gccagagctcccttagggagagatgagttgcttgtccctgtgggaaaacaaatggagacgaagggaccatttggaggggaggctgtgatgggggcgcagctcatgctcctgccattcaatgactctgtacgttaggctacttcatgtccacatcttctctggaggtggcttcagtgagcctgagggtgccygcacagtgcagcctggagactctgcatccgagagaggatgcttctcacttgccttctgcctgggatggagagtaggctgggctggagtgtgaatcctgccctgccacttactccctgggagccttggccatctcacctgggaactggggacaatgtttggtccgtcctcactgggccttatcagggttaaatgagagggcgagtgcaagcacttagcacagagagacagtagatgctcaataaatgtgaactgtgattatcggccagttgttaagattttcttccttcaaagcatgaaaattcatgcaaaactcctgagctggaatccaggatgtgaattc

SEQ ID NO: 240496 - DNA, 532 bp, Homo sapiens
gggtggcatcagccagagctcccttagggagagatgagttgcttgtccctgtgggaaaacaaatggagacgaagggaccatttggaggggaggctgtgatgggggcgcagctcatgctcctgccattcaatgactctgtacgttaggctacttcatgtccacatcttctctggaggtggcttcagtgagcctgagggtgcctgcacagtgcagcctggagactctgcatccgagagaggatgcttctcacttgccttctgcctgggatggagagtaggctgggctggagtgtgaatcctgccctgccacttactccctgggagccttggccatctcacctgggaactggggacaatgtttggtccgtcctcactgggccttrtcagggttaaatgagagggcgagtgcaagcacttagcacagagagacagtagatgctcaataaatgtgaactgtgattatcggccagttgttaagattttcttccttcaaagcatgaaaattcatgcaaaactcctgagctggaatccag

SEQ ID NO: 240497 - DNA, 480 bp, Homo sapiens
aaaacatttcaacactaaatgttccctggaggctaaacctgagtctgggacctgcctcaaggctgttgccctgtgaccttgggtgaggcacggaccytctctgctcctctgtttcccgggagacagccctgggctaatgacccccacttccaatgggaccagaggagcaggtaacacacacatgctgtgagaccacaaggccattatcagcaacggcggcttcatgtagcagggtgaggtcaactgggcagagagagaagcttactcttgtgtgaaaagcttcagtactgcacatggaacaagcccagggccagtcatcccaagcagtagaccctatgacctcagccatgtcaccgtctccaggccttcatcttctcatgtttccatgagggtattcgatgggacagtcccattctaagaatctgttttggaggtggctagactgtgtcctgccaatccctggggttgtcctgtaaggac

SEQ ID NO: 240498 - DNA, 576 bp, Homo sapiens
cctggaggctaaacctgagtctgggacctgcctcaaggctgttgccctgtgaccttgggtgaggcacggaccttctctgctcctctgtttcccgggagacagccctgggctaatgacccccacttccaatgggaccagaggagcaggtaacacacacatgctgtgrgaccacaaggccattatcagcaacggcggcttcatgtagcagggtgaggtcaactgggcagagagagaagcttactcttgtgtgaaaagcttcagtactgcacatggaacaagcccagggccagtcatcccaagcagtagaccctatgacctcagccatgtcaccgtctccaggccttcatcttctcatgtttccatgagggtattcgatgggacagtcccattctaagaatctgttttggaggtggctagactgtgtcctgccaatccctggggttgtcctgtaaggacaggcatccttgagtttgtagattgattctgtaggtctcaagcgggcctctctctcaaataggtagatcttgggcttcattcattcatgggctttctgcttaacatgtatgtcaagaacag

SEQ ID NO: 240499 - DNA, 601 bp, Homo sapiens
tcccctgtcctgaggtctcccaagcagattgtccatggtgccatcactaatatccccactgtcaaagcactgctgtggcaagcctggcctrgcccaatcttgctcttgactgtgagctgatgaagtttctgctgtctccagcagggtccgggtccagtggagacactcatgccagccccaagaagtcttctgctttgacctgctcttgagcttgcaagcagaaactacagagcagccacttgctgatctctgtccctgctcatgtggcaggccctccagatgccccatggggtcgaagggggggccacatctgccctccccgtgacatcctttccacagagctcaatgggaagctgaaagggacttgccctagagacagccaggttcatgctgctgttcaaaatgaaacaggattctggggaaatacctacacaagagaggaaaagctgctacaagttggacagagactcttctggtgtcaggaaacagaggggcacaactgagaattgtacacagagctgcagaagtagcctttcagctctaacatgcacacacatcacctggttccctagggctggggaggagctggagatgctgcatt

SEQ ID NO: 240500 - DNA, 601 bp, Homo sapiens
tcccctgtcctgaggtctcccaagcagattgtccatggtgccatcactaatatccccactgtcaaagcactgctgtggcaagcctggcctggcccaatcttgctcttgactgtgagctgatgaagtttctgctgtctccagcagggtccgggtccagtggagacactcatgccagccccaagaagtcttctgctttgacctgctcttgagcttgcaagcagaaactacagagcagccacttgctgatctctgtccctgctcatgtggcaggccctccagatgccccatggggtcgaagggggggccacatctgccctccycgtgacatcctttccacagagctcaatgggaagctgaaagggacttgccctagagacagccaggttcatgctgctgttcaaaatgaaacaggattctggggaaatacctacacaagagaggaaaagctgctacaagttggacagagactcttctggtgtcaggaaacagaggggcacaactgagaattgtacacagagctgcagaagtagcctttcagctctaacatgcacacacatcacctggttccctagggctggggaggagctggagatgctgcatt

SEQ ID NO: 240501 - DNA, 601 bp, Homo sapiens
tcccctgtcctgaggtctcccaagcagattgtccatggtgccatcactaatatccccactgtcaaagcactgctgtggcaagcctggcctggcccaatcttgctcttgactgtgagctgatgaagtttctgctgtctccagcagggtccgggtccagtggagacactcatgccagccccaagaagtcttctgctttgacctgctcttgagcttgcaagcagaaactacagagcagccacttgctgatctctgtccctgctcatgtggcaggccctccagatgccccatggggtcgaagggggggccacatctgccctcccygtgacatcctttccacagagctcaatgggaagctgaaagggacttgccctagagacagccaggttcatgctgctgttcaaaatgaaacaggattctggggaaatacctacacaagagaggaaaagctgctacaagttggacagagactcttctggtgtcaggaaacagaggggcacaactgagaattgtacacagagctgcagaagtagcctttcagctctaacatgcacacacatcacctggttccctagggctggggaggagctggagatgctgcatt

SEQ ID NO: 240502 - DNA, 601 bp, Homo sapiens
tcccctgtcctgaggtctcccaagcagattgtccatggtgccatcactaatatccccactgtcaaagcactgctgtggcaagcctggcctggcccaatcttgctcttgactgtgagctgatgaagtttctgctgtctccagcagggtccgggtccagtggagacactcatgccagccccaagaagtcttctgctttgacctgctcttgagcttgcaagcagaaactacagagcagccacttgctgatctctgtccctgctcatgtggcaggccctccagatgccccatggggtcgaagggggggccacatctgccctccccgtgacatcctttccacagagctcaatgggaagctgaaagggacttgccctagagacagccaggttcatgctgctgttcaaaatgaaacaggattctggggaaatacctacacaagagaggaaaagctgctacmagttggacagagactcttctggtgtcaggaaacagaggggcacaactgagaattgtacacagagctgcagaagtagcctttcagctctaacatgcacacacatcacctggttccctagggctggggaggagctggagatgctgcatt

SEQ ID NO: 240503 - DNA, 586 bp, Homo sapiens
aaatgtttctccatctacttatgactttaatgttttttctctaacattgtacaattttctcccaaaggtcttccatgtttatgaaatcattatcagccaggtacagtgtggttcatgctcataatcccagcactttcagaggctgaggtgggaggatcacttgagctcaggagattgggaccaatatgggcaatgtagcaagaccccatctctacaaaaaataattttaaaaaaaattagctgggtgtgctggtgcatgcctgcagtcctagctactcagaaggctgaggtgggaggatcccttgatcccaggctgtagtgagctaggactgtgccattgcactctagcctgggtgacagagcaagaccctgtctaaaaaaaaaaaaaaaaaaaaaaaaacctcagagaaaaaraaagggaagggaagggagcggaggggaggggaggggagggaattatcccaacgtgccttttatctttttttgctgttataaatggtattatttttgaaattacattttctaactgcttattgcttattgtattacatagaaattcaatgtttaagttattgactttatatct

SEQ ID NO: 240504 - DNA, 314 bp, Homo sapiens
cgtgacaagcactgtggcagacacacacatccctcaccgagagcctttgctgatgtataaccccaaatttctgtgaggtggaggtctcaggcctaatacttctaagactataataattgagtcttaggaaaagaaacgaaagattgaacatgaaattttatggtaatttattacaaagtactaagggaagtagtattgaagtcacatgtgaacgtagaaraaggagagaaagcagtgtgggtggaaaaaaaagcaaaattcagggaggtcgctttgaagcactcctgtgtagtcagcctgaaaatgagctcccg

SEQ ID NO: 240505 - DNA, 455 bp, Homo sapiens
tgctgtcttcaactggcctgcgagtgtctgagaattattcagcrttatgtcagggaagccgatggtcaggatgacattcttctttactgcctgatgtatcatgggaaaaactgaatgcatgggaaagtcctcccttcctggctctctctgtccccatgaatatttccaaagagactctttcaccttcagtgacaagagggagaggaggggattgggaggcaactatctagcagtatccagcagacataacacagacactgcatactcacacccacctagacgtgcacacacgacacacacatacccggaacacacacccacccaacacacacactgagcactcacaacacatatgcctacagcacacatagcctcaaagcacctgaaataatggggcaggctcctaaagaatctagactgtggggaaatgcggagtgctggagagagaatgggtt

SEQ ID NO: 240506 - DNA, 581 bp, Homo sapiens
ttctattctgcaggtgctgcagtcaaatcccagagacagtgcaggatccagaaacaaagtgccagaagccgggatgctgacatagagatggaagaagagggaactacttggcatgatccctgaaagcagagtggggccttagactcatataatctggtgacagtgagtatcagggggtttccccgcaccaaccaattccccaactctccagacaccaactgggtgcctcacaattcatttgcgacactgatcacctaatgtaagcacagactccacaggttaagggctcagccccacaagatcacccacgcttcagccaccaaccaccaagagtggatctccaggttactcacagttccatccaacttggcaacaaatctggggttctcacaaccccctcctcaggttcaacaatatgatagctcacagaactcagggaaakacttactcacatttaccagtttatgacaaaggacttgatagaataaacacatgaacagccagatgaagatcttgcatgtagggcaagctccagagggcgtgagcacgggagcttctgtccccatggacttcggtcgtgc

SEQ ID NO: 240507 - DNA, 581 bp, Homo sapiens
ttctattctgcaggtgctgcagtcaaatcccagagacagtgcaggatccagaaacaaagtgccagaagccgggatgctgacatagagatggaagaagagggaactacttggcatgatccctgaaagcagagtggggccttagactcatataatctggtgacagtgagtatcagggggtttccccgcaccaaccaattccccaactctccagacaccaactgggtgcctcacaattcatttgcgacactgatcacctaatgtaagcacagactccacaggttaagggctcagccccacaagatcacccacgcttcagccaccaaccaccaagagtggatctccaggttactcacagttccatccaacttggcaacaaatctggggttctcacaaccccctcctcaggttcaacaatatgatagctcacagaactcagggaaagacttactcacatttaccagtttatkacaaaggacttgatagaataaacacatgaacagccagatgaagatcttgcatgtagggcaagctccagagggcgtgagcacgggagcttctgtccccatggacttcggtcgtgc

SEQ ID NO: 240508 - DNA, 496 bp, Homo sapiens
tccctttacaggttagcattttgctgtcacttctcattcttgctgacatactcaaagcacttcttttctaatacctttgtttcagtctgctgggcaggtagggctacaggtataaaggatccaccccaattcaaaaggatttgctaacrtccaggttcttccagtaaacctgtttaagagtcaaaagcctcagactttctgtctccctatcaatgtactatctcctttgtcaaagtagacagatagggaaggcagagtttcctgcagatgtttcttcagctggggccactatgccatgtacacagttcatactttttgttctgaagttcttgtttctggcctcacctctggcccagcacatagctctcctggtcaaatagatctggtcaagcccttcccctattctgtaacttcccatggtccccagtgcttagtggatatagatttaacatggtctcttccctatttgtggcttccagctgcttgttcaagatcc

SEQ ID NO: 240509 - DNA, 376 bp, Homo sapiens
atcaaacatttataaatctcaatgtgcttctggaatttgaataaggattttggagcacctcaaggccaatctgtgattaatgagaactgttgagttacttggcttggtgtcacagytgcccactggttgaaaaggctggctttagtatctctactatagccagggattcccactttatcatggctgtctctctctgaggcacttcttgccatttaattgtaggattttaatggggaaggtcccctttgtagtcacctagttcagagattacaaacaaatgtgctatagcatcctggtgctccacaaatgagctctatgtgtgcagagatattgattcctcagtttcaaggcagtaaggtagaacctggcctgtcta

SEQ ID NO: 240510 - DNA, 544 bp, Homo sapiens
aggacttcacagcctgagattcactggactgacacagccaatgttcagtgctgctgaagcctgcaccaccatgcctgatgaagccatctttagctctataatctgaactccacaaagatattgaactgccctaggggagccagagagccttttccatttacccatgattgatcgatgaacgatagttgttttacctgctgctaaaagaagttctcataatcaggactggctacatattttacagggatagggtcaatgcaaaataaaatgtgaggtctcatgtcagtcccttaagccaagcacaggccctgtgtgacctcaccagccatgtgccctcacagccgccctgctcagagctacaccagggatttgacaggctccagatggtgcgagaaggatttagggccgggctcatgagaagagtattcctacctcagtggccagagttcatgttaggatgaccataggcctgcagcccatctcacamccacccctctgtcgccagtacctgattaggaagaagggctgacttcactagtgctgg

SEQ ID NO: 240511 - DNA, 538 bp, Homo sapiens
acattcggaaggaaatccacattagcccattatctcctctctcagactatcatttgagatgttgctcctgtcttgcaaggtctagaaatttgcgatgttgacagctctaatcactaagttttatgtgaggtgactttctctcctacccaatatatccaaaacctcaattgcaattttcccctggagagctctggattcctagacaaagaacatcactgaagggaagctatctagtgataactgcttaataatatggcctgtaccacaagagtggggatttctggttgtatgacccagtgactcttatcatagatgtttgaacttttcccatatttttggctgcaaaaccattctcagcaaattcctgaactgaatatgctgtgaatgcttctgtagcctatgcctgacaactgcccaatatcactaccataagctccccaaaacactttcctgtattttaaaaaaatcaagatgtaatgtgtatgcattaaaatgcccagmtcttaagtgttcagtgccaatgaactttgagagttat

SEQ ID NO: 240512 - DNA, 590 bp, Homo sapiens
ccctcatctccttcaggacagtattgctcattccctcagctgttgagagttctggaggctaatagaccaaccagtgtctctcttggagtctctgagtggaaccaataaatataagctttctttaaaccaataaatatctcactttctttaggaaaatgagaaataaaacaaagggcaagactgatgcgagccaaactaccaactttcttttatttttaaacagctttactgaggcataattgacatatcataacattcacctgttttaaggcacagttcaattacttttagtaacattttagagttgtgtgaccatcatcacaatcctgttttggaacatttctatcattcctaaggaattcctcatgctcatcagttgccaccccttattccaaaccccccagctctaggaagcccctaattgattttctgactccacagatttgattttctggacaccatataaatagaatcatacaatatgtggtcctttgtatccgtsttctttcacttagcttaatatacgtttgtggttcatctatgttgtagcatgtatcaatatttcgttccttttaggtgtcaaatcctat

SEQ ID NO: 240513 - DNA, 532 bp, Homo sapiens
ccacttgattttgacaaaagtaaattcaatgaaggaaaaggatagtcttttaaagaagtgatactgagacaactgaatcatctacatgctcagggaatttcagcatgctgtgtaaagtgatgccaatctgagtcatacactattggcatcagagtttgtgaagactttctcratatgataaccatgtgttaaataatatgctgtagctagttctcctctcttccttttccacaggcggccacaatgtcctgttttgctccagccatatccctgagacaccagggtgaagttgagggcctgagtcaacggatttggctgtattgggtgtctggtcaccagggctacttttaactctggtaaagtggatattatcgccatcgatgaccccttcatttagctcaactacaaggcctacatgttccagtatgattccacccatggcgaattccatggcactgtcaaggctgagaatgggaagcttgtcattaatggaaagctagatcctaccaaaatcaaatagggcgatactggc

SEQ ID NO: 240514 - DNA, 532 bp, Homo sapiens
ccacttgattttgacaaaagtaaattcaatgaaggaaaaggatagtcttttaaagaagtgatactgagacaactgaatcatctacatgctcagggaatttcagcatgctgtgtaaagtgatgccaatctgagtcatacactattggcatcagagtttgtgaagactttctcgatatgataaccatgtgttaaataataygctgtagctagttctcctctcttccttttccacaggcggccacaatgtcctgttttgctccagccatatccctgagacaccagggtgaagttgagggcctgagtcaacggatttggctgtattgggtgtctggtcaccagggctacttttaactctggtaaagtggatattatcgccatcgatgaccccttcatttagctcaactacaaggcctacatgttccagtatgattccacccatggcgaattccatggcactgtcaaggctgagaatgggaagcttgtcattaatggaaagctagatcctaccaaaatcaaatagggcgatactggc

SEQ ID NO: 240515 - DNA, 554 bp, Homo sapiens
gtgagttaatggcctaaattcttatggccacttgattttgacaaaagtaaattcaatgaaggaaaaggatagtcttttaaagaagtgatactgagacaactgaatcatctacatgctcagggaatttcagcatgctgtgtaaagtgatgccaatctgagtcatacactattggcatcagagtttgtgaagactttctcgatatgataaccatgtgttaaataatatgctgtagctagttctcctctcttccttttccacaggcggccacawtgtcctgttttgctccagccatatccctgagacaccagggtgaagttgagggcctgagtcaacggatttggctgtattgggtgtctggtcaccagggctacttttaactctggtaaagtggatattatcgccatcgatgaccccttcatttagctcaactacaaggcctacatgttccagtatgattccacccatggcgaattccatggcactgtcaaggctgagaatgggaagcttgtcattaatggaaagctagatcctaccaaaatcaaatagggcgata

SEQ ID NO: 240516 - DNA, 384 bp, Homo sapiens
ccgttgagtttgtttgtttggaattgttacaaaagtcagctgaagatttccttctccctgtgatcttttcccagttcctctggcagcccttcccaaggacccttttgagaaaagtcagaaatggcttccctggggacccagagagtccacagggctttttccactgyttcctctacccctgtattttgctcagctctctaaattgactcagctccaggttaagatcaaatccttctcccatgatctagaccttcaggttctctattgagggtctgtgtttgggagcatatgattacccttttctcactttcacaccttgggcactcagagtatttgggctctcttccgagttctgcaggagcaatctgctttcttcagagagtc

SEQ ID NO: 240517 - DNA, 497 bp, Homo sapiens
agacctggaatgtttccatggcatttaacattcaggaggtcacatgaagtgacttcagagagagctgtttcaaaagagtgttgggatctggatgtttgtgggtggttgaagaatgagttggggtatggaaatacagatgatgggtgtagacaagccaagaagctcggccatgaaaacagtaagagacggcagtggctggatggggatggaggggtgcagaatggtttgtttcattaatatgagatttgtaaatgtttatatgcagggagggaaagctagaagaaggcacagaaggtggctttgagtctttttgcctcatactcatattcccttgacttttgcaatatcttgggttctgtgggatgtggaggggaggatataagacagttccttgacattagaagaccttattctcattttatctttttcactgaccagactacaaggccctttatggagggactgtgtcttcttygctattatgtctattaagatct

SEQ ID NO: 240518 - DNA, 514 bp, Homo sapiens
tttctcacttgggtcagtaggctagaatttccaaggtcagggccaggacgagggtggggcaggagagtcaacctttgcacaaccttgacagtgagtgcctcctaaatgctgcctcatcctagtccctgacctgttccagattccacgtgggagagggaaaggagcaaatccaagggtggagcctttcagggccaggttctctgatgccatccccttctctccacaggctccctactcacactgcctcttcttacacgagggctggccactctgtctgagggatgaagttgtggtccacttggcacccctcaaccctctcttattgcgccagggtgacttctacctccaagtggagccccaggaggagcagtctgtctgcatcatgatcaaatgcctctccctggacctctgcacagtggacaagaagcctgttccygagccagcctaccctatacttttcacccaagaatggctggaggccatcaacagtgactttgagggaaatcccctacac

SEQ ID NO: 240519 - DNA, 514 bp, Homo sapiens
tctaataattctttttgtcttgaagtctactttgataatgtagacctactgtttcttatgcttactatttgtaaggtttatatttttctaatttttactttcaaccagtctgtgtctttagatttaaaatatgtttatgtatatttaaatagatatcacatgtatttataaagtattatagttttgcatatacataaagagagaaaaagggagattttttattttaatctagtctgttcatttccacmttttaattaaaatgtttataattcatttacatttaaataattattaatgtgattgagtttaatctgtcatcttggcatttgttttctattggttctatctggcctatattcctttgttgttccttttctgccttctcttgggtaaacacattttttttagtattccatttgatccctcttgtgaacttttcatctagccctccttttgttattttttaatggttgctctagtctagagactacagtacacatctttaacatattat

SEQ ID NO: 240520 - DNA, 591 bp, Homo sapiens
tacttattaatgctgcattgtattcccagtttttgtcattaatatttaagctgacattgttatatttaagttcttgtaaactaacaaatctcccataattcatttacttgtttttcaatcaaaactgaacttgaagtcaggatgaattattcattaatcatttccatttattctatttccttatttatcctccttagctggccataacatggaatcaaggcatatttttttatttgttgcccttattgcaaaagttttatatttctgttcttaattttagaagcaaatgaggtgaatctttaacattyttttggctaagaaaaaacaaatttaaacttaagttgctttttgtatgtcttgcttatttttatctttttatggatcattactttctattgaaaaattcttgctttttagtttgagtcacctggaagagaaaaaatagagacaggttatttatgagcatccaaatttaagatttaaactctggagaaagcttttgttaaaagttatatgttcccctttcttgagtatgtttaatcccagagataaacagatgtctcttttcttatgtatttttttccaatcatg

SEQ ID NO: 240521 - DNA, 457 bp, Homo sapiens
gtgtttgtcattttacttctcttggcagcatgctctcaggatccactgtttctagaaaactgttttgttgttaccatgttactgacttcatccatagacttatagccaagtcaagctatatttattccaatcaatgtgagctcctggctcctgagagcatgctgatgttaactctgacattctcttaaagcatgctcagttctgcagccaacagctgttccagaaagcataaacaaataatgatagcacagagcagagctattatgggtaggcacaaacatttttaatcagttgcaggagtttttggcaataagaatttcagatcattggattggacctgggttcaatttcmggtatatttcttgctataacaaaggccttctccatcactccaaaccatccagagtccaatatttctttatagcctgtgtgacagccttatgggaaataaaaaggg

SEQ ID NO: 240522 - DNA, 602 bp, Homo sapiens
aagatctctaacagcacatctcagggtaaggagaagagtgagccaggccaaaggagcaaagtggacattgggttgcttccatcaccaggagagacaggtgttccatggagggcagacaatgtggaaagtaacaagaaaaaaaggctagcactagattctgaagcagcagtctctgctgataaaccagactcagtactgactcatcatgtccccaggaacctgcagaagctgtgcaaagagagggcccagaagttgtgcagaaatagcaccagggtgcctgcacagtgcacagtcccttcccatcctcagtccactcctgtacatagcccagacagaakgctggactcacccaaaagaaagagaccgaaatcccttgcgcaagtggaagagcctgcaattgaaaatgttaagcctccaggttcccctgtggccaaactggcaaaatttactttcaagcagaagtcaaaactgatccactcctttgaagatcacagccatgtgtcacctggtgcaactaaaatagcagttcatagtcctaaaatttcccagcgtagaacaagaagagacgcagccttgccggtgaagcgtccaggaaagttaac

SEQ ID NO: 240523 - DNA, 404 bp, Homo sapiens
ggagacttggggtgggggaaagacttggcgaccactgccagctgtgctcctccaagaacatttggaaagcgtcacaaccagcagccagagggaaaggtgggggcccagggcaggccagaggcactcactcccctggcctggatgtggctcctggtgtccctccctccatggcagccctggtcaggaggggtcaagagcaagtgagtatgagggttgaaggggccgaagaaggcctggcagagtggrggaagaaatgtcggaaaaaaacagaacaaaagtaatctttccccaaatgaagcctttgagaaggcctgtgggtgaggtgcctttctctctccctctctctggaatgggccttggcccattttcatgaaaatattggtttgggttgaggaaggtgtgac

SEQ ID NO: 240524 - DNA, 447 bp, Homo sapiens
atttcacttttcttgatgctattactattttgtcaggaagatagatcttctaaattttaggaaactatgaatctaagttctatattgctctcatttcctttttctctttgtctctcttctgttgtagcccytccctcaccgctaagccttcaccctgactctaccctgcccccactgccttttgttctttggaagacactcattaacatttgctaatgtatgctaatgagcaataattagcatctctaatgtgaacaaaagcagtgctacaaaggaagggtaaagatgtgtacagagttcagccagccttttatgcttctttatgccttaggaacaatcctcttctttcagttctttcacaattctttagtgttttttgtttgtttcattttgtttgcttatccatgaaccctgaaaaccattcttcttcttaagttggaatattgc

SEQ ID NO: 240525 - DNA, 524 bp, Homo sapiens
aaaactccatttatacctgcatctgacactaagtaacgtcatagtagccagtgatggaatggaggagtttcagatttccttagaaaggtaagcaaaaaaaaaaaaaaaaaaaaaaaagctggggttaatttgaaatagataaaatacacacattcagcttcattacctgaaagtgtgcacttgggaaataaactacacaggacctctgatctttggtcactgtcttctacgagccagacaactttagaagctctggaattatctcaaggattataaaactagtggattaaagtgcaaaatcttaragaaagggattgaatcatgggttctagtcctagatcagcttaataaaaaaatatattccaagatgttagctaagtcacatcagcattatgtgactccatttacatgttttaaatgggtgaagaaaatgtcttctacagtctacatcataaatttgttgtgacgcacagtaagtaaaagaagtgaaagtgctttgtactattaaaagctcaaatctcttt

SEQ ID NO: 240526 - DNA, 330 bp, Homo sapiens
aggaaacagcagtcatgaacaacattatagatcaaacagacctagcagacatatacagaacattctacccaataacaacagaataaacattcttctcaaatgcatgaaacctaaaaatactactctaacattccctctgccctgtctgtgtaaaaactggtcatcaagaaatcatccgacctaccttgtttgagtgtagatcataagaccctcattccaaagaggrtccctgccccatacccagaagaaagaaatgcatgcttagagaggccaagaagaatctaggcagacaggccttgttgtgtttgcccactctatgtaaacattaga

SEQ ID NO: 240527 - DNA, 631 bp, Homo sapiens
gtcttaactctgttgcccatgctggagtgcagtggtgctatcttagctcactgcagcctcaatctcctgggagcaagggatccttctgcctcagtctaccamgtacctgggactatatgtgcacactaccatgtttggctaattttttctttttgtgtagggatggggtcttactatgtcgcccaggctgatctcgaactcctggcctcaagccatcttcctacctcagcctcccaaagtgctgagattataggcatgagccactgcacccagcctcaatcttttaaaagtgggagtaaaatattcagatgttcagcttttcatgaacaagtggaagatttggtcctacattcttccatcacagtaacagctaggactaagcacctggcctctattaatggggcattcctttttcaatttgcaccattctcaaacaatccatattacttgtttatgctacttggctggaccctgtagacattcagatttgctgcctcctaccagtgcagctggggaacaagctaggcatgttaccaagacggtgattcagatcttcaaagccaaagtcagctcacagaatggaagcacaaatttagtcccagaaaagaaacaactgtggcttctcacatgt

SEQ ID NO: 240528 - DNA, 631 bp, Homo sapiens
gtcttaactctgttgcccatgctggagtgcagtggtgctatcttagctcactgcagcctcaatctcctgggagcaagggatccttctgcctcagtctaccaagtacctgggactatatgtgcacactaccatgtttggctaattttttctttttgtgtagggatggggtcttactatgtcgcccaggctgatctcgaactcctggcctcaagccatcttcctacctcagcctcccaaagtgctgagattataggcatgagccactgcacccagcctcaatcttttaaaagtgggagtaaaatattcagatgttcagcttttcatgaacaagtggaagatttggtcctacattcttccatcacagtaacagctaggactaagcacctggcctctattaatggggcattcctttttcaatttgcaccattctcaaacaatccatattacttgtttatgctrcttggctggaccctgtagacattcagatttgctgcctcctaccagtgcagctggggaacaagctaggcatgttaccaagacggtgattcagatcttcaaagccaaagtcagctcacagaatggaagcacaaatttagtcccagaaaagaaacaactgtggcttctcacatgt

SEQ ID NO: 240529 - DNA, 511 bp, Homo sapiens
agccagcgatcctgcttccatccctccactttcagtgtggaccttggaaaagtcrcttcattactctcagcatttgtgtatttgtttacaaactagggataacaatagtatgaacctcttagggctgttgtgaggatccagtgggacattgctataagccctgagtgtggtgcctggcctgaagaatgttttcccatgtgtcagctgatactgagctcactgttaactcacaattctagagctatgcagcagggcagctgatggcccaaaggtgggtttgggacccaagggcaaattgcacatatgtatttatgacattttatcctgcattctcagccacttggtccagcctgaggatgtctgtttgattccaacaactccacagtctcctgcggctgggcaccgtgtacctgtcggtaagtagatgccttttgaccatcctgaagtcactggcagaaatgccagctcctggccacccagagcttctcatactgcagagagtggttgctcg

SEQ ID NO: 240530 - DNA, 511 bp, Homo sapiens
agccagcgatcctgcttccatccctccactttcagtgtggaccttggaaaagtcacttcattactctcagcatttgtgtatttgtttacaaactagggataacaatagtatgaacctcttagggctgttgtgaggatccagtgggacattgctataagccctgagtgtggtgcctggcctgaagaatgttttcccatgtgtcagctgatactgagctcactgttaactcacaattctagagctatgcarcagggcagctgatggcccaaaggtgggtttgggacccaagggcaaattgcacatatgtatttatgacattttatcctgcattctcagccacttggtccagcctgaggatgtctgtttgattccaacaactccacagtctcctgcggctgggcaccgtgtacctgtcggtaagtagatgccttttgaccatcctgaagtcactggcagaaatgccagctcctggccacccagagcttctcatactgcagagagtggttgctcg

SEQ ID NO: 240531 - DNA, 511 bp, Homo sapiens
agccagcgatcctgcttccatccctccactttcagtgtggaccttggaaaagtcacttcattactctcagcatttgtgtatttgtttacaaactagggataacaatagtatgaacctcttagggctgttgtgaggatccagtgggacattgctataagccctgagtgtggtgcctggcctgaagaatgttttcccatgtgtcagctgatactgagctcactgttaactcacaattctagagctatgcagcagggcagctgatggcccaaaggtgggtttgggacccaagggcaaattgcacatatgtatttatgacattttatcctgcattctcagccacttggtccagcctgaggatgtctgtttgattccaacaactccacagtctcctgcggctgggcaccgtgtacctgtcggtaagtagatgccttttgaccatcctgaagtcactggcagaaatgccagctcctggccacccagagcttctcayactgcagagagtggttgctcg

SEQ ID NO: 240532 - DNA, 609 bp, Homo sapiens
ccatctgaaaagtaatccctcaaaggtagcatggtctgggatcagtgtgaggcatataaaaataaacgagacacagttctgtccttaggaaggtcacagtcaacttgggaagrtaagatacatgcataaaaacttcactagcaaagcagtgtatgatgtcgaagtaaagggggaaatccgtgtagactaggatgagggaacaaggtataatttgagcaggaattacaggaaaaaaagtgagaaaataggttagaaaaaatatgaactgggtaagaatcaaggatgcacaaattggggagaataagtagacatttagtcttaagtggagaatttatttaagattcagtggaagataaagttagaaaagtaggttagggtaagattttaaaaggcattgagtgtaaagatgtcaaattctgcccttatccaaccttgtaaaactgtatttgaggacaggagctgtatcttttttattcttgtagtttcctgctagcttagcctactgccttttcttataagaaaatagtgagtaggcacccagtgtgtgtgtgtgtgtgtgtgtgtgtgtgtgtgtgtgtaaaattgagttagcatctattggaaatgcaa

SEQ ID NO: 240533 - DNA, 471 bp, Homo sapiens
tgaattccaacttactttccaaagcaaactctcattaattactgatgatgaccatgaggttttggagagggacaaaaccatctccaaatgtttttgagtgtctcctgtgtatcgtgtcctgtactagatgttttacacatcaactcatttaatccttatgagaacattgaaaacaaagttatccccattttacagatgagaaaattgagattgatagaggtaaggtmaccttacacagttattaactgtgagggtggattaaaatccagatttctctgtctctaaaacctcaggctttttctactgtgccatactacttctaatttgaactgtattttccagtgaaatgagattaatcttccctatagacatgccaggtacctgttatcactttattctggtatccgctccattttttggcatcctatgcttcttccatgcctgactttatctcccgtttgagcctctttc

SEQ ID NO: 240534 - DNA, 471 bp, Homo sapiens
tgaattccaacttactttccaaagcaaactctcattaattactgatgatgaccatgaggttttggagagggacaaaaccatctccaaatgtttttgagtgtctcctgtgtatcgtgtcctgtactagatgttttacacatcaactcatttaatccttatgagaacattgaaaacaaagttatccccattttacagatgagaaaattgagattgatagaggtaaggtaaccttacacagttattaactgtgagggtggattaaaatccasatttctctgtctctaaaacctcaggctttttctactgtgccatactacttctaatttgaactgtattttccagtgaaatgagattaatcttccctatagacatgccaggtacctgttatcactttattctggtatccgctccattttttggcatcctatgcttcttccatgcctgactttatctcccgtttgagcctctttc

SEQ ID NO: 240535 - DNA, 621 bp, Homo sapiens
tttgctttcctctttcagccttcttttggatgaattgacttttccaatgattccattttaccacctttatggtatattatgtacaactctttgtgttactattataaagtggttggtttcaggtgatgggtatcaagatatactaccccaaaatgtaacaccttagcatgttaaatattttaagctgwatgaatttgagaaaactgcagaagcaggacggtcactctgttcttccctggcacttctctgaagcagatcataagtccctcatgtgagaggtgccctccctatacccagagaaaagaaacatccttgtctctcacgacaaaaggtcaaggagaaaaatctgaacaagcaaacccagctaaatttcccccagtttactaccattagatcataaccccattgtattatatgccccattatatttctccatgactatccattcttcatcaaacctactataaaaatactcagatctgtttctttgagtcttctttccttatgatggctactgtgtcacataacacttatattaagtaaatgtgtatgcttctgtgttattaatctgttttttgttatagtggcctcagctgtgaactcaggatgggtagaaaaaga

SEQ ID NO: 240536 - DNA, 531 bp, Homo sapiens
  misc_feature (1)...(531): n = A,T,C or G
nnnnnnnnnnnnnnntcattctgttggttgtctgtttagtctgttgataaattcttttgctgtgcagaagttctttagtttaattaggtcccacctatcaattttggtttttattgcaattgcttttggagtcttcttaatgaaggatttgccagggccgatatccagaatagtatttcctaggatttcttcaagagtttttatagattagttttaaaaactaaaaatttatagttttcgattttacatttaagtctttaacccaccttgagttgatttttgtatmtggtgaaaggaaagagtccagctttgatcttctggatagggctatccagttattccaatgctgtgtatgacccagggagtcctttccccattgcttgtttttgttaactttgtcaaaaatcaggttcttgtacatgtgcagctttatttctagattctctaacttattccattggtctatgtggtggttaatattaggtgtcaacttgattggattgaaggatgcctagatagctggtaaaatat

SEQ ID NO: 240537 - DNA, 474 bp, Homo sapiens
catatgactgttaatatctcacataacattctgagttactcaagaatgcataaaagggrcactagatactcttctcatgtatgtgtgtgtgtctgtctatacatgtaggtacacttcatggtgcatcagctggcagaaccctcaggacaccccttcacatcctcagtgccccatttcacacatgaggaaactgttcatgacagcacatggctgatttgcataaaagtcacttggtcagcagttgttgaagctgaacttggaatctaggtctgtctgaccttaactatgttccttccacagagccacgttcattccatagaggaacccaccacctataaaaccagaaaagagacaaagccagaagtgcagggtggatttcttaacacaagctcactgcgacctctactcctcatcacgctgacactaagcttaaacccagacccttctacagttttgtctacaaagcacaatttg

SEQ ID NO: 240538 - DNA, 597 bp, Homo sapiens
gaaagtattattcaaatattttatatattgattaatcattctatctacttgttctaccagcttttgggaaaaaatgttaaaatatctagatataattgtgtaatttcccatttctccctttaattcttttagtttttgatgcatgtgttttgaaactctttcataagatgcaaccacatttattattgtatcttcaggatgagtcgatcatattattattatgaaacatcttcctttatctctggtagtactctttgtcttgaagtctatattgtctaattttaacatagacactccagctttcttatacttagtatttttgtgttatttcttaccactgtgtgaaaaatcactctgaaaaactaatgctgaacatatgcagaaactgggaccccagaattctacttctatattcaaccaaaatatgtatgtatactctccaaagtcatgtactagaatgtttatgtcactactatttgtaaaataccagactgggaattatctaaatacctaygaataatattaatataatagatgaattgtggtatatttatcagtggagaattagcagcaaaagaatgaaaaaaaaacatagct

SEQ ID NO: 240539 - DNA, 449 bp, Homo sapiens
caaattattaatgtcagaaataaataagggaacatcactacagatctcatggacattaaaagaaaataaagaaatactatgaacaactctgtacccacaaatttgataacctaaatgaatggacaaattctttgaaagacatgatatgtcaacaatatgtcaaaatgcacacaaaaagaaatgatgaaattgatagaactgtatctataaaagaaattgactcaataattaataaactcccaaagcagaaagcactaggcccagatgggttcactggtgaattctactamacatttaaagaagaatttatattaattatctacaatctcttccagacaatagaagcaaaggaaacactttctaattcattctacgaagccaacaatatcctaataccaaaaccaaagacattataagaaaactataaacctgtatctctcataaacata

SEQ ID NO: 240540 - DNA, 563 bp, Homo sapiens
taccctagaacttaaagtataataaaaatatatatatatawaaattttaaaaaattggacaaaagatatgaacagacatttttcaaaagaaaacatataaccatctcctaatgagtcactttggcataatgactattttgagttgaaggcacttgaaaaacagcaggtgcaagaagattgctctggcctgttttctgtttcttaaaaacaagagatgacatttccttgtggaaaatttcctccctgtactagaggaaactatcatttttattatcaaggacagaacttgagattaagggaaatgtatataaagaaaccttgttagactaatccttatctttctagtcaattccacccaattaactaccccagcccaaacccctttgccttgtcacattttcacaatttactattcctcatttaattcagtatgtaagtgttcaaactctaactgcatccttggatcttcatttccttaaggctctgtatcatgtaaaacttgtattaaataaatttgtatacttctgctttgagcaaaacaaaacatacaaatggttaataag

SEQ ID NO: 240541 - DNA, 587 bp, Homo sapiens
cgatcttcaccctttttccatcttctttagccaacaccttaagattaaggtgttataaaacccaaaaggagagattgaaaccaccattgcaaaattgtaactgagacagtgaaagagatgtgacctaaccaactccatcttgtttttaacttccaagctgtccttgttcattcctggggataggcacaactaactttgggaggaactttgtttatagtttaaaacaaagaatgagaacaggcttttccaaaggcaaattccctccttgtgtggggactaaactgcctttttagggctaacaaattagccacaagattagaaattatgggccgggcacagtggctcatgcctgtaaccccagcactttgggaggccaaggtgggtggatcacatgaggtcaggagttcaagaccagccatggcaaaaccccatctctactaaaaatacaaaattagccaggcatggtggtgagtacctgtaatcccagctactcaagaggctgaggcaggagaatcgcttcaacccaggaggcagaggttgcagtgagccaagattgcatgattgyactctagcatgggcgacagagt

SEQ ID NO: 240542 - DNA, 430 bp, Homo sapiens
ttagagagccctctctaatatttctttccaaagtccctgatcatttccttccctttagacagcacagctactttctgaaagtatatttgaaggacatgtttagctagagagctttgggtcctttcttcttttgtgtagcatccatactgcatcttcttattacaatctgcttgataatttcctgcctgtaatctgtagtgtattcttaaaccttcatcagaggcagcaaactttgagcccaggcaacatctactaccccagtaatttttgcctggtttgcactgaatataagacactgagtttgttccctagaggtctttgcactttattttaatggaaacaatgtcatctcatatacgacaccttctatggatgaggtgtttttatagascttaccttatttaatttttactgtaattcagggattatg

SEQ ID NO: 240543 - DNA, 481 bp, Homo sapiens
atggggcttttagcccctttgttttgtccaattctcctatatggaatgggaacatcctcatccaatgcctgtaccctcattgtatcttagaagtaattaacttggttttgattttataggccatgctaatcagcattcagttctagattccaatttattctcagtgtgcctgtataacttttctttctatatatatataattaaatttctattacttatttgaatgttatagaatactsttcatatatttaaaataaaaccaccaggtataatgatttctggcttagtataaaaaagcttttacccagttagtgttatttacacaggtggatgtggctctacaacatttagagaagaagaataaattcagctgtcatatgttgccatgactctgcctctgaagagattatgaaaaaatccaaatttcagcaaaattatatggttgttttcagtacctctgaaggtgctatatcaagaattc

SEQ ID NO: 240544 - DNA, 361 bp, Homo sapiens
catggctgggttctgagtgtttgtccctcatatagaatttcagaacactgctacaaatttctgaacgtttgtcgctcacagaggattccagaacactgyggctgggttgtgtttgccccccacataggattccagaatactgctgctgggttctgagtgtttgtccctcacgtaggattccagaacactgctatgagggtctgaatatagttgcctctcaaaggattccataacactgctgctcagttgtgtttgtttgtccctcacaagggactccagtgcactgctgcaggtttctgagagtttttccctcacataggattccagaacacttctacgagggtctgaatgtttgtatctc

SEQ ID NO: 240545 - DNA, 361 bp, Homo sapiens
catggctgggttctgagtgtttgtccctcatatagaatttcagaacactgctacaaatttctgaacgtttgtcgctcacagaggattccagaacactgtrgctgggttgtgtttgccccccacataggattccagaatactgctgctgggttctgagtgtttgtccctcacgtaggattccagaacactgctatgagggtctgaatatagttgcctctcaaaggattccataacactgctgctcagttgtgtttgtttgtccctcacaagggactccagtgcactgctgcaggtttctgagagtttttccctcacataggattccagaacacttctacgagggtctgaatgtttgtatctc

SEQ ID NO: 240546 - DNA, 534 bp, Homo sapiens
tccagaacactgtggctgggttgtgtttgccccccacataggattccagaatactgctgctgggttctgagtgtttgtccctcacgtaggattccagaacactgctatgagggtctgaatatagttgcctctcaaaggattccataacactgctgctcagttgtgtttgtttgtccctcacaagggactccagtgcactgctgcaggtttctgagagtttttccctcacataggattccagaacacttctacgagggtctgaatgtttgtatctcacagtggaatctacaaaactgctgcagggttctgagtgtttctcactcatataggattacagaacactgctgctgggttctgagagtttatccctcacatgggattccagaacamagctgctggcttctgagtgtttgtccctcacataggattgcagaacactgctacgagggtcggaatgcttgtccatcacaaaggactccggaatattgctcctgggttctgagtgtttgtccatcacataggattccagaacac

SEQ ID NO: 240547 - DNA, 598 bp, Homo sapiens
tgatggttgcgccacattgtgaatatactaaatgccattcaattgcacgctgtaaggtgtttaaaaygatcaactttacattacatgtattttaccacaatgaaagaaaaataactggtagactgtcttttctaccccatagggtgagtgtggaggaggaggaaattaggatctggcctgaatccctcccataagggcaggaactgagaatcaagacaagagcagatccttgagcatcagcctggtgaaggaggcagagcttgggttggggcctcactgagtgtggctcacttggtgagggaaggggtaagggcaagtgggcagcaggcagggagagagatggcactgctttgagatttcagataaccagttatatgcagtgaacgtcactgaggatgcagagtgtgagtcatagattagaaaggagacagcaagcgtggaaaaagtgagtcatggggagaggaaagaaaacgtcactcatctaaagaggaaaagaatgaccaaaggcagcatgatacagtgcatagggctccctctgaggcttatggatagaatcatctggaagtgcatcaatatcaccaatgcctaccaccctcca

SEQ ID NO: 240548 - DNA, 575 bp, Homo sapiens
gatcttactgagtcctactcatcaggtagcccaaaggaagtgacttgtgtttcttctctccggtgaacatgaggaaatacagaaggagaaagaggcagagatcatcatctttttcgaggttttattgtttcattgacaaacttaggtatggttatatcaaataaaaatagttttcaaggaagaaatgaaaaaaggagagaaggaagagaagggaaagaaaactaaatgaacaaaaacaaaagaaaacaaacttgcaaatagaaaaaaaaaacaagttgacacgcaaaatctagaaaaaatgactcaaaattgaaaagcttcaggttctctgaaattgatcttttgaggaaaatggtcatttatcatgccaatcgtgattcttaggggtgaaatatatagggatataggacaaataaagaagtatttatagcttgagatamtaatgtttgaggatttattttggcctttttcatatctaggtctaagacatcatagataaagcaaagtttatgctatggtttgaatgtctgtccccttcaaaactcatgttaaaacttaatccccaatgtgtcagt

SEQ ID NO: 240549 - DNA, 559 bp, Homo sapiens
agaaaagaaataacgaagaccaaagcagaactaaatgaaacaaacaaaaaacaatacaaaagataaaacaaaatgctggttatttgaaaagataaataaaattaatagaccattagtgagattaaccaagaaaagaagagagaagatccaaataagctcaattagaaatgaaatgggagctattaccactgataccacagcaatacaaaagatcattcaaggatactatgaacaccattatgctcatttactagaaaacctaggagatgaacaaattcctggaaatatacaaccctcctaggttaaaccaggaagatatagagtctctgaatagaccaataacaagtagcaagcttgaaatggtaatttttaaaaatgccaacraagaaaagtccaaaaccaaatggattcacagctcaactctatcagacattcaaagaagaattggtgccaatcctactgacattattccaaaaaatagagaaagggggaatccttcctaacacattctgtgaagccagtatcaccctaataccaaaaccagggaaagataacaaaa

SEQ ID NO: 240550 - DNA, 559 bp, Homo sapiens
actttgaaattgttaccttggttttcctagtaaactgtgttaaaacaaggtctctacaatgtctcactccaatctgtcattgatttcatagagtttttactttaatttgtatttcttcttttatgttctgttttttaaattttattttttttgttcctcactctaagaatgtatattccagataaacaactttataacctgtacttaattttttactaaccccttcaaagaatttaattttttcaaggaatattcttataactaacaggttttraatttatatatacaatattctatcaaatttattaataaagagcagtgttgaattattttaaagctttttctgttatccgaattatggtatttatatgtaatcaattgctttattttggttctttttaaaattattacttattctcaaatgtctgtcaagcattattgactctctgatcacataaatgaataaatgactttttcacattggtgatacagtggtgagcttgtcttccacaaataaatgtttttttaattttttttaatttccaacttttattttaag

SEQ ID NO: 240551 - DNA, 559 bp, Homo sapiens
actttgaaattgttaccttggttttcctagtaaactgtgttaaaacaaggtctctacaatgtctcactccaatctgtcattgatttcatagagtttttactttaatttgtatttcttcttttatgttctgttttttaaattttattttttttgttcctcactctaagaatgtatattccagataaacaactttataacctgtacttaattttttactaaccccttcaaagaatttaattttttcaaggaatattcttataactaacaggttttgaatttatatatacaatattctatcaaatttattaataaagagcagtgttgaattattttaaagctttttctgttatccgaattatggtatttatatgtaatcaattgctttattttggttctttttaaaattattacttattctcaaatgtctgkcaagcattattgactctctgatcacataaatgaataaatgactttttcacattggtgatacagtggtgagcttgtcttccacaaataaatgtttttttaattttttttaatttccaacttttattttaag

SEQ ID NO: 240552 - DNA, 608 bp, Homo sapiens
cattcctggtgtgctcacagagctgcaggcagtgacatgctcctgtttgctgaaccacaggagaaaagggctgtgacccttctggggccccggacttcagagctccctgagccacaactgtgacatgccataacacccccttggggcttctgctggttgctggcattaccaagytttcaggtgccaccacattccctttgtccaggtgccaggacccaaggcagaagccatttgtggcatgtctgttccagtcacagcctcacacagagccagcatctgtgccagagcctggagctgcctgccccactgcagcagctggctcccctgtctgtgcaccatggccagaccccttgctagcttctgcacacacccctcaccgctccacacccagcttgcctatggcgggtgtaggatcctggccggtagtgtgagccaagcacaacctggtgggatgagtgggtaagtgaaactcaaggagaggtgccgctggtcatggaggtctctggctggtgaagcggcatcctaaagaatcctgtatctttggcaccccaaagaattgcctacaatatctttgtaggtaattctgtatctttggcaccccaaagaat

SEQ ID NO: 240553 - DNA, 608 bp, Homo sapiens
cattcctggtgtgctcacagagctgcaggcagtgacatgctcctgtttgctgaaccacaggagaaaagggctgtgacccttctggggccccggacttcagagctccctgagccacaactgtgacatgccataacacccccttggggcttctgctggttgctggcattaccaagctttcaggtgccaccacattccctttgtccaggtgccaggacccaaggcagaagccatttgtggcatgtctgttccagtcacagcctcacacagagccagcatctgtgccagagcctggagctgcctgccccactgcagcagctggctcccctgtctgtgcaccatggccagaccccttgctagcttctgcacacacccctcaccgctccacacccagcttgcctatggcgggtgtaggatcctggccggtagtgtgagccaagcacaacctggtgggatgagtgggtaagtgaaactcaaggagaggtgccrctggtcatggaggtctctggctggtgaagcggcatcctaaagaatcctgtatctttggcaccccaaagaattgcctacaatatctttgtaggtaattctgtatctttggcaccccaaagaat

SEQ ID NO: 240554 - DNA, 575 bp, Homo sapiens
tttgggagcaagttcatatcttctttagaagataactattcttttgagacacagctttcagcttttagtcaacactcgctcatcgaggctgagagtatattyaatgatattcaaaatttctgtgaaaaatataacttttgtatgaagcccctgaaggtcccctgtaaagtgtaaaaacacagacttctatgctttgaggctaaattcttttattttgctgataaacattgcctttttgagaaatatccctgggcttctattcaaccttggtagccactctaacaataggaaattagataatcgtgtacactaagatgtttatcacaaattgcctgtatcttttccacaatctataagcttgtacttatggagaagcaatcagtcatctagtgaaaatgggagataaaagatcagtttggaaggtgcatgaatgcttcaagagctggtggctcaaattacatcaatactaatccctgagacattgtctatcttccctaatccagccccgtggtctcatggatagttgcttatgtcccattgactgaagatgaaaatgaatgttcctggtttataga

SEQ ID NO: 240555 - DNA, 575 bp, Homo sapiens
tttgggagcaagttcatatcttctttagaagataactattcttttgagacacagctttcagcttttagtcaacactcgctcatcgaggctgagagtatattcaatgatattcaaaatttctgtgaaaaatataactkttgtatgaagcccctgaaggtcccctgtaaagtgtaaaaacacagacttctatgctttgaggctaaattcttttattttgctgataaacattgcctttttgagaaatatccctgggcttctattcaaccttggtagccactctaacaataggaaattagataatcgtgtacactaagatgtttatcacaaattgcctgtatcttttccacaatctataagcttgtacttatggagaagcaatcagtcatctagtgaaaatgggagataaaagatcagtttggaaggtgcatgaatgcttcaagagctggtggctcaaattacatcaatactaatccctgagacattgtctatcttccctaatccagccccgtggtctcatggatagttgcttatgtcccattgactgaagatgaaaatgaatgttcctggtttataga

SEQ ID NO: 240556 - DNA, 575 bp, Homo sapiens
tttgggagcaagttcatatcttctttagaagataactattcttttgagacacagctttcagcttttagtcaacactcgctcatcgaggctgagagtatattcaatgatattcaaaatttctgtgaaaaatataacttttgtatgaagcccctgaaggtcccctgtaaagtgtaaaaacacagacttctatgctttgaggctaaattcttttattttgctgataaacattgcctttttgagaaatatccctgggcttctattcaaccttggtagccactctaacaataggaaattagataatcgtgtacactaagatgtttatcacaaattgcctgtatcttttccacaatctataagcttgtacttatggagaagcaatcagtcatctagtgaaaatgggagataaaagatcagtttggaaggtgcatgaatgcttcaagagctggtggctcaaattacatcaatactaatccctgagacattgtctatcttccctaatccagccccgtggtctcatggatagttgcttatgtcccattgactgargatgaaaatgaatgttcctggtttataga

SEQ ID NO: 240557 - DNA, 507 bp, Homo sapiens
gaattcccacagcttgaagggcatctccaggtggaatttggtgccggcyttgaaatactcggggtcgactgagcaatgccaccatctggtggtcagacaaagaactaaggaaagcagtggcagctctccatttgtgggtcttaccagttgagcaaccttttaaatctattccaggaggctctacttaaggtacagccatactaaatgttgtaataaagaatgtttcgtaatgagaataaccactctacagtggattaaatatggccacaaattcctggaagcccctcccattaagacatgagtctatttccctatcctttgaatctgggctgggctcttgacttgctttgaagcagaatgcacaggaagagatgctgtgtaacttccaagcctctacctcaattggcctcagagtttgcccctcaccctcttggaagactgccactttgtgaacaagcccgcaccagcctccttcagcatgagattctagtggagagagaatctcca

SEQ ID NO: 240558 - DNA, 507 bp, Homo sapiens
gaattcccacagcttgaagggcatctccaggtggaatttggtgccggccttgaaatactcsgggtcgactgagcaatgccaccatctggtggtcagacaaagaactaaggaaagcagtggcagctctccatttgtgggtcttaccagttgagcaaccttttaaatctattccaggaggctctacttaaggtacagccatactaaatgttgtaataaagaatgtttcgtaatgagaataaccactctacagtggattaaatatggccacaaattcctggaagcccctcccattaagacatgagtctatttccctatcctttgaatctgggctgggctcttgacttgctttgaagcagaatgcacaggaagagatgctgtgtaacttccaagcctctacctcaattggcctcagagtttgcccctcaccctcttggaagactgccactttgtgaacaagcccgcaccagcctccttcagcatgagattctagtggagagagaatctcca

SEQ ID NO: 240559 - DNA, 585 bp, Homo sapiens
tattaaaccactgcagagcctctttatctccaagtgtgggttgcagcaaagcatgaacccatctgtgctccaggcctgaatgaacataaaccaagtcattccaaaagtctctgtattgctgagcttgaactttccccccccggaaccagtgctccctctctgcagcatatcatgaaaatgtcacatcttcattagatatgaagtgaatctrccaccaaacattctcctattgcccactgcttctgtaataaaatttagacctagaaaaatctttcaaggtcatcaggctcaacacctttatattccagatgtggaaaccaaatctccaagtctcagagaagccaagttcattgatcaagggagtgggtggcaggatgaagagtagaccccagactcccccggccttgcacactcaagagtgctttccaaaaccaaactgtaccttcccagaaatgaacaataagggagaaatcacacaataggatgctttccatgggtgtccttaactcaggagatcctttctctgatgatgctgcagtgggcatgatgctgctttaatcaaagtgaaccaaattatgagaagat

SEQ ID NO: 240560 - DNA, 603 bp, Homo sapiens
tccttggtataattctgggtctgccatttcctgaccgtgtgttcttggacaaataacgtaagttctctgtgcctcagtytcctcacctgcagtaacaatagtaccaagctcaaaggttggtactcaaaacctgtgaggattaaatgagttcattgagataaagtgtcttgcacagtgcctagcgcatagtaaatagccagtaaatgttcattcattcaataaacgttcatcctcattatattattatgattattctccttcagggcctgcctcgccttacctggggaagaaattgatcattacctcattctctgccattgtgttttcttttctatcatcagctccttcttggtctctatcagttctcttggttttatttttctcattctgcttggccttggcgccctcaggggccctagtgacctttggccccagcccatcttccttgcctgagtcatccggatgggggtgtctgctttcccgcagcctggcctcgtctttcctcctggacctcccgggggcatcctgctgctgcttcagatacttgtcccacttggctttgggctctttccggtagtagccgtcttcacggcttttgtagct

SEQ ID NO: 240561 - DNA, 603 bp, Homo sapiens
tccttggtataattctgggtctgccatttcctgaccgtgtgttcttggacaaataacgtaagttctctgtgcctcagtctcctcacctgcagtaacaatagtaccaagctcaaaggttggtactcaaaacctgtgrggattaaatgagttcattgagataaagtgtcttgcacagtgcctagcgcatagtaaatagccagtaaatgttcattcattcaataaacgttcatcctcattatattattatgattattctccttcagggcctgcctcgccttacctggggaagaaattgatcattacctcattctctgccattgtgttttcttttctatcatcagctccttcttggtctctatcagttctcttggttttatttttctcattctgcttggccttggcgccctcaggggccctagtgacctttggccccagcccatcttccttgcctgagtcatccggatgggggtgtctgctttcccgcagcctggcctcgtctttcctcctggacctcccgggggcatcctgctgctgcttcagatacttgtcccacttggctttgggctctttccggtagtagccgtcttcacggcttttgtagct

SEQ ID NO: 240562 - DNA, 616 bp, Homo sapiens
gtctgccatttcctgaccgtgtgttcttggacaaataacgtaagttctctgtgcctcagtctcctcacctgcagtaacaatagtaccaagctcaaaggttggtactcaaaacctgtgaggattaaatgagttcattgagataaagtgtcttgcacagtgcctagcgcatagtaaatagccagtaaatgttcattcattcaataaacgttcatcctcattatattattatgattattctccttcagggcctgcctcgccttacctggggaagaaattgatcattacctcattctctgccattgtgttttcttttctatcatcagctccttcttggtctctatcagttctcttggttttatttttctcattctgcttggccttggcgccctcaggggccctagtgacctttggccccagcccatcttccttgcctgagtcatccggatgggggtgtctgctttcccgcagcctggcctcgtctttcctcctggacctcccgggggcatcctgctgctgcttcagatacttgtccsacttggctttgggctctttccggtagtagccgtcttcacggcttttgtagctggacacagagtggggcaggttgggagaccca

SEQ ID NO: 240563 - DNA, 533 bp, Homo sapiens
acctgtcacagcactgccttcacacaggcaccaggggagcagcagagcttgggaaagctggtgggaaccatcaggaccaagaccatgacatgagatctgccatcgccgggaagccacaccccgggtccctcccaaatctgtggcttgcactgccaagctagaatagacaaaggctaaagaatgtgcccccagactggcataaatgtatatggcaattcttcagaacataaaattccccatgggagttggatggggagctttctgttgtaaaaagagtccccaaggttccagttttcttctgctcttctggaacttcatatcctcctggttattccttccagcccagatccaggaaagaccgacgtgggaggaggatggtcttggcagggagmggctgaggttttgcagattacccatggcagagtgactatgagggtagggctcaggtgcatgggggcaggagcaggtcaggccaatgtcagggccagaggcattccacgagctcttggtcccttctgcacgttggttatcac

SEQ ID NO: 240564 - DNA, 603 bp, Homo sapiens
tccaaaaatggtttcatccagtccctgtctaaaggcaagtaaattactattataactcatttatggatgatgcaattgaagtctaatgaagttaaatgatttatccaaagtgtgcttgccatgacggtttaggtgcaagaacatatttggttacagattatagaggcataattatgaattttgtcagacattattttatgtgtaggaaaggcaaggactggggtcatttttcttttaggaaatatagtgacttaggcaaaagacatggggggcatgttttttatcttctttggtctttaaagtatctttttggagagtkgtatgtcatcacagaattaggggctttgtgaaatgatgctgtggagatgaataaacatggctttttatgtttgtcactttatctcacagtctcttaaaattcattcctgtggtaaagaggggcccttagagaaggccttgcctttccactcagactttcttgtcatctagcacccagacagaaattacagagacatcctgtaaggtctgaagaatctgtgcacacacaaattacttaagatgatggagacattggttatactccctgcttagattgacagcagt

SEQ ID NO: 240565 - DNA, 587 bp, Homo sapiens
caaggaaaacagcaaggtctagagcttaaaagaaatcaggcagcatctatgaattaagaggtcgggtaagtaagaattgaatgcaatgaaaacaatttccccatgcttggatagaacttaatgcttgtgacgatgctcttccccacgcgttcttccttctctgctcctctagcagttgtaacctgccccacagagagaagagaaaatgtgagcgctggcaagggaggaggacctaagctagtaatcagtccaaccctcttgttttccagagcacacagcccctgagaggaaggtcctcacccatggacrcagcttgctgatggcagtgataagatcaatcaggattttgggtttggcaatttccccctatacaacgatagtttccacctttcatgctgaggttggtagttgctttgtgttgtcttaaaaattttttaaacatggaaatatttctaagtgtaacaagcccttgtgtccccaccaaccaggattaaccaatgttaacatttttatcatttttcacatgatggataaagctgatgtcccctgtcccattctctcccctcactctgtgtccagaggcaaca

SEQ ID NO: 240566 - DNA, 587 bp, Homo sapiens
caaggaaaacagcaaggtctagagcttaaaagaaatcaggcagcatctatgaattaagaggtcgggtaagtaagaattgaatgcaatgaaaacaatttccccatgcttggatagaacttaatgcttgtgacgatgctcttccccacgcgttcttccttctctgctcctctagcagttgtaacctgccccacagagagaagagaaaatgtgagcgctggcaagggaggaggacctaagctagtaatcagtccaaccctcttgttttccagagcacacagcccctgagaggaaggtcctcacccatggacgcagcttgctgatggcagtgataagatcaatcaggattttgggtttggcaatttccccctatacaacgatagtttccacctttcatgctgaggttggtagttgctttgtgttgtcttaaaaattttttaaacatggaaatatttctaagtgtaacaagcccttgtgtccccaccawccaggattaaccaatgttaacatttttatcatttttcacatgatggataaagctgatgtcccctgtcccattctctcccctcactctgtgtccagaggcaaca

SEQ ID NO: 240567 - DNA, 570 bp, Homo sapiens
tccatttttagctgccctacccacatcaggtctctataaatcttatctaatccttggcttctttaacaacttggaatactggttctgccgccaactgtatgtggtaggggttgtgattccctgctcctgagagctcacagacattaagcagtaactgggctcttgtaaaagtccattagctttttgatgtactttcttaaagagcgtagtgtgtggatactgaggcatgcgccttcccagatgatatttgctgctggctttgcttaggaaatttggatcatctggttcttatcacagctgcactgttgggagatatgatgaactgccagtgacacagtgcatggtctttcagaggccactgcatgaagcctgtcccttgctactgaagmgaaaagtcaattctgtaacagggtgtaaaagctatacaggccaaggaggacttttgggtacctgtctcccttttgctttctcagcatctatgcacacattccagtgcgcttttgcgcattcctgttaaggcgactaactgcactaagcctggagagttgatggtgagggaaaactggggtt

SEQ ID NO: 240568 - DNA, 570 bp, Homo sapiens
tccatttttagctgccctacccacatcaggtctctataaatcttatctaatccttggcttctttaacaacttggaatactggttctgccgccaactgtatgtggtaggggttgtgattccctgctcctgagagctcacagacattaagcagtaactgggctcttgtaaaagtccattagctttttgatgtactttcttaaagagcgtagtgtgtggatactgaggcatgcgccttcccagatgatatttgctgctggctttgcttaggaaatttggatcatctggttcttatcacagctgcactgttgggagatatgatgaactgccagtgacacagtgcatggtctttcagaggccactgcatgaagcctgtcccttgctactgaagagaaaagtcaattctgtaacagggtgtaaaagctatacaggccaaggaggacttttgggtacctgtctcccttttgctttctcagcatctatgcacacattccagtgcgcttttgcgcattcctgttaaggcgmctaactgcactaagcctggagagttgatggtgagggaaaactggggtt

SEQ ID NO: 240569 - DNA, 542 bp, Homo sapiens
tggcctggttttttttttttttttgagacagtctgtcacccagactggagtgcagtcgtgtgatctcagctcactgcaatctccaccttctgggttcaagcgattcgcctgtctcagcctcctgagtagttgggattacaggcacccgccaccatgcccgggtaatttttgtatttttaatagagacagggtttcaccatgttccccaggctggtcttgattcctgacctcaggtgatccacccgtttctgcctcccaaagtgctgggattacaggcgtgagccaccacccagccatcctgtgtgttttgagcatattgctaggacttgatacaaatggctattttagcatttgtcagccacccagtatagttacttgtttacacatctatccccagaagtggactgtgtgcttcttaagasctgtgacaaagatgaatatgcctctgaatatgcgcagtgccttgtagaacaccagatacgtaatcggtctcagtgaatattcattaaatgaatgattaacacaaggcaggttaggacaaa

SEQ ID NO: 240570 - DNA, 582 bp, Homo sapiens
ggcgggaataatccacatcagatgatagggaatgagagggttccataatcgtatttctgcatctgaatcttaagcctagctttgcttctattcgttagatattggaaagactgatacagcattgcatcaaacctaagatgctatagactgaagtgacattcctattttatatgccattacgaacccttttaaaaatgccactcactaaactatggctgctataattatgaaattcattcaagttgctataatcagaaaaaaaatttgtgtcttaggatcgatgaaatacggtacaagctgtgaactgcaatgaacttggttctgaagctgtggaaatcgctcagcacactggggaggctcctgctaaccaaggccaaaaacatagttcaaacaacatggaaaataatctgtactgcatatttcartaagatttgtttgctctaagcactgaatacgcatacatgaaaagttaggaaattcataacaccttttaggttttggtactcagttttcttaccggtaaaatgggttgtgatctgtggtcaggcttatatgacacgacatacataaacaaatagcaca

SEQ ID NO: 240571 - DNA, 576 bp, Homo sapiens
cctttaggtcctatttttcttaggaaaggtggraagaaccaacacaatttattgaacagaggggaatcataggagactctgtagaggttttatgtctgtactaagatgatattgcattatcaatttaaaaacataattgacacttttatcagaattggaaacgtgcagaaaattttccctggttcatattaagaggtctcttaattatatcttctgctcattaaggcagaggcgattcagcctgacccttctaactgtttcacttgtatagaaaaaggaggcaaaggaaattttaagaggagtttggaaccatttcaaacaatttcctcaatgttctgctttattgtatttcagtataatgaagtactgtacccccagtacaatgtactctacttcttctgtacttgtactgagtaatcaagtgactcctgggatgataggtactatcaaacgaaaatactgtatttaaacattgctaaactgtcagttcaactttagacgctcccattcaatgaccaggaacttgtggatcatataaaggtaggtttattaaacatgctaagcaggagagagcag

SEQ ID NO: 240572 - DNA, 551 bp, Homo sapiens
catcagagtgatccagatatgagacaggagtcaaaggaaatcactttggggctttaagatttgactcccctggtggattttggacttgagtagggcctgtagtccctttgttttggccaatttctcccatttggaatggctgtatttaccaaatgcctgtatccccattgtgtccggaaataactaacgtgcttttgattttacaggctcataggcggaagggacttgctttgtctcagatgagacgatggactgtgggcttttgagttaatgctgaaatgagttaagactttgggggactgttgagaaggatgattgtawtttgcaatatgagaaggggatgaggtttgggaggggctagagtggaatgatgtgttttggctgtgtccccaccctaatcttaccttgaattgtaactcccacaattcccacgtgttgtgggaggatcccattgggaggtgattgaattatgggtgcaggtctttcctgcgctgttctcgtggtagtgaatgagtctcacgatatctgatggttttaaaaagaggagtttc

SEQ ID NO: 240573 - DNA, 577 bp, Homo sapiens
ccaattcattgacttttgaagtgttggttgtgcaatatgcagtcaggcattgtcatgaagaaaaattgggccctttctgttaaccaatgccggctgcaggtgttgcagttttcagtgcatctcattgatttgctaagcatacttctttgagataatggtttcaccaggattcagaaagctgtagtggatcagattggcagcaaaacaccagacagtgagcatgacctttttttttggtgcaagtttggttttggggagtgctttggatcatctcttggtcaaaccactgagctgttcttcattgcttgtcatataaaatccatttttcatcacacatcacaatccaatcaagaaatggttccttgttgtcgcacagaataagagaagatgacatttcaaaattatgatattttttctgatcrgctcatgaggtacccacttatcaagctttatcatctttccaatttgcttcaaatgctgaatgtccacagattggttgccattgagttattttgcaacttctcatgtagttgtaagaggatcagcttcgatgattgctctcagttggttgttgtca

SEQ ID NO: 240574 - DNA, 470 bp, Homo sapiens
gtctgattgctctatctagggcttctagtactatgttgaagaacagtggtgacagcgggcatccttgtcctgttctcaatcttagaggaaagtttttcagtttttccctattcagtatgctactagctgtgggtctgtcatatatggcttttattatgttgaggtatgttccttctatccccaggtttttagtgtttttgtcattaagagatgttgaattttatcaatgcttttccagcatcaattgaaatgatcatacggtttctatccttcattctgttaatatratgtattacattgattggagtatgttgaaccaaacttgcaaccctaggataaacccaacttggtcatgaggaatgatctttcattgttgaattggtattgtggaatttggttcactagtattttgttaaggatttttgcatgaattttcattagggatattggcctatagttttctttttatc

SEQ ID NO: 240575 - DNA, 393 bp, Homo sapiens
cttgttttcctttctggtctaacaggacaacactgagtttaatgcctcagagttgctgtgttctccctctcccagtgcccagagaggctccctgcaccacacagctgttgctgcggcgaaggtggggtggcgtcagtgattcaggactgtgttttctgtctcttcagtgcatctttcagcgataaggagttaaaaccaggtactgtgagtgctcaactaatttttggttctcataaaggtgtttttttctgtgtagatagttgttaacttggtgttcttttgggacagtaggcaccatcagtggagctttctattctgccatcttgcttcacctccctcttgcatcatgtatttatatgyaaaacctaagagtatacaacttcctaaagaaac

SEQ ID NO: 240576 - DNA, 567 bp, Homo sapiens
tgcataactagctaccttccaggttgggctgctaccaagtcaaaatctgtcacaaagtgacctggaggaaaagaaaagatagatgagctgagagagtccctcagccccctcctcccataagcaggcactgattactaaggacatttccatgcgcrgtgtaggattttttgtcctttgcacatgacctttaaaactacctgataagctatttgcactgcctaccctagaagtttcaatagacagagagaagacgaacattaaccttaatggctaaattacccaatgtcactctaaaggtctttccccttgagagaagcctgtgcagcagccaaacactcactcctttaaaagttcacagagaggctccattaaaatcaaaactgcagagttttccaaacttgggcactttaaaagtcaacatgttacctctggtgatggactctcttttttaaaaaaattaataatttggccaaataattcgaagaaattttattaaagctctctaaaagagactgtatactcaaatgctacagtagaaaccgaagagttttcagcttaatactgaga

SEQ ID NO: 240577 - DNA, 570 bp, Homo sapiens
gaatcaatattgtgatacacatgtcccatgctcatggataagtagaatcaatattgtgaaattgaccatactgccaaaagcaatctaaaaattgaatgcaatccccaccaaaataccaccatcattcttcacagaattagaaaaaagaattatacaatttatatggaaccaaaaaagagcccgtacacccaaagcaggactaagcaaacagaacaaacctagaggcatcacactacctgatttcaaactatgctataaggccatagtcaccaaaacagcatggyattggtataaaaaaatatgcacatagaccaatggaacagaatagagaagccggaaataaacccaaatactttacagccaacttaccttccacaaaacaaacaaaaacctaaagtggagaaaggacacccttttcaacaaatggtgctgggataattggctagccacatgtaggagaatgaagctggatcctcatctctcagcttatacaaaaatcaactcaagatagattaaggacttaaatctaagacctgaaactataaaagttcgagaagataatgttggaaa

SEQ ID NO: 240578 - DNA, 562 bp, Homo sapiens
tgatagaaaacttttgtcctataaggacagtcacaagtactcagaaccatgacttttgaatcacatctgtgattaagctgcagaatatagctaacgctaaagttatggtgaggacctgaagaaataatattccctttgctatttgattcattgaaggcaatgttcaaaaggagattctcaactcatatgattgttgcttagagattgttgttcaacaaataggcatactagtccatcatataggagtcaccccaatgtgacaggggctgaaataatcagaaactaaattgtaaatgagctacaattgagataktttaggtaaatattgatttgagtatagagtcttgtccaaagatgtttaggaaggcagctccttagggaaactttgctataaagcagttcattatttattttataaatatttaatgaatacctactatgttctaaacacggttggatggttaaaaaaaaaatagcaatggagcacaaaacatacagtgtcccttaccctcatgggacttaaaaactagagagtaagaaagataataaatcaataaacaaa

SEQ ID NO: 240579 - DNA, 576 bp, Homo sapiens
cctctctattcacccacagatattagagtaggcagatagccagtcgtgagcargagaagagagcccctttggggaggaaagcctagaaaatctcacaccccagagatcacccaaaacatgcatgctagttataagcacagcggaagggaaatacctatgcaggaaggaatgcccattaagatgcccagtaatcattcagtcttcagttaacctgtcagaatgtagctagatgcatgatgataaaagaaagagggcaaaggaggaaatttctaagaaatacataggtgcaattcatagccaacaccaggcccacgcatgtgcaacaactaatagtaaaagagggtcccacaaccctggggtgggaactaggccaggaaaaggcagagacttaaggcaggagatggaaaactagacaaagaaaaaaggcagagacttaagacagaggcgggaactccaagacaaacccaacatcttaaaaactcaaggcagaactctcagggtgctgctggctcactccctttcaggggtccactctgctttatcttttgagagtgtactgtctctctaaataagctc

SEQ ID NO: 240580 - DNA, 576 bp, Homo sapiens
cctctctattcacccacagatattagagtaggcagatagccagtcgtgagcaagagaagagagcccctttggggaggaaagcctagaaaatctcayaccccagagatcacccaaaacatgcatgctagttataagcacagcggaagggaaatacctatgcaggaaggaatgcccattaagatgcccagtaatcattcagtcttcagttaacctgtcagaatgtagctagatgcatgatgataaaagaaagagggcaaaggaggaaatttctaagaaatacataggtgcaattcatagccaacaccaggcccacgcatgtgcaacaactaatagtaaaagagggtcccacaaccctggggtgggaactaggccaggaaaaggcagagacttaaggcaggagatggaaaactagacaaagaaaaaaggcagagacttaagacagaggcgggaactccaagacaaacccaacatcttaaaaactcaaggcagaactctcagggtgctgctggctcactccctttcaggggtccactctgctttatcttttgagagtgtactgtctctctaaataagctc

SEQ ID NO: 240581 - DNA, 584 bp, Homo sapiens
gcttgtataggtgttaagtacttttttctgcctcttactaaaagatttcaggatattttgagcagatgtggctaagaggtgataaagaaactagctatattttactgaaacataatgtaatggtagtcttgtgtcaccatgtgtagtggtcactgaatcattcattcaagctttcagtgaatacttatcgagagcctactatgtgttgaggaatcaagagtaaatcccagtgatgtgatccacaatttcatagagcttacagtctagtagacatggacaacaagagagtaaacaaaaacatataataatttcaagctgtgaataatgcaatgtagaaaatacagcattgttaaagtgcctaatgggaaagaaatatttctagacagcatagcatycactggggaaattgtccagtttgaccacttcaaggatgaattgaccatcttgaagcacgaagattaatgaccctggtaagtttagcccagttactctacctgctcatagcatttaatttacctaaggaaaacttaccaaaagaaaataaaatgtgttgacatgcctggtaacataaatgccctcattta

SEQ ID NO: 240582 - DNA, 596 bp, Homo sapiens
tgtcccctcttagagaagaaaaaaaaaaaaaacctttagctgtagctggctacagagtagcctctagagtagacactgcatcccagtaccttgtacacacatatcagtatcacaactactcttgctagctgtccagggaactattggttcaaaatagtttgattctaccagtgcccaaatccatgattggctgtaaaatccatattgaactctggaaatggaaaaatttaccttgacagcatagggaaattttgaaaaattcaacaaatcatggaacataatatttttgaagatgataaaatacagcagggataacaatattttatatataccaagtataaatgcatatcatccaagcatctaaattcacactatccttgtctataaataagtaaaaaacaatataaataataagtcarttttgttataatgatcaaaatcactgatggtacaaatatctcaaaatccatactggaattaatgggaaaatgcccacttagcagtcctatagttgaccaatggctgttcttagcaaagaaacaaggttactcgagttatcattcatcacttctgtgcagcctggattcctaggaatt

SEQ ID NO: 240583 - DNA, 593 bp, Homo sapiens
agatctgtttgaatgcaaagcctgtgcccttgctagtgtgacatgctgccttggctctattggggcagagaaagggaataatcactttcagcagtacccttgacctactgactgaaagaaggttccacatcatctcaagaactccttctgctgggatttggtggtaaaaagacagcattatggttgcaatatgggttttaacatcagataaacctggaaattctccagttctaccacttgctagttgtgggatcttagataacatacctatccctgggacttgatttactcacctgaaaaatgaagataataatactatggcatatctcacagaaattgcaatacagattaagtgacgtcatgcatgtaaactatctgacatagtacctggcatatactaagtgctcagtaaatcttagctatcattattagtgtattatataatatcttcatgtataaagtaaaggatttctctctctctcctcaacttgaagctatgcctgtcttagcactctagcacaaatkcaactgtggctggtatttaccccctagcactcctggaagctatgtttcacctataaagcaccgcagtt

SEQ ID NO: 240584 - DNA, 622 bp, Homo sapiens
ttcaatcctcagaacagctcagcgtggtagtacagttattctcatctccgttttactcatgagaaactggggctaaagacatgaagtgacttgtgcaagatcagcctgactctactctttctttttttcttttccttttttttttttttttttgagacggagtcgtgctctgtcrcccaggctggagtgcagtggcgcaatctcagctcactgcaacctccatctcccgggttcaagctattctcctgcctcagcctcctaagtagctgggactacaggtgccccccatcacacccagctaatatttgtattttagtaaagatagggtttcaccatgttggccaggctggtctggaactcctgacctcagtgatccgcccacctcggcctcccaaagtgctgggattacaggtgtgagccactgcgccgggccgactctactctttttaggcctggctgtggcttcctgtgagctgatctattaggcagtagttgaggtcttcacttaccctgaatttcttctggttctccactaccggtaaatgactaactctgtgaattgagtaatggatgaagtcaggaatgagtctattgcatgcgtgcatttatagaagaggctgca

SEQ ID NO: 240585 - DNA, 622 bp, Homo sapiens
ttcaatcctcagaacagctcagcgtggtagtacagttattctcatctccgttttactcatgagaaactggggctaaagacatgaagtgacttgtgcaagatcagcctgactctactctttctttttttcttttccttttttttttttttttttgagacggagtcgtgctctgtcacccaggctggagtgcagtggcgcaatctcrgctcactgcaacctccatctcccgggttcaagctattctcctgcctcagcctcctaagtagctgggactacaggtgccccccatcacacccagctaatatttgtattttagtaaagatagggtttcaccatgttggccaggctggtctggaactcctgacctcagtgatccgcccacctcggcctcccaaagtgctgggattacaggtgtgagccactgcgccgggccgactctactctttttaggcctggctgtggcttcctgtgagctgatctattaggcagtagttgaggtcttcacttaccctgaatttcttctggttctccactaccggtaaatgactaactctgtgaattgagtaatggatgaagtcaggaatgagtctattgcatgcgtgcatttatagaagaggctgca

SEQ ID NO: 240586 - DNA, 622 bp, Homo sapiens
ttcaatcctcagaacagctcagcgtggtagtacagttattctcatctccgttttactcatgagaaactggggctaaagacatgaagtgacttgtgcaagatcagcctgactctactctttctttttttcttttccttttttttttttttttttgagacggagtcgtgctctgtcacccaggctggagtgcagtggcgcaatctcagctcactgcaacctccatctcccgggttcaagytattctcctgcctcagcctcctaagtagctgggactacaggtgccccccatcacacccagctaatatttgtattttagtaaagatagggtttcaccatgttggccaggctggtctggaactcctgacctcagtgatccgcccacctcggcctcccaaagtgctgggattacaggtgtgagccactgcgccgggccgactctactctttttaggcctggctgtggcttcctgtgagctgatctattaggcagtagttgaggtcttcacttaccctgaatttcttctggttctccactaccggtaaatgactaactctgtgaattgagtaatggatgaagtcaggaatgagtctattgcatgcgtgcatttatagaagaggctgca

SEQ ID NO: 240587 - DNA, 622 bp, Homo sapiens
ttcaatcctcagaacagctcagcgtggtagtacagttattctcatctccgttttactcatgagaaactggggctaaagacatgaagtgacttgtgcaagatcagcctgactctactctttctttttttcttttccttttttttttttttttttgagacggagtcgtgctctgtcacccaggctggagtgcagtggcgcaatctcagctcactgcaacctccatctcccgggttcaagckattctcctgcctcagcctcctaagtagctgggactacaggtgccccccatcacacccagctaatatttgtattttagtaaagatagggtttcaccatgttggccaggctggtctggaactcctgacctcagtgatccgcccacctcggcctcccaaagtgctgggattacaggtgtgagccactgcgccgggccgactctactctttttaggcctggctgtggcttcctgtgagctgatctattaggcagtagttgaggtcttcacttaccctgaatttcttctggttctccactaccggtaaatgactaactctgtgaattgagtaatggatgaagtcaggaatgagtctattgcatgcgtgcatttatagaagaggctgca

SEQ ID NO: 240588 - DNA, 474 bp, Homo sapiens
ctaacctgcttgaggcttgtgtgaacttgccatgggatgatgcttctcacttctgtgtctttgcacatagtgctccctcttcttggaatgttcttccctcctctccccgcatctgctatgctgagttcattcctgtttgtcacttggactcagggaaaaagttcagttaggaaaagcctcgcaactcctgacctgaattctgaagggtgagtctctgtgttcagttctctcacctgccagataacgtattaactrtctctcagaataagaaggtgaattctgccccgagcagaacatgtccttttggtaattgtttaaggacaaatgcaattgtgcaaatcaaagaagagttgaaagccagacaaacattagcctgaaactagccctttgacacacattctaaatgcctgaacaattattttcttttctgctggctcttaaataaacacatcaccaagaatgacattcagcaga

SEQ ID NO: 240589 - DNA, 589 bp, Homo sapiens
ctattgaactactccatagcagttggtaaagagctgctgtcctgacccggagggtcactgaccaccaaaccttagctgccttggtacctcactttggatacttccaagagctcttctgcagccaaagggttaaagcctggcctagtagggggccttccaaaaaccagccccagagctcctgcaggtgtccattataattggttggtgccacactagttattaaaatactttaaatataacttcctacagatcaccaaatttatgcaagttttgaaggagcaattgcaaagattctctgctgacaagtacaataataacacacaatgagataagcctgaatgtgactgaaaatcaaatttgcagttaggaaaatattcaatatrgcatcatgtcatgagccaaaggaatctaagagtcatgttcaaactaccaaggaaaggcagcaaggattgaggaaatgagtgttttaaatttcacatctgaaacggtttaattgaaattatcaaataggataaatacctttcatcatcagacacttttatttactgcagcagttcacaagcgtaggtgctgaagcacattttggttt

SEQ ID NO: 240590 - DNA, 523 bp, Homo sapiens
gtgcaccttatcaaaccttagcaattargaagtctaatattatactggttaacaaaggtgatgaaatgcattttgatccaatgggcagtgaatttattcaaattttttgaataggtaactgagttaataatcttctctttttatattcaggttcattctgcctatgattaaaatgtggatgaaaatttctttcaagttcacacaaataatttgtttaaaagctcttccttcccttttgtttttaacacatacacacaaacacacacacacacatacacacaccagatctccaaatctatgaagtcaaagaaactcagttctttccacaatgcaataaaaagttgtacaagaggagaaaatggagttttaaactcatgtaaacctttggaatgttgtcttctttatattaccaatgacacctctagagcctacaagaaaaaagaattgcttggaaagtaaatatcttggacaatgtagctaaaagaatattaaatgttctatttttagcttatcatggttgtga

SEQ ID NO: 240591 - DNA, 523 bp, Homo sapiens
gtgcaccttatcaaaccttagcaattaggaagtctaatattatactggttaacaaaggtgatgaaatgcattttgatccaatgggcagtgaatttattcaaattttttgaatargtaactgagttaataatcttctctttttatattcaggttcattctgcctatgattaaaatgtggatgaaaatttctttcaagttcacacaaataatttgtttaaaagctcttccttcccttttgtttttaacacatacacacaaacacacacacacacatacacacaccagatctccaaatctatgaagtcaaagaaactcagttctttccacaatgcaataaaaagttgtacaagaggagaaaatggagttttaaactcatgtaaacctttggaatgttgtcttctttatattaccaatgacacctctagagcctacaagaaaaaagaattgcttggaaagtaaatatcttggacaatgtagctaaaagaatattaaatgttctatttttagcttatcatggttgtga

SEQ ID NO: 240592 - DNA, 523 bp, Homo sapiens
gtgcaccttatcaaaccttagcaattaggaagtctaatattatactggttaacaaaggtgatgaaatgcattttgatccaatgggcagtgaatttattcaaattttttgaataggtaactgagttaataatcttctctttttatattcargttcattctgcctatgattaaaatgtggatgaaaatttctttcaagttcacacaaataatttgtttaaaagctcttccttcccttttgtttttaacacatacacacaaacacacacacacacatacacacaccagatctccaaatctatgaagtcaaagaaactcagttctttccacaatgcaataaaaagttgtacaagaggagaaaatggagttttaaactcatgtaaacctttggaatgttgtcttctttatattaccaatgacacctctagagcctacaagaaaaaagaattgcttggaaagtaaatatcttggacaatgtagctaaaagaatattaaatgttctatttttagcttatcatggttgtga

SEQ ID NO: 240593 - DNA, 597 bp, Homo sapiens
aagaattgagtacaaggagttgctcagtgatgtgaagctgaagagggcatctgaggagatgagctgtaaaacatattcacaagagggacgtgtgaagggagtgaccattccgaagaacccagacagctgcccacaggagaaggatgccatcccaaagatggtacccagtaagtgaaaagactttggcttttcccttgagttctcctctctaatccctgccttcagaggggtgggcagaaaggcaagggagaagttgagcagccaaatggtatcaaagagagaagccttgaaatggataraaactgaaagttttgagactggatcaaagctttttcctatttcagtattaacaattccaagatgagactgttcttataccaaaagctatcagttctttatagaacctatgccaagtgttatcaagggctacgaaaaggaagttcaaaagagcaaaccaggaggccgtgatgaaaagaaaaaaataaatctgtttcctatgcagtcaaagctatttattacaccaattacactcataaccccgtaagggagagaagggagagagatatgaagatggctagtgggcaggccagtcagaca

SEQ ID NO: 240594 - DNA, 608 bp, Homo sapiens
gacaatgaactccttataggacagagttatccactcctagcactgtctggcacaaatttttaaagattttcatagttattattcctaatttttaaagtaatggattcccatttcaaagttttcaacagtttggaaatgtttaaggtaaaagtatgtcctctttcccattcccaacttcctatacccactccatggttaacagtgtcttatttatatttctagaaacattatttgcatgtactaggatataaggttataaactaacatatgaatacataaaggcccataatcactttatataaaaaagggagagtgaacattgtatataatgttcccatttatatatatatataatatatacaatgttctgcatcttgatttttttaaaaaatacaacaaattgcatcttactttgtcttctattcatatcattacatatagatcctcattatgcttcttaaaacctgtatatatcctatattatgcmtgtaatttagggtgacttaagaagcaagtaacacacaacctggttgaaactgtaaagaggatatagaggttcattaattgggaagaacaactgcaggactggcttgattcagcaatcaaca

SEQ ID NO: 240595 - DNA, 625 bp, Homo sapiens
  misc_feature (1)...(625): n = A,T,C or G
tgagtgtgtagatttgactggcaaaactttcatttcttagcacaatattattgtccttttgaggttccatacttgtttttaagaatgaattacatatctgtgtgtattatgtattagcccatttttgttctgtttttgctttttttttcactctgtattctttttttaagaacaatccatattgctggaatacattggttctaactgtgggctgaagtaaattcaacaatatttatttattacaatcttacaacatcagaaaggcctaattcttctctaatagccattccttcttcttcctttaatagtgatgggcagctgagcacatggccatttagttaggaatttcacttcccagcatctgttgaagctaggtgtggccatgtgacnttcgntctgaataatgagatacgagtgttagacaggtgtcagacttctaggaatactcttaaatataagtggtatgccctccactttttctttcscctcctcccaccagctgcagccagagcaatcattttagactaggaggcagagtaagtgctaagttggcagagaaccagaagagagggaatgttagccacagaaaccatgcagctgccatattagccttggacttccgaca

SEQ ID NO: 240596 - DNA, 518 bp, Homo sapiens
agtataattaaaatgttggcaaaagatttgaacatatactccctaaagtatatgaatgtgtagtgagcacattaaaaagtgctgaatattttacttatcaattaaacattttttgaagtgatgaatatcacaccgttcatgagggaaatgcaaattagaagcacaataagttacaactacatgcccatcagaatggccaaaatgaaaaaaataycaaaggtaagcaactaggacattcatacatcgttggtaggattttaaaatgggacagccactttggcaaaaggtctgacagcattttataaaactaaatacatacctaccctgtgacccagcaatccccaacctaattaccccaaaggaatgaaaacacatgtcagcagaaagacttgtacaaaaatatttataggagctctgttcctaatggctccaaactagaaacagcacacgttttcaacaggtgactgaccaaactgtggtataaattatcaaaaaatactttgtaatatgattccatt

SEQ ID NO: 240597 - DNA, 375 bp, Homo sapiens
caacagcactacaactcacgctgaaggcacctcatccagcacaggtattgtctccacaggcacatcgcagcctcctgcactcagagacagtagacagcacttcagcaccgtgcctggggacattttaaacagcaaaatcaccaacaaaagtacaaaaatgcaaaagcatggctctggatagacagcaggaaggaccacttgtttctagtgtgagagctgggacaagaaagcagaggggtcaccttgcttcacctcagccgggaacagatgccttggacyactcagattttttccctgctctgtacaagtctgtgaatcactgtgaagccacaagtattgatttggtttacaaacacattttagtgaagaggtgaa

SEQ ID NO: 240598 - DNA, 557 bp, Homo sapiens
gctgtggttttaaattgctgaattgtagagagcatctagattgttattttcagtattaaagatgggggtcaggtttagaatccagcaagtgaaaagctgtccttactctgcacttctgatctagaactcagcctgcactgaagggactatcttgtgtttcttcttttctccactgtgtgaaatcataacaagaaacaacctctgagcataagatcagcttctagtatttaggggaagaaaatgcacattcctaaagtggtatgacaccaagctaccctacattgaaaagcagcctacttttccagcctgatctaaagcaaatcccaaaatagcatgggcttgatttattaaacctctgtcctgtgcagaggctgccccacgcctgaccccactgtcctccgaactcctgctgcagccgtaccctccagccctcagtggagcaggatgtgggtacaggcctgagccctgtgctgtttgctcttcttgtttgcrggtcgcatgtcttgagccagcctgtgacactcttgtctctgtatcccccagactgttcagtccac

SEQ ID NO: 240599 - DNA, 567 bp, Homo sapiens
ctttaatttttgaaaatcaagaggtgtgtgataagttcctgatgtcacactgtgaactccataaggattaactaatatacaacacaygaaacaaacctcagctgttcccaccctcattctgggaggtctttaagacaaaaagaacccaaaacaaaaaaccccacaggcgtttaaggatcctttccctcctattaagagtactgttctcagagtctcagttaactgaaacgttgcaggataattcaccagatttttcatatccagccttcctatcgaagaaagtcaaagtactaaaccaataaatgtgaaaaaggatgttgggcttaaaaaggaaaaccttcaagacttaaatctgacatttcaaaagggaagactgagaagatatgcttactaaataggattatactcaatgtacggtctttgcaataggcgatttgagttcctttcaatgtacattttatttatataccacctcccaaaatgaaaaaatctatactattcgacatactgttctatagagcactgatgagcgatataaaaggtaaagagttctcaccagagatgttc

SEQ ID NO: 240600 - DNA, 534 bp, Homo sapiens
caaggcacagagcatacaatttaccacttttaagtgtgcagtttgatggcattaagcacattcacgctattgtgcaaccatcaccaccatgcatctccagaacttttcgtctccccagactccaactaaataccaactttccactcccacgccccaagccctggtaaagcaccactctcgtttactctaggtacctcttgtaagtggaactgtttagttatttatcctttttagatggccttatgtcaccgagcaccatgtccgcaaggttcatccatattgcagcatgtgtgagaatctccatgctttttaaggctgattcatattccattctgcggataggccacattttgtytatttattcagctgatgatagacacttgggttgcttccaccttttagctattgatgatgttaacataggggtacaaagatttcttcaccacccggctttcaattctttgggtatatacctagaaatagaaccgctgcatcatgtggtcattttaattttttgaagctatatttaatagt

SEQ ID NO: 240601 - DNA, 574 bp, Homo sapiens
gctttaaaatgttttcttaatatttcctattaaggatgccttggcagatgccatttatgatcctagactgagagccaattacatcaggtccatatcactggaggagatgggtattcactatatcggggtaattactttttaaaaagagacagtttatctcattcattcggtgtcatcactccacgagaagcagggctgtacaaggatcagtttagtataatcttcttaacaatagtctggcatctgcccttgccttagggagcactacccacaayggcagggctgaactttcaacactgcgaggggcccggcctctggtctgcagacagcgtggcatggctctgtcaaccacaatgcttttcaaacagaccctatcatcagaaacgagggctctttcttgaatatccattctgccaggctctgagctcctggaagtcaggggctctgcaatgccaagctccagtcacacctgcctgccatgtggtacatggcaacgtgcctatgaagaggcatggagcttccagaaactctcccaggcagacggctgatgggtgtatggcatgggacatagagt

SEQ ID NO: 240602 - DNA, 578 bp, Homo sapiens
ttccccaaccctttcctgtggaaaaattgtcttccacgaaactggtccctggtgccaaaaaggttggggaccattgctctaaactatggcaaagtagtatttacaaccaagtatcataggatccctaatttttaggaacattctcaaccagcaaaatacccacaagtggccgggtgcattggctcacgcctgtaatcccagcactttgggaggccgaggccggmggatcacgaggtcaggagatcaagaccatcctggataacacggtgaaactccgtctctactaaaaatacaaaaaattagccaggcatggtggtgggcacctgtagtcccagctactggggaggctgaggcaagagaatggcgtgaacccagggggcagagcttgcagtgagccgagatctcgccactgcactccagcctgggcgacagagtgagattacatctaaaaaaaaaaaaaaaaaaaaaaaaaaagtccacaagtgtattaaccaaaatatcactatttgtccctttccccataaaactggtaggaaggattcagtcctaaagtaatacatgggaaacttgaaggaaat

SEQ ID NO: 240603 - DNA, 395 bp, Homo sapiens
gtaagaataacataaccagcaaaactgtgctacaaaaatgaagaaaaagcaaagacctctaaagataaccaaacgtggaaaaattatatcaacactacatgtgccatacaaaaaatgctgagaagagtcctcctattaaaactatatgatgctaaaaaacaaaactatcatataaaaataggtagctttctaggaaagatataaagatatgcaaatattatagaaaaaatatcctgtagcattattataataccaaaaaatgttttatttaactattctctaaaatttaaagataaaagctaaaaataataatgaacatctgttaataaatayataacataaatagatatgtttagtgacatcaataactaagttgaggacagatgtaataagaa

SEQ ID NO: 240604 - DNA, 531 bp, Homo sapiens
tggagtccctcatgctgattcctgctaacacatgctgggaagcctctgttattcagagtaggcagaatcccatgtgtttcactattgggaaagatttggaaatatttagagcagttataaatatatggtcttcaatatgaaatcaataactgaagtgtagattcaaggataccagagtctacactaagtttgcaaaacagttacctctgaaatgcaaatcttaagaaaatgcttcttttaagtygtgaaatgtcatggttgaatacatattttcatgtcatatttatctaatgggagtcatgctcttagacttaaacaaagagaaatccccctctatatgaaaattggtgctcaagttttttttttaattgacaaaaactgtataaggctgggtacagtggctcatacctgtaatcccagcactttgggaggccaaggtgggaagatcgcttgagttcaggagttcaaggccagcctgggcaacatagcaaaaccttgcctctaccaagaaaaaaaagccctgcatggtgg

SEQ ID NO: 240605 - DNA, 479 bp, Homo sapiens
ataacatttagtctttttgtttccctaagttcctctggactgtgacagtttttcaaacttcacttctttttgatgaccttagtacttttgaaaaatactggtcagatattttgcagtgtctctcaattcatgtttgtctgatgtttttctcttgaytggattggctggtagatttgggggaggaacgctgcagaggtcaagagccattctcatcacatcatatctaagggtacattatcaacatgacttctcgcaggtgatgttaatattcatcacatgtagcccctctccatgacaccctctttggaagacagtccctactacgtatagcccacatttaagcagtggggagttaatgttccatctccttgagggggaagtacctgtacaaatttcctcaaattcttctgtgtggaaatttgtctcttctccccccatttatttattttttaatgacttagttaaatcagtatgaattc

SEQ ID NO: 240606 - DNA, 478 bp, Homo sapiens
ataacatttagtctttttgtttccctaagttcctctggactgtgacagtttttcaaacttcacttctttttgatgaccttagtacttttgaaaaatactggtcagatattttgcagtgtctctcaattcatgtttgtctgatgtttttctcttgattggattggctggtagatttgggggaggaacgctgcagaggtcaagagccattctcatcacatcatatctaagggtacattatcaacatgacttctcgcaggtgatgttaatattcatcacatgtagcccctctccatgrcaccctctttggaagacagtccctactacgtatagcccacatttaagcagtggggagttaatgttccatctccttgagggggaagtacctgtacaaatttcctcaaattcttctgtgtggaaatttgtctcttctccccccatttatttattttttaatgacttagttaaatcagtatgaatt

SEQ ID NO: 240607 - DNA, 617 bp, Homo sapiens
tctgtgctcctcttggaattccagcaaccaattctggggatgaaaatagccatttagaaggggaattactcacacacacaaacacacacacacacgccatatactaaaagtggtaaagacagtgcttgtaaaatgagtggctatcatacagagcaggggtccccaagccccaggccatcaaccagcacctgtctgtggcctgttgggagcccggccacacacacagtaggaggtgagcctcaggcgagccagaacgaagcttcatctgtatttacagacactccccttgcttacattacagcctgagcactgcctcctgtctgatcagcggtggcattaygttctcaccagagtgagaaccctattgtgaactgtgcacacaggggatctaggttgcacgcctcttgagaatctaactaatgcctgatgatctgaggtgaaacagtttcatcccaaaaccatccctcacccccacatctgtgaaaccagtccctggtaccaaaacggttgcggattgctgatgtagagggttggaagtttgaagccagggctttgcgtttactgttccattagcttttgtttcttctccagataatagaaaacagaaaaacagaagt

SEQ ID NO: 240608 - DNA, 536 bp, Homo sapiens
ggagttattaaatgtaatattgagtaaagatcctcctaattttttaataagtgatcaggacagcttaattgcttggggtctaaggcaagtttgaactgtcactcaactacaaaaaatattcagttgsaagaaaaaataggagacttttccttttcaataactcaaggtgaaatcttcagaaggtccttttttttttttttttttttttttttttaaacagggtcttattctgttgcccagcctggagtgtagtggcatgatcatcatggctcactgcagcctcaacctcctgggctcaagccatccttctacctcagcttcctgaacagctgggaccacaggtacatgccactgtgcctggctagtttttgtatattttgtagagacagggtctcactatgttgcccaggctggtctcaaactcctgggttcaagccatccacctgcttcggcctcctagagtgctgggattacaggcctgagccactgtacatggccagaaggtttttaataatcaatataatcaggaaaaattt

SEQ ID NO: 240609 - DNA, 536 bp, Homo sapiens
ggagttattaaatgtaatattgagtaaagatcctcctaattttttaataagtgatcaggacagcttaattgcttggggtctaaggcaagtttgaactgtcactcaactacaaaaaatattcagttgcaagaaaaaataggagacttttccttttcaataactcaaggtgaaatcttcagaaggtccttttttttttttttttttttttttttttaaacagggtcttattctgttgcccagcctggagtgtagtggcatgatcatcatggctcactgcagcctcaacctcctgggctcaagccatccttctacctcagcttcctgaayagctgggaccacaggtacatgccactgtgcctggctagtttttgtatattttgtagagacagggtctcactatgttgcccaggctggtctcaaactcctgggttcaagccatccacctgcttcggcctcctagagtgctgggattacaggcctgagccactgtacatggccagaaggtttttaataatcaatataatcaggaaaaattt

SEQ ID NO: 240610 - DNA, 489 bp, Homo sapiens
gtgaggttgagcaggacatagtctttgcatggatcacagtgacaactaatttggactttgtcattagttgggaaaatattatttttattttcatgggacactttctcactccgagtctacctgcctgtcttcattccttccatcttttcttacttctcccttgcttctttgcctcctttccttcctccctccatccctctctccctgccagtgttcctttgttctttccttctttcattccttgcttccttcctttcctccctccctccctcccttcctttctgtttctttttttctttttcacctaatgatttgcaaagctataacaaggaaataaaaatcttaataaatgtgggagagattaaatcaatgtttgtaaactytttaataaaaaatatttttaaaatccatttgtaagaattatcaaaattgtaaggccaaagcatttttcacaaaaaaggtttgtattattcctggaaaatcccacac

SEQ ID NO: 240611 - DNA, 635 bp, Homo sapiens
cctcactttagagctaaactaaattgtggaaaaccatcatgaggtattaggaagtaggtcttactggtgaccagaaatagcaaaacctgagcccaaaggaaatctttcagagtattctgtctcattattttcaatcagcagctcttaaaatgcaacagccaccatttacwctcaaggtggattatgaagtatccatgcttttaaaattgacctcagaatatctccctcttttttttttttttttttttgctttgctcctacttaagtagtagataatctattatgcactcaggacttagtataaaagtgttccttttggtgtgattaatttttccctttatagaatctttaacttttataatatttgtagaggtttctaaataaagcagtaccatggtagccctttcacctttttctagatataactcattaggttaagtcattaagtgtgattagtttgtttctttttctttaaaacaggatactcagttgctgctggggagtttactggggattctcagcaaggtgagaggcactgttgagtttaaatcacttataaagcatggggaaatggtaaaatggcatataaagttttttctatcaatgtgattttatttgctataccaaagggatat

SEQ ID NO: 240612 - DNA, 517 bp, Homo sapiens
ccatgttgtccaggctggagtgcggtggcactatcgtagcttactgtagccttgaactcctgcctcaagcgatcctcctgccttggtctcccaaagtgctgggattacaggcatgagccactgtgttattatttctactgaacaaaatactgaaacaattttttgatcagaaggaaatatacatatamaattaggatatgtggtgccaaatggctgttccaaacttcagcatgaaattattgtcttgaagtagagcaaatgttattaatttggagccagattggtaagtgacaagtggtaagttattactgctttaatttgaggctcaggttgtctctctgaattttcaggctaatttatttttacctgtaatgcctgttcggatccttagaaatttttttctattgaattttagtctttttctcattgatttggggactcttacatattacatatattcctcctattcttgaaaaattttcactttggttttcgtttattagttttgttaatcacc

SEQ ID NO: 240613 - DNA, 594 bp, Homo sapiens
tatttaatttacacagaattgtgaaatattttaatttatgtgagatattaacttgctgaaggttattgctatagagggcatttactaatagaattggttctaaacaaacttgtaaaataggctaaatttttcttgaagttttcagtctctcctttctggaccttccttccccttcccgtctccctcaaaaatgttttattttatttttttaaagtcactaagtgtagagtaacctgacatctcaaattacctaggacagtcccagcttatgtctattgtagtggtgtaattactaatgacacatccctttactctcaaaagtgtctcagtttatggccaccctacttaaataatgtttttaataggcttgatagatacttttatcatggagaartgttgaggtgattaaattatcagaaaagactaaattttcctatagtcttaattttatttttaaagccgaggtctcccttggttgcccaggctggagtgcagtggtgcgattatagctcactgtagcctgcaacttaaaactcctgggctcaagtgatcctcccccctcagcctcccaggtagctaagactaacaggtgca

SEQ ID NO: 240614 - DNA, 594 bp, Homo sapiens
tatttaatttacacagaattgtgaaatattttaatttatgtgagatattaacttgctgaaggttattgctatagagggcatttactaatagaattggttctaaacaaacttgtaaaataggctaaatttttcttgaagttttcagtctctcctttctggaccttccttccccttcccgtctccctcaaaaatgttttattttatttttttaaagtcactaagtgtagagtaacctgacatctcaaattacctaggacagtcccagcttatgtctattgtagtggtgtaattactaatgacacatccctttactctcaaaagtgtctcagtttatggccaccctacttaaataatgtttttaataggcttgatagatacttttatcatggagaaatgttgaggtgattaaattatcagaaaagactaaatwttcctatagtcttaattttatttttaaagccgaggtctcccttggttgcccaggctggagtgcagtggtgcgattatagctcactgtagcctgcaacttaaaactcctgggctcaagtgatcctcccccctcagcctcccaggtagctaagactaacaggtgca

SEQ ID NO: 240615 - DNA, 621 bp, Homo sapiens
ttctgttagaaaacaattgttatgattttaaccatcttgagaaaaggtaaaaatgcacgttaaaattattccttttgtccctgcctctttttttttcctaattttgtgatttctgtttgtattaaagctcattagaaatgaacaaatttacaaattaaatcccctaacttctccaatataaagaatatggtaaaatatttatttcaaacratatgtcccttggtatgaacatgtgctaggtcagttttcttgctatattttgaaataggtctaattcagaagctttttagagcaaaacattgtacatttgacagtaattgtgacggattttcataatgcactgatgtagcatgtcaaatcttatgtagtcagttaaattcagggaaagaaattaaatttggcaatagttggaatttttctctccctgtaattaaggaaagctctccttcttgctatgcttcatctgcaatagacacattgctctctttaacatcacttaaggacactctaattttctgtcaaattccaaccaacttatgttatcattttgtcagtttccattttcagtcccctttctgcctttgaaacgtttcatcacggagtcaaaggcataaaataaat

SEQ ID NO: 240616 - DNA, 651 bp, Homo sapiens
cctttctgcctttgaaacgtttcatcacggagtcaaaggcataaaataaatgtttctcaacttgtgattctttctttttcaaagaagtttgtcttctttaatgagggctatctcwcaccaaagtgtgttttatagagcagagaacaacaggaaatagacaatgcagctctgttaaaaaaattgacattgtccataaggtttttttgattattaagtaattaatgaaaggaaatacaaaaactattaaggttttctgaaggccagttacatcaggcatatagtctaaataaactaagagatctagaagattgatgttttagtattcaaattctatccagagaaataaatttagatttgtacatattggtcaataaaatataattcttaaaaaaattctcttccttctccatcggtctactttgtgcacgcttgagagattatacaagtggacaaagcacaggcagctgcagcagagcaggtgaagttggtgcaatagagctacatgacaggactctattacagtaagcaatacaattccagaaataacctatgtggaacatattgcctctgctacaaatgtcagaaaatggactttgattgatggtgtcgcaacacaaaaccacatactaaaactttttaattatgatgact

SEQ ID NO: 240617 - DNA, 349 bp, Homo sapiens
tgcctctgctacaaatgtcagaaaatggactttgattgatggtgtcgcaacacaaaaccacatactaaaactttttaattatgatgactgtaaaagtgtatacagccttgccagcagagttagtagtttttattattaacamataggcaaataacataaattctgtatgctcctcaggccttacaaatgtttctgattgctgccatcagcatgtatgtaagcaggaaggcatgactgaggtctggtgatcatcacctctgaagagggaagctttccatagggagtgattatctacggagaaccacaccacctggagttgccatattgctactctaaaaattccctaatg

SEQ ID NO: 240618 - DNA, 581 bp, Homo sapiens
cttgccagcagagttagtagtttttattattaacacataggcaaakaacataaattctgtatgctcctcaggccttacaaatgtttctgattgctgccatcagcatgtatgtaagcaggaaggcatgactgaggtctggtgatcatcacctctgaagagggaagctttccatagggagtgattatctacggagaaccacaccacctggagttgccatattgctactctaaaaattccctaatgtgggagaaaaatgtgttcatttgtgttggaagatgttgttagcagttagaatattaaatagtggtatggtttatacagactaagctctatagaacgctcagtcataaattgaaatacttgtcgtttaaacagcttcataaacttaagaaaaaaacacacccaacaaacattcacagcatttctgtagaagcatttgctgacagtgaaagtggcaaaattgctagtttttagattgtctagagaagtgggttgctttgaaggatgagtgatctgatttagagcaagttggctacaaattctgttttttcaaaaattggatttgcaaattgaagttaaaa

SEQ ID NO: 240619 - DNA, 581 bp, Homo sapiens
cttgccagcagagttagtagtttttattattaacacataggcaaataacataaattctgtatgctcctcaggccttacaaatgtttctgattgctgccatcagcatgtatgtaagcaggaaggcatgactgaggtctggtgatcatcacctctgaagagggaagctttccatagggagtgattatctacggagaaccacaccacctggagttgccatattgctactctaaaaattccctaatgtgggagaaaaatgtgttcatttgtgttggaagatgttgttagcagttagaatattaaatagtggtatggtttatacagactaagctctatagaacgctcagtcataaattgaaatacttgtcgtttaaacagcttcataaacttaagaaaaaaacacacccaacaaacattcacagcatttctgtagaagcatttgctgacagtgaaagtggcaaaattgctagtttttagattgtctagagaagtgggttgctttgaaggatgagtgatctgatttagagcaagttggctacaaattctgttttttcaaaaaytggatttgcaaattgaagttaaaa

SEQ ID NO: 240620 - DNA, 591 bp, Homo sapiens
taatgcttcaaatttattaagatattactttgtgccagatgttgttcaaagcacatacatgtaaagcaggatatttccctgacctgtttgtgggattcgagrcaagggtgccacaagggtccgctgctctcaactccttgtgggagggggcgtgtgagtgaatgagtgcaggaactggagtgaacaagtgctggaactggctggcccctttggcaccagcgggaccaaactccactcacttggacctgctgcgttccaccctttgtgggagggaccatgcaggtgagcaggtgcaggaaccagccagatggtttagcactggcaagagtgaactctgtacaggcctcatggcagcatccaggcaggggtgcctgtgactactgaagctccagagggtgtattacagtgctcttttagctctgccatccatggatggcttaagtgttaacagctcagtggactctttgcattttcatgtgaggtggctgtcctctgccagcgagggcaaaggacaagtgtgacagccttttttatccatacttgtggctccagagctcttgtctggtgtccagaaaaaatgaggttgcatga

SEQ ID NO: 240621 - DNA, 355 bp, Homo sapiens
tcttcttgaccattgctcttctttgcctcagcacagcagaattaaatgtcttagaagccctcggccctgagaaagagaacagtgcctcaccttctattctttgctatatgcatttcatacttttttttwaaaaaagaaaataagccaaactcaaaggcataaaactttcataaatgctgaaattagtattttcattgaaaactaattttagatttatttgattgtcaaattatgagtagttttgccaaagttgtacttcactaatttttaattccccccttagctaatgtgttcaatatgtgcttaatttgccttctgtgaaattcctccaggaccctcaatgactagaatatcc

SEQ ID NO: 240622 - DNA, 355 bp, Homo sapiens
tcttcttgaccattgctcttctttgcctcagcacagcagaattaaatgtcttagaagccctcggccctgagaaagagaacagtgcctcaccttctattctttgctatatgcatttcatacttttttttaaaaaaagaaaataagccaaactcaaaggcataaaactttcataaatgctgaaattagtattttcattgaaaactaattttagatttatttgattgtcaaattatgagtagttttgccaaagttgtacttcactaatttttaattccccccttagctaatgtgttcaatatgtgcttaatttgccttctgtgraattcctccaggaccctcaatgactagaatatcc

SEQ ID NO: 240623 - DNA, 530 bp, Homo sapiens
ggtggatgactgtgttagatacttgtttttgtgttccctttagtctgtcccttttcctgtgtcaagtcatttcttcttccagagttatctttcagcaggaatgagactgtcagcttagaaaaaagaaattagcatctaaatgcaaatgggtgagggttaggattatttattcaatgatttcattttttcctatttgtaatgagtctgcacttattgtgtgtaaaatgttgtggcaatgcaaaagctaggaaggtagaatcttttttcaagacagaattctagaacctgatgaacgagaggagcaagggctgtgctatagaacttttgaagtgagaaaggtaggwtggaggatttcatggcagcgttgacatctgaactgggtcctttaatcaaccaattgtcatctcatttgtatgtaacatttattacgtagagcccattgtgtgctagtcactgtgggaaacacaaacaagaagacacagacccagtcttcattttcaccaagcgaatttgccagaaaagcaaaattt

SEQ ID NO: 240624 - DNA, 606 bp, Homo sapiens
atgcacaaaatgggagttttgccctagtggatatcaacacttattacaaaggacaattacaacaatgtgttattaaagtagggaatttcgaaagaaactttgacccaatgcaacagaatagacagcccagaaacaggctcctagatgtaagaaaatgtagtttatggcagaagtggcattgcagagtgctgtgaaaaagaattagctactgcacaaaacagactctctcagactgagagacaaaatactgagtgaaaatgtcaagcattatacaaatgtgtataggattatatgatttttataaaacccaaaacaagaaagcaaaatatcttgtttagagacatactcttttggtgcaaaactttaaaaaaaaaagggaataaatgaaatacacacaactcaggatagtggtyaaaggcagcaaaaagatacattcagcagtactgataatgcccttgttcaaaacttggatggtgatgggggaaatatccaaaatgtttaaccaatggtgggacataatcccaaagtaattagaacagaaagagccagaaatgacctcaacagccactaaggtgaacacctactcaccgtcagcccaggtaggca

SEQ ID NO: 240625 - DNA, 606 bp, Homo sapiens
atgcacaaaatgggagttttgccctagtggatatcaacacttattacaaaggacaattacaacaatgtgttattaaagtagggaatttcgaaagaaactttgacccaatgcaacagaatagacagcccagaaacaggctcctagatgtaagaaaatgtagtttatggcagaagtggcattgcagagtgctgtgaaaaagaattagctactgcacaaaacagactctctcagactgagagacaaaatactgagtgaaaatgtcaagcattatacaaatgtgtataggattatatgatttttataaaacccaaaacaagaaagcaaaatatcttgtttagagacatactcttttggtgcaaaactttaaaaaaaaaagggaataaatgaaatacacacaactcaggatagtggtcaaaggsagcaaaaagatacattcagcagtactgataatgcccttgttcaaaacttggatggtgatgggggaaatatccaaaatgtttaaccaatggtgggacataatcccaaagtaattagaacagaaagagccagaaatgacctcaacagccactaaggtgaacacctactcaccgtcagcccaggtaggca

SEQ ID NO: 240626 - DNA, 542 bp, Homo sapiens
tgacttttccacttaaaagtacaaaaaaataagttgaaaaagctttatgatgtcaatgtaggaatatttccatggagtcaactagagtttccaatactataaatactctatgagggtttgctccagtgaagaattattttaaatacatacctattaaatctttccataaactcaaactctacaacaataattaccacaggaggcccattctgttgtaaktgatcatatatatatacacatacatacagagagagggagactgaaattgagagaatggcaaagagagaggcagaaacacagagaaagatacagagacagaggaagacagagactgagaaaaacagaaagagagagagaggacaaagagagaaatgtataaggaattggctcatgtgattatggaggctgaaaaatcccaaaattcatactccaaaggcctgagaaccaggagagctgatggtgaaagttccagtctgattccagaggtctaaaaagaccaatgttccagctcaaagactgttaggcaaagagagggaattctc

SEQ ID NO: 240627 - DNA, 560 bp, Homo sapiens
tgtgaacataacaccaacatacatgtgaccaatgccctaccaagagccagcctcataatggacaaaaaggaggagaaagtggaagagatcgtactgcttccattttcctggccagaatggtgttgctgtaagggtttctaagcaagtraggtttagaagacagaagggggttagactgagtgctgaatacctagtacctgcctcagacacatagcagctgaacctgtttcttatgttttcaatgctcctgtggctcagtcatgaagactgagctccactgatcagatccatccacccaagacattaaactgaacattagtgacatgaagagataaggatggtataggatccattctggtaagggtgacagtagcagtagtagcagtagtggagggatctgtacccacttcccagaggtatcacatagaaatgatagttctagagttctggcggcagcactctgggcccagagggtgtttgtgtgagctgctggaactatgccttgaggtggtggcagttgcatcctgctaggatgtgtgcagcgtgcacaatttaagaac

SEQ ID NO: 240628 - DNA, 523 bp, Homo sapiens
ggtaaaaactgaaaaaaatttactaagggtattttaagacattgcaggcaaatataatagggaggacaggggagtggaaaagataaagagaacttctaggaaacgggaaacattcaacattgcttttactctttaggcttccccagcattgccaatctcaaatcttaagtaaaccatactgytaacaatagatgcagtgcccagacccatgggctcctcccccatccctggccatagacttcttagggttgctagaaaatcttaaggcttggctaagtgatgccacttcacattcacactccatgacctcaattgcaacatgttgccactcagcaactttttattcatttagttaactatcatcattttcattgcacaaattcctaaaatttctctccccacaaaccctcaaaaccacccctgcatatcctcttacattctatatattattgtgtttcctccacttccctctctcataattttatgatttctccacatgaccatctcatcatcccaatttctt

SEQ ID NO: 240629 - DNA, 384 bp, Homo sapiens
ccattcccatcccacgaatatattctttcttttttcataccacaaatttttatttaccacctatcagccaaacgtgatmagtgttgaaaccattgtttaacattaatttcaagtaatgatctttatggctgccattgttcaataactcaataccaagattttaatatttgtatttataaaatgctctggcataatgaattattcatagacaactatgtcatcacccagatttaacataggcaaatattgtgccatatcagttttctcttattaaaaatcaaaatattttggctcccctacctccatctcttttccttttcttttctgtagagttggccactgtcgagaagttcgtatgtatgatttgcatgccatcatgttaca

SEQ ID NO: 240630 - DNA, 430 bp, Homo sapiens
aaacaatcatttctacactctttttaattctgcatctttggctgagatcgactattgaatcaatacatcaaggaattaatcttatcttgccaaggaaacagccctgttgatctaatacctttttaatatcaccaatgattatgatatatcatttattaatgcagttttcctgaagaaatataaaatagaaagtttgcaacttwaaaaaatgtcaggttttttttttgtcattttgcacatacagttactactgagtgactatttaggctgaatttgtatataccaaccttattaatatgtttggggtaaaaaacattaacagagaaatgcacaagagcttctttatcttggaagttaaagaaatggcttcaagaattagggaaattgatttgaatccagactataccattttcaagcaaactaacccctt

SEQ ID NO: 240631 - DNA, 540 bp, Homo sapiens
aatgtcattagagtttcgtgtgtgtgcacatgcatgtgtgtgtgtttttatatacatatacatatatatacttatatgtaaaatatactgtcttcaaatagagacatttttacttcttcctacccaatttctttctcttgacttaattgctctggctaggacctccagtactattttgagtaraagtggagatagtgggcatccttgtcttgctcctgacgttaagtatttcagcttttcagttttgagcattatgtcagctgtgggctagtcatatatggttttattatattgaggtactttttttctatacgcaatttgctgagaggttttgttttttaacatgaatggatgtcaaattttgtaaaatgcccttttttacgtatactgagtgaccatatgatttcatatgatttcataacttcagcctgttaatgtgtattccatttacagatttgcacatgttgaataagccttgtatctcagggataaattgtatttgatcatggtgtacgatccttttaaagtgctgttgaattc

SEQ ID NO: 240632 - DNA, 540 bp, Homo sapiens
aatgtcattagagtttcgtgtgtgtgcacatgcatgtgtgtgtgtttttatatacatatacatatatatacttatatgtaaaatatactgtcttcaaatagagacatttttacttcttcctacccaatttctttctcttgacttaattgctctggctaggacctccagtactattttgagtagaagtggagatagtgggcatccttgtcttgctcctgacgttaagtatttcagcttttcagttttgagcattatgtcagctgtgggctagtcatatatggttttattatattgaggtactttttttmtatacgcaatttgctgagaggttttgttttttaacatgaatggatgtcaaattttgtaaaatgcccttttttacgtatactgagtgaccatatgatttcatatgatttcataacttcagcctgttaatgtgtattccatttacagatttgcacatgttgaataagccttgtatctcagggataaattgtatttgatcatggtgtacgatccttttaaagtgctgttgaattc

SEQ ID NO: 240633 - DNA, 538 bp, Homo sapiens
gtgtactgggggtattcttgtttcaccattttatacccctattatgaaagctacactttcataaytatgtatattcttcattttggcttatattatatcacataatattatatatgtagtccagtcttatctccaactggactctggacactttaagaacatgaaactatcttattacattttcattttttggtctctccaaattagcccaatgcttagttcatagcatgtgctcaataaaccacacacagaagtgattacattgctctaagcctggcactatatttctgtactgtactttctggtttaaatgaagcttgaagggaggacataacctagaagcttattgacccagtagagctatgtaactacgcaactatggtaaagtgttttataaattttcaaaaaatgtcaacaattgtctgtaggataaaaccttcttaaagaaatggcttatttgtaaagataaatatcacttgcataaaaatatacctagttgtttagttaaaaataaaaagatcttatttagtaatctata

SEQ ID NO: 240634 - DNA, 529 bp, Homo sapiens
acctcttcttgggggacactaatagacaccccccttatttatggtgtactgggggtattcttgtttcaccattttatacccctattatgaaagctacactttcataactatgtatattcttcattttggcttatattatatcacakaatattatatatgtagtccagtcttatctccaactggactctggacactttaagaacatgaaactatcttattacattttcattttttggtctctccaaattagcccaatgcttagttcatagcatgtgctcaataaaccacacacagaagtgattacattgctctaagcctggcactatatttctgtactgtactttctggtttaaatgaagcttgaagggaggacataacctagaagcttattgacccagtagagctatgtaactacgcaactatggtaaagtgttttataaattttcaaaaaatgtcaacaattgtctgtaggataaaaccttcttaaagaaatggcttatttgtaaagataaatatcacttgcataaaa

SEQ ID NO: 240635 - DNA, 538 bp, Homo sapiens
gtgtactgggggtattcttgtttcaccattttatacccctattatgaaagctacactttcataactatgtatattcttcattttggcttatattatatcacataatattatatatgtagtccagtcttatctccaactggactctggacactttaagaacatgaaactatcttattacattttcattttttggtctctccaaattagcccaatgcttagttcatagcatgtgctcaataaaccacacacagaagtgattacattgctctaagcctggcactatatttctgtactgtacttyctggtttaaatgaagcttgaagggaggacataacctagaagcttattgacccagtagagctatgtaactacgcaactatggtaaagtgttttataaattttcaaaaaatgtcaacaattgtctgtaggataaaaccttcttaaagaaatggcttatttgtaaagataaatatcacttgcataaaaatatacctagttgtttagttaaaaataaaaagatcttatttagtaatctata

SEQ ID NO: 240636 - DNA, 547 bp, Homo sapiens
tgcataccctcccttctgagccgatataaaccccagactcagactagttggacaacctgtctgcagatgggagctagccactttgggtctcctctcagctgagagctgttctgtcactcaataaaactcctctctgccttgctcaccttccagttgtccatgtaacctcattcttcctggacctggcaaaagaattcgggacctgccaaatggtgggagcgaaaggagctgtaacatgttcctggtcagtttgccaaactgtggccagtgacatgctcctggactgcaggattgaagagtggcaactcttctggggacccaggccttgggattctccaagccagagttgctgtaacactatagctctcmtgccctctgctggcaccaggtggctgccccatgtgacaggaagcagtggcagggctgggccagttcaggagcctcaggccagagtggggtggtggaactgaaagagctgtaacacaaatgggctgaaacacgccccctggaacatgggccccgtccaactcaccatgttgtggacgac

SEQ ID NO: 240637 - DNA, 519 bp, Homo sapiens
tagtgtaaagatttttaacttttcatagcaaacacttaytaagccccactataatgtagttagaaaattgtggtgataataataaggccatggttgctattgaataagcacttggtttgttagtagcaaacattattttactcacaaatattattttattgaaacatagcttcaacagaacctaagaagtagaatttattttctctatttttatagaaaacaaatcttaagctcaacaagtctaattattaacttccccatggtcagtaggtagaaaggttcacagccaggatttgcccacatcttaccccaagtatgtgccccttctctactgagtctatggtgcctttatgttaagatgcttcatcaactgctgtcgcctgagttatacaactttaaagtatagaatttactattactattattcctacctaactgatcattctaaacatattcatctccaagttaaaatcactttttttgtccatgagaatggtgatgtccttgttgaaagaaatg

SEQ ID NO: 240638 - DNA, 615 bp, Homo sapiens
gactttcttttctgttattgttatttgttttgagatggagtcttgctctgtctcccaggctggagtgcagtggtgtgatctcggctcactgcaacctctgcctcctaggttcaagtgattcttttgcctcagcctcctgagtagctgagactacaggtgtgcaccatcacgcctggctaattttttttttttktatttgtagtagagacggggtttcaccacgttggcctgactggtcttgaactcatgacctcagatgatcctcctgccttggcctcccaaagtgctgggattacaggtgtgagccaccaccccaggccagaaatggactttctaaaagctgtttggcaatacatgttgtcagatgtatttttaatattcttaatttttgagccagtaatttcactttgagaaacaaactccagagaattaattacattttggggcaaagacttttttttataaaatgaaaaataagctagatataatttcaatgtttatacatggaataaatacattaatatgtggaatattatatttgaactaaaaataatgttttcaaataattttgaaaaaatgataataagataaggttaatagaagagtgtgcaacat

SEQ ID NO: 240639 - DNA, 581 bp, Homo sapiens
ctggtcttgaactcatgacctcagatgatcctcctgccttggcctcccaaagtgctgggattacaggtgtgagccaccaccccaggccagaaatggactttctaaaagctgtttggcaatacatgttgtcagatgtatttttaatattcttaatttttgagccagtaatttcactttgagaaacaaactccagagaattaattacattttggggcaaagacttttttttataaaatgaaaaataagctagatataatttcaatgtttatacatggaataaatacattaatakgtggaatattatatttgaactaaaaataatgttttcaaataattttgaaaaaatgataataagataaggttaatagaagagtgtgcaacatgatttctgttatgaaacatataatcacaaagaaaagctagagagaggactggatcattttgattttctgttacttttttttgaaaattctataagaaatttattttactttcataatttaaaaaggcgttgatttttttgttgtggtcttactttttctaactccacacacttaagacacaagaaacatgcagagata

SEQ ID NO: 240640 - DNA, 604 bp, Homo sapiens
tctttccctttggaatttgtcacaatttttgagtactttgtaaattgaatacttttgtattgcaacctagacattttaaatatgttgtttacattctaggttctattaaaatcctcaggaaaatatacttttttttttttttttttggtggttgtggtggtttgcttggcattcaccaagttaggttcagattgcaatttctgtctcactttatggaaatgattgttccaatgtcagttcaattagygaagcctttgatatgccatttggggtccactgtgagcatgtaccactcagaggttagtgtaagacctaggtgatattttaaaattgaggttccactatcaaaacttttgctgtgcacttttggatctatcctgcacaagtacacttcgagagtaaacccagaagctaaacttgtttattcgcagaattaggggactcctttctccaaatctctcatctccaggatttcccccacacttttcagttggaagggacctctttccctgatcttcaggccaaaaatatggaatttaacttggggctaaattccttgctgcctttgcatactgaataactccaatgattgtggccatctcag

SEQ ID NO: 240641 - DNA, 605 bp, Homo sapiens
aatatatgtaatatatttatattatatatctttaaaatcttcattttggcttttcatcttcatttttggcttttctcaaagacacggatgayttcacccacatttttaacagtaacaatttgctgattctaggagcagctgctgctttttgctgggtcacgtcttccccatttctccgcaatccctacaactcccttttatgtccacagtaattattacactcggactcttcttttcatacagtaaagaaatcgttctccattttcatgtcaaagtcaaaggtgagaaaatacaagaaggatcaagagtgctgcctacctctttcaaaacaaatgggaaagagtataattttaggtggaggtcaggaaaagaatatttctacatgcttgttaataactccaaagaaacttgtaaatagaatttaataggagtaaaaatgaaaaaatgataaactctgacttggaaaaacttcacaaattaagtaataacggaaaagggtattcaagagtgaataggagtttttccagatgaaaattaaccccttagatagtcatccattcaataaaatgtggagtctgaggcaattaatcattttagaagtgttt

SEQ ID NO: 240642 - DNA, 567 bp, Homo sapiens
tacgttttgcttctggatgcttaatgctaaatcttgggtttgttcaagctgttgctcaaactttaaaagataaaaccttttttatcactgattcctaygacaggctaggctttcttctagtcttttcagcaaaattctgcagcgctctctctaacctgagtgtacttgcctggggtgtttctgatggctggtttctacttgcacagtctgtgccatttggtaatataaagggtcatgggtagctgtaatgtcctttgaaggaaatattttccccagactagggtctgaagataaaatccctctcacagttgggcaatgccatccttcttgctaaatagggtcaccaaacacccttcagacagcaacagccctaagctatgctactgaatcctgtgccagtttcatgtgggccagccttataccccatggttagtctgatactttccctattacactcctcctaatggaactattcaaagacagaacgaatcgatattgttgccttgaaaacttatttcagaatagcctaggaaagacatgggatgtgatctaaagtcagtctgtacc

SEQ ID NO: 240643 - DNA, 584 bp, Homo sapiens
ccttacatttgaaactctttttgatggcttgaatttgctattacagtatggcatggcttatccatattccgtagcatttcaagtttaggacaattagtgcagtatagctagcactaggttagatgctactaggaatggaaaaagaraaagaattgtaggcatgtatgtctatatgcatcacacagatgtttgtgtctgtgcacacttggcagttttgttcttgcttttgctttattttgactctaatttgaataattagaatacttttcctatctctttcatttgctgcataataaattgttcatttttcaaggcccaacttaaacctcacttcctctgggtagccttcactaccaccaccatggggaagctccacatatttattatagactttaccactagtagtttttatttgcctgctctattgggacagcctagctgtgaatgagttatttgaagggaaggacttcacttaattcaggtttgtagctccacagtcagtagaggatcttgcatatctcagttattctggaaatgctaaatgagtccatagtgaatgatataattcttgcagtgtgatcact

SEQ ID NO: 240644 - DNA, 557 bp, Homo sapiens
agatacaattattttctggcggtgargggggcttggattttgtgtcagccctgttaagataaacatcacacaccattgtacaagatgcagaaatacattcaaaacaaattgagaaaaccatatttgtttcagagttgggagaaccttagattaacgttgtgattacccctctaaaataaattcagatggaaatattgaacacattctaaattcagcgcctggacattcggtaagtatgtataagttttttcttccattcggtacaaaaatcttaagctccttttccctcaagtgcctttgtatctctctcacaggcacaccagggtgctagtgtctgcttggcaaagaagagatatgagaccctgatattgtttcagtcacagttcaatcaggaaaacagaccccgtgctatgtaattcaatagaggaaatttgatatgtggaattagatagagaggtgttggaagagctagaaagccaaacaggggactgggaggcaaccagagattatcaacagcaaaaagctgccacaactccaaaggctgaaaagatacaggg

SEQ ID NO: 240645 - DNA, 361 bp, Homo sapiens
ttatcattctatctagaatgctcttccccagagcttccatggctagctccttgttttcattcaagtctcagctcaaatgtcaaccctttgraaagaacatccaatataaagcctttctacagaaagaaagaaaaagtagaccttccattctcatcacataactctctgaaattactttttatttctctgaaatgcctattctccttcattttattggctgtcttcacccaatagagtatcatctccaagaaaacaaacatcttgtctattattcacttctatgtcctcagtttcctaaggcaatgactggtactagtatagcttctgaaatcactggcgaacccatcattgcctctcttcc

SEQ ID NO: 240646 - DNA, 361 bp, Homo sapiens
ttatcattctatctagaatgctcttccccagagcttccatggctagctccttgttttcattcaagtctcagctcaaatgtcaaccctttgaaaagaacatccaatataaagcctttctacagaaagaaagaaaaagtagaccttccattctcatcacataactctctgaaattactttttatttctctgaaatgcctrttctccttcattttattggctgtcttcacccaatagagtatcatctccaagaaaacaaacatcttgtctattattcacttctatgtcctcagtttcctaaggcaatgactggtactagtatagcttctgaaatcactggcgaacccatcattgcctctcttcc

SEQ ID NO: 240647 - DNA, 596 bp, Homo sapiens
gtaaataactttactctgagccacagtttycttatatgtaaaatgaggatgagagtagatattcttatgagtcttctgaagatgaaattcatgcatgtaacttgctttgcacagtatctagcacacaataagtactcagtgaaagttagctctttggttgaacctctctgtggagaaggccaacagacaattcaaattcaacatttcaaatccacaattatctttcttgcgcagctttatccttgcatcacaggcaccactgtttatgcagtgtccaggccagaagccaggaatcattctagtgttcttcttttccagctctgccccatcccacccagacgtttatctctaagaggcccagacatttgacctgcattatagcttatcaactctataccctttccttcagttcttccataccgagtctttgctttttccagccttactgaggaataattgacaaatatcaaaacatcatgttgttcaccatatttgtattcattataaaatgattatccataatcaagctaattaacataaccatcacttcatatagttatcctttctgtgtgtttgaaatgagaacatttaagatc

SEQ ID NO: 240648 - DNA, 463 bp, Homo sapiens
cttccacagtgaacaagtacattttttaagagagtttatgatgggtgtcgcataaactgccaggggaaatcataaacaggtgagcctgaagtctgcctagaaaggcaaagaaaagcattacagatggaatggttcttaaactgtgtttgaagaacacacaggtgttctaactggacaaagggaagcagcctatccaactggaggacacagcataaccaaaastaaagaggcctggggatgggggcagcaggtgggcatgactgaagcacaaggttcaaatattggaggtggagggcaggaccttacatgccaagctgatgaatttagagtttaatctggagtctgcatggaatcatcagcaaagcaatcagggatatgacatactatattctagaacagcatcatccattagaagttcctagaatgaatgaaatattccctgtctgcactattcacttagcca

SEQ ID NO: 240649 - DNA, 549 bp, Homo sapiens
atttatgggtcaggtagaagaggagtagccagcagagaakagtgggaggctgactgtggactaatagaaatgtaaagataacgtatacaattaaggtcatattaatatttatgttttgagcaccaataacttatttacttgaaataatatgtctttagtaatttagtcaatatgccctgtgagaaagagctaacatgctaaattactcatagcatgtcttatacttcccggttagaatccaacctcacttgtattttcacatatcctggtgtcttatgtaagtaaacaaaagataatccctcacagaaagctctaaaaccctaattaataattttcctaatagttttattcttagggccattagctttcagtcatttagtcttgaaatgccgttgaaatttacaaagataaaatgctactctataagagaaatgaacaaaccatcgatactacaacatggattaatcttaaatgcatttgctaagtgaaagaagacagacctaaaaggcaaataccacatgatttcatttatgtgacattgtggaaaag

SEQ ID NO: 240650 - DNA, 599 bp, Homo sapiens
tacacagtcataaaaaagaatgaaaccatgtcattttcggcaacatggacgcagctggaagccattatcctaagcaaattagcacaggaatagaaaaccaaataccatgtgttctcrcttacaaaggagctgaacattgaacaactacagacataaacatgaacaatagacactgcagaatactagaagatgaaagaaaggagagaggaatgggtggaaaaactacttattgggtactacactcactacctgagtgcaatatgcccatgtaacaaacatgcacatgtaccctctgtatataaaataaaagttgagaaaaaaaataagtaaaatctaaaccaggccaagggttttgagattgctgagaaagcctgacttcaatgccatttgtttccttgaagcctagcagcttgaagggccatcagacactccaaacacaacttggatttgttcctgccacagcctctcatctacagaaaagctggcaagtaggtaaagacccaacaggtcatgggagaggcaccacccagcctatgccgctgggagaggtgctgatgattatcttcaattaaaacctccctggaaactcaatgagaagt

SEQ ID NO: 240651 - DNA, 490 bp, Homo sapiens
aggcgctcatggtccagagaacatcatgaatcatcttggctccataatttttggggttacagatacttagagagatggacagggggtgtagttaccacactggcctccaccatgtggctgaaggccatggcttgattagttatttcttaatacacatctgctggctgcaattgcaagccgggggtgtgagctccaggcagaggcagagggtggcaggaacttccagagacttactggcagagcatagattagctgttctcccccttgacaattgccttgggccccttgtgttccagagggatggatgatccagatgcaaaatagagtgaagatgaagatacagattggagagaaaatggactgagtccatrgggaacttcctttgggatattccatgagctggctgctcactccttctctctttcccaacaaactacgatgccctcaataaactatatgtatttaccaagcaaatgtgtcacgcacactt

SEQ ID NO: 240652 - DNA, 525 bp, Homo sapiens
taacatccaaagggagatacctcttttttatgacagttagtgccatctgccttttgaaaattatatttaaaacaacaggcctggcatggtagtttatgcccataatcctagcactttgtgaggccaaggaaggagggttgtttggggtcagaaattcaagaccaacctgggmaacccctctctccagaaaaattaaaaattagccagatgtagtagcgtgcacctgtagtcccagatgtgcccaggctgaggctgagaagatcgcctgagcccaggaggtcaaagcttgcagtgagctataattgtgtcactgtactccagcctgggtgacagaacaagacactgtctctaaaataataaaaataagaaagaacaattatggagaaaactttgacaaaagctacagatagtttgtgtcaatggagtagaaaatatggaggagtatataaatgatgtttaaaacacgaaaagcaatatcatgaaagaaaaaatgatccgttccaatttaaaattaaaattgtaaca

SEQ ID NO: 240653 - DNA, 608 bp, Homo sapiens
gggagatttttttttaatgcaaacatctgtttcttgaatttggccatggtaagacctaagggaagggggaataccagttgacgaaataagatcaagaagatactgcctcatttttttcttctgtttcaggggtataaatcctgccttctctcagccttacagaggaagaaaaccctttccaagtttcctctgatactgggtttatgcccaattatagtttaggtgagatcatgtggatgccttttctggtactttgctgcactataaatataacctgttttgaaagaaacttcatatatgcatataaaaatataaactcagagtaaagatgagtagggcaatcaatacgtgttgaatgagcactcattatgtgcccagcacatactgagtgtagaagaatgaatctttgcacttatgaaacttaaagttttgacagggaaactgataagtggtaaagaacaataaaagataacttatgaccttgtattaaattgggaggtacttatattaatakttatcattatttgtgacaggagaggacaggatggactactgacattagagaagactttgaaaaggaagtttgaattaatgcaggctgtaaggtg

SEQ ID NO: 240654 - DNA, 588 bp, Homo sapiens
cttgatgctgacagccaggcaaacattgcaaactctctctaaagagaaggttgctccatgttatgctctttcccaaggactagcagctctgggctttctcaccaaacccacaggacctaagaggactttctaactgtgttcatggaagctgggtccaccagcccactgattaatcctgtgatctgcttggaacctcacacacatgaagttggtcaaagccacaaggaaccttagagattacccaatccagtgatttggtttctcccaagaacttttgcaaaaatattgatgcttccttgagctcctctcacattgcttgaatccacaactcagagagtgtgctgcagacacctgtatttttaaaacttctgatgattctgatttccaaagaggattaagrtgaacccttacagatgaggtttctgagaatcagagaacttgagtcacttgctgaaggttgcacagcaagtatgtggcagagctggactgagactaagtgatgggagcccagaacaatgcccacatctctatggtagatccacagatgaaagctggagagtgccaactggatggcgcttttcactatgg

SEQ ID NO: 240655 - DNA, 543 bp, Homo sapiens
tttattttgcattcaaactatcttttggggccaggtttccttcataacagcttattgcaaaacggatctgaaaccctagggagtttatctgtagttaggtttctttttctttccagtaactgtgggtcggaggtattccagccattattaactaaaggactactctgttttatgacatctaatcaggtggatgtcccactgggaggacagattgtgctcttttttttccctctggactgaggagataaagagataaaactcatacgttgttttatttttttaaaaaatcaacagcctatycccctgtgagatcttcacgtgagcctgttatgcatgggagcctggttttagtgggggagacctaagggcttgtggctatggtgttttgtcctctgaatggctgggcttgctctggtctacaaaagtttctattcaggatcatcttggatcctggtggcttggacgaaaatggcaaactcttaatatgtctatagacctgggctgtccccggatgtctccacttggctgagaaaccaagttcac

SEQ ID NO: 240656 - DNA, 575 bp, Homo sapiens
gaggagttccggacatctcagcgtatctgggagggaatgtgcctttgggtggttaagtctgtgacatctgctgaatcagagtagaacctgttggctgaggaaggcttgacttctgccatgctgcaggtggtactccagctcaaatacaaacgctcacagccgatgcctgtgctttccacgcaccatgttttgttctgggcctagtggaagtgagygagcctgagaggtgagagtttgaccatgcagctctgtagggagggaggtgtcctcatagtctcaccttgcaccgggtgctgtgttcttcgtggagtttagtcctcttatggagaactcctgatctcattgccggataagcacaccaaggcctaaagcagtttgagtaatttactccaagcatcttagccaagtaccaggtgtcgaccatcagtctggggccctgagagctactgccagccacagtgctataaactctccccaccaaaaccgcaataaaaatttcagaaggacgagttaacaatggcagagaggggacaggatgtctggggtgggtctggcgagggtgaagcaaaaggcca

SEQ ID NO: 240657 - DNA, 575 bp, Homo sapiens
gaggagttccggacatctcagcgtatctgggagggaatgtgcctttgggtggttaagtctgtgacatctgctgaatcagagtagaacctgttggctgaggaaggcttgacttctgccatgctgcaggtggtactccagctcaaatacaaacgctcacagccgatgcctgtgctttccacgcaccatgttttgttctgggcctagtggaagtgagcgagcctgagaggtgagagtttgaccatgcarctctgtagggagggaggtgtcctcatagtctcaccttgcaccgggtgctgtgttcttcgtggagtttagtcctcttatggagaactcctgatctcattgccggataagcacaccaaggcctaaagcagtttgagtaatttactccaagcatcttagccaagtaccaggtgtcgaccatcagtctggggccctgagagctactgccagccacagtgctataaactctccccaccaaaaccgcaataaaaatttcagaaggacgagttaacaatggcagagaggggacaggatgtctggggtgggtctggcgagggtgaagcaaaaggcca

SEQ ID NO: 240658 - DNA, 481 bp, Homo sapiens
ctggtacctctccatagctctctcgctctcatgtggggcaccggctccttttccttgtctgccatgggcgaaaccttcctgaggcctccccagaagcagatgctggtgccatgcttcttatacggcctgcagaaccgtaagccaaataaacctcttttaattatccagtacccagccttgggtattcctttacagcaacacaaaatggactaacagcagaaggcagaaatcagccccagtggatggaagaacattctagaagaacagaggttagggcagagtcccagggagttttggttttccctttctctcccaataacgaaggcaggaagccaggaggagaggggagccycattatccaggcagcaaacctacctctggacgtcacagactcttctctaccacagggacccccaaaggagaagagggcctcctgccatcctgccccactgctggtgcccacacggctgccagtggtcct

SEQ ID NO: 240659 - DNA, 351 bp, Homo sapiens
gtcctttggctttgtttctgggtgctttcagtggcaaagtgtttgtaaaagttccttggttataaataggctttgtataatggctttcccaaatgctggttgaaatagtgctgtacagggtatgtgagcaggttcatttcctcctctggggctatagtgtggaggtctcagaaagcatatcttgttccccagtgctgtgaggttgtgtcatcagattttctattgtgttatgcatttctaactctggaacagctggtggtacttataggtaagagctggctaargttaatgcatatgtgtatatacttgatccttgtttacttgtagaagctctctgttacctcaagcaat

SEQ ID NO: 240660 - DNA, 396 bp, Homo sapiens
  misc_feature (1)...(396): n = A,T,C or G
nnnnnnnnnnnnnnnnnnnnntttgtctcttctaacagtattttcaaatagcttgtgttaaagctcactaattctttcttctgctgratcaattctattctattattctactaaagactccaatgcattcttcagtatgccatattgcatgtttcagctccacaatctctgcttgactcttgtaaattatttcagtctcttcgttatgtttatctgatagaatggggaatttcttctctgtgttattttgaatatctttaggtttcctcaaaacaactatcttatattctctggctgaaagatcacacatctctgtttctccaggattggtccctggtgccttatttagttcgtgtggtgaggtcatgttttcctggattttctttatacttgtag

SEQ ID NO: 240661 - DNA, 597 bp, Homo sapiens
aatactaatgacatagtgttagatataggtgtagctaagaaactgagtaaagcctgtgaatgtatgccaaaaataattactttgattttaagaaaataaatatgtttttaaacatttttgctttaatgtacatgaatgcctattaatcttatttttagattaaattctatttttaaaactagattttgaaaataattattttgtaactctactaacgtaataaaatcaattttgtttcaaaaaacagtatttcaaaaaatatacaattttttttagttctcctattcactttcagtttgaatgattaattatatggtcattctatccaactgccaacctgatcgctcctcttggatgtctcaaagttacctcaaatttaacctgattaaaattatctgcctgacatgccccaaatctgggcttctaaaagtgctcctgtctcagtgaatagcttcaccatctacatccaggcaattgtataaaycaggaacctgagttaactttaactctctttcacccttcaataaatactgcctgttttatttgtcaatacaaaattaaaaaaatatattgcccaagagcttcccatgttggcac

SEQ ID NO: 240662 - DNA, 564 bp, Homo sapiens
  misc_feature (1)...(564): n = A,T,C or G
ctgacttgtactttgcgcttctcatttaattggtcaataaaatttatcaattctaagttggaatatctctcaaatccatccatttctctttaccttactgccactgtcattggtgtgctctcatctttaaatgatgaattaaagcatcagccctctaattggccactcttctacccattttgtctccttcattcctggtctaaatctttttcagttactacctagaacatttcctctaagtctctaatctcttcttgtccttcctctccatanaaccgttttcagtgactttctagggctcctagggtgagagtccagaatttttcagcatccctatatctttcagtcctttcttgccstctgtttccagcctttctcaacacctttcagtacattaaacatgacatgctctttcttgctccaggcctttggtcttttggttatcccctcctgaaatactttcttgttcttcattattcagttcaggcaccattccttccagaaagctgaacttagacaccatccagggcctggaattagggacttctagcatataccctatac

SEQ ID NO: 240663 - DNA, 564 bp, Homo sapiens
  misc_feature (1)...(564): n = A,T,C or G
ctgacttgtactttgcgcttctcatttaattggtcaataaaatttatcaattctaagttggaatatctctcaaatccatccatttctctttaccttactgccactgtcattggtgtgctctcatctttaaatgatgaattaaagcatcagccctctaattggccactcttctacccattttgtctccttcattcctggtctaaatctttttcagttactacctagaacatttcctctaagtctctaatctcttcttgtccttcctctccatanaaccgttttcagtgactttctagggctcctagggtgagagtccagaatttttcagcatccctatatctttcagtcctttcttgccctctgtttccagcctttctcaacacctttcagtacattaaacatgacakgctctttcttgctccaggcctttggtcttttggttatcccctcctgaaatactttcttgttcttcattattcagttcaggcaccattccttccagaaagctgaacttagacaccatccagggcctggaattagggacttctagcatataccctatac

SEQ ID NO: 240664 - DNA, 565 bp, Homo sapiens
atttgattccatattcttaatgtttagaaaaacacgcagcatacaataggcactctggaaacgtttgctgagtgatccaattatcaaacaaaattgcacatgatctggcctcatgaactgaatcttcttaactcaagaggaagagctctataaatacaaagtcttagactgaaatcctgggtctgtcagttaccagttgtaagactctcactaaagtacttaagctttctgagtctaaaatttcttacccataatatgaggatgaaatgcctacttcataggaatattataaaaaatcaaycagacactatatataagcacttgtcatagagcttggcacataagtgcttgataaatggatattgccaccagtggtgtatattgtcatcattactgctacttctactaatattggtcaccatcaaactcttccatttgtttcctcaaatagattgcaaatgcctataaagtaaaagaatctgtcttataagcctttcacagtaagtttctttttaagatgatggtgaatacaacttctttgggtattccaaaaacagaaagaacc

SEQ ID NO: 240665 - DNA, 421 bp, Homo sapiens
agataggcagaagcaacagatacagttgaaaaggaaggtggaggccataggatacagcataacacgtaagccatgttgtggagtaaagatttacccctaraagagatgcagaggattttaatcatgttctcaatgacatcttatacacaaaggccattggcacccaaggtatcaccactgatacccagttaggctattccttcacagagtaactggttgaaatgctgattcaaaggagtcagctgtgacatcttggccttcatcacatgcaagaatgcctctaaatcaatttctcagtgcccatcatctccctgtgtatggcatagcttcctttctacactattgatcttcacacatttaaaaattacgtgaaaagctttcatacttcagtagatttattaatcttagaagctctgaattc

SEQ ID NO: 240666 - DNA, 245 bp, Homo sapiens
ctaatgctttccatatataaatgttcattatcccactctcagtgttacttaaaaaagagtatgaatattaatattgtgtgtgtaataacatagatgaaaagcaaatgtcaaactcaccctatmtaccagtcaatcttaaaaatgtccaatcaataatgctacccagtctccgaatacagtgtaagatttccctgggcaaggaggcaagcccaagaccattcttatttctggagtacctccttgcc

SEQ ID NO: 240667 - DNA, 565 bp, Homo sapiens
cttggtctacagtgcaaattgagtctgattttttggttgatttctgtatggaagatctgtctaataatgaaagtggggtgtcgaaatccctattattgtagtattgtctgtctctctcttttggtctaataacgtttgctgtatatatctgggtgctccagtgttgggtgcatatgtatttaaaattgttacatcctcttgctgaattggtcttttatcataatacagtgaacttctttgtcttttatagtttttattttgaagttctttgaaatttagggtatttttattttatttgaaatgtcctaaagatatcatgtagaaaaagaaaagtagcaggattattttaattttgtcacataatagtgcttggttctttttaattgcatagggtaatacattttaacagatgactatcttgtcatctttttaatcactgtaattagacaatgcctttttaatatatctgacatatatctggaactgtcatctttygcttggtgatttagttgattttacacttagaaatgtgactcatattttattagaagataatataaagcct

SEQ ID NO: 240668 - DNA, 457 bp, Homo sapiens
aaggatagactgtatgttatatcacmaaacaagtcttaaaatattcaaaaaattgaagtaatatcaatcattttctgtgaccacagtggaataaaactagaaatcaatagcaagaaggactgggcatggtggctcacgcctgtattcccagcactttgggaggccgaagcaggcagatcacttgaggtcaggagtttgtgaccagcctggcctgttctggaaaccatccccacaccacccagtgggcaccccaattccggcagacacaaaggagttagaaagagacagaataagcatttaaaaggcgggtccagggagccggagcatcggaggtttgctcagggcccagagctctcaggctctgcccaatttattggtttacaagctctttactcttagggcagatgggagggagagaaagggatgaggaaaaggattaatcagtgaaggagaattc

SEQ ID NO: 240669 - DNA, 457 bp, Homo sapiens
aaggatagactgtatgttatatcacaaaacaagtcttaaaatattcaaaaaattgaagtaatatcaatcattttctgtgaccacagtggaataaaactagaaatcaatagcaagaaggactgggcatggtggctcacgcctgtattcccagcactttgggaggccgaagcaggcagatcacttgaggtcaggagtttgtgaccagcctggcctgttckggaaaccatccccacaccacccagtgggcaccccaattccggcagacacaaaggagttagaaagagacagaataagcatttaaaaggcgggtccagggagccggagcatcggaggtttgctcagggcccagagctctcaggctctgcccaatttattggtttacaagctctttactcttagggcagatgggagggagagaaagggatgaggaaaaggattaatcagtgaaggagaattc

SEQ ID NO: 240670 - DNA, 521 bp, Homo sapiens
  misc_feature (1)...(521): n = A,T,C or G
cttctccttgcccctcgccttagttggagccaagatttcctggactctgtacctttgtctttcttcatttgctctcttgtcatgctgaagcacatctcccacgagcttcctaaaaaaggcatctcaggcaatntatctaagcccttcaggctggccagtgttgatgctttgttctcacacttgataatagtttatctaggttgaaaaatttaggttgacaawacttttttctttttttttttttttttttttttttgtagagatgaggtctccctatattgcccaggctggtctcaaatgcctgggctcaagagatcctcctgcctcggcctcccaaagtgctgggattacaggagtgagccaccatgcctgacaacaatacttttttcttaaaatttttattgtgtttctcctttnncttctggcggggggggggggttttgagaaacacaatgccattcctattcttgttgtttttggtgatgttttttctttgttagttttcttctcttctctggatg

SEQ ID NO: 240671 - DNA, 550 bp, Homo sapiens
gaaacatggtaatctctggtcctgtcgggcaggagtaagaaaaggtcccagtcctggcatgaagtgagtgcctaattagccagtgggaaactcctgttaattcctctaagaggatctccttggttcattgttttccatggcctctggttcaggggggacagaggtgggttcctgggagtactttctttctggtgcttacacaatttccagcccttgttggtacttatygaacaaaccacagattgttttagaaggtaaggcactggctgttgcaggaaaaatttgtgggttttctggcaagacagttccctaaaaatatattaggcttcttatctcttagcttctaattggttccatgtgtttggccacagtttttatatttgaagattctgacttttaattttcaaactctgtgctttgcttcagtgggaacacattatcattcattcttaattttaaggcaggtttatgttaagtgccttgcaaaaattcagactgccaaaagtaaaggctaagataaatgaaaagtttagacaaatgataaatattg

SEQ ID NO: 240672 - DNA, 577 bp, Homo sapiens
tagaacctttttaactccctgagctgcaacattaaaagcagagtccctatttaatgggcccaaatcaataaattcaccctatccaactctgtgtttcttccatcattatcccacgccctgtatatccattcccatgcctgttcttcagatttctgtttatataaatttaaaaactcaagcaggtcttttcgagtgtagcacaccctcctcatgggtcacactstccacctgggacttcagtctatttataggtctagaagaaaacaggaacgttgggggtggctcctggggagaatcaacattatcttgcctgacaactgtcttggggaggccaccactgttgcctcaggcagcgcagggttcacctccttagacaaaggtgggaaggctgatggcagcatgggtcagggagggatgttgccactactggggacggggaagctttttcttctggcaaaagtttcatcagagtttacaaactcagtgtctccagcttcatcagggtcctcccacacatccccattccaagttttagggtcccgttcttttccaatcaatgtcctcattttaacagtag

SEQ ID NO: 240673 - DNA, 577 bp, Homo sapiens
tagaacctttttaactccctgagctgcaacattaaaagcagagtccctatttaatgggcccaaatcaataaattcaccctatccaactctgtgtttcttccatcattatcccacgccctgtatatccattcccatgcctgttcttcagatttctgtttatataaatttaaaaactcaagcaggtcttttcgagtgtagcacaccctcctcatgggtcacactctccacctgggacttcagtctatttataggtctagaagaaaacaggaacgttgggggtggctcctggggagaatcaacattatcttgcctgacaactstcttggggaggccaccactgttgcctcaggcagcgcagggttcacctccttagacaaaggtgggaaggctgatggcagcatgggtcagggagggatgttgccactactggggacggggaagctttttcttctggcaaaagtttcatcagagtttacaaactcagtgtctccagcttcatcagggtcctcccacacatccccattccaagttttagggtcccgttcttttccaatcaatgtcctcattttaacagtag

SEQ ID NO: 240674 - DNA, 542 bp, Homo sapiens
aggtgagccccatagtaccttgttttacctttgcatcactgaaagaggcactgaagaaataggaaaaaaaaaaagtytggaatcaccaatgccatccaaccaccactcccccactcaccccagccacagtggtgtgatgtgaagtggtgtgatgtgaagcggtgtgatgaagtggtgtgatgtgatgtgaagagtgtctgtgcagagtgatgtgaagactgtgatgtgaagagacactctgggcacagtaggaggcagaactcttctcttgtgaggcattggacgcagtgcagtcctgttagagcataaagaaaacctagacaaaactcagttgacacccgcccatgaagggaacatttaaactgtccctggccagaggaaaattgctgatcctagcagtccaaaccttgccatggagggataaattgctctgggtctctaagtaatcctgaaattactctaggccacaaagactgcaatacttagacaagtcctagtgctgaactgggcccatagacagtggacttggcatggggtggggg

SEQ ID NO: 240675 - DNA, 516 bp, Homo sapiens
tgctccaacagagacaatataaaccaataattaataatttgtcagttagaaaactatttcctttatgtgtagagtcaaactctcttttcatctcagaaggaaaacaaagatgagcatgctcaaattctgactattgaaggaaaccacctgcatgtaaaatatatttcagtggttttcaactctgaccacaagaactttatcacttactgaaaaattataatacagtatgaatcataacgaacaggttaggtagtttttattattttaatccaaatggccatgtaataaaataaaagttctaaaccctgctttgggctgaattyagctttctttttagataaacatttatggtgcctcaggggaatctctctcatcacacctcctattattttatagtttcctaagctttgggtaatacctaagtcaaatataatcgacctaccaatgaacccaccatacgaacaaactgaccaacatgcaaacataatttggtactgaactctttttccatgaaga

SEQ ID NO: 240676 - DNA, 633 bp, Homo sapiens
ctttttgttactgatatgtatgtatgtactgatacgtatgatcagctgtaatggatcacatgctctaactttttggtttgttctttgtagtagtcagtaatgctgtctaaaaaatatttgcctttctggtttctgagatcagtggaatggcagtctccagctctttgaaattaattgtggccttgtgacttgctttggtcaatgaagcataagaagttatatgggtcacttctctttctctctctctctttcttttctctttttagaaagaaacagggtcttgctcttttgtaagactggagtataatggtgtaatcatagcccactgaaaccaagaactcctggacttaagcaatctttctgyctcagcctcctgagtagctgggactacaggcatgcatcaccatgcccatctaatttatttttgtttttattttttatagagacagtcttgatatgttgcccaggctggtcttaaactcctggcctcaagtgattctcccaccttggcctcccaaagtgctgagattacaagtgtgatccaccatgcctggcccatatgggtcaattctggaagaaggttttaagagctggtgtgtgacttgcttctgcctttcttcctggtgtgttgac

SEQ ID NO: 240677 - DNA, 604 bp, Homo sapiens
atatctgatgttacattctgtttttcccaatgtgttgtttatcttgccttcttctataaagtccattatggccaggacatagtgaagggagggatakcttgctaaataagaaacaaaaatttagaactattctttaaacttttaaattgaagtgtaacatacatactgtaaaatgcacacatcttaagctatatgaatttttacacagtgataatacctgtacaactaccacctaggttaagatatagaatattaataacatcccggacatttcactcaggctccctcccagacactacctattccatggctcagagaatgtggctagagtatgattttgtttttctttcttcccctacttttttttcttcttatttttcccctcttgaagtatgaagagtttcctgaaactttgacttgatggctcccatcagttttgaaaaatgcatggctagttttctttattccttctgtcttcaaagtttctggggctccaaaaactctccattcattatatatcttttatgtattttccatgttttagctatattagtcatagtttctgctatgtctcatttggctttaaattcatctattaaatgct

SEQ ID NO: 240678 - DNA, 588 bp, Homo sapiens
taggatctattccccattgagttccttataatttttcttcatttctgaagtgattttggtgtctatttttctgaaattgtkccatttcctattttatcatgtttttttaatagagatcatccctggtctttgagcatcttttctccaaattcttttatttctgtcctataaccttccttcatgctttgatctttcattaagagggctacagtgttcatctgctttgtgattttttttttttttttttggtgagtcttcctcatttatagaaaattttgtattgtaacttttattgatgcttgtttattccttttgttgtcactcatattggaatgagttggattttctgggactaaggttaagtatcccttatgcaaaatgcttgggatcagaagtgttttgaattttagctttctttttggattttgcaatatttgcagttacaacagttgaacttcactaatccaaaaaataaaaataaaactgaaatgctctaataaacattttctttgagcatcatgtcagctctcaaaaagtgttggattttggagcacttcagatttcagattttcagattagggatactca

SEQ ID NO: 240679 - DNA, 499 bp, Homo sapiens
gaattctgagacctgctgctggcatctctcttcctgtaacccccaagctctcagccctgcttagactcagttctctctgagctcagccttgctcacagcatatcccactaaagttatagtagagtagcattgggctttattgtcagaataaagttgccacctttggaaatctgccatgctcaagccccttgacatttctaatggcattttctatatgtcttttgccagttctcagatctttctgacagctttacgtgtatttcggatttggaagattttcctttctcttaatttcattggaaatggagtgtgtaggatcgttccaagatggcagaataggaacagctccggttggcagctcccagtgtaagtgatgaggaagacaggagatttctgcatttccaactgaggtattgtgttcatctcattaggactggttggacagtgkgtgcagctcatggagagtgagttgaagcagggtggggcatcacctcacctg

SEQ ID NO: 240680 - DNA, 516 bp, Homo sapiens
aagtgaaatacaggggtagagggatgcagcagaaaggccttgggagctcgctgagtccccaagcagtccattcctgcctggcaccacagggatccattgggagagtggccagaggagcagtgggtaaaactccacagggagaaggaattctgtagctgaactttgtaacaatttgaaggggggaagaagcctcctggtcagaactcaggggagggtgtgaatgaggcttgcagacttcacaggccagggaagaactaaaacccttttctctcacagctgggaagtggatagccttgggcaagttttcaagcctgtctcatcctctgccagggaacagacttgtgctgttgtggggggtggggaacactgtgggagtgagactggcccttcagtttgtgtggaatcyggataaggcctgtgattgccagctttcccctactttcttgacaacctgcataactcagcagaggcagctgtaatcctcctaggtacacaactccagtgacctgagaattt

SEQ ID NO: 240681 - DNA, 482 bp, Homo sapiens
atgctgcatgtaataatattcagtaaatttttaataaatgtgtcgattaaatttttaaaggaaataaatattaatataatgtatccactgccatttgaatgttctcaaatcacttattaattatccttctgatgaatttaatttttatgcagtctatcttataggtatatgtcatgttgaacaaaaaaaaaatatttttatatttaaggcagatagtcccagatccttgtaactttgacacttgctatcattgtaaaaccatttcagtatcttatttcagtatcaaggatctcaagaggtaartggaaatgagaagcaaattcccaattaagtttaatcaattttgtgttttaaccagcactctctttcaaatattctacatatgaatgctttgtgttgctctttgatgtgggtataaatgtcaatataagtaaatagagtagtccctcggtatccaggggagaaattgattccaagacctc

SEQ ID NO: 240682 - DNA, 481 bp, Homo sapiens
tggaattgaaagagtaagaggcaaaactgttcaaattttatcttcaaaaaccggataccaaaagagataaaaacttcttgacctaatttaaaaaaaaaatagaagataaaaatcccagaaggtataggcttttcgacctacccatacctcccaggaactgaactacaagaaggcaacattctgatactgttctataatatatccaaaaatgggagaaaagaaacagaagaaagtgagtctagagtgggaaaaatcaagtggaaaatcgctaaagtatataccttaacctagctttgacaaaatatctagaactctacagagaaaagaaaaaatcaccatgacttgtcatttttcatgaygaactttgaggataagttaatttggaaagtatgagtctaaggtaaatgtccaatatggtatattgaactctgatataggatattttactatttaaatgaaatttaaatttcatttaaaaagt

SEQ ID NO: 240683 - DNA, 540 bp, Homo sapiens
ttgtcatttttcatgatgaactttgaggataagttaatttggaaagtatgagtctaaggtaaatgtccaatatggtatattgaactctgatayaggatattttactatttaaatgaaatttaaatttcatttaaaaagtgtccgccaggcacggtggctcatgcctgtaatcccagcactttgggaggtcaaggcgggtggatcaccagaggtcgggagttcgagaccagcctgaccaacatggagaaaccctgtctctactaaaaatacaaaattagccaggcgtggtggcacatgcctgtaatcccagctacccagaaggctgaggcaggagaattgctggaacctggaaggcagaggttgcagtgagccgagatcgcattattgcacttcattctgggcaacaagagggaaactccatctcaaaaaaaaaaaaaaaacaaaacaaaaccaaaaacagggtccttcaacaaagactttgcatacctccagtagagaatatttacccaaatgaaaggggaaaaataaaatctgcagatt

SEQ ID NO: 240684 - DNA, 540 bp, Homo sapiens
ttgtcatttttcatgatgaactttgaggataagttaatttggaaagtatgagtctaaggtaaatgtccaatatggtatattgaactctgatataggatatttyactatttaaatgaaatttaaatttcatttaaaaagtgtccgccaggcacggtggctcatgcctgtaatcccagcactttgggaggtcaaggcgggtggatcaccagaggtcgggagttcgagaccagcctgaccaacatggagaaaccctgtctctactaaaaatacaaaattagccaggcgtggtggcacatgcctgtaatcccagctacccagaaggctgaggcaggagaattgctggaacctggaaggcagaggttgcagtgagccgagatcgcattattgcacttcattctgggcaacaagagggaaactccatctcaaaaaaaaaaaaaaaacaaaacaaaaccaaaaacagggtccttcaacaaagactttgcatacctccagtagagaatatttacccaaatgaaaggggaaaaataaaatctgcagatt

SEQ ID NO: 240685 - DNA, 540 bp, Homo sapiens
ttgtcatttttcatgatgaactttgaggataagttaatttggaaagtatgagtctaaggtaaatgtccaatatggtatattgaactctgatataggatattttactatttaaatgaaatttaaatttcatttaaaaagtgtccgccaggcacggtggctcaygcctgtaatcccagcactttgggaggtcaaggcgggtggatcaccagaggtcgggagttcgagaccagcctgaccaacatggagaaaccctgtctctactaaaaatacaaaattagccaggcgtggtggcacatgcctgtaatcccagctacccagaaggctgaggcaggagaattgctggaacctggaaggcagaggttgcagtgagccgagatcgcattattgcacttcattctgggcaacaagagggaaactccatctcaaaaaaaaaaaaaaaacaaaacaaaaccaaaaacagggtccttcaacaaagactttgcatacctccagtagagaatatttacccaaatgaaaggggaaaaataaaatctgcagatt

SEQ ID NO: 240686 - DNA, 551 bp, Homo sapiens
taattgtattccactccaaagcaactactacaattgactatcaatattaaaatcrtccattaattcaacaaatatttatgatgtggctactatatactctataaatttcatattataaaatcaaacgtgattaactattaagaaatttgagttctctaatttaaagatcttatgcatacatataattttttaaaataatattcattttaaaagcctggggcttttatccttaaatatcagtttaaccataaaatattcattaaagaattgaacatttaataactaattaaaatctgtgcctctgattttattacaagccattattgcatacacaacttaatattggttaatgtccacacaccagtaagaagataatcaaaaatccttattaatctggtaattgagtaaaatatcaatgtgcctttgtaaaacctactactacactatatcagctattgaactatcatttagtttctatcattttttattctttatctaaaataaaatataaatctaacgttatgattaaatatttgacattcctcatgcca

SEQ ID NO: 240687 - DNA, 553 bp, Homo sapiens
aattgtattccactccaaagcaactactacaattgactatcaatattaaaatcgtccattaattcaacaaatatttatgatgtggctactatatactctataaatttcatattataaaatcaaacgtgattaactattaagaaatttgagttctctaatttaaagatcttatgcatacatataattttttaaaataatattcattttaaaagcctggggcttttatccttaaatatcagtttaaccataaaatattcattaaagaattgaacatttaataactaattaaaatctgtgcctctgattttattacaagccattattgcatacacaacttaatattggttaatgtccacacaccartaagaagataatcaaaaatccttattaatctggtaattgagtaaaatatcaatgtgcctttgtaaaacctactactacactatatcagctattgaactatcatttagtttctatcattttttattctttatctaaaataaaatataaatctaacgttatgattaaatatttgacattcctcatgccattg

SEQ ID NO: 240688 - DNA, 577 bp, Homo sapiens
ctgtaccatctgctgggaaggacagaagaccactgtttgaagaaggactattgcttagatcctggaatcagaaacagcaacagaacgtcctaaatgatcagaacaccacatrccattattattgttgttgtttgccttagaattgttttgagagtgacaaaattacatctcaaggagaaaaaacatcaaagcaataccaagaatttctgtttaggggaatagaaggcactcaagcccttgtatgtcctacaatgaggtcactcaggcagcctgcttgaggacccagctctgtactccctgtgaactctaccaaattagctttacacgacgcagccatcttgcttctctagaggatcaaagtaactggacccaggcccagtgttctgctgataaccagtcacaggatacgtttgcaccctgttctgctcctagtacaccatgctgcagattcctctgtatttcccagtttatatccatacagggaacttgggttcacatatttccttctattatctgaactaatctggtgacctgagatcatttatgtaccctacactcttgttacaatgctctggaa

SEQ ID NO: 240689 - DNA, 561 bp, Homo sapiens
  misc_feature (1)...(561): n = A,T,C or G
nnnnnnnnnnnnnnnnnnnnnnnnnnnnnnnnnnnnnnnnnnnntacatccagcaacagtagaataaatattatttttaagtgcacatgagacattcacagagatagagcacttgtgtaagctataaaatgtctcaataaatattaaataattgaaacagttctaaacacgctttgaacaaaacaatactacttcagaagtgaataagaaacatatatctggaaatcttcaaagatttggaaattaagcaacaaacttctatatcacctatagatcaaataagaaatctcaaagaaaactaacaaatatgtatttagacctgactgataatacaatatttsaaaatgtgggaattgtagacacagcagtgctttagagaaaaatttataactctaaatgttcgtattaggaaaaaaggtttaaaatcaataatatatgtttttaccttaagaagttataaaaagaatgaaatgaaactcaaataagcataggaaagatatagtaaagacaagaataaatgtcaatgaaatagcaaacagacaaacaatagagaaaaccaaa

SEQ ID NO: 240690 - DNA, 514 bp, Homo sapiens
tttgtaattcagtattcctttcscattctccccactcaggtttgttttgaactctcatatgcttatgattgaaatgtatgtgggtatgttgtgatttatccacagatgtaaaatccttgaacacctctgatatttctgtaattgtctcatgacctcctcattgtccttttctatgtctgttgtgttgtagaccacaaaagaggtgctaagcgaagcccatatgaatgattacacttatttatttaaggtatacaactgcctgccttcctcacaagctataaatattgtccagtataggccaatttactctgctgcccctgtgagagttgtttgtaagaatccgaacctatttgtctgttgcagagtggttgttaactgtgataaatgtcaatataattaaagataatggtttaatatttcaggaagctatgaagcagataacccagctcctaccagaggacctcagaaaggagctctatgaactttgggaagtaagtatatatggtacgttact

SEQ ID NO: 240691 - DNA, 514 bp, Homo sapiens
tttgtaattcagtattcctttcccattctccccactcaggtttgttttgaactctcatatgcttatgattgaaatgtatgtgggtatgttgtgatttatccacagatgtaaaatccttgaacacctctgatatttctgtaattgtctcatgacctcctcattgtccttttctatgtctgttgtgttgtagaccacaaaagaggtgctaagcgaagcccatatgaatgattacacttatttatttaaggtatacaactgcctgccttcctcacaagctataaatattgtccagtataggccaatttactctgctgcccctgtgagagttgtttgtaagaatccgaacctatttgtctkttgcagagtggttgttaactgtgataaatgtcaatataattaaagataatggtttaatatttcaggaagctatgaagcagataacccagctcctaccagaggacctcagaaaggagctctatgaactttgggaagtaagtatatatggtacgttact

SEQ ID NO: 240692 - DNA, 514 bp, Homo sapiens
tttgtaattcagtattcctttcccattctccccactcaggtttgttttgaactctcatatgcttatgattgaaatgtatgtgggtatgttgtgatttatccacagatgtaaaatccttgaacacctctgatatttctgtaattgtctcatgacctcctcattgtccttttctatgtctgttgtgttgtagaccacaaaagaggtgctaagcgaagcccatatgaatgattacacttatttatttaaggtatacaactgcctgccttcctcacaagctataaatattgtccagtataggccaatttactctgctgcccctgtgagagttgtttgtaagaatccgaacctatttgtctgttgcagagtggttgttaactktgataaatgtcaatataattaaagataatggtttaatatttcaggaagctatgaagcagataacccagctcctaccagaggacctcagaaaggagctctatgaactttgggaagtaagtatatatggtacgttact

SEQ ID NO: 240693 - DNA, 526 bp, Homo sapiens
tctcagtgactcttccttgcttaagaagtttcctcatctctgcagacccttagaaaatctaccaggacttagaagagaagagaactatttagaatgagattatttatacatataactgcaggtagctgctggtgggattaattataaattttgaagaccactgaaaacttgtcaagctaataaatcagcttcatttagacaaagtcctaagtcagaacaaggctactattccattggtcaatgacctataggcaaatccgatcatgttggtcttagactttaacacttcaagctacctasaaaactctgcccacatatatagagaaaaactcttgaatattaatcattcttattctatttaggaagatttcagtgcctataatttttttcagggcactaagatagggattactttcaactggtaaatcttttactaataaactttccttatgttatcaatcatgataggtagaatacctgacacctagagtcttctttctactttatttgatttctcaaccatttt

SEQ ID NO: 240694 - DNA, 554 bp, Homo sapiens
aaaggaaaaaagaaaaggaaagtctttcttggttctatctgtccaatcccactaccacacaataactactataaacactttgatgtgtttattttctgatatttgaaatatatactcatttgatataggtcatttgatagctacattgatgtgttatttattctattcctattttaaaacatttgatttatatcatttttattgaataaataatgctataattaacatataaaaagaaagggtttgatttgtccttgagaggacaaatggcctgatgctctatctttaggctagaaaagtagtaacacaaagaacgaaggcccaaaagagctaagcaattctgctaactgataaagmtgggcttagtctggttaaggtacaacgacaaagtccaattcatactggtacaactgcttctaacaggtagaatagctataaataaaaataatgcatgcatatttttctaaaactttaaacagttcagttccccaattcccaaactcaatttacttttaatttcacaggttataaactccagacaactagtcaccatt

SEQ ID NO: 240695 - DNA, 592 bp, Homo sapiens
attttttccacctagtaaaaaagtcaccaatgaagaagattcaagtccctaaaataagtacaaaactttatgattccatgccactattctttatctaatttttgcaggtactcattatttgatgggtgattataaagaaacaaagatgatggtaaattagtaattgtggttggaaaataatgccaagatttcttaggcattcttccaactctataacaatttgggcaataaatttccaaaaatgacagtatctgtcttgcatgagtatatcttctataattatagacttgaacaagagaatgcaaacctattagttaaaaatacaccatctctccttgttgataattctaagtgaaagtattactatatgttagaatgtaccagcatttgatttgataaacacccgaaaataactaatcattctgagagagataaggctaaataaatttatctggtaataaatgcagyaggccacaaaataaaaataaaaatcataaatgtaggaaagatatgagattacattattggtagaaaatagcatcataaacttataaaactcaaaagaatccagagaagcataatagaattacaa

SEQ ID NO: 240696 - DNA, 593 bp, Homo sapiens
attatgaagtacaattgatccttaagttaaatacattatctaggttgcttgaatctaagcatttgagccctttaggaaacaaaggttttcctcaactgatagtggttaggaaggctgaaaaaagataagactgattyaactatgaggactccatgaaatatttcaggtttgaagatgtagggggatgtatttgagaaggaacttaggcagtttctaagcacagaaagcagctcatagctgacagcaaggaagaaaacagagatatcagaattactgccacaaggacttaaattccaccagctgaaatgtgcttaggcactgattctttctttgagtctccaggtaagacacagttcagctgacaatttgatttcagtcttgtgagaccctaagcagaggacctagttaaacctgcctaagcttttgaattataaaattatgagataaaaattgagtattgttttatgtcttcaatttgtaataatttgctatgtagcaatagaagactgacacatgctcattataaaaatatcattggctaagatattactagatcatacacatttaattaagaatgacaataagagattaat

SEQ ID NO: 240697 - DNA, 564 bp, Homo sapiens
aatatatacataatatttatttagatgtggaaacaattaacttactgtctctaaaacagtaaaactctgtattaaactctgttgtgacccataagtcctgttgatttgaggaaaaaataaaaagcagtattaagcaaaatgcaatatccttgaacttctcaattaaatgacaattcatttatttctgatttaacattttcttaaataaactcagtgttgctgcagaacttgctaaatgattttctctttttattcttcctgacayaaactttggatgcaacataaagcttctcttggacattaaaggaagggtctcctagtctgtatgttcctaagagctaccttccaaggaacagtaaggaataattgtttttctttaacacttaacattgggtcctgtccctcctgcatcaactactaagagtcagtggttattgtaactcctgatctgccaggtgatcacacgttgttagcctgggtcagctgtaatggcagagggagtcaaatcctggccctttgttctcctcccactccctctaggaacctgctcatcatcttcctctg

SEQ ID NO: 240698 - DNA, 564 bp, Homo sapiens
aatatatacataatatttatttagatgtggaaacaattaacttactgtctctaaaacagtaaaactctgtattaaactctgttgtgacccataagtcctgttgatttgaggaaaaaataaaaagcagtattaagcaaaatgcaatatccttgaacttctcaattaaatgacaattcatttatttctgatttaacattttcttaaataaactcagtgttgctgcagaacttgctaaatgattttctctttttattcttcctgacacaaactttggatgcaacataaagcttctcttggacattaaaggaagggtctcctagtctgtatgttcctaagagctaccttccaaggaacagtaaggaataattgtttttctttaacactyaacattgggtcctgtccctcctgcatcaactactaagagtcagtggttattgtaactcctgatctgccaggtgatcacacgttgttagcctgggtcagctgtaatggcagagggagtcaaatcctggccctttgttctcctcccactccctctaggaacctgctcatcatcttcctctg

SEQ ID NO: 240699 - DNA, 633 bp, Homo sapiens
accacactcaggcttgctcaaagtttgcagtcgtgtgtatgacattatgccctgatttcaacacttttcattttatgtttttctatttttgtaatttgggttggttcttatatagatttaaaatttttcatttactgtaagctaccattcccagaattccctctttaaaagattgatttctgcttggattatctgaagatatctaaagataaagaattcaggcccctagttcctagtttttcccactatatcatctctctccttgacagtttgcagtttagcaaataaattttgtggacaygtagcccttttgagttaacacaaaaccttcatcagttttcttgtcaagaaaactaaaacctatattattaatatcaagccattaaaatttcttcttaaagggatcacttttgaattttaaatattcttcaaagcaaatttacaccattacaatctggccctgattttattgttcaatcttattcccatatttcttcttttcatctttctactttactttctttccatcttactactccatttttttccttcaatccaacaaaacatgccaacattccttttttatttttttgtaaacagttttgaggtaaaattgatattaagaagctgaat

SEQ ID NO: 240700 - DNA, 580 bp, Homo sapiens
aaatgacactcaaaaaagacagtgttgaattttaagaatttatatcttacacaacttactaaaactccatagagaaataattaagattgaagctgctgtttgaacaataggtctatctagagtcgtctctaaattaatccaaacgaaggaaaaaaagctagatttttcccagttaggctaaagctatcatttgagtctaccagccatttaattaagttccagcaatgtacatttttggtggagttgaagacacttcatgtcaatgccagtgatgcacagttaagctgacaccaagtgcttacacagaaattgtgcgatggtaagtgtgcattgttgtttaaasctattaagagctagtataatttgatatttaacagcagataagtgatgtacatagaaaataatttaaataaaaagctttgtcttcttattcaaatattctgttttggtaagccagcctaaaccatgctgcaaatcgttttacctacttttgaaatgagttctgcaacagcgcagccaggtgacatcagaagatggcagaataagaggttcatccactcatatcccccccataaccaca

SEQ ID NO: 240701 - DNA, 531 bp, Homo sapiens
tttaaataatgaacacaaattctcaaactctttgaaacaataaagagtaggagcactttcaaatttattttgtaagttcagcattaccttcatactaaacccagataatgacaccagaagaacagaaaatgataggacattatctcttatgaatatacataatacaaaaattgtcaacaaaacactagcaaatcaaattgaacagcacattacaaaaatcatacactatgctcaaatagtattttcttctgaggtacaaaaaaatcattcaatatatttaagtcaataaatgtgatacacaactttcacagaataaaggataaaattgtttgatcatctcaatagatgcagaaaaagtatttgacagaattgaacatattttcatgaaaacaagctctcaaaaaattaggtatagaaggaatacacctacatcatactcattggtgaaatgctgaaagttttttctctaagatcgggaataggacaaggkactgactctcactaattctattcagtataatactggaattc

SEQ ID NO: 240702 - DNA, 601 bp, Homo sapiens
ttaatatgttaattttaatatcttattatattttatagataaaaatacaaattaaaaattatttgccctttgttatgtgacttcaggaaaactcctattcaacatcagcactcatgctgttttagaccagcagtctatagtcagcatcttactcaagattagttcccaggaagtagtcttcagtgtttctaggatggttgaaaggagtttacaagacatctctgttctttgtaaactaacattatgctgaaatttataatgaaagtgttctgaatcataaggragtcattgcttgtatttagggcttacctgcatggagtttattattgttattattagtactaatattattattagtattgttgttcctctggcattttgctggacatgagatgaaaaatgaaaagggtaaatattatccccatatgctattatgaattctgtccttcatagtttgtcttgttccatctaatcttaatttcatccacattataatcccataaaccatgtttttgaattacaaaaatgttaactttacagtgcccaattttaagttaagtaagtctaatactgaacctgaagaaactcagatgagtagaaa

SEQ ID NO: 240703 - DNA, 601 bp, Homo sapiens
ttaatatgttaattttaatatcttattatattttatagataaaaatacaaattaaaaattatttgccctttgttatgtgacttcaggaaaactcctattcaacatcagcactcatgctgttttagaccagcagtctatagtcagcatcttactcaagattagttcccaggaagtagtcttcagtgtttctaggatggttgaaaggagtttacaagacatctctgttctttgtaaactaacattatgctgaaatttataatgaaagtgttctgaatcataaggaagtcattgcttgtatttagggcttacytgcatggagtttattattgttattattagtactaatattattattagtattgttgttcctctggcattttgctggacatgagatgaaaaatgaaaagggtaaatattatccccatatgctattatgaattctgtccttcatagtttgtcttgttccatctaatcttaatttcatccacattataatcccataaaccatgtttttgaattacaaaaatgttaactttacagtgcccaattttaagttaagtaagtctaatactgaacctgaagaaactcagatgagtagaaa

SEQ ID NO: 240704 - DNA, 568 bp, Homo sapiens
  misc_feature (1)...(568): n = A,T,C or G
ctgatttttccatcttttccagttaggccatacatgtcattggccagataatatagtgactacctttgggtcatgtgtctacctctagaccaatcatccatagctataaggtggttctgtagtttaaaacttgaatgtctagacagtgtgatctagttgtggaattgatttgtttagatggggatttggactgggaagacaataacttatctatgtagaatattctttttcataatagcctaatacatacgtgagcaatgtataacaaaaatgtataataaaaagargtcttatccacattaatgatagctacattagagtttagtggagaatacaagtaagtcatcagatgagctggttaaaatagaaatactggaaactgagacaaggtagatcttttcataagttaaagtgaagatgaacggtgggggcgagagcacaaccaaaagctactttttataaacaggaattctttatnanaaatggtatccaattttactgggtatgtatacacaacgctgttggagatacttcttggcagctgagatgtgatgaaagagggaggaag

SEQ ID NO: 240705 - DNA, 409 bp, Homo sapiens
aacacacacacatgtagtctggaaacaagtcttttgctaaatgtawgtattgcaaatgtttctttcagcctctagcatgccctctaatttccctaaatgtctttttcaatatttagaggtttttaatttttatctcatctaattaatcaacttacttatgttaagtacttccagtgaatatattttcttaaatgtgtatactaattagagccatatcccatattttaatgaatattaaaaataatttgaactctatttaagattcttctaggtcataacacccacctagctttgattgctaaaaacactcacaatcctattataagaatgcatcctatagatattcaatcaacactttaatatttaggtggtatataataaaaatattcatttataatttttaaaaatt

SEQ ID NO: 240706 - DNA, 599 bp, Homo sapiens
aagacacagttaaatcagtggaaatgataattatccacarctacaaaatttctgtactcagagtccctaaatgttactgaataatctcaaaacttacagaacagatttaaactcttccagtccagaagttaatctctcagatgatggtcatgctccatgatcatctgggaatccagggtatgtacgatcacttcttgctttggataattccctaggcaaagaggagagcagttggccagggaaggagttgtcctagaggatttgaggataaaaccacttgataagtgttgaatgaatcagaaattggagaggtggatctggcagcgctggagaaatacaaacaaccttcccctctttgaaagatggaggttctcacagtggtggcaacgtgccttatcagtgttagtcgcctgaacttcctgagctgccagggcagattaacatgccaaatattcatcatattctcaggaaaaataagtaaacagaggatatctgtgtttttttttaacttatcttgttgcgactaaaacaatctaataatgttattttaaagaaaagtatttgaaaatatgtttcacatctatttactttgtttctta

SEQ ID NO: 240707 - DNA, 648 bp, Homo sapiens
gaaaacatgtcacatgtcatacttatgggaaagagatacagagtggtatattaaccaagtagtggtcccaagatcccttttgggggacaaaaatattggaaattgtgggctgggcacggtgtcttatgcctgtaatcccagcactttgggaggccgaggygggtggattacctgaggtcaagagtttgagaccagcctggccaacatggtgaaaccgtgtctctactaaaaatacaaaaacaaaacaacaacaacaaaaaaaattagccaggcgtggtggcagaggcctgtaatcccagctactcgggagggtgagtcaggagaattgcttgagcctgggagatggaggttgcagtgagccaagatcgtgccactgcactccagcctggccaacagagtaagactgtctcaaaaaaaaaaaaaaataaaattactgatgattatcaatagtaacagtgtggtgaagaacaacagatggtgagtatcagaagagagaacttgcaatgaagagagatattaaagtcttaagtctggaattttagaaatgatagtgggaatgcttgatggtgtaggggaagaacaaatgataaatcaaatccccaaatcaaaaaatggtccaaacttaattagtgtactttttgaaaaggg

SEQ ID NO: 240708 - DNA, 547 bp, Homo sapiens
agttttagaaatccaagcacactagggtctcagaggtttctgctcagcccccttgcatttccatgcctaacctgttcactactggacacctttcctcttctgcttcttggtggagagggcctatttgagcccctccagtaaggcaggcactgtactagttacttcacttrtgttgttctgcaggtaggcagagctgaggaaatgaggctcagaattctaaggacttgcccaagagcaaacagcacttggggtgtttgtaccttaacccaaattcatcaaactccaatgcaccaggcctccttaaccgccccaagagttctttcctcccttcactccacatttactggagtatatagtaggtcccgcccagtgcagcctgccagtgatagatgattaaaaacccaggccaccagcagtgcccagtctagacaagaaaatggaatgggtgccgatgggtttgcaggaagaagtctacttggagaactcatttgagacaggcagtcagaaggtgctctagagaggaggtgatgcttaagttgaatcctgg

SEQ ID NO: 240709 - DNA, 248 bp, Homo sapiens
cccagcactctgggaggccgaggcagatggattgcttcagctcacaagtttgagaccagcctgggcaacatggcgaaaccccgtctcaacaaaaaaaattcaaaacttagccrggcatggtggtgcacgcctgtaagctgaggtgagattgcttgagcctaggaggcgtaggttgcagtgagccaagatggtgccactgcactccagcccgggtgatagagcccgaccttgtctcaaaaataaataaa

SEQ ID NO: 240710 - DNA, 540 bp, Homo sapiens
ttttattattacaagtaatatttgtgttataatttttaaagtatttcatatataattaggataaaaaataagaatgttaatattggctgggcgtggtagctcacatcraatcccagcattttgggaggccaaggtgggtggatcacttgagcccaggagtttgagaccagcctgagcaacactgaaaccttgtctcttattaaaaaacaaaaaaattttaatgaatgctaatattattaagatccaaggttttgattaggagagaaaggagatgcaaataaaataaatgtaaacactctgtaatgttaaatttgtataggacatattaatatgaactcatggtaaaacatttttttacttcctctgttcacttaacctataaaaaacgatattccagtagcaatgttaacagaatctttcccttattcttgatagttttgctgccagttctggcaaagtgtcatcatgcgggtgggaagggattggatgccaggccaaggttgtaaggaagtaatttatttcattttatttttttgagat

SEQ ID NO: 240711 - DNA, 540 bp, Homo sapiens
ttttattattacaagtaatatttgtgttataatttttaaagtatttcatatataattaggataaaaaataagaatgttaatattggctgggcgtggtagctcacatcaaatcccagcattttgggaggccaaggtgggtggatcacttgagcccaggagtttgagaccagcctgagcaacactgaaaccttgtctcttattaaaaaacaaaaaaattttaatgaatgctaatattattaagatccaaggttttgattaggagagaaaggagatgcaaataaaataaatgtaaacactctgtaatgttaaatttgtataggacatattaatatgaactcatggtaaaacatttttttacttcctctgttcacttaacctataaaaaacgatattccagtagcaatgttaacagaatctttcccttattcttgatagttttgctgccagttctggcaaagtgtcrtcatgcgggtgggaagggattggatgccaggccaaggttgtaaggaagtaatttatttcattttatttttttgagat

SEQ ID NO: 240712 - DNA, 528 bp, Homo sapiens
ctgcattaggtcatccatgttaacaacccatacatycccatttatgtaagagaatgcagctccgccttatcattgtcatctccatctttcccacatgatttttcctggagaaccaagcgctattgggagtaggtcctaggctggcttacaactcatgctctcctgctacctatcaaattatatggcattcagacaaactacctgactggcttctccaatcagatccgaaagtcagggcctgggtgttgtctttatttcttgttccactcagcaacaggcatagaactgttatcagatggctgaatttaggactgcatgctggctgattctgttcccagaagcccaagataattaagaacctacttgtatctcttttccaaatgaggagttctaaggcaaactttaaatccacttccacccacagctcccagtttcactgtagggtcagcacttggacaatcacctggaaaacaaaaatgcaaatactatcatcgtaaattataagatttcacctaatactaaggggat

SEQ ID NO: 240713 - DNA, 530 bp, Homo sapiens
ggctgcattaggtcatccatgttaacaacccatacatccccatttatgtaagagaatgcagctccgccttatcattgtcatctccatctttcccacatgatttttcctggagaaccaagcgctattgggagtaggtcctaggctggcttacaactcatgctctcctgctacctatcaaattatatggcattcagacaaactacmtgactggcttctccaatcagatccgaaagtcagggcctgggtgttgtctttatttcttgttccactcagcaacaggcatagaactgttatcagatggctgaatttaggactgcatgctggctgattctgttcccagaagcccaagataattaagaacctacttgtatctcttttccaaatgaggagttctaaggcaaactttaaatccacttccacccacagctcccagtttcactgtagggtcagcacttggacaatcacctggaaaacaaaaatgcaaatactatcatcgtaaattataagatttcacctaatactaaggggat

SEQ ID NO: 240714 - DNA, 561 bp, Homo sapiens
ttccagagtccaatgttattcttaaataactgactcttcaagtcagtaagggaaaaggaatggctcgtacaaaccagtataggattaaaaaaaaaaaaaaacaaaaacccaagscaattaaatatcataatgataatgatatcaactgcagacttaaaaattttgagaaacactagacctatggcaacaccaaactataatttgcttttatgtaggagtagaagggacttgattcagaacatcttggcaaaagttttataacataccacatttataaacagaaatctggttactggcatctagaacagcaaggtcattactcttttgagggtgtgctaagaatgtgacttgattcacagggtgtgggaacagcagttggtaggtgcacatgggaggcggaaccacagtctgccggaagactgtcaccaacaccctgtctgcagtgaaaaagaaagaagaggattagacctagggatattcaatttgtaagataagccatctgaacatcacagtatatctaaacaataatggcaattcacaaaaaaataactttcaatgttt

SEQ ID NO: 240715 - DNA, 630 bp, Homo sapiens
ggtactgggccaaggaggagaatggaaggaaagagcagggtctgaatccagcctgcatgctccttggcaagcagatcctctgctgtaggaattttgtgccaaggaaggaggctctttccctaatttccacaaaagcaccatttgccccacagagccttgcaaactgggccttcccttctaaacaccattttctgctctgtacaatggcttcatatataccctgccttaaaaccacagccttttaagagttaggaatgcaaaatatatgcggccttggaacaaygaaatctgtgaagaagcgtaaaatctactattcgagttgaattcagacttcagggaataagaaaaaaaaaaaagaagaaacaaagatagatacagccttataaccaaatgaagaaacgtaaaaatccttttgtgttacacaaacatctgtatcatctgtatccatgtgtaccaccacctctactctggttccaagaatttctctaaggtttcttctcccactcacttccaagccagggctggtcccagtcctgccacaggctcactggttgactgcaaagcaaactctcggttccacactctgaccttccgagcccctgtgcgggagtggagtcaaacacacataca

SEQ ID NO: 240716 - DNA, 594 bp, Homo sapiens
ttcttcttagtgggctacaattaaggttctttcagggctgtattccttctggaggtgtaggagacaatacttcctcttgcctccagctcctagaggccacctgtgttccttggctcatagtcccttcctccatcttggaagactctcagactagagctgtcattgtcacatctgcttctctgcccttgaccctcctgtatcccccatataaggacccttgtgattacaytggccccacccaggccatacaggatactctccccatctcagattccttcatttaatcacatccacagaatcccttttggcatgaaagttaatatagtcacaggtcccagggattaagatgtggacacctttggaggaccctttcacctgttcagtgcctccctctttgctaatacactccaagcctgacatgctctgactcatttgctcttcgtgggctgcccaggcttgcccatctgtcatctgtcatcacactttctgcatttgtgtgtggaagaggtgatgctttagtgtaaggcagtcactctatctagtctgtaaggtccttgagcatagggattcccctcacattctctgagcaaaagc

SEQ ID NO: 240717 - DNA, 411 bp, Homo sapiens
gtaagtatcctaagagaaagtgtagactatgcattgagagggtttgaaggaggacaaatttatatttagggagggggctcaagaagtcttcatgaagtagtgatatttaatttttatttatcatgcaaagaattgaatatctacgacctaccatttgctatgccrggtactgtggatttagtggtgtgcaaaatagatgtgaacccagctttcgtggcctagtggggaagatagactttaaacaaacaaaaaataaaaaattccagatggtttggactgaaaaaataaatatgtaattgcaaactgggacgattatggagcaaaaagattacagtgagtaagaagagggtctgatttagattgagtgatctgagaaagcctttctgagaaaaagacatttatgtaagatct

SEQ ID NO: 240718 - DNA, 381 bp, Homo sapiens
ttgcataggtattatttatttctaatttaatgcttgtgtggctgaagaatacactttatataattttaatctttttatacgtggcttatttcatggccaaccatatgatttcttatcaatgttccatgtgcacttgaaaataatatrtattgagtgtaattcttaagttttaatttgttcaagtagatggctagaactgttcaaatcttctgttatgtgcacatgcatttaggattattatgtcttcttgatgagttgatacttttatcattttttaatattcctctttatcttcatttatcttctttctctcaaagtcttcttcacctgatgacaataaagctgcatcaaatttattatgcttacttgttgcatgtatgt

SEQ ID NO: 240719 - DNA, 450 bp, Homo sapiens
acatagatatgtttccagaagttttctgagaatagaatccaacagagaagtttatcccaaagcaaagctatcagttcatatattgttccagtttccatgctatattcactaaatatccatctctaaggcaatactttgctccttgctggtaggatactaggagacctgaatagatgagtagaaacaagttgtttataatgatatattatatgttgaatacagctatgtgcaaataattttaatttgtaaaagttactattttgggaattaataactgtagtttatggattctaagtatgataaattatactaatagtcctggtaaatttttgtggtaggttttaattcccagataaaagaggatattgaatagagtgaaacctaccctggtaaatccasaaataagtcaacaaaataaataaaaagaagattagaattagaatataaaca

SEQ ID NO: 240720 - DNA, 527 bp, Homo sapiens
cattcttcccttcctggacctacttactctacttctttattttcctgggaacatttcttaaaaaaatcttttacttatgaatccatatctgaaggtctacatttgagaaagccaaactatgacaagaatgtttgttgtctataggacccaaggctaagaaatcgcttaggccttgataggaactaagactacaactagtagatgataataataatttcagggaaataacctcactttgttttargcctctgtttttctctcgataactgcttcctttttccttctctactttcaaacctatttgacagaatatgtaattctacagctcgcaagtaaatattttaatttctacatttgggtggtctttagatcaaattcaaaagagaaagcatatgattgcctcaatgtgatagaacagctaatcagacatggccagagagacagtgttctataataccaacaaaccagctgggttaagcagagagactctaaagcaaaagagaataattggtagctggccaggtcac

SEQ ID NO: 240721 - DNA, 649 bp, Homo sapiens
cagcgggaatctccatttttgggtggacccagtttctaatggccggcatttgcatatcaaaggttgctggccttgctctaagagcctgggctttacaacaaactttattggagatgctttaaaaaatgaaaacttcccaaggaccccttttcctacaacattcccccctgtggagatgccacactaactgctgttagggagttttgagtgacgactccttctggctacttcctgctgaaaaggggcattgaatggggaacagctgctagggctccttttggggtcaawctaatggtcctcagaagaatggcatgtccatgtgtggttcaatttacaccaccatttgaagtttgattgcttctaggcaagaagaaacaatttgagttatagtattgagtatacagggtccaaatatcaatacaagacttataagcaagaaagtgcttaataatgggggttaaccaattccataaagaagacctgagttcaacctatgcaaatcaataaacataacccatcacataaacagaacccatgacaaaaaccacatgattatctcaatagatgcagaaaaggcctttgacaaaattcaacatcccttcatgctaaaaactctcaataaactaggtatcaatggaacatatctcaa

SEQ ID NO: 240722 - DNA, 570 bp, Homo sapiens
tatgagcatagcatatggcttcattcctatgtgtctttgacaggtcttttttcttcctgaaatgtcttcactcctgtatgtcctcatccatttttctgtacagcttaagtggtatttatggccagggtgaatttatattttaaactgggatacttttgagagtaaaagtaagcacttgttaattattactccagaaccacagatgtaaactgaaattattttaggtaaatagtaacaaatgttatcctartctcagctaaaattttatactctgcctactttagaaatctataacacaatcagtaacacatcataactccccttttgtttcgacatggtcatggtcatttgcaaatagcagctgagaggctgacaagctgtgcagaactctagcagacttacagggctgaggagattaaaattaaatttctgggacttccaatataaagggacctggaaagaccccaggtttttgtctggagcctcaaaaaagttgcacaatagaaagagaagtgaaaagaaaatagaagagcatctataacaactccaacccagattcaaacagcaaaa

SEQ ID NO: 240723 - DNA, 597 bp, Homo sapiens
tcaaaataattttgaatagtatattcgagaaaataacaygaaaaatggatcttttcagcagagacatgaaatctgtaagaaggaatcaaattgaattttggaactgaaacatacattatctgaaattaacaatttagtagattgtttctattaattatgcaaaggaaaacaggattaataaacaggaagacaagtcaatataaaatgaccatattgaagcactgagaggagatatggaaaatatctaaagagtcatatgaaacaaaaataatatgtaaatagatactgaccaagaattttcaaacttatcaaaagtgttcaagatactccatgaattccaagcaagagtatcggcacctaggagaaactacatctaggcacttcatagtcaaattgattctttttaaaagtcaaagaggaaattttaaaaatactggagtaaaaagttacattaaaggaagcaacagtgatactgatgaatcccttttccacagaaatgaagtgagtctgatcgttgtagtataaaatctttgaattatggaaagagattatgtgccaacccataactcaatatccagggaaaatatacttcaaatg

SEQ ID NO: 240724 - DNA, 597 bp, Homo sapiens
tcaaaataattttgaatagtatattcgagaaaataacatgaaaaatggatcttttcagcagagacatgaaatctgtaagaaggaatcaaattgaattttggaactgaaacatacattatctgaaattaacaatttagtagattgtttctattaattatgcaaaggaaaacaggattaataaacaggaagacaagtcaatataaaatgaccatattgaagcactgagaggagatatggaaaatatctaaagagtcatatgaaacaaaaataatatgtaaatagatactgaccaagaattttcaaacttatcaaaagtgttcaagatactccatgaattccaagcaagagtatcggcacctaggagaaactacatctaggcacttcatagtcaaattgattctttttraaagtcaaagaggaaattttaaaaatactggagtaaaaagttacattaaaggaagcaacagtgatactgatgaatcccttttccacagaaatgaagtgagtctgatcgttgtagtataaaatctttgaattatggaaagagattatgtgccaacccataactcaatatccagggaaaatatacttcaaatg

SEQ ID NO: 240725 - DNA, 536 bp, Homo sapiens
actcatttaataaaaaaatgaaatgtttacataattaaattgataagagttgacagtaaagcagaaattctggaaatgctggtactaactattgtcagtaaactcatttctcttttgtctgaaagtatttcttacttaaatggcacatctgaaattcaatgtatgctgtgagttcctttagcactcacacttttagaataactaagatgaatagaggaaaatcatttctattaggttatcattcactccctcatccatttatcctgcagtcaataactcctctgtgccctgtatgattcgaggtactgggaatactgaggtaagtagtacaaaatccatgcccctgtggaacttatgctctagtcaagggaggaagagaactaatgaatgaactmataaacaactaaatgagatagtttcagatagttgtggatgcactgcataaaaagtaaggtggccatgtatattactgactttgattagaggggtcaaggtaggcgtctgatctttgatatgaaactgggataatgagaggg

SEQ ID NO: 240726 - DNA, 565 bp, Homo sapiens
gggtttttacaggctgaacttatcagactagatccaccyggctatccacctataatattataaaattataatattataattaatattataaggtgtggtggctcacgcctgtaatcccagcactttgggaggccgaggcgggcggatcacaaggtcagaaggctaacacggtgaaaccctgtctctactaaatatacaaaaaaaattagctggacatggtggcgggcgcctatagtcccagctactcgggagactgaggcaggacaatggtgtgaacccgggaggcggagcttacagtgagccgagatcgcgccactgcactccagcctgggcgacagagcgagactccatctcaaaaaaaataataataataataaggcacatatacttaatgtggagagcagaatttgcagcagtacatgctcgaagtagtatttacttgaaaaagcagagttttgaggagataacatggtttattagaatgcacactagactggaatttggaaacttagttttcatttcttcttttgccatctggctttatgagcttagataaatgacattc

SEQ ID NO: 240727 - DNA, 540 bp, Homo sapiens
gactagatccacctggctatccacctataatattataaaattataatattataattaatattataaggtgtggtggctcacgcctgtaatcccagcactttgggaggccgaggcgggcggatcacaaggtcagraggctaacacggtgaaaccctgtctctactaaatatacaaaaaaaattagctggacatggtggcgggcgcctatagtcccagctactcgggagactgaggcaggacaatggtgtgaacccgggaggcggagcttacagtgagccgagatcgcgccactgcactccagcctgggcgacagagcgagactccatctcaaaaaaaataataataataataaggcacatatacttaatgtggagagcagaatttgcagcagtacatgctcgaagtagtatttacttgaaaaagcagagttttgaggagataacatggtttattagaatgcacactagactggaatttggaaacttagttttcatttcttcttttgccatctggctttatgagcttagataaatgacattc

SEQ ID NO: 240728 - DNA, 540 bp, Homo sapiens
gactagatccacctggctatccacctataatattataaaattataatattataattaatattataaggtgtggtggctcacgcctgtaatcccagcactttgggaggccgaggcgggcggatcacaaggtcagaaggctaacacggtgaaaccctgtctctactaaatatacaaaaaaaattagctggacatggtggcgggcgcctatagtcccagctactcgggagactgaggcaggacaatggtgtgaacccgggaggcggagcttrcagtgagccgagatcgcgccactgcactccagcctgggcgacagagcgagactccatctcaaaaaaaataataataataataaggcacatatacttaatgtggagagcagaatttgcagcagtacatgctcgaagtagtatttacttgaaaaagcagagttttgaggagataacatggtttattagaatgcacactagactggaatttggaaacttagttttcatttcttcttttgccatctggctttatgagcttagataaatgacattc

SEQ ID NO: 240729 - DNA, 540 bp, Homo sapiens
gactagatccacctggctatccacctataatattataaaattataatattataattaatattataaggtgtggtggctcacgcctgtaatcccagcactttgggaggccgaggcgggcggatcacaaggtcagaaggctaacacggtgaaaccctgtctctactaaatatacaaaaaaaattagctggacatggtggcgggcgcctatagtcccagctactcgggagactgaggcaggacaatggtgtgaacccgggaggcggagcttacagtgagccgagatcgcgccactgcactccagcctgggcgacagagcragactccatctcaaaaaaaataataataataataaggcacatatacttaatgtggagagcagaatttgcagcagtacatgctcgaagtagtatttacttgaaaaagcagagttttgaggagataacatggtttattagaatgcacactagactggaatttggaaacttagttttcatttcttcttttgccatctggctttatgagcttagataaatgacattc

SEQ ID NO: 240730 - DNA, 210 bp, Homo sapiens
tctaaaatgggaagtttatctagttgatttctagggttcttttctaaatatccaataaattccactgaacaattatctctaaggaactcattttttttaatgccaagggaatyggctaaaatttatacaaaataatataaaaagtaaagaaaaatattggaatcatttttttgtacttatttttagctgatcctgtgatacctgtggatg

SEQ ID NO: 240731 - DNA, 542 bp, Homo sapiens
cactccccaatttttttttcttgtaagtacagttctaattaatctgcagtctcttgaatgaatatgcaagtaaatagcccaattgtaagccccttgaaatggataggataataccttgcatatacaaactaacattctcagtacagtaatgtactaagtcaatacttaataaatctttggtatttgggatatttcattagtaatgtgacatccagtgacccacacgatatttgaactaaaaggaaatcatgaatgcaatccttttgttttatgggcagagatgtaaagtgggaagaaaacagtatttaaaaggaaacctgccttaggtgttctgactccagtatatgactttgcaggtcctcatattgctctgagcttcagtcagttttctcatctgtaatatcagcatttttttttcttttttgagatgaagtctcactctgtcgcccaggctggagtgcagtggtgtggtgccatcttggctcactgcaacctctgcctcctgggttcaagygattctcatgcttcagcctctcaagtag

SEQ ID NO: 240732 - DNA, 668 bp, Homo sapiens
cattcagtggcattaagtacattcatattgttgtacaagccatcaccactgtccatctctagaaccttctcatcatcccaaactgaaactctatacttattaaacaataaccccctgtctctagtctctggaaaacacatatttgcattgtgtctctacagatttacttattctggatatttcataaacatggaattatatcatgtggccctttgcttctgacttctttcagtgttcatccccagtgtagcatctaccagtcttttttttaacaaatgaataacgttccgttgtatgtatatagcatagttagtcaatctagtgatgaacatctgggctccttccacctcttggctactgtgaatggtgctgctctgaacatggctgtawgtgttatttgtttagcatctgttttcagttcctttgagtgtacacctatgagcggaattgctgggtcatatggtaactctatgtttaactttttaagaaaccaccaacctattttaaaaagcagctgagacattttacattctcactagcaatgtatgaggattcaattttctccatgccttcacatttctttttttctgttgttattgttatagcaattctagtgggtttgcagtgctatcttatgtggttttgattttcatttccccaatgattgg

SEQ ID NO: 240733 - DNA, 573 bp, Homo sapiens
taaaagtgttcagaagagagagatttccaataaagttgctttttatttacttttagtaattatttgtcaaaatttgtaatatttgtgttgttttctaagtcacatcctactaatagtaacaatggtatcagaatagcttttttwaaaaaatgttttgaccattgaattagaatttaaatttaaataatgtttttgatgcagaaaagtatggtaggctaatgagtaaaataggctaaagcataaaatatgtaaaattaggataaacttctgtagggcaagaagcgtggaaatataagttcaaggagaaaatggaattatgcaaaatttgtgactattaaagaccagcctgttccagtattcttttaaaatgagtaagaatgaatttcactggacatataagatagttttatatggccatatttacacagtgttggaagttacattctttgcaactattcacattttggtgacagtttctatatgccaatctaaaaatgtgcaaaaggcttttacaaaattcttttagggtatatacaagtaaaaaaattgaaaactcctgttgtagctcaccct

SEQ ID NO: 240734 - DNA, 573 bp, Homo sapiens
taaaagtgttcagaagagagagatttccaataaagttgctttttatttacttttagtaattatttgtcaaaatttgtaatatttgtgttgttttctaagtcacatcctactaatagtaacaatggtatcagaatagcttttttaaaaaaatgttttgaccattgaattagaatttaaatttaaataatgtttttgatgcagaaaagtatggtaggctaatgagtaaaataggctaaagcataaaatatgtaaaattaggataaacttctgtagggcaagaagcgtggaaatataagttcaaggagaaaatggaattatgcaaaatttgtgactattaaagaccagcctgttccagtattcttttaaaatgagtaagaatgaatttcactggacatataagatagttttatatggccatatttacacagtgttggaagttacattctttgcaactattcacattttggtgacagttkctatatgccaatctaaaaatgtgcaaaaggcttttacaaaattcttttagggtatatacaagtaaaaaaattgaaaactcctgttgtagctcaccct

SEQ ID NO: 240735 - DNA, 600 bp, Homo sapiens
gtttgaacatgataaatttgaaccaacgtgagaaatgaaatttgctgtctgcttacttccaaagccaagaactgaagagtgattgaactgcactgactgcctgtcttaaaatacacaaagcaaatgctaccatgagtcagccaagatcaagccccgctccagaatgcagactgttcatcactgctccagaaaccagggaaagacakctgggacttcaggcactagggctagattgtatgtggagagttgaaaaactacagaatgtactcttacataatggctaaggttcctccaccgataaatgccaactttccagtggaccacgggaaattgtctattttgggccactccgtgggaggccatggagctcttactcatgttgtgaagaatcctggaaagtgcaaatctatggcagcatttgctccaatttgcaaccagttctctctttttggagggtggaggtggggatggggcaaaaatctctcaatggatatttgaaatcagatcacaaaaataaaaggcttatgatgctgccattcttagaaagttctattcaggttctggttagacgtaatcaaggaaatgatgatgaaacatttc

SEQ ID NO: 240736 - DNA, 574 bp, Homo sapiens
cacaaaacaaactcattgaggaaagtgttacctctatttttaaaatgctaggacttgaggccgggcttggtagctcatgcctgttatcccagcactttgggaggctgaggtgggcggatctcctgaggtcaggagtttgagaccagcctgaccaacatggcgaaaccctgtctctactaaaaatacaaaaattagctgggcatggtggcagatgcctgtaatcccagctactargggggctgaggcagggacaatcacttgaatccagaaggcagaggttgcagtgagcctagattgtgccattgcactcaagcctggacaacatagtgagactccatttcaaaaagaaaaaaaaattgccaagacttggattcagataagataaatgccttcctcaaatttctagccaagtaattatggagctggtgtacaaactcaggtgtgtccaacttcaacaccttcttaaccctttgctcctaatcagatttactccctctaatcacaggattctttacagattacatgaagtgaagttcccggcttcagctggaaaatctcagtctggggtggattt

SEQ ID NO: 240737 - DNA, 557 bp, Homo sapiens
ggaggcacaaaacctgaaagccctacttgctttctcagcaaggaggctggcagcctggggtaagttcccagccctgctyaccagctgcctggaaataaacttggtgttactagggggcatggtgagagtgagaccagccttttgggctgcatgggagctgcgtgaggactgcaactaactgctggctttcccccacttgcctggtgacttgcatgatgcagcagaggcagccataatctccctggaaacataaatccattggcctgagaataacaaccccatccctcacagcagctgcagcaagccctgaacaaagagagtctgagctcagacagacatgcttaaccctgcccacacctgatggtctttctctacctgccctggtagccaaagacaaaggacataatctcttgggagctctatgatcccacccaccacctgatcctttctatactactgcagctgatgctttcttgaaaacaccatctcctggctggagcccaaccaacacaaaactaattcaataaacaaatctacaaccaaggaccctcacagag

SEQ ID NO: 240738 - DNA, 557 bp, Homo sapiens
ggaggcacaaaacctgaaagccctacttgctttctcagcaaggaggctggcagcctggggtaagttcccagccctgcttaccagctgcctggaaataaacttggtgttactagggggcatggtgagagtgagaccagccttttgggctgcatgggagctgcgtgaggactgcaactaactgctggctttcccccacttgcctggtgacttgcatgatgcagcagaggcagccataatctccctggaaacataaatccattggcctgagaataacaaccccatccctcacagcagcygcagcaagccctgaacaaagagagtctgagctcagacagacatgcttaaccctgcccacacctgatggtctttctctacctgccctggtagccaaagacaaaggacataatctcttgggagctctatgatcccacccaccacctgatcctttctatactactgcagctgatgctttcttgaaaacaccatctcctggctggagcccaaccaacacaaaactaattcaataaacaaatctacaaccaaggaccctcacagag

SEQ ID NO: 240739 - DNA, 530 bp, Homo sapiens
aggtggtgctgagaggaaagtctgaaagagcacaaataggcaatctaaggtcataccttaaggaacaagagaagcaagaacaaaccaaacccaaacccagcagaagaaaataaataataaagatcagagcagaactaaataaaattgaaacaaaaaaaataccaaaggcaaatgaaacaaaaatctggttcttggaaaagataaataaaattgatagaccattagcaagattaaccaagaaaagaagagagaagatccaaataaatktaattagaaatgaaatgggagctattataactgatgccacagaaatacaaaagatgattcaagactactatgaacacctttatgcacataaactagaaaacctagaggagatggataaattcctggaaatatacaactctcctgtattaaaccaggaagaaatagaaactctgaacagacctataacaagcagcaatactgaaatggtaattttaaaaattgccaacaaaaaaaaagttcaggaccaggcagattcacagctg

SEQ ID NO: 240740 - DNA, 605 bp, Homo sapiens
gagctgccccctcacccaagtccactatgccaaggcaatcactggaaggcacactgcagagtacaaaggttctgtgggccagatgatccaacaatatgactgagggtgcccagggcaagctccagctcatgtcatcaccctcactgagccctgtgtatgtttaatcattgagggccaggaaattgatgtcctcctggacactggtgcagccttctcagtgttaatctcctrccccggacgactgtcttcaaggtccattaccatctgagggatcctgggacagcctgtaaccaggtgtttctcccacctcctcagttgtaattgggagactttgctcttttcacatgcctttcttgttatgcctgaaagtctcacacccttattagggagggacatattagccaaagctggagctattatctacatgaatatgggggacaagatacccatttgttgtcccctatttgaggagggaatcaaccctgaagtctgggcattgaaaggacaattttgaagggcaaaaaatgtccacccagtccaaatcaggctaaaagaccccaccacttttccttatcaaaggcaatatcccttaaggcctgaagctt

SEQ ID NO: 240741 - DNA, 605 bp, Homo sapiens
gagctgccccctcacccaagtccactatgccaaggcaatcactggaaggcacactgcagagtacaaaggttctgtgggccagatgatccaacaatatgactgagggtgcccagggcaagctccagctcatgtcatcaccctcactgagccctgtgtatgtttaatcattgagggccaggaaattgatgtcctcctggacactggtgcagccttctcagtgttaatctcctacccyggacgactgtcttcaaggtccattaccatctgagggatcctgggacagcctgtaaccaggtgtttctcccacctcctcagttgtaattgggagactttgctcttttcacatgcctttcttgttatgcctgaaagtctcacacccttattagggagggacatattagccaaagctggagctattatctacatgaatatgggggacaagatacccatttgttgtcccctatttgaggagggaatcaaccctgaagtctgggcattgaaaggacaattttgaagggcaaaaaatgtccacccagtccaaatcaggctaaaagaccccaccacttttccttatcaaaggcaatatcccttaaggcctgaagctt

SEQ ID NO: 240742 - DNA, 518 bp, Homo sapiens
gctgactatagtcaataataatgtatatttcaaaacaactgagggaataaatttcaaatgtttcctaacaaaaaataagtgaggtgatagatatcttaatcagcttgatttaattattccatattgtatacatatataaaaatatcacattgtgccccataaagttatataaaattatggtttgtcaatgaaacacaatactaattatgtttacatacataaatgtacatatatgcccacatgcacaaacacacacacacamaagagcacagtgaataaaagggggaaatgcttgcaaatgagttcagagagataggggccaggctgtatacaaccttcaagccactcccttatttaagttttgttcaatacaaaggcagcattggaatgttttgagcaaggaaattccatgatctgatttagttttaactagattgctatggctgttgtgtggcgagtggggcaagattagaaatagggaagttgtataggaggctatgttaacactagaaaaggag

SEQ ID NO: 240743 - DNA, 533 bp, Homo sapiens
tggcctggctttttctgaaaatgtagtcatctgtgttcacaaagaaatggtctgaaattggaatctatgtttaaaaggacagcagaacataaaagtttggaaaatttgcagcctgaccatgtggtagaaaagaaaacccctttttctgggagaaattgaaaccccattgactgcagaaatttgcgtgcataaataaagagaaacagaatgctaataaccaagacaatggtgrtgtcttgccctgacatgtctccagggcatttcagagatcttcatggcagcccctcccatcacaggcctgcaagcctaagatgaaaaaatggtttcctgggcagggcccagggccccactggtctgttcagacttgggacatagcaccctgcaaccgaaccactccatctccagtaatggctttaaaaggggtcaaggtacagctcaggccatggcttcaaagggtgcaagccccaagcctcagtggcttgaggtattagacctatgggtgtgcagaagacaagagctgagatttgggaacc

SEQ ID NO: 240744 - DNA, 594 bp, Homo sapiens
tggttcttagctctagctatctgtattcctctggctgaactctccctattcacacctctcccgctgtctgccagcatttctttccagccccacccccagcttctgggttcagcttttttcccttttctctgagtttgggaacaaccaggtctctaatgatcatagagcaactgggagaagagtgaacagcagaccctctcctcctctagtctcactacactcttccagctgtagaaaaaaagctccagagggggtaggaagcccatgagagggaactgctacaaatcctggctccgagaacgcatgaattacagcccagtggtccctgaaggcttctcgagagagcagttcaaagtccccagcctggctggaacaacagcagcctcaagactggctkgggcttggcgcagtagctctcgcctttaatcccagcactttgggaggtggaggcaggaggatcgcttgagggcaggagtttgagactagcctgagtgatacagtgagaccatcatctcaaaaaacaaaagactctggatgggatgaggcaacaaatcggtgactttccgccactccgtccccatccatctagaccac

SEQ ID NO: 240745 - DNA, 434 bp, Homo sapiens
ttgttattaaaaaaaataaaaagaaaagtgttcagacactgccacatgtccactggggaataaaattgcctcaattgacaacactgatctaagtgtttcctacaattttttttctagtgatttggtcttgagtttttcattctataggtcttatcaaagagcgagggacaaagctgccttcaagagaagaagcccaacccttggccccacttgccctgcctagcttaaggagccccaggaaacctctgctttttcaccttgaccactgcagtccatctggcaacccagacctggactagaagcaggaagaaaaggatcaygaggaggcacagcacctctaggaacgcacaactaggacttacagctggggctgggcttgcatctgcctgcctcctgccgcacagtgctcctaatgcagcaagatttttggaatt

SEQ ID NO: 240746 - DNA, 422 bp, Homo sapiens
tcttacatcttatcctctaataattaaaatacaggttccgaacttgtaggtataattctagcttatcccatgcttgtggggtggcaactaacatattattaccccatttctgggtacgaygtagcaatggatatatcctatgaaactacataaggatggacaaccagaatggtaaacggtatatcatatgaagaacaaatgaataaattgagaatatttaacttgtaaaatgggaaaacatgttagctactttagggctttgatgtgaaaggagtagtagaggtacagcttagctttagcaatcacattaagtgtaggttcaacataaagagctttaactgtctgctaacaatggctacttccttactctatcactagaaacactcaagaaaggaattagtatggactctttgtactaggaa

SEQ ID NO: 240747 - DNA, 580 bp, Homo sapiens
ggctttaaactggaacattgacttttccagcccactagacaacagctytgcagattttttttttttttgagacagtgtctcactctgttacccaggctggagtgcagtggcatgattttggctcactgcaacctccgcctcccacgttcaagtgattctcctgcctcagcctgccgagtagctgggactacaggcgcccaccaccatgcctggctaatttttgtattttctagtagagatggggtttcatcatgttggccaggcttatcttgaactcccaacctcaaaggatccgctcgcctcagcctcccaaagtgttgggactacaggcgtgagccactgcacccagccaagctctgcagattttggatttgccagcctccataattgtgtaagccaattccttataataaatacacatatatttatatatctatatctccctatatgtttatttctatatatcttttacttataatatttaccaatctctcttattggttctgtttccctggagaactctaatatagaacaataaataccattataccaaaactgcagctaaaacttcagagaattc

SEQ ID NO: 240748 - DNA, 282 bp, Homo sapiens
gcctcagcctcccaaagtgttgggactacaggcgtgagccactgcacccagccaagctctgcagattttggatttgccagcctccataattgtgtaagccaattccttataataaatacacatatatttatatatctatatctccctatatgtttatttctatatatcttttacttataatatttaccaatctctcttattggttctgtttccctggagaactctaatatasaacaataaataccattataccaaaactgcagctaaaacttcagagaattc

SEQ ID NO: 240749 - DNA, 604 bp, Homo sapiens
tgcaaggtggcaagcctggctgggggaggggtgtccaccattgctgaggcttgagtaagtaaacaaagcagccaggaagctcgaactgggtggaacccaccatagctcaacaaggcccacctgcctctgtagaccccacctccgggggcagggcatagctgaacaaaaggcagcagcaacttctgcagacttaaaagtccctgtctgacagctctgaagagagcagtggttctcccagcacagtgtttgagctctgagaatggacggactgctgcctcaagtgggtccctgaaccccatgtagtgtaacttggagacacctcccagtaggggccaactgacatttcatacagcctggttcacctctgagattgaagcttccagaggaaggatcaggcagcaatatttgctgttctgcagcctctgctggtgaaacccaggcaaacagggtctkgagtggacctccagcaaactccaacagacctgcagctgaggaacttgactgttagaaagaaaactaacaaacagaaaataatagcatcaacatcaacaagaaggacatccacaccataatcccatctgtaggtcacctatgtcaaagacca

SEQ ID NO: 240750 - DNA, 589 bp, Homo sapiens
ctgtttcagtgtattgatatgttatggtacagcaggcaaatgatcctgstggtcccataacacaggcatactgcttttcttgtggtaacgggaacaagtgcaacagtatgacttttccttcagtgaggtctcagcacatttctgaaaccaggacccctgaaaactatactgattcagcagactcccgaatctttcagtatttaccttttacctcttggagtggaatgcatgtgtcttaccaagttctccatcatgctaaccatcccttgctgatgtggcccaattagcatgaagtcattggcttaaaggatctatgtgattttctgcagtatttgcagatggttcagatctcttcagactactttataacaaagggtcagagatttagcatagccccatggaaaaactgaaaatgtgtgctaattttcatccttgagaacatgaactgattttgatcctctttgattgggatatacaagaaagaatttgccaaattggaggccacatattaatctcttctgacagacatttcatatctagcacaatggctgtagtttgagctatcacttaaatgaatttgtggtagtct

SEQ ID NO: 240751 - DNA, 582 bp, Homo sapiens
aagcaaatgtcagtgaattaattttcaactttcacaactatgtagtagccccagcatggctgttcttgtctattatgawcccagacagctgttcctgatcttttttctttccattccctacctactttcctagccattgcaaacttttggagacttctatgctaatgtagccatttatttcatgtcctatgccttgtgaagctctaggctgtggccctttctctggagagcctgctgaaacctctccctcctctttccaggcaaattggctaggaatcccacccctcctgacccaggctataggtagagccagttggagtcaggcttctggtgaggttgcaaggttacttacaatgcctgagtcatcaagatctaaaagcttggcaactcttgccctcagactggaaaccctagcctctagtaatattctttaaatcaaaaacatcttccacatgcacactcaaactttatgctcattaccacaacaaagtctgatttttgatcaggtcaatattgtcttataactcaggtaaaatttgtactgttcaaaaaaatggactgaaataacaattgaagaatgat

SEQ ID NO: 240752 - DNA, 385 bp, Homo sapiens
catatcctgtttagtactgagttttaggagagcaggtgatatttcctctactcctctgaattccccacagcactaaatctattgttttggacagaatagtcactaagcaaatatgtattgattgaacaacaaataatacatcacaacctgagataaaccatcaatttccactgtctcattaacatattctacagagtaaaattagtaataaccttgggtccttgagcagttacgataacaaagcacaatactccaatataggcaggaaaacttgaagactcaatgtatatttgataaaatatttgaayagcagagctggaatttccccttgaaggtcatcttacatagcagtctcctcctttcccacatttttactgatgggaaa

SEQ ID NO: 240753 - DNA, 570 bp, Homo sapiens
ctatactgaaattgcataccaaaactatgatagtaacagcagcaacagcaacaacaaaaaacaccagtacctactttgtacattatctgaggagaataattgtgggtaattaggcttctgatggcattttactaatacatatttttgtgccttgcatattttaaagatccattcttttttctttgctatgtattttctttaagtatattatagcaatgtagttagattttttttagtgctgtttattactccactattagttttagaggtaatacatctcttgtggatgttagaaggaaaaatctcattwtgaaaaaaatagaagtaaatgattttgtagtctttaacacatttaaatgttgtataaataaatcagatatattgtgaaactaacacgtcacggttctctcaaaatttgttaacatgtcatatgtgaagaccaagaaagacatagttttagaactcacctatctacattactcatggctttaagaaagtgtctgaaatgagagttgctctatttaatttggcttgagatgattccagtggtctttctgtttgttttttcag

SEQ ID NO: 240754 - DNA, 420 bp, Homo sapiens
ccttgttactccagcagaaaagcatgtctattattaccaatagaattagtgtgttcagaaaaagaaaaggcttaatttacagccttttgaagttttagggaaaattccttttttaaagcatgcaggaggaaagacatgacatcacagccttaagtgggtaaaaggttacatggctgatactttttaagtgattgaattattagcatgggtaataatttgtggaaggtsaagaggtgccactagtttcagtgtgttaatcttccccacttaaagtgagaaataaatacctcataagaatatatatggggatatagtgtctttcctttctaagacacttgcttgagtcagcagtggttgcgtgtggtcacctttggattagtcttcggattcagagaaatgagtgggtggtttcagtgcagt

SEQ ID NO: 240755 - DNA, 500 bp, Homo sapiens
gcatttctaataagctcccaggtgatgctaaggttgctggtctgtaagataatgtctgtattagggagttttggttattaaaatgtttggtctagaaaatgagagtttacatgacagtgacttccgctgttaaaaatcgaggtttgttttaaacccaaacaaccatagttgaaatatagaaataacatcactttcagttgtataactcattttattaaaaaaggaactaagctaccttgaaactttactgaacatttttatattttgtggcacttctaatcctattttatatgccttctattgaccttttatstggtgagttgctttgaaaaatccctgagtaacaatgcagcctgaccctttctccctaatatttccctctattccctattgatctgtcatactttcattctatcatacacagaaacagtgtttttaacagcattttaatacaaatgttttattatttaaagtaacactataaagtcatgtaatgcaaa

SEQ ID NO: 240756 - DNA, 424 bp, Homo sapiens
catttgtcagaaacaaccacttacatggtctcataattgaatkatatgtatttttaaaattgtgtttcacattctcaaaccttcagaatacactgaatttttagtatataaaaattttcataagatattctttcctggccaaagaccacaatagaggtcttgattgtgtggtttcctcctcctttttcccttcacgaacagaggttttcctatcttggcagctgtttcctacaaagcagtcatcagtccctgatttcttccttcctcctccttcccacaaacaagggctctttgaatagtggatgactgaagacagactgatcttggatcactttaagaaagtggaaacgtgtgcaagagttgagcatgtgggcaagctgcctgtaggcactagctcattcaaatcaaacaatgaaaacttgga

SEQ ID NO: 240757 - DNA, 578 bp, Homo sapiens
ggttttcctatcttggcagctgtttcctacaaagcagtcatcagtccctgatttcttccttcctcctccttcccacaaacaagggctctttgaatagtggatgactgaagacagactgatcttggatcactttaagaaagtggaaacgtgtgcaagagttgagcatgtgggcaagctgcctgtaggcactagctcattcaaatcaaacaatgaaaacttggacagtaaaaattctttgcttggaatctagagtggtccaaaggctgacttaattttacttgcagcacttcatccacgcgtttacattattctgattgcttgatcagatcatcgaacagactgtaagaatataagaaattgttcattgatggccttttaaatgtgacaagccatgagattatctgactttttaaaatgctttatrtagaataactttcaggtttaaggcaggcacattgctacagcagttgtaaactgcaggttcacttttggttttggttacctttgaatagtctatgggagctcagagtgaaaaatgtacagagccagccagctagttttgcagggatgcgtgccat

SEQ ID NO: 240758 - DNA, 501 bp, Homo sapiens
ataaaaggaaaaagttctagtgttctatggtattgtaggatgactatagttaacaataatgtattacatagtttcaaatatctagaagaaggatcttgaatgttcccagcacaaagaaatgataaatgtttgraatgaaggatatgctaattaccctgatctgatcactatactttgtatgtatcaaaacatcactgtaggctgaggtggacggattgcttcagcccaggaatttgagaccagcctgggcaacatggtgaaactccatctctattaaaactgcaaaaattagccaggtgtggtgacacgtgcatgtagtcccaactacttagtcccaactactccagaggctgaggtaggaggatggcttaagcctgggaggcagaggttgcaatgggccaagatcatgccactgcactccagcctgggggatagagccagaccttgtgctgaaaacaaacaaacaaataaacaaacaatcactatataccccataaatat

SEQ ID NO: 240759 - DNA, 410 bp, Homo sapiens
acaccttagcccttttttcatagcatgctatttggatagcataagawtcttccaaatgatcaactcttggtttctttttccttaacagtgcatttctcaatgtatctctttcttctctcattttactgtcagcagcaaagagaaatctggctgcacctttcatactttgcctggaaatctcctaatccaaataaccaagttcttttacaagttctacttttcaccgaacagtagagcataattcagccaagttttctgccactctatgacaaggattgccttttctctagtggccaagaatatgttccccatttatatctgggacttcaccagaagcacctttattgctcatatttctagaaacattcttttagtggtaatatatatatgtgccttaacacaatagaagc

SEQ ID NO: 240760 - DNA, 410 bp, Homo sapiens
acaccttagcccttttttcatagcatgctatttggatagcataagaatcttccaaatgatcaactcttggtttctttttccttaacagtgcatttctcaatgtatctctttcttctctcattttactgtcagcagcaaagagaaatctggctgcacctttcatactttgcctggaaatctcctaatccaaataaccaagttcttttacaagttctacttttcaccgaacagtagagcataattcagccaagttttctgccactytatgacaaggattgccttttctctagtggccaagaatatgttccccatttatatctgggacttcaccagaagcacctttattgctcatatttctagaaacattcttttagtggtaatatatatatgtgccttaacacaatagaagc

SEQ ID NO: 240761 - DNA, 639 bp, Homo sapiens
gtgctgttacagcatggagctgagccaaccatccgaaatacagatggaaggacagcattggatttagcagatccatctgccaaagcagtgcttactggtaagtctgtatactctggttattccaggaagcctgtaaagaacaaccttgccaggtaggaaatttgcctcctatgattaatgacttcagctagatttttaaaatagtgtcagttcagtagctatccttttctacgtctagatagctgacatttkattctcctctaagaaaaataaagctttctttttattttctaattgctgtttaagtatgtcattgttgccttattgggggtgagggtgatagataattgtatgttgctttagtatattcaggacattttttaaatacccctgagtttttcagataacttatgcctgccctttacatgcaggttgagtatttctaacccaaacttcaaaacacttctggtcttaagcatttcagataagggatattcaagctgtactattttttttaatgtattttaattttgatggaatgctttcaaaaaacactggccattccgttaacttttcagaagaggattctaggcacactcatttcagtaccatgctagttgtactctgctgtaacatatt

SEQ ID NO: 240762 - DNA, 613 bp, Homo sapiens
tctgtcgcccaggctggagtgcagtggcacagtcacagcttactgcagcctcaacctatccaggctcaggtgatcctccaacctcagtctcctaagtagctgggattgcaggcgtgcctcaccacacccagccaatttttgtattttttgtagagagagggtttcaccatgttccccaggctagtctctaactcttgggctcaagcgatccacccacctcagcctcccaaagtgctgggattacagacatgagccaatacacccggacatttttaggtttggaacaaagttgtagatacattttgtttctctgttataaaaataacatactcattttaggaaatttgaagggaaaaagggaaaggtcaccaataacctatgacscaagataaactttgttaatattttggtatattttcttttgggctttccttttcctgagcatattgattttatatagttgaggttgcctttcattatataaaatagaatctttttttttaatcccatagcaaaggtatttcatgtttgctcttcatgcaaatatttttaaactacacaatattctgttaatgaactattttccatttattggaaatttgtttccaaattt

SEQ ID NO: 240763 - DNA, 567 bp, Homo sapiens
ttacaggcaacctcctatttaatgatacaatctaaatgattcctgggcaatagtccttaattgaatcataaaaattgaatttatttcctatgagtataaggctaggaactagggtactgaaaacccatttcataccacaaacaacaaagacaaaaatttaaccttgaaagtaaaagatgacaaacccaaatacatactttaagaaatatccagtggcaggaatacattcctgccaatattagaacatggcatagtccatgagacaggatgaactaccttgatggtaarattcctagagaataagaaggtattttccaacctatttcacacactgggttttggatttcttggcttcactccatcccttagaggttctatgaaatttcaactacatatagaaccttctaccaccccagtcatcccttgcccctatactggggtgttacttcatttaacaggacccaagagtatgtggtgtgatgatgtgactcagtcaatgggcctcccagtacagagtgtcactccttccacactctctctggttgtcactgaagatttgaaaaggca

SEQ ID NO: 240764 - DNA, 553 bp, Homo sapiens
tatccagaaatcgattgattagataatgcacattcagcaactgcaaagtccatagaaggcttaaatcaccaagtgaaaaccagtaaagaggtaccctaagaacagagtgcatgaggtgggaatgactaaacatgtgctgagacaaactcacacatcaatggtacggcttatgctattctgtaataactatgttgctgtcattataggagatgggctcactaggcatccatctctacctttatttcctaggcttctagaagctakaaatgctaactaatcactcacccatctttcttggaactgatgatagctaaataaatagttttgtctgaataagacactgggaaagtatttcctgataaataaggcagatgtaactagcactaccccttccctagatcatagataaaaagtctgcaacagcagcagccatcttgcaaccatgaggcaccaaaccaatatgcagaggatgaattgatagaaggagcctggcaatttgatggtatcatggagtttttacacctaccctgaacttcctacattcagatttttt

SEQ ID NO: 240765 - DNA, 642 bp, Homo sapiens
gaactgtgcacctgcagatagcggggcaactctctttgtgacctctaggcacaggagcgccacctagtgaggaaatcccacttcaaaactttccaagcaaaaccayccctactttattcatttcacttttccttgaaaaataattcttttaagctcacacaaacatgcttataattttaaatattttaataaagaatcctaacttcagagtaaaaatactagagctagtcaaatacattgtgaatcaggaaattcactttgtattactaacaatttctttcaaatttcttttcacccatgtgtattttcaaaaatgctgatagggtattttgaaatataaagaaaaccttcaaaactctggaagaaaataaaagaggcatggaagaggggttgggaatagagtggagagaaacagaaacaagacttcattatatgtcatatattgcttgtttatttttgaactgtgtgaatgtactgctaataaaaaaattaagttaaaacagagaagacagcacgtattcatgttgcaagtagtcattccatttcagcaaaaacaatatcaccagtcacattaaatttatttgacagtttgcaaagaaaatgcatccttcccatgagattcaagaattatctccaattact

SEQ ID NO: 240766 - DNA, 642 bp, Homo sapiens
gaactgtgcacctgcagatagcggggcaactctctttgtgacctctaggcacaggagcgccacctagtgaggaaatcccacttcaaaactttccaagcaaaaccacccctactttattcatttcayttttccttgaaaaataattcttttaagctcacacaaacatgcttataattttaaatattttaataaagaatcctaacttcagagtaaaaatactagagctagtcaaatacattgtgaatcaggaaattcactttgtattactaacaatttctttcaaatttcttttcacccatgtgtattttcaaaaatgctgatagggtattttgaaatataaagaaaaccttcaaaactctggaagaaaataaaagaggcatggaagaggggttgggaatagagtggagagaaacagaaacaagacttcattatatgtcatatattgcttgtttatttttgaactgtgtgaatgtactgctaataaaaaaattaagttaaaacagagaagacagcacgtattcatgttgcaagtagtcattccatttcagcaaaaacaatatcaccagtcacattaaatttatttgacagtttgcaaagaaaatgcatccttcccatgagattcaagaattatctccaattact

SEQ ID NO: 240767 - DNA, 534 bp, Homo sapiens
tctgacacaagcagatatctcagctattgatttttttaaaaaaatacttaagtcaatggtactcaacttccttggacaagctctgtcaagtgttttacctaattttacccttggacatactaactaaaaaaaaaacaatggatgttaaaagttacaaagcgaagttcaaaggacatgtctttcaggttgcccacaactgctgaaggcaggctcccatttatcttctgctacttagaacttgtgcaaaatgtggcttattgtcatgacaaagacacaaactcagaaactgtcaggccaggccttgtcagcgttcctgagatgccaggccacccgtcagtgtgtctgggaggggcagaccacagtcatgccttccagcacacctcacaaggtttgataatttgctttgaggttattttataaaaagccaaactgtctacttaaaaaatgtgaagatgaacgtgttgttttgaagatttttttttgcctctatttgcrgttgaattttttctgtccagagatcattttacgattagc

SEQ ID NO: 240768 - DNA, 596 bp, Homo sapiens
aatgtgaggtacaattgcatttatcatgctcttcgttgcctgtgtactttgtttttttttgtttgttttgtttttgcttttaaacttgaatttttgttttatagatcctgtgtgatttatgytttaaagaggttctgttttgatatgtttccaggatttgtttcaagatttagagctccttttagcagttcttgtagaagtggcttgataatggtgaattctctcagcatctgtctgaaaatgattgtatctttccttcacataggatgctggatacaatattcttggctgacaatggttttgtttgaggaggttgaagaggggccccaatcccttctagcttgtagggtttctgctgagacatctgttaatctgataggttccactttacaggttacctagtgcttctgtctcacagctcttaagattgtttccttcatcttaactttggataacctgatgacaatgtgcctaggcgaggatctttttgagaagaatttcccaggtgttttttgtgcttcttgtatttgcatttctcagtctgtggcaaggccagggaaggattccttgattattccctgaaatatgttttccaa

SEQ ID NO: 240769 - DNA, 556 bp, Homo sapiens
caagatcttagtttccaccctaccctagccgctggttccctccaatgtttgctgtgtgtctattatgtgccagggactgcactcagccctagagatgtaaagaaggcgagctgcataatccctgccctcatgggacttaagagtctcctgagacaaaccaacagcacaacgctcacccatcaccttggttataccttggcccttagagcctgaatttcttctgcaaagaactaggacaacccaccttgtrgctccaacttgctctttcgccacttctgtcatttccttacccctggaatatctgcttttatttttttaaaaaactcttatgaagacgttcagttctttatattctctcaggctgtcagcatcgcttgggctttccttgcccagcttgggacccttggacagctctttaaatgttactaaatccggaactcctctaattctgaccctaacccattggattccttctcctcccccaggctgctggacactccggaaatggcaacttgcttcattacaaatgaatacttgatctcagctgggctctgaa

SEQ ID NO: 240770 - DNA, 272 bp, Homo sapiens
cgccactaatttaagaatgtcatctcctgtcttctagttcgctttcattttatataaccatattgataacagcgactccaggaacaagaatttattgagcaatcagtgtcttttttgagccccagggtaaccacaaaaacagtgaatatagatggtaaaattaactcyctttaattgatgctggaactgaggatcaagaaatacacatattcttacaccccagaaatggctagaaaccagttgactcctaggcctttgctctttctcttcat

SEQ ID NO: 240771 - DNA, 620 bp, Homo sapiens
tcgggtgatgggtgcaccaaaatctcacaaatcaccactaaagaacttatttaaccaaatacctgtaacccaataacttatggaaaaataaattaattaattgtttttaaaaaagaaagaactggagtgaaaaatgaaggcagtgctggagtacagagaagtaattaccaaagatcacaacagagaagtgttaatagctgcagacaacacattcgatatcaattcctaatggcagacactgtgggttcctgtgtggtttcttttacgctgaattatggcactgaagcaaactgttaatcacaaaaggtggagatgaagccttcttgatgctgacctatagctcttwttcagtcatctttggcaaatgctgttccagggcatcacaagctctactcatggggttgaaagtgtttctcttatactcattttagttcatgaggagacagctttcttccaaatccatttatcctgattgatttttaaggaatcaggtttcaggttccaggcaaagcaaattcaggataaataaaatagaaacaccgataagataggacacttctatttgcttgagtaagtatccattgcctctatatatatatatatatatatatatatatata

SEQ ID NO: 240772 - DNA, 492 bp, Homo sapiens
gagaattcagcttacaataaagttgaattggggaaagtctatacataattttgagggtagtccaagcaaacggcacagacatgacatggtcttgtgtagggagtaattagaggtttgactttacagccccagagagtgtgtttataggtgatggatgtatggaagattggggtggggtgatggtgtgggcagtggccagcattgaggctcaaggtgcaggaatatgcctgttgttaagaaccagggaagccttgctaaggagttactggaggctttcaaacagagaagtgacatgaacaaattcctctagggagaaaattgtaacaaccatatagagaaagggagaarggattgaagacagtgagagctatgacaggagtcaattagaaagattttatggtaggtcacaccgaaaaaaaagaaaaaggtaaggacatgtgaagtgaaatataaaggatttattgacttaggtaaaggagttaagagaaggcg

SEQ ID NO: 240773 - DNA, 470 bp, Homo sapiens
gagttagactacttaagggagatcttagttcaggctttatytgtcaggaaacttaacacatttctcacgataactagtatcttgtcagtctcatgtgaaattggttaaaaaatgtagaggctactgttgttggaagaggttcacagtttacttttatataggccacatggagatcatgaaaattaggagacatttgttgctaaacttcttattgggtctgagatgatatagtaggtacctttataatcccattcacagggggataaatatttaaagttgtgggttatgccatagagtagtattaatctatgtttgtacaaaatagtggctgtggatttcctaagttttgatttgaaatttttactggtgatcctgagaaccaaatgtttaacttgcatcttgggaatgatttaattgctacctatggaaaggcagtgaagttaagtatattaaaataacatcacccatac

SEQ ID NO: 240774 - DNA, 470 bp, Homo sapiens
gagttagactacttaagggagatcttagttcaggctttatttgtcaggaaacttaacacatttctcasgataactagtatcttgtcagtctcatgtgaaattggttaaaaaatgtagaggctactgttgttggaagaggttcacagtttacttttatataggccacatggagatcatgaaaattaggagacatttgttgctaaacttcttattgggtctgagatgatatagtaggtacctttataatcccattcacagggggataaatatttaaagttgtgggttatgccatagagtagtattaatctatgtttgtacaaaatagtggctgtggatttcctaagttttgatttgaaatttttactggtgatcctgagaaccaaatgtttaacttgcatcttgggaatgatttaattgctacctatggaaaggcagtgaagttaagtatattaaaataacatcacccatac

SEQ ID NO: 240775 - DNA, 432 bp, Homo sapiens
cagggtgattttttttttttttgagacagggtctcactctgttgcccaggctggagtgctgtggcatgatcttagctcactacagccttgacctcctggcttaagtgatcctcctgcctcagcctcctgagtagccagtgcttaccaggtgtgtgccactaggcctggccaatatttttgtttatttatttttgtacagataggatcttgctatgttgcccaggctggtcttgaactcctggcctcaagcagtcctcccattttggcytcccaaagtgctgggattataagtgtgcgccaccacacctggccagcatggtcttttagaaatagcaatctgctttcatttccttgctcaaaacacgacagtaatttcccattatccttaggatgaagactataagtccctgccattgcctaccagggcctgca

SEQ ID NO: 240776 - DNA, 432 bp, Homo sapiens
cagggtgattttttttttttttgagacagggtctcactctgttgcccaggctggagtgctgtggcatgatcttagctcactacagccttgacctcctggcttaagtgatcctcctgcctcagcctcctgagtagccagtgcttaccaggtgtgtgccactaggcctggccaatatttttgtttatttatttttgtacagataggatcttgctatgttgcccaggctggtcttgaactcctggcctcaagcagtcctcccattttggcctcccaaagtgmtgggattataagtgtgcgccaccacacctggccagcatggtcttttagaaatagcaatctgctttcatttccttgctcaaaacacgacagtaatttcccattatccttaggatgaagactataagtccctgccattgcctaccagggcctgca

SEQ ID NO: 240777 - DNA, 573 bp, Homo sapiens
agcagctggccaggcgcggtggctcacgcctgtaattccaacactttgggagactgaggcaggcagatcacctgaggtcaagagttcaagatcagcctgamcaacatggaaaaaccctgtctctactaaaaatacaaaaattagccgggcgtgatggtgcacacctgtaatcccagctactcgggaggctgaggcaggaaaatcgcttgaacccgggaggcggaggttgtggtgagtcaagatcgcaccattgccctccagcctgggcaacaagagcaaaactccgtctcaaaaacaaaacaaaacaaaacaaaaaacaacccaaaaaacaaaagatagtagcttatgttcacggcaagcacctctcatcacaatccagttccaagaaaaaatgttagtgttttctacattggctgatgccccgtctgaaatcagcacattccatggaggaaggcgtccgctttgctgcatcgtctatcccagggtttaatgttggtaaatgagtaactctagcatctgtacaaggctccctaagactcctgcagcagtcgaccaagcccagggacataattg

SEQ ID NO: 240778 - DNA, 573 bp, Homo sapiens
agcagctggccaggcgcggtggctcacgcctgtaattccaacactttgggagactgaggcaggcagatcacctgaggtcaagagttcaagatcagcctgaacaacatggaaaaaccctgtctctactaaaaatacaaaaattagccgggcgtgatggtgcacacctgtaatcccagctactcgggaggctgaggcaggaaaatcgcttgaacccgggaggcggaggttgtggtgagtcaagatcgcaccattgccctccagcctgggcaacaagagcaaaactccgtctcaaaaacaaaacaaaacaaaacaaaaaacaacccaaaaaacaaaagatagtagcttatgttcacggcaagcacctctcatcacaatccagttccaagaaaaaatgttagtgttttctacattggctgatgccccrtctgaaatcagcacattccatggaggaaggcgtccgctttgctgcatcgtctatcccagggtttaatgttggtaaatgagtaactctagcatctgtacaaggctccctaagactcctgcagcagtcgaccaagcccagggacataattg

SEQ ID NO: 240779 - DNA, 575 bp, Homo sapiens
atgtaggtaggcaaggtactaacctcatttttcaaataaagaaaccaaaattgagagaaattatgacttgcatggttccatgatctttccatctcatcacacaatctgatttgcttcagacacctaatggttttaaatactaattaaaaaacatatgaaatgctggttcttcagaattgtctttggaatgaagtactaattcacctgcttactgcatcttctgacctctccaaacctctcaccatccacattgtgttttctcaaygattcaacctaacagggttcttatattgctccttttgatcagttgtggcagtatcagaaacagggatatgaaggtcctgggtccatgagacttgccattaggggctgatctgtgtctcttgtttctctacaataacttgattgctgttgttggcagcacttacctatagaagagctcctaatgaaacaggctggctggcttcctgttgtgatctgctctagaggagaacagaagcccctactcaagccctagcttacctaactctcagcaaatcagtaacaaaagacccaaggagttattaacagcaagt

SEQ ID NO: 240780 - DNA, 557 bp, Homo sapiens
cagactccggcaaatacctcaggaatgatatcaggtgctagttactgcatcaaactaagttttgtttttytgtttctcagctctcaattatttatatgcataatcactaagtaaacaggtataaaaatttcatgtacattagtcagaagcaatgtttaaaaaaatcaataaagccaaaatatattaggcagtcaatgccttttttccccctaaagaattgaagtctatgatttggcttgctgcccatacaaattattatcagatttcattaaagcaaaaatttaagtagtgtacatctgagtttgctggttttttgttgttacttttgctaaactgtgctaatccttctgtaatttaaggtttgagcaatagaacaatgaaatgaaactggattcaccctgtttcaaattttccaggggcttctttcgtattttcacactactgacaggctaaatttctcctctgaccttaattctacacaacctcagaacaaagtattcttttctttttttctcttcaaaagactctcactatcctttaataccaacaattgtgtt

SEQ ID NO: 240781 - DNA, 557 bp, Homo sapiens
cagactccggcaaatacctcaggaatgatatcaggtgctagttactgcatcaaactaagttttgtttttttgtttctcagctctcaattatttatatgcataatcactaagtaaacaggtataaaaatttcatgtacattagtcagaagcaatgtttaaaaaaatcaataaagccaaaatatattaggcagtcaatgccttttttccccctaaagaattgaagtctatgatttggcttgctgcccatacaaattattatcagatttcattaaagcaaaaatttaagtagtgtacatctgagtttgctrgttttttgttgttacttttgctaaactgtgctaatccttctgtaatttaaggtttgagcaatagaacaatgaaatgaaactggattcaccctgtttcaaattttccaggggcttctttcgtattttcacactactgacaggctaaatttctcctctgaccttaattctacacaacctcagaacaaagtattcttttctttttttctcttcaaaagactctcactatcctttaataccaacaattgtgtt

SEQ ID NO: 240782 - DNA, 557 bp, Homo sapiens
cagactccggcaaatacctcaggaatgatatcaggtgctagttactgcatcaaactaagttttgtttttttgtttctcagctctcaattatttatatgcataatcactaagtaaacaggtataaaaatttcatgtacattagtcagaagcaatgtttaaaaaaatcaataaagccaaaatatattaggcagtcaatgccttttttccccctaaagaattgaagtctatgatttggcttgctgcccatacaaattattatcagatttcattaaagcaaaaatttaagtagtgtacatctgagtttgctggttttttgttgttacttttgctaaactgtgctaatccttctgtaatttaaggtttgagcaatagaacaatgaaatgaaactggattcaccctgtttcaaattttccagggrcttctttcgtattttcacactactgacaggctaaatttctcctctgaccttaattctacacaacctcagaacaaagtattcttttctttttttctcttcaaaagactctcactatcctttaataccaacaattgtgtt

SEQ ID NO: 240783 - DNA, 538 bp, Homo sapiens
gagtgagagagcacgatatctacttcctcacacttctcctcggttctcaaataaaagcgctcacttacatttgccatctttattctgtgatccgtttttatgttacagcaaataagcaaattatgaggtcctctgggcgaaaggaaaatcagcatggaatgtaagttattgtgccatctagagaaaatgtgagaggctggaagcctcaatcaactgtcttccttkaagaataacctagatcttggctcccactggcaaagatgagtgggggttattgtcttctctaagaaactaaacgtccctcacatgcttgaagatgtcgcaagggagacctgatggccccatttctgtgaggttgttcctcaaagaagaatcaaagatttcagtcacattagcatcatcatgttctcttagtccagaatttttcagcaaacatattccacaaaattttctgcaagttcagggtacatatagcaggtgcagtggatttttgttatgttttaatataacatactagagaaaatccagaacattcttc

SEQ ID NO: 240784 - DNA, 592 bp, Homo sapiens
aagctttgttgaaaatgacatatgaaagtaacttagtgtatttttaaagcccctatcccatggaacttggagccagagaaaaattgtatargtcagttcactaggaataggtccactatgaggacctatcttttatttttcttttttgagacagtcttgctgtgtcgcccaggctggagtgcagcggtgtgattatggcttatggcagccttgacctcctgggcaaagtgaaccttgcacctcagcctcctgagtagctgcgactacaggcagtcagccaccacattatctaattttttattttttgtagcgagagggtctcaacatgttggccagactggtctctaactcctgggctcaagtaatcctcccaccttggtctcccaaagtgctgggattacaggcatgatccactgcacccacccctgaaaacatactttatataaaccattattttgtttactttatgggaaagatagtctttaaaaaaaaaaataaataagaaccatttcctcccagattataaaggtgaattatgcttattgtggaaacttctgaaaatacaaggaaatatatagaaggaaaaaaaaaa

SEQ ID NO: 240785 - DNA, 572 bp, Homo sapiens
aagctttctttgatataaattttcctttartgttctatggaacttatatattcatattaattttatttttgctgatgagaagcaagataaaatatatatattgtgagtttttattgtgtgattaacacagcatgtatatttccatggtagtaacccaagacctatattgtacttaaacctgtatgttggagtgtctttctgaaatgtgtctgtcgtagtaagtagtacagctcagcacatagtgattcattaaatgtttcacagcttcaaacttgactgtggataaacatcactgaaagatagtcccctactttgcaggaaataggtgcattttctgtatcaaatcctctcttcaaactatcagaaggggttctgtaaatctttattgattctgcaacacccaccaaagagactttggcctcatgtagacatttagattcacaaggcgggccatacttggtcccagtctactcagaaggataagggacaggagaaacaacagggtagtgttaggtgtttcctcttcaaaagaagtctttgcagccatccaggggcttctctggtcctctgag

SEQ ID NO: 240786 - DNA, 617 bp, Homo sapiens
ggtcctacccactgtggctgggacaccctttcagtgagtgctgggagttattccttctccttttccagagcagctcacccaagaccatgggtacgatttgttgcttttacgtagttaataatttagacaagatggcacctgcttattgacttcaggtcatgctaactagaatgtgcgtgtcaccttgacattggaaatkcttttgtggtttgtgtcactgcttgcttgttccatgaggctcatctttgaagagatacttaaggacagccaatgctattcctcttcctctttatggcctcatgatgggtttggggaaaggcagaactgtaatggacctaacccaaaagaagcatagggtcctatttggtgaacactttgcacagcaggaagtaatggggtggagggggggaataaagaaacagaagaataaaagaaagaggaataaggtgactctgtggttgtttgcacccacctcagagtcagggcaccatatgggctcagagcagcctatccctgactctctacacccaggtcctgcttttactaatatctaaataaacagatctcctggattgcccttgtactctttttgtgctcctgagtcattttgcatagct

SEQ ID NO: 240787 - DNA, 390 bp, Homo sapiens
cattctccagcagcaaccatgtggttcagagaatctgtatgcttggggatgggggagcacagtgattgtgggactttgcaatggaaccctgtcatagtgggaagcaacaccaggcaraactcaactgatgcccacagaaggaacattgagattagcactggccggaggggaatcatacatctcaggagtcagaacctgagttctggcaagtctcgacactctgggataaagggctctagagttctaaataaacttgaaaggcattctaggtcacagaactgcaactcctaggccagtcctagtggtgtgctgggcttggagccagtggacttggtggggcatgcaacctggtgagacaccagctggggctactaaggagtacttgcacca

SEQ ID NO: 240788 - DNA, 390 bp, Homo sapiens
cattctccagcagcaaccatgtggttcagagaatctgtatgcttggggatgggggagcacagtgattgtgggactttgcaatggaaccctgtcatagtgggaagcaacaccaggcaaaactcaactgatgcccacagaaggaacattgagattagcactggccrgaggggaatcatacatctcaggagtcagaacctgagttctggcaagtctcgacactctgggataaagggctctagagttctaaataaacttgaaaggcattctaggtcacagaactgcaactcctaggccagtcctagtggtgtgctgggcttggagccagtggacttggtggggcatgcaacctggtgagacaccagctggggctactaaggagtacttgcacca

SEQ ID NO: 240789 - DNA, 444 bp, Homo sapiens
ggaatcatacatctcaggagtcagaacctgagttctggcaagtctcgacactctgggataaagggctctagagttctaaataaacttgaaaggcattctaggtcacagaactgcaactcctaggccagtcctagtggtgtgctgggcttggagccagtggacttggtggggcatgcaacctggtgagacaccagctggggctactaaggagtacttgcaccaacccttccccaaacctaggcagtgtagcttgcagctccaaaagagacttcttccttcagcttcagaagatgagaagaaagcataatgtggactttgtyttgcaacttggatgctagctcagccacaataggattgggcagtgggcaaaattgtaaggcccccattcctggccctagctcccagaggacatttctaaacataccctgtgccagaaggtaatct

SEQ ID NO: 240790 - DNA, 371 bp, Homo sapiens
catgcctgtggtcccagtactcaggaggccgaggcaggagaatcacttgaacccaggagacagaggttgcagtgagccaagatcgcgccactgcactccagcctgggtgacagagtgagactccacttcaaaagaataataataataataaagatttaaagatgagagagactcaatgyacttgtaatctgtgtttgatgcaggcagactcggtcgggtagaaagtgggagggcacctaactaagactggagtggtggtggaaaaccagagactgtgctttgaaggatataggagttattcaaagaaagtagggaaggtaggaggaatgagcccaagggaatgctggacacaatatttcagacatagggaa

SEQ ID NO: 240791 - DNA, 603 bp, Homo sapiens
aatcaaaaaattctagaatcaggacttgcctgggcacaggtaagcggggggtgcagttctgaagtgtaagaattgggaagattaaactagaggatacaacatacacaactgtgagacttgggcccccttttcytctaacttggctctgaaatatgagcaatcataggcagtgtattaatcttttctcacaatgttatgaagacatacccaagacggggtgatttaaaatgaaaagaggtttaattgatttacagttccacatggcttggaaggcctcaggaaacttacaatcatgacaaaaggggaagtaaacacatccttcttcacaaggcagcaggagaaagaaatgccaagcaaagagggaaaaaccccttataaaacaatcagatctcttgagaattcactgactatcacaagaacagctgcatgggcataactgcccccgtgattcaattatctcccatgaggtccctcagaaatgtgggaattatggaaactaaaattcaagatgagatttggatggggacacagccaaaccatattattcaaccccaatccctcccaaatctcattttctcacatttcaaaacacaatcatgcctt

SEQ ID NO: 240792 - DNA, 603 bp, Homo sapiens
aatcaaaaaattctagaatcaggacttgcctgggcacaggtaagcggggggtgcagttctgaagtgtaagaattgggaagattaaactagaggatacaacatacacaactgtgagacttgggcccccttttcctctaacttggctctgaaatatgagcaatcataggcagtgtattaatcttttctcacaatgttatgaagacatacccaagacrgggtgatttaaaatgaaaagaggtttaattgatttacagttccacatggcttggaaggcctcaggaaacttacaatcatgacaaaaggggaagtaaacacatccttcttcacaaggcagcaggagaaagaaatgccaagcaaagagggaaaaaccccttataaaacaatcagatctcttgagaattcactgactatcacaagaacagctgcatgggcataactgcccccgtgattcaattatctcccatgaggtccctcagaaatgtgggaattatggaaactaaaattcaagatgagatttggatggggacacagccaaaccatattattcaaccccaatccctcccaaatctcattttctcacatttcaaaacacaatcatgcctt

SEQ ID NO: 240793 - DNA, 581 bp, Homo sapiens
agaccagcctggacaacatagtggagccctgcctctaccaaaaattacaaaaattagctggatgtggtggcatacacctgtggtcccagctacccaggaggctgaggcaggataattgcttgaacctgggaggtggaggttgcagtgagctgagatcatgccactgcactccagcctgggcaacagagtgggactccatctcaataataacaataataataaaaataaaaggctaactgtattccagaaagtgatcaataaagaggggtaaatctttgaaatggttttttaaaaaggacaaagaaaaaaaaggatcctgctatcaggaagaaaatgtatgttcccttaaaaagrgaacagttgcaagtaataatcaatacagcaatgtgcagagaatatttaaggaataaaatggtaaacccaaaattttatgccttgccaatttgtagtttgtatattaaggcagagaaaagcattcttattctttcctgccaggttcattaagcaccacctgtactaggtatctaggaatgctgtaacaaattaccataactttggaggcttacaacaacagaaatttg

SEQ ID NO: 240794 - DNA, 553 bp, Homo sapiens
caactatattcacacaagcggctgtgcttaatcacacaggaacagagatcatcacacacacactcatcccatgcctttgtgttattgtttgagtcttttgtcccctggtccacagcctctcacgtccttctctcctctatgtgccctgtacaataggagcgctatgaatcagcagggaagtgtcctttgccaaagccaaataaggggctgggccctaaaaacagcaataaaccccatgaggctttattaattcaaacaaagtgtaatccgtggtagggaggatttctwgggccacaaacaagagcgaatatgacttccaaaggaaaagaaagggaaagccgggctgcccacctgtttattgggaacagttgttcctctagcccaaaccacatctccttaatagggaagaggagtgcagccctatcagggagtttttattcttagggcaggaaaagagcaaaagatgtttctttagcctgcaatatgtcagcatcaaatttctcatttccctctcctctcctctccctccaccccacccccaagccctcgtgtt

SEQ ID NO: 240795 - DNA, 572 bp, Homo sapiens
gggatgagagttcaggaagaacaaatagtacctgccgtcaaaggatggataacctactcgggattcaaccaatatttattgaggaaaacatggtagtgaatgaacagagcctgggactagaatcactgggttygtgttgggctctgaaatcctgtcacttagggcagtctgcttgacctcttggcacttctgtgtcttccttgtaactggaaaacagcagttcttaccttgtagtttcttgtgaagattagcgagagaaggaagacacagtgccggcatggtgtttagagcaaagtaaacagagctcagtaaacagtagctgctttaagtgtctcctgagtactggacgctttcatctacgtgacgttccatcaaccctatgattaggccccatttacagaggtggcatctcaaggccagagagccgaggggcttgctggtagttggtggttcatgagcagtacagctgcgctggactctggcccttctggctccaggctcaatgctctcctcatcccgacagaattggcccttgtggtgtcaagatcatcgattgagaagaaatattccag

SEQ ID NO: 240796 - DNA, 572 bp, Homo sapiens
gggatgagagttcaggaagaacaaatagtacctgccgtcaaaggatggataacctactcgggattcaaccaatatttattgaggaaaacatggtagtgaatgaacagagcctgggactagaatcactgggtttgtgttgggctctgaaatcctgtcacttagggcagtctgcttgacctcttggcacttctgtgtcttccttgtaactggaaaacagcagttcttaccttgtagtttcttgtgaagattagcgagagaaggaagacacagtgccggcatggtgtttagagcaaagtaaacagagctcagtaaacagtagctgctttaagtgtctcctgagtactggacgctttcatctacgtgacgttccatcaaccctatgattaggccccatttacagaggtggcatctcaaggccagagagccgaggggcttgctggtagttggtggttcatgagcagtacagctgcgctggactctggcccttctggctccaggctcaatgctctcctcatcccgacagaattgrcccttgtggtgtcaagatcatcgattgagaagaaatattccag

SEQ ID NO: 240797 - DNA, 606 bp, Homo sapiens
atatcagtgcatgctgaacaagccacctctggggwgtggagtgttcccaaagtgtctttggaggaaatacatttaaatgtaaagtcatctgctgagttactctctatttgttacctctgttttctactcacaagtcactagattttttttttttttttgacagggtttcattctgttgcccaggttggaaagtagtggcgcaatcacatctcactgcagcctcaacctccctggctcaggtgatcctcccaactcagcctcctcagtagcccagaatacaggcacacaccaacacgcccagctgatttttgtattttttgtagagatgaggtttcactgtgttgtccaagctggtctcaaattcctgagctcaagtgatccacccaccttggcttcccaaaactctgggattataggtgtgagccaccgttcatggctacaagtcactagattcttaacggagaggaccacgaggaataataaaactgataacaacaatagctgccatttttcagaactttctgagccagatgtttcacatatgttttcttcttcacttcacaccaatctggtgagctgagcagcattagtatgttcattttctag

SEQ ID NO: 240798 - DNA, 596 bp, Homo sapiens
acattacccctgtagtgctctttctccactcttgagtatggaagaaaaggttgcctttgtggataaagagattggagaccggtgttgggatctctcttctccctactgtactctttcctggggatcagagccaagcaagacatcacccytcaggaagatatattttctacacattgctgctttccaaatgattagagggtttgaccaaggagattttgtacttaaatgcaacctcttaacgaatttctgaggcgggtgacaactgcctgtgatagggttaggcagatggcacctggcccaaggtgccaggtgaggagatgctttgctcattatgcctgggccatgccggggccctgacctggaattgtgtctgcctttttctaaatgcttgaaggctccctatgggccagaagtggccttgtgccccttgctgggttatcggaactgtggagtttgtagaatctagggcctttctccaggagctcctttagccttgtggccccaagcatggcagggtcacacagtcaggtttgaatcatgtaataggaaggtcattttctttgtttttaaaacatttttatttcagtagcttttgt

SEQ ID NO: 240799 - DNA, 568 bp, Homo sapiens
tccaatgtagaattaattcagttatgcagttgggggagaaacacttacatcccctaaagtcacaagtaacttttttttttttttgagacagagtcttgctctgtcacccaggctggagggcagtggcgtgatctyggctcactgcaacctccgcctcccaggttcaagcaattctactgcctcagcctcctgagtagctgggattacaggcatgtaccaccacgcccggctaattcaagtaatttctttaaaacttctgaggtctataagtttaaatgcaactaagccaacagtcagtctttaaatttctaccataaaagacatgtatattttaatatttgacaagagttaggttaatttgccattcattcctcccaaattctgagtgcacttgcaattcagatttttttaaataaaaatttgtgtccggcactagactcaagaaaaaattacataataaaaaccaacatggagttcttatcatgtgttaggcactgttctaaattccttacatgtattaatttgtttaatcatcacaaccctatgagttatatacagtactttattc

SEQ ID NO: 240800 - DNA, 573 bp, Homo sapiens
attgttagacagctatggtttttatcagtattatcaatattattcttcatggtcctctctattaagaatctagtagcttgtagctgggcatggtggcttacgcctataatctcagcactttgggaggctgaggtgggcagattgcttgagcccaggagttcaaacccagtttgggtacatgtttacctatgcaacaaacctgcacattttgcacatgcacccttgcacttaaagttgaaaaaaaawtttttgttttaaattagctgggtgtggtggctcatggctgtaatctcagctactcaagaggctgaggcaggaggatggtttgagcctgagaggtcgaggctgcagtgagccatgtttgcaccactgcattgtagcctgggtgacagagtgaggccttgtttaaaaaaaaaaaaaaaaaaaaaaaaaaaaaaaaaaaaaggaagaagaagaagaaaagaaagaaagaaagagaaaagaagaaaaaagaaaatgaaaaaaagagatttgcaatattaaaaataaaaagagggatatacagagagatccagcagagactataaagataat

SEQ ID NO: 240801 - DNA, 573 bp, Homo sapiens
attgttagacagctatggtttttatcagtattatcaatattattcttcatggtcctctctattaagaatctagtagcttgtagctgggcatggtggcttacgcctataatctcagcactttgggaggctgaggtgggcagattgcttgagcccaggagttcaaacccagtttgggtacatgtttacctatgcaacaaacctgcacattttgcacatgcacccttgcacttaaagttgaaaaaaaattttttgttttaaattagctgggtgtggtggctcatggctgtaatctcagctactcaagaggctgaggcaggaggatggtttgagcctgagaggtcgaggctgcagtgagccatgtttgcaccactgcattgtagcctgggtgacagagtgaggccttgtttaaaaaaaaaaaaaaaaaaaaaaaaaaaaaaaaaaaaargaagaagaagaagaaaagaaagaaagaaagagaaaagaagaaaaaagaaaatgaaaaaaagagatttgcaatattaaaaataaaaagagggatatacagagagatccagcagagactataaagataat

SEQ ID NO: 240802 - DNA, 636 bp, Homo sapiens
tgtttgtccaaaatattacaagtgcaaaggaacccaaaggagggagaagtcagtgtggaatgaaatgggctgagagggaggcatggaggaggcatgaatgctaagggaaggaaggaggaccccagcagggtgaggaactgacgcagacctacgcaggctaggtggggccagctgagggtgacacactgggccagaggggatggggtgatgagaggaggtgaataaagtccattcagcagctaagagtgatagaagggttaattttatgtgtcaacttgactggcctaaggaatgcccagagagatgatagacattatttctaggtctttcttggagagtttagcatttgaaccagtgggccctgtaaaggagattgccctcaccaatgtgaatgggtaccatctcatccattgagggcctgaatagagcaaatagyggaggaagggcaaattgtgtctccctgtccttaagctgggacatccaccttctcctgccaccagacatcagagctcctggttctggggcatttggactccaggatttatgccagcaaccccatccacaccccttcccttccctggttctcaggcctttggcctcagactgaattacaccaccggttttcctgggccttca

SEQ ID NO: 240803 - DNA, 475 bp, Homo sapiens
agggcaacctggagaggatgaaaagtaccaaaatgtaaatatgatggttatatgtatagaaatatttatggttacatgagaaatataatggttatatttctcaggctaactgagaaagtggcatttgagcaaaggtttgaaggagttgatagattgtgctatctgaagacccgaaggaggaatgatccaggcagatgaactagcaagggcaaaggccctgaggtaggagctaaatctgcatatcttcaggagcactggagtgaaacaagcaagaagagcctggttgwccaagttgatgaggtaatggggagacattgtatatggcctgataggccattgaaaggactttctggctgggtgctgtggctcacacctataatctcagcactttgggaggctgaggggggcagctcacataaggtcagaagttcaagaccagtctggccagttggtgaaaccctgtctctaataaaaa

SEQ ID NO: 240804 - DNA, 600 bp, Homo sapiens
ttgagaacactggttcctaggataagattatttgaatgggcctgcatgcaaatgattttccactctgcttccctaacacctacaccagyccactccttaatggatatgttatttgagggggctgatcattgtcattatggaagcacactaacagaacagctcttcagaaaaatgacccaggctgggaattgatctgctaggggataatttgaaaagtagaatttaaagctctggcaggccctagaaaattactgtcttgctcaatggaattagttgtccaagatgaagaatattttcttcttgtaccatctcatcttctgatggctctcttttcaccacttattcttaattccctgttctgtgccgacggctggagcccatggccggcagcattcctgatcctcaatgctgtcaccggaacataaacagtcagaggttaactatgcttacttgaaaacagaggaagtgcatgggaatgttcttttaaagggaaaggaataagcgcagaaagaatacagaattaaattcatgaggaaattgtgcagctctcacattgtaacttccatgaaactctcatcatttatttatcagtgcaggagt

SEQ ID NO: 240805 - DNA, 439 bp, Homo sapiens
tggtgtgtaaatgagatgcctggaactgcttgcagctatttggcaaccatgaggaagttagtcctggagaaaggaaamtaactgggtttatgttcacagtcttgagctgctgggtccaaagcttgccctggctcaaaagtttccagtttgtgaactaatacgtcaactttattattcaaggcagttcagtctgggttttctgtttcttgctccccaaatcactttaccttagtgtgatatgtgtggagcttttaggtaggttcccagtgaaaaacatgtaaagagagcatcattctctctccatccatctctactccaccctccctgctttcctgagttctttccattgctaataccttgatctgaggtggggaatagacttggatccaccaacactcattgaatgtttttcattgcaagatatatactaagcacagaa

SEQ ID NO: 240806 - DNA, 439 bp, Homo sapiens
tggtgtgtaaatgagatgcctggaactgcttgcagctatttggcaaccatgaggaagttagtcctggagaaaggaaactaactgggtttatgttcacagtcttgagctgctgggtccaaagcttgccctggctcaaaagtttccagtttgtgaactaatacgtcaactttattattcaaggcagttcagtctgggttttctgtttcttgctccccaaatcactttaccttagtgtgatatgtgtggagcttttaggtaggttcccartgaaaaacatgtaaagagagcatcattctctctccatccatctctactccaccctccctgctttcctgagttctttccattgctaataccttgatctgaggtggggaatagacttggatccaccaacactcattgaatgtttttcattgcaagatatatactaagcacagaa

SEQ ID NO: 240807 - DNA, 432 bp, Homo sapiens
gaactgcttgcagctatttggcaaccatgaggaagttagtcctggagaaaggaaactaactgggtttatgttcacagtcttgagctgctgggtccaaagcttgccctggctcaaaagtttccagtttgtgaactaatacgtcaactttattattcaaggcagttcagtctgggttttctgtttcttgctccccaaatcactttaccttagtgtgatatgtgtggagcttttaggtaggttcccagtgaaaaacatgtaaagagagcatcattctctctccatccatctctactccaccctccctgctttcctgagttctttccattgctaataccttgatctgaggtggggaatagacttggatcmaccaacactcattgaatgtttttcattgcaagatatatactaagcacagaaccaagctagaacccc

SEQ ID NO: 240808 - DNA, 610 bp, Homo sapiens
catagcatgagcctaggcccagaggaaaaaccaaagggatgtaagaattaaccagtttgtgtttaaaaggatcctggcagatacaaaaggctaaatagcaattaattggtcaaattaatatatggtaaacctgcaaaccttaagttgtcctctccctaccagaggctccttcagaaagaaagccagggcaggtctgaggcagtaggggaggggtgggaagagagtggagggaggctgcctggctgaaatcttggaggaagccatccccagagcgtgtgggacagaagagtgggcaagttatggaggcccttgagtccctcggttgtcagttgctggttttgcacactgcgtcagcttctcccrtgtgcctctctggctggtgagccttcattcccccctgactggctgccctgtccctctcttattaaaggatgccttgggcacaggctgttatcctcatttggaagggtttggaaattatacatgagagtaagaaaattctgctgtggctttttatggtaggcatcactcttagcaagcatgagaacctagttctgtcctttgtagaggttgtagtggttattattactattattactacaataaactc

SEQ ID NO: 240809 - DNA, 622 bp, Homo sapiens
tttcctggggtcacgcagtcactaaccacttttcttggctgggtgtgggggttcccttggctttgtgtcactccctgctgggctgtcaccccactctgcctttcttctttgtgtgtctagttgttttcctaatcagtcccagtgtgagaacctgtatatttcagttgaaggtgctatattcactcacccctttcattcctctccatgagtgctgtggactacagctgcttctaatgggccatcttgatgcatgtgtattttcacaaagctagaagggaggattctgaatatttccaacacaaagaagcaatgtttgaggtgatagatgtgctaattacactgatttgatcattacatattgtatacatgtatcaaaatatcacactgtactccataaatatgtacaactattatgtgtcatttaaaaagttttaaaaagttaaaattaagattccatatgaaaaaaaaacacagaaaaacccagtaaggtatctagaagaggcatgtttaaaaatactttaataaatattagactctgacccaacatgcaaagatactcccttcacaaatatctaagtatgcrttgagtaaaattaggattgacttcaatgatttctcattt

SEQ ID NO: 240810 - DNA, 595 bp, Homo sapiens
agatttcctaagtttactactgcattcaattaatgaggaaaaataactttcacacatgatagtcataaaactaacacatgatatagattctcatataattacacaattttaaacaattttcaaaatgtaagactggatttccaaaaactgttaacagtttgtttaaattctgctgtctccttgtattctgaaaaattgctagaagtgtagattttaagtgttcttaccacaaaaaatgataattatatatgtaaagttatatatatattaattagcttgatttagccattccacaatgaatacattcttcaaaacatgttgtacatgataaatatataacatttgtatttgacaattaaaataagtaaattagtaaaaatgttatcaagtatattcgaatttwaaaaattctataatcttctttgttaggagccttacctcctcctttagctacctctacttacacctttgctatcttcatgctgactctacctatgctcatggataatatctcatgctctgagcttttttgactctattaaaggttaccagactttggtctcaattcctaaggctttttctagattatatattc

SEQ ID NO: 240811 - DNA, 596 bp, Homo sapiens
gaattccttctcagttttgtcctgagaggcagasagcgtgcccctggcagccttgaaatgaggggtcatttggggatcctgaaagctgaggttctagcccaggaagtgccccagagcccggccatcctgacacactgactctccttccatgctgggagacagcagctctgccctgcccacctgcccagaagtggccagctggctttttgccaggttctgccctctgcagccccagagctacacctgtcctttcttagaagctgccaatggccatgagtgtccaggccactctgggaaggactgtagtaaaatagtcaatgtgtttaatccatgtttcccactggcccacccatgcctttgacccacaggacagtggccacgcatgtgcttgggaaaaccaccataacaggtccagacaagagtgctggcctgagcatgggtcacgctaacgtgggtggctcaattaaggaacagggatggacttcctgtcctgtcgcccccacacactcctgcttcttctagtggccatttctgtgtgaggctggagcacagtggaaggtctgtgaacctgtattaagcaaaatagaaactaaatg

SEQ ID NO: 240812 - DNA, 596 bp, Homo sapiens
gaattccttctcagttttgtcctgagaggcagacagygtgcccctggcagccttgaaatgaggggtcatttggggatcctgaaagctgaggttctagcccaggaagtgccccagagcccggccatcctgacacactgactctccttccatgctgggagacagcagctctgccctgcccacctgcccagaagtggccagctggctttttgccaggttctgccctctgcagccccagagctacacctgtcctttcttagaagctgccaatggccatgagtgtccaggccactctgggaaggactgtagtaaaatagtcaatgtgtttaatccatgtttcccactggcccacccatgcctttgacccacaggacagtggccacgcatgtgcttgggaaaaccaccataacaggtccagacaagagtgctggcctgagcatgggtcacgctaacgtgggtggctcaattaaggaacagggatggacttcctgtcctgtcgcccccacacactcctgcttcttctagtggccatttctgtgtgaggctggagcacagtggaaggtctgtgaacctgtattaagcaaaatagaaactaaatg

SEQ ID NO: 240813 - DNA, 596 bp, Homo sapiens
gaattccttctcagttttgtcctgagaggcagacagcgtgcccctggcagccttgaaatgaggggtcatttggggatcctgaaagctgaggttctagcccaggaagtgccccagagcccggccatcctgacacactgactctccttccatgctgggagacagcagctctgccctgcccacctgcccagaagtggccagctggctttttgccaggttctgccctctgcagccccagagctacacctgtcctttcttagaagctgccaatggccatgagtgtccaggmcactctgggaaggactgtagtaaaatagtcaatgtgtttaatccatgtttcccactggcccacccatgcctttgacccacaggacagtggccacgcatgtgcttgggaaaaccaccataacaggtccagacaagagtgctggcctgagcatgggtcacgctaacgtgggtggctcaattaaggaacagggatggacttcctgtcctgtcgcccccacacactcctgcttcttctagtggccatttctgtgtgaggctggagcacagtggaaggtctgtgaacctgtattaagcaaaatagaaactaaatg

SEQ ID NO: 240814 - DNA, 587 bp, Homo sapiens
ttgcggtgagccaagttcccgccattacactccagcctgggcaacgaaagcgaaactccgtctcaaaaataaaataaaagactttaagtcattcatcaattttatgtatttactatttcttctcccattccataaagcctacagtcatataacagaaagggaaaatcgggacagccacatataaataaaggtgcaaagttgaggcaggagtggaccttaagggccaagcagaggtcattgctgagccctggtcatttagccctgggctttctggaagccagagtgaaaagacagacacaatcagctgcataagagttatcaaaaagcaggaagagcgctgattttcctggtagtaaagcaagggctttccaagaatttacctctaaagtaatttctttygttctttcttttttctcgctctgacacccagttggagtgcagtggcacaatcagggctcactacaacgtctgcctcccaggctcaagccatcctcccacctcagcctctcaaatagccgggactacagggacgcaccaccatgcctggccagttttttggtattttttgtagaggtgggatttcgcca

SEQ ID NO: 240815 - DNA, 615 bp, Homo sapiens
gaatggataaaaaatatattctatataactgcaataaaatattattcagcaatagaaataaatgttctgatgcatgctaaaacatggattaaccttgaaaacattatgctgagtgaaatgagccagacataaaagtattaatattgtatgattccacctatataaaatatatattatagggacataaaatagaggagaggctaccatagactggggtgaaagcaaatgaagggaaacgttgaaaaataaaagaacaaattgaaagaactcacactacccaattactacaaagccaggtaatcaaatcagtatgatcctggcacatggataaacatacaggccaatggaataaaattgagagttcagaaataaacctmtacatctatggaaaatcgatttttaacaagagcactcaccttgcttaataagtttctatctgagttgagaatttctccctgggatgataaaaagttttgcaaataatgatgatggttgcatagcattgcaaatgtaatcgacaccactaaatgatatatgtaaaataattaagagatcaaattttattttatgtgcattataacccaaggaaaaaaaataaaaaggaaataaaacaga

SEQ ID NO: 240816 - DNA, 615 bp, Homo sapiens
gaatggataaaaaatatattctatataactgcaataaaatattattcagcaatagaaataaatgttctgatgcatgctaaaacatggattaaccttgaaaacattatgctgagtgaaatgagccagacataaaagtattaatattgtatgattccacctatataaaatatatattatagggacataaaatagaggagaggctaccatagactggggtgaaagcaaatgaagggaaacgttgaaaaataaaagaacaaattgaaagaactcacactacccaattactacaaagccaggtaatcaaatcagtatgatcctggcacatggataaacatacaggccaatggaataaaattgagagttcagaaataaacctatacatctatggaaaatcgatttttaacaagagcactcaccttgcttaatragtttctatctgagttgagaatttctccctgggatgataaaaagttttgcaaataatgatgatggttgcatagcattgcaaatgtaatcgacaccactaaatgatatatgtaaaataattaagagatcaaattttattttatgtgcattataacccaaggaaaaaaaataaaaaggaaataaaacaga

SEQ ID NO: 240817 - DNA, 436 bp, Homo sapiens
aaataaactacacactaaaataccttatgaatataaatgcaagatttctaaacaaaatattarcaaactacatccagcaatatatagaaaagaactgattattttccatgaacaaggatttgtcccgggaatacaagcttgttttaacattcaaaaataagtcagggtaaaataccatctcgatacaataaaggacaaaaaaatacatgatagatacagaaaaagcatttgacaaaatcacacactatttaaaacaaaaaagttaaaaaaaaaaaaaaaaagacccaggaagctagttatagaaggaaactagctcaaccaaacaaatgttatttacaaaagccccaagccaacattatacttaatagtgaagactgaatgatttacccccaagttcaggacagatggatattctcacagtgactgcgcaacattg

SEQ ID NO: 240818 - DNA, 587 bp, Homo sapiens
cctgtacaacctgcagaactgtgagtcaatacaacctcctttcttataaactacccattctcagatgtttctttacagcatgcaagaatggcctaatayacagtttaatgaggatgctgtattttgcaaatatatttgtctccccacaaatcacctgatgtgttttgatcagatagctcttctaattaatattagaggatataatttatagaaattaatatatttttgaaatttttgttctgtaaaactattaataatatgtagtttgctataattataaaatataagctaagtttttgaaaatttattcacaattttgacagtgaaataaacacaagtatgttggtagcaacattattaaaatttaatctatttttttaaatggtaatatgtgcattgagaagaaaagtaaaagaccataagagaatacaaagtaaaaatcaaaattcttttacctttctcctccagccaaccaaggaatcaaccaataaaaacagctctgtgtttgtaggtttgaatatgtgttacatgcacttataaattcttccaaaaaaactctatacatgtaacagaagctttttacacaa

SEQ ID NO: 240819 - DNA, 587 bp, Homo sapiens
cctgtacaacctgcagaactgtgagtcaatacaacctcctttcttataaactacccattctcagatgtttctttacagcatgcaagaatggcctaatacacagtttaatgaggatgctgtattttgcaaatatatttgtctccccacaaatcacctgatgtgttttgatcagatagctcttctaattaatattagaggatataatttatagaaattaatatatttttgwaatttttgttctgtaaaactattaataatatgtagtttgctataattataaaatataagctaagtttttgaaaatttattcacaattttgacagtgaaataaacacaagtatgttggtagcaacattattaaaatttaatctatttttttaaatggtaatatgtgcattgagaagaaaagtaaaagaccataagagaatacaaagtaaaaatcaaaattcttttacctttctcctccagccaaccaaggaatcaaccaataaaaacagctctgtgtttgtaggtttgaatatgtgttacatgcacttataaattcttccaaaaaaactctatacatgtaacagaagctttttacacaa

SEQ ID NO: 240820 - DNA, 587 bp, Homo sapiens
cctgtacaacctgcagaactgtgagtcaatacaacctcctttcttataaactacccattctcagatgtttctttacagcatgcaagaatggcctaatacacagtttaatgaggatgctgtattttgcaaatatatttgtctccccacaaatcacctgatgtgttttgatcagatagctcttctaattaatattagaggatataatttatagaaattaatatatttttgaaatttttgttctgtaaaactattaataatatgtagttwgctataattataaaatataagctaagtttttgaaaatttattcacaattttgacagtgaaataaacacaagtatgttggtagcaacattattaaaatttaatctatttttttaaatggtaatatgtgcattgagaagaaaagtaaaagaccataagagaatacaaagtaaaaatcaaaattcttttacctttctcctccagccaaccaaggaatcaaccaataaaaacagctctgtgtttgtaggtttgaatatgtgttacatgcacttataaattcttccaaaaaaactctatacatgtaacagaagctttttacacaa

SEQ ID NO: 240821 - DNA, 587 bp, Homo sapiens
cctgtacaacctgcagaactgtgagtcaatacaacctcctttcttataaactacccattctcagatgtttctttacagcatgcaagaatggcctaatacacagtttaatgaggatgctgtattttgcaaatatatttgtctccccacaaatcacctgatgtgttttgatcagatagctcttctaattaatattagaggatataatttatagaaattaatatatttttgaaatttttgttctgtaaaactattaataatatgtagtttgctataattataaaatataagctaagtttttgaaaatttattcacaattttgacagtgaaataaacacaagtatgttggtagcaacattattaaaatttaatctatttttttaaatggtaatatgtgcattgagaagaaaagtaaaagaccataagagaatacaaagtaaaaatcaaaattcttttacctttctcctccagccaaccaaggaatcaaccaataaaaacagctctgtgtttgtaggtttgaatatgtgttayatgcacttataaattcttccaaaaaaactctatacatgtaacagaagctttttacacaa

SEQ ID NO: 240822 - DNA, 616 bp, Homo sapiens
aatgttaataatagaacatttaccctggaacattggatagataactctgcgataaagatcattagacattcggctgcaatgatctttgcctacctasagaatttgttcaaatgcttatgtatgcatctgtagaagatcctgcaatgttgctaaactgttcaaacccaaggtgaccagtacatttcccactaagtgaaaaatactgaactggatgatgactcagattttctctcaatcttaagtctctatcatttaaaataagtctgggtgtctagggttatgagatcaaattgtgtttctttgtcactggaaatccccacttcaaaccttaagaacaagccattcaaaagcttgcactgaggcaacacacttaataggaaagcatgacttcattttggcatgattcgtcttcaaatcaggtcagtgatttagatttgaatgagtggattgttcatgggcaccggatcaaattagactttcatttattttaagaaattcattagaccaattatgacaaccacagagggatgtcttatgactgagaagtgcaaattataagaacaataatatccattgttaagtgtgagatgaaaatttctgtgtagcttgctcatta

SEQ ID NO: 240823 - DNA, 410 bp, Homo sapiens
gacattctttttcattttttttttttggcaaaccttttgaaatacagcaatgcaaaggtacactactcacaacttttcatttgttgtggttcaccattcccttgtaacttaactctctccctccatgaaaagcaaagaatacaaaaggattttaacaaacaatactagtattagcttccttagagtttatattttgttatgactgaaatgttccattccagcagaaatatttaatcattttttttcagactgaaaaacaacccactaacaaatctgcagccctctcaggagtgttatatagtttcagaaatttttttwaaatttggtttagcaattcatgttttttcatgcttatcacatcgaagctactgagacaactagaaaaagagagttttgagtggcctcattat

SEQ ID NO: 240824 - DNA, 410 bp, Homo sapiens
gacattctttttcattttttttttttggcaaaccttttgaaatacagcaatgcaaaggtacactactcacaacttttcatttgttgtggttcaccattcccttgtaacttaactctctccctccatgaaaagcaaagaatacaaaaggattttaacaaacaatactagtattagcttccttagagtttatattttgttatgactgaaatgttccattccagcagaaatatttaatcattttttttcagactgaaaaacaacccactaacaaatctgcagccctctcaggagtgttatatagtttcagaaatttttttawaatttggtttagcaattcatgttttttcatgcttatcacatcgaagctactgagacaactagaaaaagagagttttgagtggcctcattat

SEQ ID NO: 240825 - DNA, 561 bp, Homo sapiens
tatgttttgttttatcatgaagaagaaaaactaaacagccaataactatataagttcaagttaccgaatgaggtagcattggtttctcacaaatactattctgtgattgagatcatatcattctgtcaagactacatttataaaatcatcaaaatttatataaatattttattaatattaatctaaaggaggcttcacaattaaagaacaatatctcaatcacagatattcaaagggattgaactgccatcagcttaaatttttctgaaactaaataaaattagagctttgttgaggaggatgataatgattgatgatgatcatgatagaattgttagacgggccacatataaaaagaaaaaaaagttaaacagagackatttgtgctccttttacaactgtagatgactgttcaacttccttttccttaatgtgctgtttatgagtgagtcaataacagccgtcactgacttctgagtcctttacaactaacaaagaagctgtggttttcattgatcatacccttgggtaagcctgtgaaattggaaagttgtttaaaaa

SEQ ID NO: 240826 - DNA, 534 bp, Homo sapiens
cagacgcatccagaaataatgttttacccgctatttgggcattccttagcccagccaagctgaycttagaaaaattaacctccacattttctatgcatgtgcacacttcaaagtctccaagtcctggaggaatgagttgccttttctgtaatcacgtcagattaattcaatagggaatctctcttttactactaatatgtttagtttgaagccctggttaacctccacacaattttaggagtagaattaacaaataatacagtgaggatgcagaaatggccagagggaagttgtttgatggagttctagatccaccttttccacaaccaccccaattatgggcttagtacttaaagaagattgtaaatacgggaaaaacattttcctctattcttcccaaaggcttttgagtatgagaattagtggatttcaatagcacgttaatagccatacatctcttccaccaacccacacttcctccaccaccacttctcatatgggattcctttcactgacctatacctagattctttc

SEQ ID NO: 240827 - DNA, 534 bp, Homo sapiens
cagacgcatccagaaataatgttttacccgctatttgggcattccttagcccagccaagctgatcttagaaaaattaaccwccacattttctatgcatgtgcacacttcaaagtctccaagtcctggaggaatgagttgccttttctgtaatcacgtcagattaattcaatagggaatctctcttttactactaatatgtttagtttgaagccctggttaacctccacacaattttaggagtagaattaacaaataatacagtgaggatgcagaaatggccagagggaagttgtttgatggagttctagatccaccttttccacaaccaccccaattatgggcttagtacttaaagaagattgtaaatacgggaaaaacattttcctctattcttcccaaaggcttttgagtatgagaattagtggatttcaatagcacgttaatagccatacatctcttccaccaacccacacttcctccaccaccacttctcatatgggattcctttcactgacctatacctagattctttc

SEQ ID NO: 240828 - DNA, 534 bp, Homo sapiens
cagacgcatccagaaataatgttttacccgctatttgggcattccttagcccagccaagctgatcttagaaaaattaacctccacattttctatgcatgtgcacacttcaaagtctccaagtcctggaggaatgagttgccttttctgtaatcacgtcagattaattcaatagggaatctctcttttactactaatatgtttagtttgaagccctggttaacctccacacaattttaggagtagaattaacaaataatacagtgaggatgcagaaatggccagagggaagttgtttgatggagttctagatccaccttttccacaaccaccccaattatgggcttagtacttaaagaagattgyaaatacgggaaaaacattttcctctattcttcccaaaggcttttgagtatgagaattagtggatttcaatagcacgttaatagccatacatctcttccaccaacccacacttcctccaccaccacttctcatatgggattcctttcactgacctatacctagattctttc

SEQ ID NO: 240829 - DNA, 426 bp, Homo sapiens
tctttttgcaccgtgttggaaactattgaagtactatcttcacagcgtaacyctccgtacatgcacttcattgctcctcaatttttctgcctttctccaacacaatacctgatacttccctactttctattctcttgtatccttattttttcctaattgagagagaacagtgatgataattaaacaattgagtggaaaccaattcctgcgatagtgctagatgcttaataggtaacatcttctgctcgagttactgagacttcacctactttgaagctactgatctcaaagaagcttaaggaataattatggaggagataattttaggtaaatttgaatttataaggaaatgttgtccaggaaaattatagggtccattttttaccaggcttgagacatatttggtacagagaatattagggagtg

SEQ ID NO: 240830 - DNA, 426 bp, Homo sapiens
tctttttgcaccgtgttggaaactattgaagtactatcttcacagcgtaaccctccgtacatgcacttcattgctcctcaatttttctgcctttctccaacacaatacctgatactkccctactttctattctcttgtatccttattttttcctaattgagagagaacagtgatgataattaaacaattgagtggaaaccaattcctgcgatagtgctagatgcttaataggtaacatcttctgctcgagttactgagacttcacctactttgaagctactgatctcaaagaagcttaaggaataattatggaggagataattttaggtaaatttgaatttataaggaaatgttgtccaggaaaattatagggtccattttttaccaggcttgagacatatttggtacagagaatattagggagtg

SEQ ID NO: 240831 - DNA, 426 bp, Homo sapiens
tctttttgcaccgtgttggaaactattgaagtactatcttcacagcgtaaccctccgtacatgcacttcattgctcctcaatttttctgcctttctccaacacaatacctgatacttccctactttctattctcttgtatccttattttttcctaattgagagagaacagtgatgrtaattaaacaattgagtggaaaccaattcctgcgatagtgctagatgcttaataggtaacatcttctgctcgagttactgagacttcacctactttgaagctactgatctcaaagaagcttaaggaataattatggaggagataattttaggtaaatttgaatttataaggaaatgttgtccaggaaaattatagggtccattttttaccaggcttgagacatatttggtacagagaatattagggagtg

SEQ ID NO: 240832 - DNA, 426 bp, Homo sapiens
tctttttgcaccgtgttggaaactattgaagtactatcttcacagcgtaaccctccgtacatgcacttcattgctcctcaatttttctgcctttctccaacacaatacctgatacttccctactttctattctcttgtatccttattttttcctaattgagagagaacagtgatgataattaaacaattgagtgraaaccaattcctgcgatagtgctagatgcttaataggtaacatcttctgctcgagttactgagacttcacctactttgaagctactgatctcaaagaagcttaaggaataattatggaggagataattttaggtaaatttgaatttataaggaaatgttgtccaggaaaattatagggtccattttttaccaggcttgagacatatttggtacagagaatattagggagtg

SEQ ID NO: 240833 - DNA, 584 bp, Homo sapiens
aaaatattctcacttattctctgaaaccaaaactgacagaatctcttactagcaaagtttccatgcaagaaatattaaaagaggtatttcaatatgaaataaaattacacttgacaatatctagagtccatataaacaaatgcagaacaatagaaaaagcaaaaattagaaacatatgaaagagaatgtaaatgtattttttgtaactattttcttttctcctacctgattcaaaaataaactgcataaagcaatggttataagtaatgtactgattggcatacaatgaatgaagatgtaatatgtatggtaatacaacaaaggaagaaggagagaacaatgctatttagaatcaaaatttttgtatgctattaaaattaagttgatagtaaatctaactagattttcaaaaattaagatactacttgtagcccatcaggcaaccctaagaaaataacttacaaaatataataaaaycagtgataaggggattaatacagtgcattaaaaatatctattcactaaagaaaaggcaatcttagaaaaatagagaaataaaaaagcagaagacatatagaaaacaa

SEQ ID NO: 240834 - DNA, 455 bp, Homo sapiens
acattattttacatttctcagcagggtctcagatctagttgatgcgattttttcaaatcacaaactcacttttgtatagggtttgaggaggggtcaaaataaatttttcctcatagatatccagttgatccagcaccttttattgaaaaggccattcctcacactaaattgtagtastgcttttgtcaaaaatccggtgactttatatagaaaggtctgtttctgatctgttttctgttttattattctaggtgtccatgcttgttctaataccttactatttgatttactttagctttataccaagttttgatatttaatcatgtaaatcctcaacctttgttctttttcaacattatcttggctattaaattcttggtatttctaaatatagttttaaaacagtgtcagacaatgcttttttattatttaaagatgagatactcagtacctga

SEQ ID NO: 240835 - DNA, 376 bp, Homo sapiens
cagttggtttccctactcctaattcaggaaggtgggtgytctgaatgcctggagaaattcccacaatcctgttgtattagtctgttctcaggctgctaataaagacatacttgggactgggtaatttataaaggtaagaggtttaattgactcacagatccacatggctggggaggcctcacaatcatggtggaaagcaaaggagaagcaaacacgtcttacgtggcagcaggcaagaaagagtgtgtgcaggggaactcccctttatcaaaccatcagacctcatgagtcatgagacttatttactatcacaagaacagcatgggaaagacccacctccatgattcaattacctctcactgggttcctcccacaa

SEQ ID NO: 240836 - DNA, 376 bp, Homo sapiens
agttggtttccctactcctaattcaggaaggtgggtgctctgaatgcctggagaamttcccacaatcctgttgtattagtctgttctcaggctgctaataaagacatacttgggactgggtaatttataaaggtaagaggtttaattgactcacagatccacatggctggggaggcctcacaatcatggtggaaagcaaaggagaagcaaacacgtcttacgtggcagcaggcaagaaagagtgtgtgcaggggaactcccctttatcaaaccatcagacctcatgagtcatgagacttatttactatcacaagaacagcatgggaaagacccacctccatgattcaattacctctcactgggttcctcccacaac

SEQ ID NO: 240837 - DNA, 455 bp, Homo sapiens
acattattttacatttctcagcagggtctcagatctagttgatgcgattttttcaaatcacaaactcacttttgtatagggtttgaggaggggtcaaaataaatttttcctcatagatatccagttgatccagcaccttttattgaaaaggccattcctcacactaaattgtagtagtgcttttgtcaaaaatccggtgactktatatagaaaggtctgtttctgatctgttttctgttttattattctaggtgtccatgcttgttctaataccttactatttgatttactttagctttataccaagttttgatatttaatcatgtaaatcctcaacctttgttctttttcaacattatcttggctattaaattcttggtatttctaaatatagttttaaaacagtgtcagacaatgcttttttattatttaaagatgagatactcagtacctga

SEQ ID NO: 240838 - DNA, 376 bp, Homo sapiens
agttggtttccctactcctaattcaggaaggtgggtgctctgaatgcctggagaaattcccacaatcctgttgtattagtctgttctcaggctgctaataaagacatacttgggactgggtaatttataaaggwaagaggtttaattgactcacagatccacatggctggggaggcctcacaatcatggtggaaagcaaaggagaagcaaacacgtcttacgtggcagcaggcaagaaagagtgtgtgcaggggaactcccctttatcaaaccatcagacctcatgagtcatgagacttatttactatcacaagaacagcatgggaaagacccacctccatgattcaattacctctcactgggttcctcccacaac

SEQ ID NO: 240839 - DNA, 376 bp, Homo sapiens
agttggtttccctactcctaattcaggaaggtgggtgctctgaatgcctggagaaattcccacaatcctgttgtattagtctgttctcaggctgctaataaagacatacttgggactgggtaatttataaaggtaagaggtttaattgactcacagatccacatggctggggaggcctcacaatcatggtggaaagcaaaggagaagcaaacacgtcttacrtggcagcaggcaagaaagagtgtgtgcaggggaactcccctttatcaaaccatcagacctcatgagtcatgagacttatttactatcacaagaacagcatgggaaagacccacctccatgattcaattacctctcactgggttcctcccacaac

SEQ ID NO: 240840 - DNA, 376 bp, Homo sapiens
cagttggtttccctactcctaattcaggaaggtgggtgctctgaatgcctggagaaattcccacaatcctgttgtattagtctgttctcaggctgctaataaagacatacttgggactgggtaatttataaaggtaagaggtttaattgactcacagatccacatggctggggaggcctcacaatcatggtggaaagcaaaggagaagcaaacacgtcttacgtggcagcaggcaagaaagagtgtgtgcaggggaactcccctttatcaarccatcagacctcatgagtcatgagacttatttactatcacaagaacagcatgggaaagacccacctccatgattcaattacctctcactgggttcctcccacaa

SEQ ID NO: 240841 - DNA, 455 bp, Homo sapiens
acattattttacatttctcagcagggtctcagatctagttgatgcgattttttcaaatcacaaactcacttttgtatagggtttgaggaggggtcaaaataaatttttcctcatagatatccagttgatccagcaccttttattgaaaaggccattcctcacactaaattgtagtagtgcttttgtcaaaaatccggtgactttatatagaaaggtctgtttctgatctgttttctgttttattattctaggtgtccatgcttgttctaataccttactatttgatttactttagctttataccaagttttgatatttaatcatgtaaatcctcaacctttgttctttttcaamattatcttggctattaaattcttggtatttctaaatatagttttaaaacagtgtcagacaatgcttttttattatttaaagatgagatactcagtacctga

SEQ ID NO: 240842 - DNA, 455 bp, Homo sapiens
acattattttacatttctcagcagggtctcagatctagttgatgcgattttttcaaatcacaaactcacttttgtatagggtttgaggaggggtcaaaataaatttttcctcatagatatccagttgatccagcaccttttattgaaaaggccattcctcacactaaattgtagtagtgcttttgtcaaaaatccggtgactttatatagaaaggtctgtttctgatctgttttctgttttattattctaggtgtccatgcttgttctaataccttactatttgatttactttagctttataccaagttttgatatttaatcatgtaaatcctcaacctttgttctttttcaacrttatcttggctattaaattcttggtatttctaaatatagttttaaaacagtgtcagacaatgcttttttattatttaaagatgagatactcagtacctga

SEQ ID NO: 240843 - DNA, 647 bp, Homo sapiens
  misc_feature (1)...(647): n = A,T,C or G
atcaaaaaggattatcatgacaatagttgtaggaaaatctttggagaaaatccaacactcattcatattaaaaaacctatgacacttaacaaaaaatatgacacttaaaacacaagcaacacgagaaaaatattgttaaattggacttcattaaaattaaaggcttttgatctncnnnntncaccaaaaaaaagggttttttctttgtttagcaggagccanaatattttcayattgtatgtctgataaggacttatgcataatatataaagaactgttgcaactaaaaatcaaaagacaaataactcaattaaaaaatgagcaagttttttgaaagactttacgccaaggaagatatacaaatggccaataggcacatgaaaatatgctgactgttattagccattagggaaatgcaaatcacaatcataatgagatgaaacttcacaaataccagaataactataataaaaaagacagataataacaagtgttgctgaggatgtaaaagaattagaactctcatacattgcttctcagaatgtaaaacagtttctttgaaaaacagtttagaaattctgcataaaatgaaacatagagctgccatatgacccagaaattctacttgtaggaatatacccaagaga

SEQ ID NO: 240844 - DNA, 647 bp, Homo sapiens
  misc_feature (1)...(647): n = A,T,C or G
atcaaaaaggattatcatgacaatagttgtaggaaaatctttggagaaaatccaacactcattcatattaaaaaacctatgacacttaacaaaaaatatgacacttaaaacacaagcaacacgagaaaaatattgttaaattggacttcattaaaattaaaggcttttgatctncnnnntncaccaaaaaaaagggttttttctttgtttagcaggagccanaatattttcatattgtatgtctgataaggacttatgcataatatataaagaactgttgcaactaaaaatcaaaagacaaataactcaattaaaaaatgagcaagttttttgaaagactttaygccaaggaagatatacaaatggccaataggcacatgaaaatatgctgactgttattagccattagggaaatgcaaatcacaatcataatgagatgaaacttcacaaataccagaataactataataaaaaagacagataataacaagtgttgctgaggatgtaaaagaattagaactctcatacattgcttctcagaatgtaaaacagtttctttgaaaaacagtttagaaattctgcataaaatgaaacatagagctgccatatgacccagaaattctacttgtaggaatatacccaagaga

SEQ ID NO: 240845 - DNA, 647 bp, Homo sapiens
  misc_feature (1)...(647): n = A,T,C or G
atcaaaaaggattatcatgacaatagttgtaggaaaatctttggagaaaatccaacactcattcatattaaaaaacctatgacacttaacaaaaaatatgacacttaaaacacaagcaacacgagaaaaatattgttaaattggacttcattaaaattaaaggcttttgatctncnnnntncaccaaaaaaaagggttttttctttgtttagcaggagccanaatattttcatattgtatgtctgataaggacttatgcataatatataaagaactgttgcaactaaaaatcaaaagacaaataactcaattaaaaaatgagcaagttttttgaaagactttacgccaaggaagatatacaaatggccaataggcacatgaaaatatgctgactgttattagccattagggaaatgcaaatcacaatcataatgagatgaaacttcacaaataccagaataactataataaaaaagacagataataacaagtgttgytgaggatgtaaaagaattagaactctcatacattgcttctcagaatgtaaaacagtttctttgaaaaacagtttagaaattctgcataaaatgaaacatagagctgccatatgacccagaaattctacttgtaggaatatacccaagaga

SEQ ID NO: 240846 - DNA, 486 bp, Homo sapiens
tgggtggggtaacagccaaaccttatcaatacccaaaggaatataaattactctattataaagacacatgcatkcatatcttcattgcagtactattcacaaagcaaagacatggaatcaatctaaatgcccatcagtgatagactggataaagaaaatatggtacatattcatcatggaatactatgcagccgtaaaaagaatgagatcatgtcctttttagggacattatggagctggaggccattatccttagccaactaatgcagagacagaaaaccaaataccacatgttctcacttataagtgggagctaaatgatgagcacatatggacacagagggtaacaacatccatggggcttttcacaggctagagggtagagggagaggatcaggaaaaataactaatgggtattaggcttaataccagggtgatgaaataatctgtacaataaacccccaagacacaaatttaccaatgtat

SEQ ID NO: 240847 - DNA, 486 bp, Homo sapiens
tgggtggggtaacagccaaaccttatcaatacccaaaggaatataaattactctattataaagacacatgcattcatatcttcattgcagtactattcacaaagcaaagacatggaatcaatctaaatgcccatcagtgatagactggataaagaaaatatggtacatattcatcatggaatactatgcagccgtaaaaagaatgagatcatgtcctttttagggacattatggagctggaggccattatccttagccaactaatgyagagacagaaaaccaaataccacatgttctcacttataagtgggagctaaatgatgagcacatatggacacagagggtaacaacatccatggggcttttcacaggctagagggtagagggagaggatcaggaaaaataactaatgggtattaggcttaataccagggtgatgaaataatctgtacaataaacccccaagacacaaatttaccaatgtat

SEQ ID NO: 240848 - DNA, 486 bp, Homo sapiens
tgggtggggtaacagccaaaccttatcaatacccaaaggaatataaattactctattataaagacacatgcattcatatcttcattgcagtactattcacaaagcaaagacatggaatcaatctaaatgcccatcagtgatagactggataaagaaaatatggtacatattcatcatggaatactatgcagccgtaaaaagaatgagatcatgtcctttttagggacattatggagctggaggccattatccttagccaactaatgcagagacagaaaaccaaataccacatgttctcacttataagtgggagctaaatgatgagcacatatggacacagagggtaacaacayccatggggcttttcacaggctagagggtagagggagaggatcaggaaaaataactaatgggtattaggcttaataccagggtgatgaaataatctgtacaataaacccccaagacacaaatttaccaatgtat

SEQ ID NO: 240849 - DNA, 337 bp, Homo sapiens
agaagtgactgcagtaatttagaagagagataacggaaccatggcctcgggtagtatctacaaaaaaggtgagaactcgatttaggatgtgttgtgaaggtaaagttgacaggctttgccaatggaatggatgtggagtgtgtaaaacatagggaatcygggctgatttttaaattgagggccagagccactggatagttagagatgatatttccactaagactggaagtgagggggagcatcatatttggggcagggaggaatcaaagtttctgttttgagtagttaaattcagaatgcttctcagatatcccagaggaggtgttaatttggcagt

SEQ ID NO: 240850 - DNA, 337 bp, Homo sapiens
agaagtgactgcagtaatttagaagagagataacggaaccatggcctcgggtagtatctacaaaaaaggtgagaactcgatttaggatgtgttgtgaaggtaaagttgacaggctttgccaatggaatggatgtggagtgtgtaaaacatagggaatctgggctgatttttaaattgagggccagagccactggatagttagagatgatatttccactargactggaagtgagggggagcatcatatttggggcagggaggaatcaaagtttctgttttgagtagttaaattcagaatgcttctcagatatcccagaggaggtgttaatttggcagt

SEQ ID NO: 240851 - DNA, 476 bp, Homo sapiens
gctggaagaggcttacagaaagagcacaagaatgyggggtatctgtgtgtgctgtcaacagtgctcactattactgcgaatgaatatctgtgtccccccaaaattcatatattgaagcctaacccccaagttgatgatatttggaggtggggccttggggaggtgattaggtcatgagtgtggagccctcataggtgtgattcctgcccttataagaaaagatgatctctctctccaccatctaaggatacaagaagacagcatctgcaaaccaggaagggggtcttcaccagtcacagagtctgctgacaccctgaccctggactatcctaggctccagaactccagaaatcaatctctgttgtttaaatcactcagtctgtggtatcttgttatagcagcccaaactgactaagacaattatacatgtcaaaatcctttctaatctgtggatctgggctttgcaattttgcatg

SEQ ID NO: 240852 - DNA, 476 bp, Homo sapiens
gctggaagaggcttacagaaagagcacaagaatgcggggtatctgtgtgtgctgtcaacagtgctcactattactgygaatgaatatctgtgtccccccaaaattcatatattgaagcctaacccccaagttgatgatatttggaggtggggccttggggaggtgattaggtcatgagtgtggagccctcataggtgtgattcctgcccttataagaaaagatgatctctctctccaccatctaaggatacaagaagacagcatctgcaaaccaggaagggggtcttcaccagtcacagagtctgctgacaccctgaccctggactatcctaggctccagaactccagaaatcaatctctgttgtttaaatcactcagtctgtggtatcttgttatagcagcccaaactgactaagacaattatacatgtcaaaatcctttctaatctgtggatctgggctttgcaattttgcatg

SEQ ID NO: 240853 - DNA, 476 bp, Homo sapiens
gctggaagaggcttacagaaagagcacaagaatgcggggtatctgtgtgtgctgtcaacagtgctcactattactgcgaatgaatatctgtgtccccccaaaattcatatattgaagcctaacccccaagttgatgatatttggagktggggccttggggaggtgattaggtcatgagtgtggagccctcataggtgtgattcctgcccttataagaaaagatgatctctctctccaccatctaaggatacaagaagacagcatctgcaaaccaggaagggggtcttcaccagtcacagagtctgctgacaccctgaccctggactatcctaggctccagaactccagaaatcaatctctgttgtttaaatcactcagtctgtggtatcttgttatagcagcccaaactgactaagacaattatacatgtcaaaatcctttctaatctgtggatctgggctttgcaattttgcatg

SEQ ID NO: 240854 - DNA, 476 bp, Homo sapiens
gctggaagaggcttacagaaagagcacaagaatgcggggtatctgtgtgtgctgtcaacagtgctcactattactgcgaatgaatatctgtgtccccccaaaattcatatattgaagcctaacccccaagttgatgatatttggaggtggggccttggggaggtgattaggtcatgagtgtggagccctcataggtgtgattcctgcccttataagaaaagatgatctctctctccrccatctaaggatacaagaagacagcatctgcaaaccaggaagggggtcttcaccagtcacagagtctgctgacaccctgaccctggactatcctaggctccagaactccagaaatcaatctctgttgtttaaatcactcagtctgtggtatcttgttatagcagcccaaactgactaagacaattatacatgtcaaaatcctttctaatctgtggatctgggctttgcaattttgcatg

SEQ ID NO: 240855 - DNA, 342 bp, Homo sapiens
tctgcagcagtgtcaaagtgtgttacaatggtcttttagctctgcggtctgggaggggctgtctgcgacccccagagccccagagggcatgtgttacaatcagtgctcctttaacatttgctgtctgtggatggctaagtgttaaccaactcagtggatggtcaggktgacagccttttacactttgctgtcttggtaactgagttctgatccagcgtccaggaagaatcaggtcacatgaacaaattgaaggtggtgaatgtggaggactttattgagtggtaaaagtgggcctcagtgggaaagggagctggaaaggggatggagcaggaagataatctt

SEQ ID NO: 240856 - DNA, 301 bp, Homo sapiens
cagacatttgtatctataatttagacagtttaaaatgcaatattaagtaattcaaaaattgttcaaagctcagtaccttttcacacattaatactttgattatcaacttccttttaaagagtaagtgagtagaaaagggtaagtagaaaagagtagaagaggcctttctttcacaatttgccaaaacatgcatyacttatttaaaataaaaaaaaatgctgtttgaaaaacaagaaggatggcaagaatgaagctccttcatgcaagatacctctgactaccctctaaagacagatactat

SEQ ID NO: 240857 - DNA, 399 bp, Homo sapiens
attatgcctgatagggcacttccatgtgcagtgaggtttgtatttgcacatctagagcatccaggaaatcagcraagttgcgttttgtgtctttagatatgctacagttgataaaccctaagattcagatattaactattggataagctcttgcatttcccataactttagctttgaagccattcattacattaatactaaggaaagaatgtcagaaaatccaaagagagagaattcacagttatgatttttggacatataattggaaagaagtcagatttggcttttacaattagtgccatataatgtcacacaaagtatttcctgcagtgtgctcaaagaggtcaatttgtgatttatttgcaagtcatagttctgaaattactgacttgtgtgtgt

SEQ ID NO: 240858 - DNA, 399 bp, Homo sapiens
attatgcctgatagggcacttccatgtgcagtgaggtttgtatttgcacatctagagcatccaggaaatcagcgaagttgsgttttgtgtctttagatatgctacagttgataaaccctaagattcagatattaactattggataagctcttgcatttcccataactttagctttgaagccattcattacattaatactaaggaaagaatgtcagaaaatccaaagagagagaattcacagttatgatttttggacatataattggaaagaagtcagatttggcttttacaattagtgccatataatgtcacacaaagtatttcctgcagtgtgctcaaagaggtcaatttgtgatttatttgcaagtcatagttctgaaattactgacttgtgtgtgt

SEQ ID NO: 240859 - DNA, 399 bp, Homo sapiens
attatgcctgatagggcacttccatgtgcagtgaggtttgtatttgcacatctagagcatccaggaaatcagcgaagttgcgttttgtgtctttagatatgctacagttgataaaccctaagattcagatattaactattggataagctcttgcatttcccataactttagctttgaagccattcattacmttaatactaaggaaagaatgtcagaaaatccaaagagagagaattcacagttatgatttttggacatataattggaaagaagtcagatttggcttttacaattagtgccatataatgtcacacaaagtatttcctgcagtgtgctcaaagaggtcaatttgtgatttatttgcaagtcatagttctgaaattactgacttgtgtgtgt

SEQ ID NO: 240860 - DNA, 399 bp, Homo sapiens
attatgcctgatagggcacttccatgtgcagtgaggtttgtatttgcacatctagagcatccaggaaatcagcgaagttgcgttttgtgtctttagatatgctacagttgataaaccctaagattcagatattaactattggataagctcttgcatttcccataactttagctttgaagccattcattacattaatactaaggaaagaatgtcagaaaatccaaagagagagaattcwcagttatgatttttggacatataattggaaagaagtcagatttggcttttacaattagtgccatataatgtcacacaaagtatttcctgcagtgtgctcaaagaggtcaatttgtgatttatttgcaagtcatagttctgaaattactgacttgtgtgtgt

SEQ ID NO: 240861 - DNA, 528 bp, Homo sapiens
accttcttcactctactctgactccaacacctcatgcttggccaccgtcattcttggatgccatccctgggctctgatctactccctagattatcatccatttcacacagacactcttctcatccttcctgggttaaacccacatgggtgctcacccyactctgctcagtcaggctctgacactccaaccttgctacatcactgcgtgatgcccttttcatcttgcttgggttctgccaccacttctgtgtggactccttctcctgttctttggctttgatacctggcaccttggagccctcctatacagatgcccctttcagtctatttacaccagaaaatcccacagtgacctgactcttctacatgcaaatcctttttatcccattctgtgccactgccttacatgggtgttatcttcccactagcctgaggggtttagacaccaggtgatggataatacttctgtctggatgctccctcacctttttttgattctgacaccccacgtgggtcacctacatgcat

SEQ ID NO: 240862 - DNA, 528 bp, Homo sapiens
accttcttcactctactctgactccaacacctcatgcttggccaccgtcattcttggatgccatccctgggctctgatctactccctagattatcatccatttcacacagacactcttctcatccttcctgggttaaacccacatgggtgctcaccctactctgctcagtcaggctctgacactccaaccttgctacatcactgcgtgatgcccttttcatcttgcttgggttctgccaccacttctgtgtggactccttctcctgttctttggctttgatacctggcaccttggagccctcctatacagatgcccctttcagtctatttacaccagaaaatcccacagtgacytgactcttctacatgcaaatcctttttatcccattctgtgccactgccttacatgggtgttatcttcccactagcctgaggggtttagacaccaggtgatggataatacttctgtctggatgctccctcacctttttttgattctgacaccccacgtgggtcacctacatgcat

SEQ ID NO: 240863 - DNA, 472 bp, Homo sapiens
tcacaaagctaagaaatacatatgcatataccaagcaaagcacaccataagggtaaaatgatgacttttttgaggttggaggttactatctgtccatcctgtcttccttagattatttccytgaaatcttaataggtccaaataacagatttatgcttttgattttgcagtggaagaatggggactttctgacccttggaattgtaaacaaatgcctccaaaacttacttgggagtttttcacaagaggactatcttaggatgtagccctttgtctcttgaggagatgagaagttattcttacttctgctttgctaaataaattatgtgaaagtctgcctagacattttagtcacttttgtagtacctacgtgcatagaaatctgaccatgttcatgtagtaataaactgtgttctcttttctatgttggttcagagaggtctttgttagtgttattttatttccaacaaac

SEQ ID NO: 240864 - DNA, 453 bp, Homo sapiens
catgaggctgagccatttttcaaagatgtcaaaataggaaaataataaaatggaagaaaacccagaatcccatcccctgacttgctccagaggcctccccaactccaggccaccaggagcaggggccctgcagaggaactctccctgggtagaaattcgctggtttttgccttccaccagatgttggcaacttcaatttcatcttttttggcattagagctaaygttaaaatgactcaggtcaaaaaagagtgatgtgctgcagccctgacaatgctcccagtgagaatttgtgcaaaactcttccctggatctacaaaactagggccaggcagggtgttggggctgtgacgactgcatctctgcctcctcctctctgcagtgtggcctcttcacaggcagagcattcattcctctttagcttctcaccagcccaggatgcagggaagaagta

SEQ ID NO: 240865 - DNA, 587 bp, Homo sapiens
aattcacaagtgtcttgcgctgtgtgtgtgtgtgcgtgcacgcatgcstgtgtagcttttggttttattctggtttgttttgcaaaaatgaaataatagcaaacatgtgatcctgaaactttcttcactgaatacgtatcttagaatctttatttttcttattattcaaaataattcattttttaacctactacttactcatcattaaatatagttatttaatccccttttaaaaccatttgaattgttttaaattttgtcctactgcaaataatttcatcatattcttttaacctataactgcacatatgttttagtatttctgtaggttaaatttttggaaatggtatcagatcaaaaaagttaacattaaagtcataatcaatattcccaaatgtagacacatttttgaatcttcaatttaatcactttcataaaatttcaactttccttaataatacttccaatttaaactaaggagctttaattgtttaggaccacaaagatttctatcagagggaggacaaaacatgaaatattttgttttgtaatttatttgttgcaaaaaacatcactgctgtttgtat

SEQ ID NO: 240866 - DNA, 587 bp, Homo sapiens
aattcacaagtgtcttgcgctgtgtgtgtgtgtgcgtgcacgcatgcctgtgtagcttttggttttattctggtttgttttgcaaaaatgaaataatagcaaacatgtgatcctgaaactttcttcactgaatacgtatcttagaatctttatttttcttattattcaaaataattcattttttaacctactacttactcatcattraatatagttatttaatccccttttaaaaccatttgaattgttttaaattttgtcctactgcaaataatttcatcatattcttttaacctataactgcacatatgttttagtatttctgtaggttaaatttttggaaatggtatcagatcaaaaaagttaacattaaagtcataatcaatattcccaaatgtagacacatttttgaatcttcaatttaatcactttcataaaatttcaactttccttaataatacttccaatttaaactaaggagctttaattgtttaggaccacaaagatttctatcagagggaggacaaaacatgaaatattttgttttgtaatttatttgttgcaaaaaacatcactgctgtttgtat

SEQ ID NO: 240867 - DNA, 587 bp, Homo sapiens
aattcacaagtgtcttgcgctgtgtgtgtgtgtgcgtgcacgcatgcctgtgtagcttttggttttattctggtttgttttgcaaaaatgaaataatagcaaacatgtgatcctgaaactttcttcactgaatacgtatcttagaatctttatttttcttattattcaaaataattcattttttaacctactacttactcatcattaaatatagttatttaatccccttttaaaaccatttgaattgttttaaattttgtcctactgcaaataatttcatcatattcttttaacctataactgcacatatgttttagtatttctgtaggttaaatttttggaaatggtatcagatcaaaaaagttaacattaaagtcataatcaatattcccaaatgtagacacatttttgaatcttcaayttaatcactttcataaaatttcaactttccttaataatacttccaatttaaactaaggagctttaattgtttaggaccacaaagatttctatcagagggaggacaaaacatgaaatattttgttttgtaatttatttgttgcaaaaaacatcactgctgtttgtat

SEQ ID NO: 240868 - DNA, 587 bp, Homo sapiens
aattcacaagtgtcttgcgctgtgtgtgtgtgtgcgtgcacgcatgcctgtgtagcttttggttttattctggtttgttttgcaaaaatgaaataatagcaaacatgtgatcctgaaactttcttcactgaatacgtatcttagaatctttatttttcttattattcaaaataattcattttttaacctactacttactcatcattaaatatagttatttaatccccttttaaaaccatttgaattgttttaaattttgtcctactgcaaataatttcatcatattcttttaacctataactgcacatatgttttagtatttctgtaggttaaatttttggaaatggtatcagatcaaaaaagttaacattaaagtcataatcaatattcccaaatgtagacacatttttgaatcttcaatttaatcactttcataaaatttcaactttccttaataatacttccaatttaaactaaggagctttaattgtttaggaccacaaagatttctatcagagggaggacaaaacrtgaaatattttgttttgtaatttatttgttgcaaaaaacatcactgctgtttgtat

SEQ ID NO: 240869 - DNA, 453 bp, Homo sapiens
catgaggctgagccatttttcaaagatgtcaaaataggaaaataataaaatggaagaaaacccagaatcccatcccctgacttgctccagaggcctccccaactccaggccaccaggagcaggggccctgcagaggaactctccctgggtagaaattcgctggtttttgccttccaccagatgttggcaacttcaatttcatcttttttggcattagagctaacgttaaaatgactcaggtcaaaaaagagtgatgtgctgcagccctgacaatgctcccagtgagaatttgtgcaaaactcttccctggatctacaaaacyagggccaggcagggtgttggggctgtgacgactgcatctctgcctcctcctctctgcagtgtggcctcttcacaggcagagcattcattcctctttagcttctcaccagcccaggatgcagggaagaagta

SEQ ID NO: 240870 - DNA, 453 bp, Homo sapiens
catgaggctgagccatttttcaaagatgtcaaaataggaaaataataaaatggaagaaaacccagaatcccatcccctgacttgctccagaggcctccccaactccaggccaccaggagcaggggccctgcagaggaactctccctgggtagaaattcgctggtttttgccttccaccagatgttggcaacttcaatttcatcttttttggcattagagctaacgttaaaatgactcaggtcaaaaaagagtgatgtgctgcagccctgacaatgctcccagtgagaatttgtgcaaaactcttccctggatctacaaaactaggkccaggcagggtgttggggctgtgacgactgcatctctgcctcctcctctctgcagtgtggcctcttcacaggcagagcattcattcctctttagcttctcaccagcccaggatgcagggaagaagta

SEQ ID NO: 240871 - DNA, 626 bp, Homo sapiens
gcattctactttgatcctcctaattctgatcctctctccgttacctcttccccaaaaaccttctaaggatcatatcattttaattaggaagttatttggctaccttcaaaatatgatttgtctttataaatattggactaataactccaatttgtgcacacgacatctgaagaatgttacgaacatgtgtgaactctgtaaggctcccagtccaactttttttttgagatgcagttttgctcttgtcacccaggctggagtgcaatggtgtgatcttggctcactgcaacctccacctcctgggttcaagtgattctcctacctcagtctcctgagtagctgggattacaggcacttgccaccatgcccagctcatttttgtatttttagtagagacggggtttcaccatgttggccagggttgtctcaatctcttaacctcatgatctgcccrccttggcctcccaaagtgctgggattacaggcgtgagccactgcgcccagtcccggtccaacttttatttcattttcatctttcctaatccagccttgtgttggaagcttcttcagactaaaccaagaaaaccttaggtcttcatgttcatatggggactttaatgttgata

SEQ ID NO: 240872 - DNA, 626 bp, Homo sapiens
gcattctactttgatcctcctaattctgatcctctctccgttacctcttccccaaaaaccttctaaggatcatatcattttaattaggaagttatttggctaccttcaaaatatgatttgtctttataaatattggactaataactccaatttgtgcacacgacatctgaagaatgttacgaacatgtgtgaactctgtaaggctcccagtccaactttttttttgagatgcagttttgctcttgtcacccaggctggagtgcaatggtgtgatcttggctcactgcaacctccacctcctgggttcaagtgattctcctacctcagtctcctgagtagctgggattacaggcacttgccaccatgcccagctcatttttgtatttttagtagagacggggtttcaccatgttggccagggttgtctcaatctcttaacctcatgatctgcccgccttggcctcccaaagtgctgggattacaggcgtgagccactgcgcccagtcccggtycaacttttatttcattttcatctttcctaatccagccttgtgttggaagcttcttcagactaaaccaagaaaaccttaggtcttcatgttcatatggggactttaatgttgata

SEQ ID NO: 240873 - DNA, 560 bp, Homo sapiens
  misc_feature (1)...(560): n = A,T,C or G
agagccagctgtacaggagactggagattcattatttctcaaatccatctcccagagctttcagagtttttaaggataatttggtgcatggaggaaggccagtgagtccagagtgctgattggttaggtcagagataaaatcataaggaattgaagctgttctctttcactgagtccgttcctgggtgggggccacaagatcagatgagccagtttatcgatctgagtgttacaataaactgggtgccagctgatccatcaagtgccggggctgcaaaatacctcaagcactgatcttaggagcagtttagggaggattagaatcttgtagcctccagctgcatgactcctaaacgataatttctaattttgtagctaatttgttagtcttacaaaggcagtctagttcccaggcaagaagnaggtttgttttgagaaaggggtgttaatatctttgttttacactataaagtaagttcctcccaaagttagttcaccctacacccaggmatgaacaaggacagcttggaggttaaaagcaaatggagttggttaggtca

SEQ ID NO: 240874 - DNA, 490 bp, Homo sapiens
gcagaaacagtcagaccctagcagggtgcaaggacagaaatcagcccaactgtaagaaaacttagaaaatatatctaaaactttatccctgttatagatggaaaayacttggtgcagagcctggaatcttctatgaacttggataggtgaataacactgtactacatggtgatagctgtgaaagatccaagtgttacacttagaactgacaaattcaacatattttgtcagacaagcattgggctcattctgtccattccacagtctattggctgaactctgctaaacctatctgattaaataaagacatctgtaaaagtcttaataatggtcacactacaaagctctttgagtaactaatcccagtgttagccagcaatgagtcttagggaagttcttcacattgacctggattccaaatacctaataaaaaagagcaagtgtcaaactcagagtgtgtgtctctctcttcctgtttatttgtgaatgg

SEQ ID NO: 240875 - DNA, 490 bp, Homo sapiens
gcagaaacagtcagaccctagcagggtgcaaggacagaaatcagcccaactgtaagaaaacttagaaaatatatctaaaactttatccctgttatagatggaaaacacttggtgcagagcctggaatcttctatgaacttggataggtgaataacactgtactacatggtgatagctgtgraagatccaagtgttacacttagaactgacaaattcaacatattttgtcagacaagcattgggctcattctgtccattccacagtctattggctgaactctgctaaacctatctgattaaataaagacatctgtaaaagtcttaataatggtcacactacaaagctctttgagtaactaatcccagtgttagccagcaatgagtcttagggaagttcttcacattgacctggattccaaatacctaataaaaaagagcaagtgtcaaactcagagtgtgtgtctctctcttcctgtttatttgtgaatgg

SEQ ID NO: 240876 - DNA, 490 bp, Homo sapiens
gcagaaacagtcagaccctagcagggtgcaaggacagaaatcagcccaactgtaagaaaacttagaaaatatatctaaaactttatccctgttatagatggaaaacacttggtgcagagcctggaatcttctatgaacttggataggtgaataacactgtactacatggtgatagctgtgaaagatccaagtgttacacttagaactgacaaattcaacatattttgtcagacaagcattgggctcattctgtccattccacagtctattggctgaactctgctaaacctatstgattaaataaagacatctgtaaaagtcttaataatggtcacactacaaagctctttgagtaactaatcccagtgttagccagcaatgagtcttagggaagttcttcacattgacctggattccaaatacctaataaaaaagagcaagtgtcaaactcagagtgtgtgtctctctcttcctgtttatttgtgaatgg

SEQ ID NO: 240877 - DNA, 490 bp, Homo sapiens
gcagaaacagtcagaccctagcagggtgcaaggacagaaatcagcccaactgtaagaaaacttagaaaatatatctaaaactttatccctgttatagatggaaaacacttggtgcagagcctggaatcttctatgaacttggataggtgaataacactgtactacatggtgatagctgtgaaagatccaagtgttacacttagaactgacaaattcaacatattttgtcagacaagcattgggctcattctgtccattccacagtctattggctgaactctgctaaacctatctgattaaataaagacatctgtaaaagtcttaatratggtcacactacaaagctctttgagtaactaatcccagtgttagccagcaatgagtcttagggaagttcttcacattgacctggattccaaatacctaataaaaaagagcaagtgtcaaactcagagtgtgtgtctctctcttcctgtttatttgtgaatgg

SEQ ID NO: 240878 - DNA, 505 bp, Homo sapiens
gaattctgaagaagcagtagacacagatttcccataataaatactagtggaaggacaacagaaataaaaaaagttttttctcttttctaccaatctcttccttttgaaaaagatagcaacraagatagcttaaagatagatctttaagcctcaattttgaggccatttctttctagagaatttttggtttctcctttccacactccattataggctgtgctaagggaccctcctctgcactcctattggtaaacaacattattattgcattattcacacctgctgtaattgtcttgtttatatatttgtctcccccaataagtctgtggccttgccttgtgtttccaataattcactcctcagagggctttcccagggggctgggggcagcgaggggcccactgataaacagcagatgcccagtaggcctgaggcatgtctgacacatggatgatgaaggagatgggaaaaaaggagcagcagctcctgggatgatatagttaag

SEQ ID NO: 240879 - DNA, 553 bp, Homo sapiens
tgtgtatttacagatgaagtgaatttcctgtagaaagtttatagttaggtcttgtttttaatcagtgtagccattatatgtcttaaatgggataatccatttacatacaagataattattgataggcaaggacttggtcctgccatattattacttgttttcatgttttttttttaatttgtactttgattgattgattgatttcactaccttcctttgtgattaagtgatttactctatcagtgtgtttcggtttctttttttttttaatttttagagtatcttttaaaagtttttgctttgtggttaccacaaggcatgcaaagaacattttatggttacaataagttattttaaagagatagcaacttaattttgattcaaaaaagggggaaaagaaaccamtctactctttaactccctcactccctcactccctcacattttacatttttgatgtcttaatttacatctttgtatattgcgattccttaacaaattattgtaattattattatttgtattgtattttaaccttcctactaaggatata

SEQ ID NO: 240880 - DNA, 594 bp, Homo sapiens
acaggccctacaatgatgtgatgtttcccctatttgccaatcagggagctcagagcacaccaatctacttcttggaacctcctctttttctcatgctcacatcaaagcagccagcaaggcctgtaagctctataaaatatatgcagaatccaactagctcacccctccgctgctatctctctgcacctggccaccatcatttgtttcctcacctactgctccatctcctcactggcccacctgttctgccttcacctggccctgtgtcctccctaactctctgatttcagctcccctcactctgaattcattcagtttctctactcacaatgaacgctgctggcccctgagcttcctaagaatatcctcacctcagggcctttgcccttgctgctcccaccttccagaacaatctttccctagatacccacatggctcaatccctcaatcctttctctgctcaaatgtcaccactttggagaagactcttgcractaccccatgtaaatagcacccctgtcactctctgacttattaccctgctttactccttcttagacgtttatcactgcctacatatacttacttgtttat

SEQ ID NO: 240881 - DNA, 582 bp, Homo sapiens
gcatcgcttattgtattcatattttaatactctactgatattaatggaattcatattccagaaggagaggcagatgtgcaaacagacaattgcactccagtgtgacatactcatggtcgtggcatcgtacaaggcactggttgctgcctgagctgctgaaaaaatgggagtgagagtgctgggaaaactaagtgacacatgctcaggcaaggagttttagtccttagagctaaacctgtctctgcagcctggaaaccccactccctcagcttcctgcggggatgagaaggggagtgcccagctacgagcatttctcctcctggctgctaccatgactccaagtagggccatccctggaatggaagacacagtcactcctgcctcggtttacagtggtgtttcccgacatttgttttcaaggactccagcagggctgagactagggtgaagctagccaggtgcacagggggtaacattcaaagaggcacccactcactctcaggatggtgcaatgagacggtgtcctttaattttgcactgcaggcccctygcttgtctcactgtattcgctcccattcctgg

SEQ ID NO: 240882 - DNA, 559 bp, Homo sapiens
tgaattctactgccccagacatctgctgcgcctgccagtgctcctaacactaccacccaatcaccagagctgcaaccactcccctacttgccctccccgccaccgccacacttacacttgcaattccctcatggcttgccaacaaatggtgaccctccatccygccctgcctgcctcacaggcacacaccatctgcacccacctcgggctgctcaaagatttatgcatctgagaatatgtccttccctcctctttccagtgggaggaggaccttcatgagccttgatctcatcagccatctggactgatgaggctcaactcataactatatctgcaaaggtgagagagagcccaggggagggcagcctcactggaagattgagccacgtggctcagaattgtggccatggggtcaggtcctcaactcctatcacagttcctgccacaatgcccatcctccatctttagggctggaagaaaaaagtatgcaggctgcagatgtacagtgtttgccactttctctcacctcttccgagaggctgtaatagcgtggtggttg

SEQ ID NO: 240883 - DNA, 624 bp, Homo sapiens
cagccagcagtgccacatgggggaaggcaagcatgtggaggtcaggcagggaggacgctgtcccttccagtggcctgatgggcacaggagttggcctggaaaccggactggtgtaggggcaggtgggcagcgtgataggatggagactaagcactccaagaaaggggctccccaaggatgcaggtgtacccaagtgggtgggtttgagctggatttatgtacaggggcaagtgaggaggccgctgcatgaacaacaattttcccagaatggaagcttgcaggaggaacacccagaggacacccagaggtgagaatttttgcctgacattaacactagttccacaaccaccatcccgaacccttggagccagatgtgtcccagagctcaggctgaaccctacttctgaaaggtgatatggggcttgttcaatatatcacacaacacaactggggtccaaagaatcactrtgtaatcactcaacattaatatttctgcagtgacgcatttggatggtgatactaagtgagaaaaacaaataccataaatatcctcccatcgacccaggctgggttttgccaccaagtcatttcaagtcagttcaggtcaggttcagttttctcatc

SEQ ID NO: 240884 - DNA, 577 bp, Homo sapiens
agctttttggatttctggtttgcagggaaggggttgcaggcttgtgaaaagagccgggattgtgacatcatgctcacgaccactgtaatagctgctatttgtgggatggcacrgtgtggtggccctgagcctaagctggcttgaatattcaccatggccctgcaaagcaggccctgtcttcttcatttggtagagaaggggaagggtagggttgtcaaggtaacgggagccatctaagtcaccacaactgataagaggagacagagcatagaggaggtaaattgtcctcagagaatcatctggaacaaagttcctagaagaacagaggtttaggtcaaattcaatgattccttcagctacatttgcaccaaccggtctgggggcagacatagctcctgtatgttctgtaggtatgttaaggaaataacaaggccttaagaactctaacccctttgcctaggggctatctgtcctcatgccctcctgtaatgagattctagcataataatccctgctctgggctccctccgtccatgtgttctctcccccatttcactgctggaaaaactaaggctca

SEQ ID NO: 240885 - DNA, 510 bp, Homo sapiens
ggatattaaacaaactcacaccccagagttgtgagaaatactaaaagaaacaaacatatgtaaaagcrtcttgcaaaatgcaaaggcaagtggacactgctgttagtgtgaatttattgctcagcttctagactgtgggaggtgatgagcaaatctagaaacttctgccatgcaactatcaagtgggagtccttgcccatctcacttgatcccaggagcctagcatgggaaccggcacgtagtacatgctcaatgtgcatttgtggaatgaaccaatgagtcagtgaaggaaggaacggacttcctgttcacttaagcagatctgccgccatcccacccactcagaaagtatgcctagaaagcgccctgcaaggctgggcacaaagatggcactagaccaagtcaacctcaggctagagcttgagtccactggtgcctttgtgagtttgtctattgcttgaggtcctttcaggagctgtgcttggtgctgggagtatggctgtaaacaaa

SEQ ID NO: 240886 - DNA, 367 bp, Homo sapiens
agataattctaattgttgctggtccctatctgccaacargtggttattctaaggcccctaaagccagaccacttttaattgaagatgatgaaatagccaggccagccagtgacctaagagtccattccctgaggccagagtgaactcacaggcaccagccagccctggagcttgagctgccggcatacctgggctgccagtcattagcaaagcaataatagctggcatgtgtggtgcactcattggccagaccctgggctaaactcctcaggaagtgaggccttgcctgcaggccaaagggaaggccaggagcaagatgctctttctgtagctccctggccatgacactctccccagagatagagtg

SEQ ID NO: 240887 - DNA, 367 bp, Homo sapiens
agataattctaattgttgctggtccctatctgccaacaggtggttattctaaggcccctaaagccagaccacttttaattgaagatgatgaaatagccaggccagccagtgacctaagagtccattccctgaggccagagtgaactcacaggcaccagccagccctggagcttgagctgccsgcatacctgggctgccagtcattagcaaagcaataatagctggcatgtgtggtgcactcattggccagaccctgggctaaactcctcaggaagtgaggccttgcctgcaggccaaagggaaggccaggagcaagatgctctttctgtagctccctggccatgacactctccccagagatagagtg

SEQ ID NO: 240888 - DNA, 404 bp, Homo sapiens
gacactttgggctcctcctccctttaagttaacaggctaagaaaggagttacagtgttggctggggtgattgacccagactatcaagacgaaatcagtctgctactctacaacggaggtaaggaagagtatatatatataaataggaggccattagggcgtctcttagtattaccatgccctgtgattaaggtcaatgggaaactacarcagcccaatctgggcaggactacaaatgacccagaaccttcaggaataaggtttgggtcacaccaccacaaaaaaaacaccttgacctgctgaggtgtttgctgaaggcaaagggaatacagaatgggtagtagaagaaggcggtcatcaataccaggtacaaccacatgaccagctgcaaaacaaggactgaaa

SEQ ID NO: 240889 - DNA, 497 bp, Homo sapiens
taggaaggggcatcagggacagcaaaggctcagaggctaaaatgtgmctgacacattcggctcctggagcagagaatgagtgttgaaaaagaaataagagaagaagaagaaactgcagagtatatttatctcaatttgtggaaagccttagttgtcaaactaagagatctgtgttttctccagttgacaaagaaaagacatgttcatagtctcctgaaaagtggtcttttaggaagaataatctgaatgtggagcaggagcaaagaggcagctgaagacagcaggaggctatggattaatgaacagtgtactgaatatggattcagagggctttggaatttatgttccagcattactgcttaatagctgtgaaacaaactatcaccaagttactcagcttctctaaactgcagtttctttttcttaaaaatggggataataacgtcaggatttggggtggtgctctaatatacaaagagattcatagcaagagaatt

SEQ ID NO: 240890 - DNA, 547 bp, Homo sapiens
tgagagaggagagcaacaaagtggcctcaggagtttcagggatagtgggtaaggaaatggctattgtccttgctgaaagtgtaggtccaaaaactcacatgagagaaagatcaaaatgggacttaatggtggcttctgtggtacagggctaggctgctcacacagcatgagccaactcctagtatgactgatgtctgtcttttttacctgggttcaatgtcagttttgacatttattacctagtggccttgggcaagtctcttyactgctctgagcctcagtgtcttcaattgtgaaacagaaataatcatacctctcttagataattgaggaggtcaagcaagtatttaagctgacctgcagcagagtggctggagcagtaaatccctttaaaatcatatcttcatcatggagatgactattataaccttgtggtaagggacccatggtacaattgagggggtgagagaattaagccataaagatcaggcattgagtcttaactctgccctttattaactgtgtgacctggaaaataacattatac

SEQ ID NO: 240891 - DNA, 547 bp, Homo sapiens
tgagagaggagagcaacaaagtggcctcaggagtttcagggatagtgggtaaggaaatggctattgtccttgctgaaagtgtaggtccaaaaactcacatgagagaaagatcaaaatgggacttaatggtggcttctgtggtacagggctaggctgctcacacagcatgagccaactcctagtatgactgatgtctgtcttttttacctgggttcaatgtcagttttgacatttattacctagtggccttgggcaagtctcttcactgctctgagcctcagtgtcttcaattgtgaaacagaaataatcatacctctcttagataattgaggaggtcaagcaagtatttaagctgacctgcagcagagtggctggagcagtaaatccctttaaaatcatatcttcatcatggagatgactattataaccttgtggtaagggacccatggtacaattgagggggtgagagaattaagccataaagatcaggcattgagtcttaactctgccctttattractgtgtgacctggaaaataacattatac

SEQ ID NO: 240892 - DNA, 392 bp, Homo sapiens
ctcctaagttaggttttcagtcttctctacctattaagctaggttgcagttcgtccacaaggactcaaatagagaagtacggagtccttctcaggccatatttagttcactttaacagattctatagcagatctagagaaaacagcatagccctaaggccgcaatggcatgtaagccccacttcttcacccctaaccaggagcatttccagagaagaaccaaggtctctaagagattcttgtaccagagaagatggagatatgattacctgacaagattcrtttttccaccactatcccatgtgaggctcatgagggcaattggaagaaatttggaaagtacaggagtcacattttctagatacatatgatttgtttgatgcacagggaaac

SEQ ID NO: 240893 - DNA, 606 bp, Homo sapiens
tatctgaccccctgcttcttggaggtgctagtttttctttatttggaaatccaattcatccaaagtagctggagctttgaatgaagaccaactcctttcatagcaaattattcatgtattcaggcaatgattcagcagcaggtagcaaatgctgactgtgtgcaaagggcttgactgtctcacttcagagaattagaaaggaagtcagacatttagtccyaggctcaagggaaagaacagatgcaaatccacatgaaccctcctaccagaagtgaatgcatgtgtagcaaatgaatgtgtaactaaattaatacattaagtagtataagtcaaccttggactacttatctatatctctaatgcatcctcccattggcaaacacgaggaatttacttatggaatcgtatgtggcatatactgagcacctgcaaagtgtcagtgaaaagagctcagatagatgagttgagattcagagatgttaagggatttgtcctatgtcccctagtttataagtggcagaggccaggcgtgtgccctctggaacataagttctatgaagataagtgtccagcctggatcagtgccctgtgcagtaagcattagtt

SEQ ID NO: 240894 - DNA, 486 bp, Homo sapiens
gacagtcaaagaagcaggccagtggaaccacaaaaaggccgatttcaaatgtctaagtgcctccaaagtatacaaagcatcagattcagcaggagcaattgaggcttttcaactaactcctcaacagcaacatctcatcagagaagactgtcaaaaccagaagctgtgggatgaagtgcttgcatatcttgtggaaggaccaaattttctgaaaaaattggaacaatcttttatgtgtgtttgctgccagaagctagtttaccagcctgtgacaactgagtgcttccagaatgtctgtaaaaattgccaacagtgytcctttaaggcatagttttctcctgccctgcttgctggcatgatcttggccagaattatgtcataattccccatgagattctgcagactctactagaccttttcttcgctggctacagcaaaggatgatgatctgtctgctttcactgggttgttcatggtgggtttttg

SEQ ID NO: 240895 - DNA, 591 bp, Homo sapiens
catcatttgggctacatgaaactgtgtggtaaacatcacttgcttagcttttcttattcaatctgcaaagggaagttcagactacggagtctggagctctctgacttacagaagtatctatacaatttacatagtagtgtgtcagttgacacaagctggtatttacatttacagtttaaatgaataacttctatttcctataataagcatctatagattaaatgccacaatatgttttacaaactttgttattatgtatgttgcaatagaaggttcatccctggaagattaaacactacttttaaaagttgatgatctcaggaggtctcttgcttctccaggagcataacacagtgatagagttccttcaggtttaaaytgtttcctcacctgcccagtttctgaacagggctgtttgtttcctctggtttggtatgcaagggatgtaaatattatctagcattctatttgttttcttctgagaacacagctagtatacttccttgagaatttaaagtgcatgtagcaaaaggagatttctctcctacattttttcaaatataactctgatttgcagttttaacacagatg

SEQ ID NO: 240896 - DNA, 618 bp, Homo sapiens
gattctacacactgcattaattattagaacatgactctttgttcctctattctattactcactgattacaaaccttaaggagaaaggtcattattacaaacagcaagaaaacagaggtttaagttaaaattgtcttggaaggctgtaaaacggtgattttccttcctttgaggaatagtaaatgcaagtattataattcataagggctactcctttatacaattcaaaatcaaaatctcattactctcatcatcgcattttcaataagaattaatttctgaattttattaattttaactatggactctgctcaatattctcaggtttggagaaaaagtagggcagcatttctattccatgcactgaaaaagacctggaaacgaagcgcaaaagccatcacactccaggaaatgtagcaaggcagtgtgacctagttgtagacccagacaactggtattcttttctagttttctgctctctgrgccacatcatagtcctaacttctctgagcttggttttctctctctgttgaagtgtacattaatgcagggaatttactattgtggtaatattcttgtagtcaccaatggtaattctctctctctgtctctcttcctc

SEQ ID NO: 240897 - DNA, 623 bp, Homo sapiens
ataacttattgtgattttgtacctctcccccttgcctatcaatttccgctgcatcctctgtcttgttgtggctctggcaaattgataaggagttggcagggtggttttgcagggaaggcctcatttcctttcctgtgtggcctagttcttccatctgtgactctcttgatagcatcttcctagactttgtttcatcttggctttttcagcacctcccrggcccatctcctggctggtctcaagtcttgctagggcactgtccaaggaaaccatgcagcagccctgaagactgatgctgtctcagagttatacttcctgatgctggatggacctcacatagatgcagcctctgggcgccaacgttatgcaaagctcagacttgggaggagagcgggaaggaggggagtagctaggcctattcactgtcacaggtgggcttttaccagggctttctgccttggccaggctcagccctcctgtcatctgacctcactatacacttatctgcaggataatgccccgatttcttagcaggaatataagacctgtcccacactctatgttttatccacatttcctgtcacaccctccttttctagttcagggatatatatatatatatt

SEQ ID NO: 240898 - DNA, 492 bp, Homo sapiens
ctactaaccactgtcagttcactaaacaaggctttttccttcacactcagccctttcaatgyttatggccaccctgatggactgatacattcactctcagcttctatctcccttccacttccacaacagtgtctgggatggcaaaacactcctgctctcagccttctttgaagctaagggagccatttgtgacactgtctaacctatggaagttaagccatggtctcctggaagcttctaggacaggttttgctttcctgattaaaaggatagacattgctaataactttccctgattttttgtgccttgaacacagaaatgataatcaggcaggaatagctatcttgtgactgtaaggaacatgccaagagaatcacaggggtgccacctgacatcagtctgctgaaccaaggccagaagtttcctatgccacctccttaggatgtgatgaaaatagactccaactgcttcaagtcacttttaatcaatgc

SEQ ID NO: 240899 - DNA, 392 bp, Homo sapiens
tccatgggagcaggatttgtsggggagtttttttgttcatgactatctgcagctcctagaaccactgctagtatgtgtaaacactcaaatgttgaagtgagaataaatgtcttgataacctactggctgatggcaaggtgcctactaatgagaccaaggaagaaccaggacagggttgctaccaagcaggacttaagtaagtaagtcactgagtggctggtacaggaaagaactctttacttgtttgcagatttgccctaataaagaatgccagcttcacatagtatctttatatttcccatctcctaagctgtgatatttttataacacccttagagagtgacttaatcatgccatttacaggtaaaatacagaaagcccagagaagtaaa

SEQ ID NO: 240900 - DNA, 392 bp, Homo sapiens
tccatgggagcaggatttgtgggggagtttttttgttcatgactatctgcagctcctagaaccactgctagtrtgtgtaaacactcaaatgttgaagtgagaataaatgtcttgataacctactggctgatggcaaggtgcctactaatgagaccaaggaagaaccaggacagggttgctaccaagcaggacttaagtaagtaagtcactgagtggctggtacaggaaagaactctttacttgtttgcagatttgccctaataaagaatgccagcttcacatagtatctttatatttcccatctcctaagctgtgatatttttataacacccttagagagtgacttaatcatgccatttacaggtaaaatacagaaagcccagagaagtaaa

SEQ ID NO: 240901 - DNA, 392 bp, Homo sapiens
tccatgggagcaggatttgtgggggagtttttttgttcatgactatctgcagctcctagaaccactgctagtatgtgtaaacactcaaatgttgaagtgagaataaatgtcttgataacctactggctgatggcaaggtgcctactaatgagaccaaggaagaaccaggacagggttgctaccaagcaggacttaagtaagtaagtcactgagtggctggtayaggaaagaactctttacttgtttgcagatttgccctaataaagaatgccagcttcacatagtatctttatatttcccatctcctaagctgtgatatttttataacacccttagagagtgacttaatcatgccatttacaggtaaaatacagaaagcccagagaagtaaa

SEQ ID NO: 240902 - DNA, 611 bp, Homo sapiens
cgtcacacagctcatagtggcagagccaaaactacaagacccaaggctcttttgagttttatcctgtgctgttttcagagatcattcttttctgaacatgtggtctgcaacctgagcttgtagttttatattcaaggtcaggaggcagcagaagagacctactgtctctagcaaytctacttagtggcccaagaccttgggagtttactcagcttgtttccagagatcagtccgctttgctttggtttcagttcagggttagcatatcaataattctttattaataaggccaagcatataatgtttcttagcagttgcatatcgaatatggagagaaaacatagggagtgtactatgtattgtgaaacattgcaccagacaagcatattctaagccatgtgattctaagcatttgcttcctaaatgatcgttgatctctggccgctgaagagttcattgtctatctgtgaacaagtcacttgttccagcccattaccgcagctaattagccacaactacatttcacgtaagggttgcctttgtgttgaactttaatattcagcaggagaatagacactgcatccctttaattgtgttttcctaattaaatt

SEQ ID NO: 240903 - DNA, 611 bp, Homo sapiens
cgtcacacagctcatagtggcagagccaaaactacaagacccaaggctcttttgagttttatcctgtgctgttttcagagatcattcttttctgaacatgtggtctgcaacctgagcttgtagttttatattcaaggtcaggaggcagcagaagagacctactgtctctagcaactctacttagtggcccargaccttgggagtttactcagcttgtttccagagatcagtccgctttgctttggtttcagttcagggttagcatatcaataattctttattaataaggccaagcatataatgtttcttagcagttgcatatcgaatatggagagaaaacatagggagtgtactatgtattgtgaaacattgcaccagacaagcatattctaagccatgtgattctaagcatttgcttcctaaatgatcgttgatctctggccgctgaagagttcattgtctatctgtgaacaagtcacttgttccagcccattaccgcagctaattagccacaactacatttcacgtaagggttgcctttgtgttgaactttaatattcagcaggagaatagacactgcatccctttaattgtgttttcctaattaaatt

SEQ ID NO: 240904 - DNA, 380 bp, Homo sapiens
cagcagccccagtcaggagcttatagataaaactcccatctccctgggacagagtacctgggggaaggggtggctgtgggcgcaacttcaccagacttaaacatttctgcctgccggctctgaagagagcagtggatcctgacaaagagggttctccaagcacagtgctcgagctctgctaagggacagactgcctccttaagtgggtccctgacccctgtgcctcctgactgggagatacctcccaacatgggtcgacagacacctcatacaggagagctcatgctcgcatctggcaggtgcctctgggacaaagcttccaggggcrgaagtaggtagcaatctttgctgttctgcagcctccgctagtgatacccagg

SEQ ID NO: 240905 - DNA, 571 bp, Homo sapiens
ggcacgtgccacccatgcctggctaatttttgtattgttagtagcaatggggcttcaccatgttggccaggctggtctcgaacttctgacctcgtgacccgcccgcctcggcttcccgaagtgctgggattacaggcatgaaccactgcacccagtcctggctttacagagtggacggtgacagcgattgggaagaaggggaagacacagtatgtagtgtgkgtccctgctcctttcataagccatcctgtgtaatcccacaatctgcctctgggtgggaaccagccctttcattcacagatggagacagtggggctggaaatccttgcctggggggttgggagtcacagaggcagcaaatgaatgatttgacactatgattcctcccaccacactccactgcccggcaggaagagctacttaaaaatacaccaactgtgatctgactaaagtaagggaagtcccaaacatctgcttttatagaacataaagctaaatgtcacacagatgcaataagactattaaaacagcattaaaagtaaatgtgctgaatttttaggatggagttgcg

SEQ ID NO: 240906 - DNA, 402 bp, Homo sapiens
ctctgcctgttgcccatttccaaagtcacttccacattttcagatatctttccagcagcacccccactctacaggtaccaatttactgtattagtccatgttcatgctgctgataaagacatactcaagactggacaatttacaaaagaaagaggtttaattggacttasagttctatgtgtctggggaagcctcacaatcatggtggaaggcaaggaggagcaagtcacgtcttacatggatggcagtaagcaaagagagagcttgtgcagagaaactcccattttttaaaccatcagatcttgtgagacttattcactattacgagaacagcacaggaaagacctgccccgatgattcaattacctcccaccaagttcctcccacaacatgtgggaattc

SEQ ID NO: 240907 - DNA, 405 bp, Homo sapiens
gatctaagctggaaaagggaatacagaatggccaagaggggctagaataaagttggaggggtccactggataaaacaaactccagtgtacattagaggccaggtatgatggctgacacctgtaatcccagtgctttggaaggccaaggtgggaaggctagcttgaggccaggagtctgagaccagcctgggcaacataaggagatcctgtctctaaaaaaatgtttttaattcactgggtatgggggcacrtgcctaaagtgtcagctactcagggggctgatgtgagaggcctgctggagcctgggaggttgaggcggcagtgagctgtgaccgtgccactgcacttcagcctgacagacagagtacgactctgcctcaaaaaaataaaaaagacattagaata

SEQ ID NO: 240908 - DNA, 401 bp, Homo sapiens
tatttatttacatatatatattttatatatatataacatatatattatatataagtatttacttacatgtaagtatggtatgtaagtaaaagtgttaaaaacattaagctctggatcactggacagtgcacaataaaaataatagtttacatagcattcactgtataccatataatgatctaaactcttcatttataattctcgcaacagctctatgaggtagatattatcattatccctacttttacagagaagaaacatgagatgcagtgaagttgtgtaattttctctaggtcttacagcttctatgtgctcagagccaagagaagagcagggaatctggcttcmaaagcagttctctttaccactatgctatagtgtgctgttaggaaagtgtggga

SEQ ID NO: 240909 - DNA, 536 bp, Homo sapiens
ataacagccaaattctccaacacggcactgctcccctcacccaaatggtctggctttcacctacctgtctgtatctcrctaactctgcccatttacttcatgaggcactcatgatgatctcttccccactgaccaaacacatcctattcgtttctatttccatgctgtgcactgtactccaccctccctctattgaagttctcttcatctgatacaaaagcaatgccatgacaccttctctttggaagtttccctggtaagtctcccttcctcctctgaacaaatctctcctccctttctgcttctactccccatgtttatccttcctttttgtgcacacatgattctgcttaacatcatggtttatattcctgtctttcggtagcatgtgagcttctccaggtcagaagcagctctgaaactctcctaatgtagaataagccctcaataaatgtttgctgaattgaatgacccctgatccatccacacaggagatccacttctgttgcccttagcttcccacagtgggcccctac

SEQ ID NO: 240910 - DNA, 536 bp, Homo sapiens
ataacagccaaattctccaacacggcactgctcccctcacccaaatggtctggctttcacctacctgtctgtatctcactaactctgcccatttacttcatgaggcactcatgatgatctcttccccactgaccaaacacatcctattcgtttctatttccatgctgtgcactgtactccaccctccctctattgaagttctcttcatctgatacaaaagcaatgccatgacaccttctctktggaagtttccctggtaagtctcccttcctcctctgaacaaatctctcctccctttctgcttctactccccatgtttatccttcctttttgtgcacacatgattctgcttaacatcatggtttatattcctgtctttcggtagcatgtgagcttctccaggtcagaagcagctctgaaactctcctaatgtagaataagccctcaataaatgtttgctgaattgaatgacccctgatccatccacacaggagatccacttctgttgcccttagcttcccacagtgggcccctac

SEQ ID NO: 240911 - DNA, 585 bp, Homo sapiens
caaggctcaataattctttgttgaatgaacaacaaggtgaattcaatctaaagggttatggaaataccttttaaaagtactaaaaattcacaggtgcagacctcttctttaaactgtggcagccccaaggatgtcacatgtatttcccactttgctttgcccccatcctcattgatggacatatgctccatattggccttggtgcctgcagcttgtgattcatgctgaaagcacatctgaaaccctcatctttatagctcttttctgagaaaattacccaatctggcaatctgtctggccccaaggatacttgacagatcaaattgaaccaggccagatggaagcgggaaatgaactccaccatcaaattgtccaatgcctgaaaaatgttggctttgaaacaatgcaggtcttctcrtgcatttcctagaatcagaggaaggtgttctctgctgcgtcaaggcagtgaggcctctgtgttcctgactgaggcccccaagtgagctccgtgtccacagcagagctccctgccaggtggagtgtcacagctgtggaatcagagaagttgtgcaagaggagaaggaa

SEQ ID NO: 240912 - DNA, 458 bp, Homo sapiens
gtacaacccatcaccctacttggtcattcagcgtcttctgagtgctttcccttgccaggcagtgagagaggtgctggggatacagcaatgggtgaagcagggagcttgtcatggcaacagatgcagaaacacgtcactaaggaatacatgctggacaaggaagacaattctgaaccaaggtgatggatgaaagaaggaagtgtgctaaagtctaatctacatggtgcttcgtgtgcatttccyaggtagctgtggcagtttaaagcctcaggaactagatgaggtgttcaaggtcctattcagtcaggagagtagtatgaccaacccttcacaaggtatgtatgttgctggggtgggtaggtagatgggatccagaaggaccttccagtaaaagttacatttgagccaccttctaaaagagggataggagttggccaaatgtatgtgggaagggagga

SEQ ID NO: 240913 - DNA, 382 bp, Homo sapiens
gtacttactgacattttggagggagaaatttacatttaagacacaaataacttcaaattgaagtgaaggtgtaacctgctctctcatgccctttgcctccctgcattccatttctgccccttgctcctgcttgctggctttcccacccatgctgcaatctctgcacctctccctcccttctccttttctagagmgaaaaacaaactcctctcactttctcaggcagagaagcttgactgttcttttgttgctgaagctcttgctaaaacttttattccaaaatagtttattgagggttttgttttgttttgttttgtttttttgagacgaagtttcactcttgttgcccaggctggagttcaatggcacgatctcagctcac

SEQ ID NO: 240914 - DNA, 359 bp, Homo sapiens
ttctcctgctcctaggactttgtcccayttgagtcacctacttaaaatgcagtcagcatctataaggtattaccaagaagatgtaccattttgacctctggagttcattattgtgaaaaacttctagccggtgacatatgactggagacaatgatgtgagtatacaaaagtaatgcactggcagtatagcctcataatttggagtcacatgtcctgggttcaaatctcaactatgaaatttacttgtagaataatcttggacaagctgcttgacctctctgagctttggttttcttgtctcataaatgcaagtaaaaataaaactttacaaagtcaaaaggataaagagacatacactg

SEQ ID NO: 240915 - DNA, 481 bp, Homo sapiens
catccaacctacagggctgtaggacaagataagagtttaggaattttaactcctaattcagtgttcttgccatttatattttcctttctcwttcccaaatttactggccatcttaatctaaactctgttatctcacagcaacctctgaggcttcccagcacatcaagaaaccctatgaactgagctgcatttaataactagctattagcttgggctctaaaaactttgttaaggaaaatagaaactgaacatctttagtaaagtttcaacctgggctctacttttaactcctatcatcattcaatctttggaaacaaaaacttgaaaattaccaaattgggggtgaatatgaggaaaggcttgcaatgtgcatagtgttaagggcttaaaaaaatacccaagcataacaacaactctctgtgtaaatcaagtaagtgttgactgattctatcaatttgtaagtccaaacaacttccagatg

SEQ ID NO: 240916 - DNA, 481 bp, Homo sapiens
catccaacctacagggctgtaggacaagataagagtttaggaattttaactcctaattcagtgttcttgccatttatattttcctttctcattcccaaatttactggccatcttaatctaaactctgttatctcacagcaacctctgaggcttcccagcacatcaagaaaccctatgaactgagctgcatttaataactagctattagctkgggctctaaaaactttgttaaggaaaatagaaactgaacatctttagtaaagtttcaacctgggctctacttttaactcctatcatcattcaatctttggaaacaaaaacttgaaaattaccaaattgggggtgaatatgaggaaaggcttgcaatgtgcatagtgttaagggcttaaaaaaatacccaagcataacaacaactctctgtgtaaatcaagtaagtgttgactgattctatcaatttgtaagtccaaacaacttccagatg

SEQ ID NO: 240917 - DNA, 563 bp, Homo sapiens
gttgtcccttctgtaaaaagatgatcgtgttgtctaccatatgtagaggtaatatatttaaagcagtagtcaataaatggcagccattattattgtctcttttgggtcctaactgctggtgcccatgaggagcatctctcctataactaactgccttcaatttaatgctcacaaatgcartaggcgagccttcgtgatattaagtgagagaacagaccatcttctgggctaacagccactttggagcctgactcccaattttctcaaatacctacccgctttggccaattttttttgtatctcacagactgtagttctctctctcaggcattcgtggtctgggaaaaaaagctaagaccatgaagatctttataactgagtgggctttggtgtgtaattggccctataaaaggaaacaaaaccaccatgtattgatatctacgtggatgattcaagcattttgcatatcttatttaattctcaaaaaaacatgtaaagaaaaaaattattgtttgtcccattttcatatggagaaacaggctgagagtaagcgatttcccccc

SEQ ID NO: 240918 - DNA, 563 bp, Homo sapiens
gttgtcccttctgtaaaaagatgatcgtgttgtctaccatatgtagaggtaatatatttaaagcagtagtcaataaatggcagccattattattgtctcttttgggtcctaactgctggtgcccatgaggagcatctctcctataactaactgccttcaatttaatgctcacaaatgcagtaggcgagccttcgtgatattaagtgagagaacagaccatcttctgggctaacagccactttggagcctgactcccaattttctcaaatacctacccgctttggccaattttttttgtatctcacagactgtagttctctctctcaggcattcgtggtctgggaaaaawagctaagaccatgaagatctttataactgagtgggctttggtgtgtaattggccctataaaaggaaacaaaaccaccatgtattgatatctacgtggatgattcaagcattttgcatatcttatttaattctcaaaaaaacatgtaaagaaaaaaattattgtttgtcccattttcatatggagaaacaggctgagagtaagcgatttcccccc

SEQ ID NO: 240919 - DNA, 644 bp, Homo sapiens
gagaaagttcagcataaaccaattataattcagtatcactgaactgggtgaaatgaaaaaataagcagagaccaggtggtgtcagcacaaaatgaattcagaagaacaatgtttatgtctgttttaaaaaaccaagaagagcccaatactggaatccaggataaattaactctgttcctgtttcctcagttaaattctgtcaatctgagttctaaaaaaatagcctaaagtatttgtctgtctgccttattggctcttccaaacatattatttcaaaggacagattttatttaaatatagaaagtctcaaaatcatggcacgctagaattatatgagagaaaataataatagctcacctttgttttgcatggagtttttcttaaagcacttttacttgtcttaatctcattatcagaaaagtagacaaggcagaaggtatttttctcactttgcacacagtaaaactgatgcacacactttgggaggctgaggtaggtggatcacctaaggtcaggagttygagaccagcctggacaacatggcgaaaccccctttctactaaaaatacaaaaattagctgggtatggtggcatgttcgggagactgagacaggagaattgcttgaacccgggaggtggaggtt

SEQ ID NO: 240920 - DNA, 500 bp, Homo sapiens
tgtcatttacagataagagtctggattaatgcaattattgtttgccagtcttgattatttacttctggtgggactagaaagtccttggaaatagaggcacaagatgattccagaaatcaggcagaaagaatagagtttggatgctggcacactgcttactagatgtgtgacctcagacagattccttcaccttctggtaccatagtttcttcatatgtagaatggagttctacctgaaaatatctggcacccagatattttcaacaaatattagcgccttttccctctccttttcacttctcttcccttctgtgacaacgtagtcacatcagaacaaatcttccactctgacctacatgagggtttgtcatcagaataatgttcctcagtagtattattttttattaccrattccactccctttaacattcccactttgtcttggtctttcctttaccccctagtccccataacacatacaagtgcttgcagtttcccaa

SEQ ID NO: 240921 - DNA, 602 bp, Homo sapiens
ccccataacacatacaagtgcttgcagtttcccaaacatatcatgttctctctcatctctggatctttgcatgtttaatttcttctctgtgcactagtcaatccttcatccatcaaattcttttgcatccctctgttgtccgctcaaatattcttcttctagaaagtgttctctgaccaccttccaccctcaggctaggtaagcygccctttctctcttcttccattgcagtgttttaccctatcatgccactgaaccatactctatgattagttacctgctttacttctgtctttctctactatttttccccagcttatctcccacagttgcctagttaatacttcttcaggaaactttctttgacttcaatgacaataccagcacccctctccaccacccattttacccactaatggttaaaactcattactgtgtgagggtctctcacgaaggtcagtctctggttttcgctcacccctttggcatcagcaccttgcacatagttggtccttgaacatattcattgactgactaacctatagaacaaaggaatctctgaattctctagaactagcatagggcctgtggcacagaaggta

SEQ ID NO: 240922 - DNA, 602 bp, Homo sapiens
ccccataacacatacaagtgcttgcagtttcccaaacatatcatgttctctctcatctctggatctttgcatgtttaatttcttctctgtgcactagtcaatccttcatccatcaaattcttttgcatccctctgttgtccgctcaaatattcttcttctagaaagtgttctctgaccaccttccaccctcaggctaggtaagctgccctttctctcttcttccattgcagtgttttaccctatcatgccactgaaccatactctatgattagttacctgctttacttctgtctttctctmctatttttccccagcttatctcccacagttgcctagttaatacttcttcaggaaactttctttgacttcaatgacaataccagcacccctctccaccacccattttacccactaatggttaaaactcattactgtgtgagggtctctcacgaaggtcagtctctggttttcgctcacccctttggcatcagcaccttgcacatagttggtccttgaacatattcattgactgactaacctatagaacaaaggaatctctgaattctctagaactagcatagggcctgtggcacagaaggta

SEQ ID NO: 240923 - DNA, 602 bp, Homo sapiens
ccccataacacatacaagtgcttgcagtttcccaaacatatcatgttctctctcatctctggatctttgcatgtttaatttcttctctgtgcactagtcaatccttcatccatcaaattcttttgcatccctctgttgtccgctcaaatattcttcttctagaaagtgttctctgaccaccttccaccctcaggctaggtaagctgccctttctctcttcttccattgcagtgttttaccctatcatgccactgaaccatactctatgattagttacctgctttacttctgtctttctctactatttttccccagcttatctcccacagttgcctagttaatacttcttcaggaaactttctttgacttcaatgamaataccagcacccctctccaccacccattttacccactaatggttaaaactcattactgtgtgagggtctctcacgaaggtcagtctctggttttcgctcacccctttggcatcagcaccttgcacatagttggtccttgaacatattcattgactgactaacctatagaacaaaggaatctctgaattctctagaactagcatagggcctgtggcacagaaggta

SEQ ID NO: 240924 - DNA, 515 bp, Homo sapiens
agttgcctagttaatacttcttcaggaaactttctttgacttcaatgacaataccagcacccctctccaccacccattttacccactaatggttaaaactcattactgtgtgagggtctctcacgaaggtcagtctctggttttcgctcacccctttggcatcagcaccttgcacatagttggtccttgaacatattcattgactgactaacctatagaacaaaggaatctctgaattctstagaactagcatagggcctgtggcacagaaggtacttgccactgccccatgctgcctgccaaaatgtgggcaaaacaaaaaacaataggcttttgtggaacacaagacaaaatggtggcaaaaataaggtaattcttttttttttttttttttttgatggattctcgctctgttgtcaggctggagtgcagtggcatgatcttggctcactgcaacctccgcctcccaaattatggtaattctaactgaccattggattgacagttttgaggtg

SEQ ID NO: 240925 - DNA, 577 bp, Homo sapiens
aaaatcgactctaaatgaataaagrctctaaatgtatgaccataaaattccaagaacagataagggaaaaagctccttgacattggccttggcaatgatttctaagatattacaccaaaagttcagtccacgaaagcaaaaatacctgaacaggactacagcaaactaaaaagctcctgtgaagcaaagaaaataatctacaaaatgaaaaatcaacctacaaactgggaaaaatgtttgcaaaccccatatctgataaggggttaatatccaaaatttataaagaactcttacaactcaacagcagaaaagcaaaacaaaacaaaaaaaccgatttaaacatgggcaaaggacctgaacagatatttctccaaaggaaacataacaatgtccaacagatatatgaaaaggtgctcaacatcactaatcaagggaaatacaaattaaaacttctatatcaccttaagcccatttgtatggctgttatcaaaaagacaagtcataataaaagttggtgagtgtacagagaaaagagaaccccaggacactgttaatgggaatgtaggttgatacagcc

SEQ ID NO: 240926 - DNA, 577 bp, Homo sapiens
aaaatcgactctaaatgaataaaggctctaaatgtatgaccataaaattccaagaacagataagggaaaaagctccttgacattggccttggcaatgatttctaagatattacaccaaaagttcagtccacgaaagcaaaaatacctgaacaggactacagcaaactaaaaagctcctgtgaagcaaagaaaataatctacaaaatgaaaaatcaacctacaaactgggaaaaatgtttgcaaaccccatatctgataaggggttaatatccaaaatttataaagaactcttacaactcaacagcagaaaagcaaaacaaaacaaaaaaaccgatttaaacatgggcaaaggacctgaacagatatttctccaaaggaaacataacaatgtccaacagatatatgaaaaggkgctcaacatcactaatcaagggaaatacaaattaaaacttctatatcaccttaagcccatttgtatggctgttatcaaaaagacaagtcataataaaagttggtgagtgtacagagaaaagagaaccccaggacactgttaatgggaatgtaggttgatacagcc

SEQ ID NO: 240927 - DNA, 550 bp, Homo sapiens
caacacgtgaatgagatgaaagggtcrctggtctggtggagctggggctggaggacgggctgcctgattcaccccctgtcgctccctaattgccctggggtgcatctgccaactctatggtttcagggagaaaagtttaaaaaaaaatcactattttacataatccctatgcccagttaacctctacattttaaaattcaaataccaacctgcagacatcaggggaggcaagactgtccctgaggtgagctggggagacttagtcagatgaaatgaccggagcgggctgtccatttccccaaggctggtccaatcttgtgacacttaacgccgacatctggatcctgctctcatccgacggctgcaggtgcctaggggaggccatcctctcaagggagcccaaaggacggtaaatccccctccttcctcctgtcaccagccctgacactgtgcttgttccagaagcctcaactatttatagatgcagaggctgagaagcagcaaaagagagcaagctgaaatgacagagtggcctcgttattcctcctcc

SEQ ID NO: 240928 - DNA, 550 bp, Homo sapiens
caacacgtgaatgagatgaaagggtcactggtctggtggagctggggctggaggacgggctgcctgattcaccccctgtcgctccctaattgccctggggtgcatctgccaactctatggtttcagggagaaaagtttaaaaaaaaatcactattttacataatccctatgcccagttaacctctacattttaaaattcaaataccaacctgcagacatcaggggaggcaagactgtccctgaggtgagctggggagacttagtcagatgaaatgacyggagcgggctgtccatttccccaaggctggtccaatcttgtgacacttaacgccgacatctggatcctgctctcatccgacggctgcaggtgcctaggggaggccatcctctcaagggagcccaaaggacggtaaatccccctccttcctcctgtcaccagccctgacactgtgcttgttccagaagcctcaactatttatagatgcagaggctgagaagcagcaaaagagagcaagctgaaatgacagagtggcctcgttattcctcctcc

SEQ ID NO: 240929 - DNA, 587 bp, Homo sapiens
cagatttatgcttcagtgacaaaaatcaagaatttaatcagttacacaaggagaaagtatgtgtgtatgtgtgtgtatacacataaccagatattctcctaagtttttcaaaataatagaaacagatattttgggattcatgatctgtaccactgtttatattaaccatggctccttactgtctatcaaactgtttactttttcatagttggggcctgcatttgtatagatttctagccccttatcattcacatagactttcgatagtacctgttgaytgaaaaaaaaaaaaaaaaaaagaaatgagggccagtgttgttaactggaatgtgaagctctccataatgttactcttcatttctccaaaattgctgtttctccaaaataatgtccaatattttccacaaatctccccctctccgtcccaccccagtaacatttatgggatgtcttccatcttcctaccttatgttaatatggagttgacctcactttgccagatatatcatacacttttcacaccttcctgtgtttatttgctgcaaatcagtacatactacctcaatcactgccttgttccttgttta

SEQ ID NO: 240930 - DNA, 548 bp, Homo sapiens
agcggaacttcatctgtatttccagctgcttcccagtgctcacattaccgcctgagctctgcatcctgtcgcatcggtggcagcatcagatgcacatagaagcgcaaaccctattgtaaactgcacatgtgagggatctaggttgtgtgctacttatgagaatctaatgcctgatgatctatcactgtcttccatgcccccaagatgggaccatctagttacaagaaaacaagctcagggcttgcactgattctacattatggtgagatccatattatggtgtaataataataaaaataaagtgcacaataagtgtaatccacttgaatcatcctgaaaccatccctctcccccagtctgtggaaaaattgtccacaaaaccggtccctggtgccaaaaggttggaaattgctgcaytgaaatcagtataactcaatatatacattgcacaatttatatctgagaaatatttttatttatctcaagtaaaattatatttatatgaatatatagaaaactaggcattttccaattggaaatgacaaatg

SEQ ID NO: 240931 - DNA, 468 bp, Homo sapiens
aagataccaggagtgttttaccatcttttctgccattgtttatgaatgaagtgtccttcaacccccgtgtatctttgttgaaacatttttggcagaagttatgaaaaataaataatagcaacttagaacatagaagagactgtggataaattcagattccagcaatttraggcaccaaatggcacaatgcttctaatcattgatgtttccatattgtgaaaagagataatctaaaagtaattccaaggagaaaggcctttactgataacataagcatgattagtttgttggcacaggggcaggcagaataaaatggaagtaaaatctcactcctggaatgttgcagttgaaacagcccatgcctatatccgaacaatgcctaatgagttagatgatgaaatttgggagttctgagctgacgagtcttaggattttgagttcatgctgtaatggtttgagatttggggg

SEQ ID NO: 240932 - DNA, 596 bp, Homo sapiens
aagctcaaaaacctatgtattttggatacctacattgattatatgtttatatctaaaatccaactagaatagttaaacaatgatagcaacaataacaacagcaatttaattaattatttaatttaaactcatgatcttgaatctcagcatcacagacccacctgcatctccagtgtccattcagtgtctatcttattcatgtatatggaaggtctgatggatttatactgatttaatactttcttcttcttcttgtttgaacccacaagccccatcccgatgtcagaatakaaattttttttttgtttgctggtcttctttatgcactttgctagaattttcaacagaaagtttctattattaacagccagttgaattcagtaagtatctaccctgcatgaaatatataacacctagtacatgtgtaatataataataatttgtaataaatagtacctgttatatagccaaccttatgagaaaatgggaaaacacacaaataaacaaaacaagtttgagctttccaaaacttatttttgagctttacaacatgaaattaatgttacaggaggaattaaatactttggctttcctca

SEQ ID NO: 240933 - DNA, 425 bp, Homo sapiens
  misc_feature (1)...(425): n = A,T,C or G
ccttctggctccacatctaatttgaattggtcttatggtcacatatcatagacttggaaggtaccagaaaagcccaacctaaaggctgtagctatgttgttaaactccttcaacccctagggaaggtcatattcctgctccaaattcctcccttaccacgtatggagtcagaggcaaggggccagcckctattctcttagatgcagtcgactttcctctttacctcccctcattctttcttgccaattttagcaaccctttcttcttttctgaaaaggagctctaaaaatcactcttatccacaaacacaaattgtgctttgaaccngaggaatgttcagaatttggaaatgcaatgtttttcaagtatttaaatgagaagcagagacacccaaagactacttcatcatattttaattctatttc

SEQ ID NO: 240934 - DNA, 523 bp, Homo sapiens
accaccgcactacagcctgggcaacagagtaaaactgtatctcaaaacaaaacaaaaacaaaaaacagagaaaagttcttgccctggagtcactttcagggtgaaccttgagagtcactctagagtgaatgtaaatgtggtcatggatagaaaagtctggcacatattgctaacacgcaaaacccttgttgagcttagtgtcatgttctccrtaagactcagcatgttatttgaatgctggggctatgccctttacttctgtattcccagcacccagtaaattactcaggtaaatttaaaaaactttgttaaatgttaatttagttggaattttctctattttctattttaacaagaaagatataagatttctcatatctttctcgttctcagacaattccaaggggtttctatgtcttatcaattataacttcctcatatttttctttcctgtcatctcttctcctgcctgtaattttgcactttttttttcccacctgaactatgagaatgggcttttaac

SEQ ID NO: 240935 - DNA, 523 bp, Homo sapiens
accaccgcactacagcctgggcaacagagtaaaactgtatctcaaaacaaaacaaaaacaaaaaacagagaaaagttcttgccctggagtcactttcagggtgaaccttgagagtcactctagagtgaatgtaaatgtggtcatggatagaaaagtctggcacatattgctaacacgcaaaacccttgttgagcttagtgtcatgttctccataagactcagcatgttatttgaatgctggggctatgccctttacttctgtattcccagcacccagtaaattactcaggtaaatttaaaaaactttgttaaakgttaatttagttggaattttctctattttctattttaacaagaaagatataagatttctcatatctttctcgttctcagacaattccaaggggtttctatgtcttatcaattataacttcctcatatttttctttcctgtcatctcttctcctgcctgtaattttgcactttttttttcccacctgaactatgagaatgggcttttaac

SEQ ID NO: 240936 - DNA, 557 bp, Homo sapiens
  misc_feature (1)...(557): n = A,T,C or G
gctgcatgtggaccttgcagaggaaaccacataccctgaggaacaggaaccagaaaggtagcnccccatctccttaactgctctgacttctgccctctctttctcagccttagctgaagagctcatctctttctgctaggactattttaatagtctccaaatcggcttcctgactctaaattggcttcctgactccaaattggtttcctatcagatctgtcttttggaagctttaaatgtttagttctttatagcctgcaggattaaaatgcaacctcttagcataatattcaaggctctttgaggtctggctccatgcctactggactccacgctccaccaatattgaaataatgacagttacctgaatgcatcttgctgtttaagattctacaggtatgactttgggcaaggtgcttatctcctctctgttttggctcatttagaggtgaaggtgagaatagaatctgccttgttgtagtgttgtgaggattaaatgagataatatgcaaaaaagacttayagagaagtctggcacatagtaaaatgctcaacaa

SEQ ID NO: 240937 - DNA, 514 bp, Homo sapiens
tgcctgtggtaactgggtttctttttttttttttggctattgagttgtatgtgttccttacatattttggatactgatccccattcagacatatggtttgcaaatattttctcccattctgtaggatgccttttaattttctttattgtttcctttgctgtgcagaagctttttagtttaatatggtcctactggtctattttggcttttgttgcctgtccttttatatcatatccaaaaaaatcattgcccagatcaatgccatggagcttattccctaaattttcttctaggagctttatagtttcaggtcttatgtttaagcccttcattcattttgagttgatttttgcrtatggtatatcataaggttccaaattttattcttttgcatgtgactatccagttttcccccacatcatttattgaagagattattctttccccaatatgttttttcagctcctttgttgaagatttcaaccattatcaattaattattttttcaaaaatt

SEQ ID NO: 240938 - DNA, 524 bp, Homo sapiens
gaaacaagaaagtatgcctcatacacaagggggaggaaagaaattgtttcttttaaaaactccctgaggaagctcagaaatgggacatggtagacaaagacttcaaatcagctatttttagaagagctaaaggaaaccatgtctagagaactaaaggaaagtgtatgagtcagggttctccagagaaacaaaaccaatgggctatatagagatatataaaaggagayttattatgggattctgcacgattatggaagccaagaaattctatgatctgccatctataagctagagagccagaaaaactggtggggtaattcagtctgaggccaaatgcctcagaacaaggtgggtgggccagtggtgtaagttccagacttacaaggctgcaggggggcggcggaagaagtggtgtaagtcccagaatcccagggctggaaaactagaagttctaatgtccaagggcagaagaagatggatgttctggctcatgaaaagaaagagacagcaaatttaccctttct

SEQ ID NO: 240939 - DNA, 575 bp, Homo sapiens
gacctgtgctagactcactatccttgaaggtgtctttaaaaaaacagacttgaacatagtcagatttttatttttgcttgtcaagaaatattcagtagcaatatttaaaagataggtccccatctccaaggactagttcccctctttgtcaacaaatgacctgcacaggatgggactacagtattttcaagtcccccatggaggagggcagttttgggtagagcctaggagctaaccctgaggtcctcaaggttaaaaatctgataaatgacccaaggaggtgtgtagcctgtgagctgaacatctgtttcattacaaattttcccttcatcaacaactgtcttggtaaaatatactggtatttattttaatgaagttccctgcttatacacagaaattgatgaaatgtgattactggccagtttggtgaaaatrctatctttaaatcagagtcaattatttgtccgtgagtagctccaactttagtcacatgaaacaatgattttagtatctgatgtgtatttcatgcaagtgcttcaaatgaataaaggagcttttccaagtaattgtaggct

SEQ ID NO: 240940 - DNA, 554 bp, Homo sapiens
aggttgaggaggcaagaagggcctacaccttagagatcagggtcaggaatcaagattaattctaagtgtgatgggaagcagtgagaaagtcttatacaggatgagaactttgaggccattctgagtgcactgtggagaatggattttagcagagctggaggaccagttaggaacctcctgaggtatccaggtgagatcacggtgtgggaggaagaaaagtacacatttccatcttttttggaactcttccttctgtcttttccataacttcagctctccttgttctcttaactcagcccacatagtaatagcggcactacattaatatctgtaggccacacatctacaaggagttctytacttgcgttatttattttaaatttttacatcaatcctgtgattgttacagtgttaccacttagatttagattttgcacatgaagaatttgtgttaaaaaaaaaaaatgaatcaacttgcccaaaggatgcagaactaagaggagacaggacaagagcttgaggtaattttacctgacatcaaatcctttctcttg

SEQ ID NO: 240941 - DNA, 584 bp, Homo sapiens
ttaactcccgtcaacaaaaggtgtgactgacctggactgttagcaagtgattcttcagcatctgtttgtagagagaataagtatatcagtattttttggaaatcctgactttaataactgaagatgaaggttttagttccatcgttatacgcatttattaatctgatgtgggaaaaattagtccttttaaaaaacatagtactgggagaagcagattcatctgtagataatgaaagtaagtttctctctggttgttggtttgtaccaagttatgtaaaaatggccggatgcaaaggtacatttgggatgatctgacttaaaccatcaattttgcagcaggtgtttcacttttggtgtctctggggggacctcagatttagacaatcatcctctggaagattgagacgtgggaataacatatacccaggaggctgtcactaggatacatgtcacccatgataagatgtcacaaggtaaatagacaaatgaatgcaccaacacataagacaatgtctttaagtatgcacttcaaattacasgtcacggttagcaggtactgacatgcaattgagttgcttctcatg

SEQ ID NO: 240942 - DNA, 576 bp, Homo sapiens
aagcttatattcacacaaaaaactgtgtatgaacattcatagaagactgatttgtaaaagtgaaagactataaacaacacaagtgtccttcagtggggaaatgatcaaactaaccctggtacatccacacaaatggaatacttctcaataacaaaaaggaacaagctgttgatacaacagttgttggaacaacaacaacaacaacaaaccaaataactctattacaaaatgggcaaaggacatgaatggacatttctcaaaaggagacatagaaatggctaaygagtatatgaaaaaaatgcccaacattactaatcatgagtgaaatgcaaattaaaaccaaaatgagatatcaccacagctgtcagaatggctattataaaaagagaagaaagataaatgttgtcaatgatgtggagaaaagggaatctttacacactgctgatggaaacgtcaattagtatagccattatggaaaacagcttggacgttcctcaaaaaactaaaaatagacctaccacatcattcagcaatcccagttctgggtacaaatccaaaggaattaaaatcggtatg

SEQ ID NO: 240943 - DNA, 402 bp, Homo sapiens
cgtgttagctgtctttccccattctgctgctggaaaaccagcagagagacatcacctaacttgcatcagctccttagtgcctcattcttaaatgcaaacagatagccaggaatgcctggatctttaagaaaagtatccagcctaagaggcataaattagaacaactagaaaaacagagaaaagaaacagggacaacaaaaggagaaaaaagttttgagtagagttataatacgtatactgagacagttagaaaaggtactgcatctgtgaaacaagaacagaaagttatgaaaaaggaaaagccaggcaataagaaaatgcacttggaaattaaaaaatacaatggctgaattttytttaaaaaccaaacacttaaaggataatgttgaataaaactttaat

SEQ ID NO: 240944 - DNA, 411 bp, Homo sapiens
gaattcaaccattcacttcttgtatattagttctctcattttttaaggtattcaaccaccatgctgaaaaggggtactgcacctgatttagaaaaggaaactgactcaggtagaacacctaaattgctcaagatcacacaccttgaaastgaaagaatttacagctctttctattatacagagctacctcccaaagtgaccctatgccttttcacctagcttggactgatgctggggacctcagcatccatatctcctggtttcccaggcaagtctttacctgttgatggaagtgtggaggacacaggggttatggccagtgaagtctccgaagtgaccccaactatatggaacaacaaaaaagtcattataaataacaatgtaacattaaaaaatataaataaaaaatag

SEQ ID NO: 240945 - DNA, 488 bp, Homo sapiens
gaatcacacagatggattcatcagcagagcatgagagcagaaggactttggatagragtcaggacacctggctctgccttgccctagctctgtgactttaggcaaatcttttccttctttgggcctcattttcctccaaaatgagggtggtggttcaacaccttactcccccaaccgggtccatgaccggcagcagcggcatcacctgggagcctcttagaaaagctccacccagagccactgaatttgcatttcacaagttccacatgaggctcacacacatataagcatttgggaatccctactctagacttgagattttaagctattttatcctatttatcctgtccccagcatccaccttcactgcgtgcagtttcatgactagtgataggggagtggcctggaatcctctggggagttgagtggcctcccctgacttctcctctcttctcccctgacctcacctggagaaacagaagtgttta

SEQ ID NO: 240946 - DNA, 488 bp, Homo sapiens
gaatcacacagatggattcatcagcagagcatgagagcagaaggactttggataggagtcaggacacctggctctgccttgccctagctctgtgactttaggcaaatcttttccttctttgggcctcattttcctccaaaatgagggtggtggttcaacaccttactcccccaaccgggtccatgaccggcagcagcggcatcacctgggagcctcttagaaaagctccacccagagccactgaatttgcatttcacaagttccacatgaggctcacacacatataagcatttgggaatccctactctagacttgagattttaagctattttatcctatttatcctgtccccagcatccaccttcactgcgtgcagtttcatgactagtgataggggagtggcctgraatcctctggggagttgagtggcctcccctgacttctcctctcttctcccctgacctcacctggagaaacagaagtgttta

SEQ ID NO: 240947 - DNA, 354 bp, Homo sapiens
agctgcagtgggagtcgtatctgcaaatgcagaggaatgttttggtttgaccaactacatggtggaaaacagaagggcagatggatagaactaacactatcacaacccagttttttcatgtktgtgttcaggtgtgcttgctgggtcaaagcatcacctgaaacatgacacatatggccaagcaggagaggtgcagacccccagccctggcctccatgagcacatctgatcaagaccagtgcatgatacacacaggccaagcaggagagatggggacccccggccctggcctcccatgggcacatctgatcaagaccagtgcatgacacacaggccaagcaggagagatgtgga

SEQ ID NO: 240948 - DNA, 450 bp, Homo sapiens
gtgttctacctggtgtggaggtcacgggagtggagatggaagctgcaggtgaacacaaaggacaagggagcaataagaccgtctcgtcaggcacacatgcctctacaagatgcaggagacaggaaggtggtgtcctggatcagtgactgccaggcttgtcctcctgctctgcagccaggagccgtggcaaggcatctccagaccccccactgcctccaagccagccctccattccttcttgtgggtctccattcctcttgccaacatgttacttcttcccatggaggtagaggtgactgtctggggggggccacagccatggkccaggtttctcagtggcatggagttaatctaacaaagattctgtgagtgggtacttgctttcccggcctttctcctcctttcaaatgattggtggcagtgacccaggaaagggtcagctctgcagac

SEQ ID NO: 240949 - DNA, 588 bp, Homo sapiens
gctgatgtacaggaggcttcctcaggcgtgtgctcrggatcagcccccgtgtcctaggagggaagcagaaccaagcaggggagttggcccacaaagaagcagctgcagcagcagcagggtccagccactcccccagggtgtcctggggccgctctgcccttcagaggtgccccactgaggcaaggtgctcagacctgtctatgcttctgtggatcagtcgttgcctgagggctgcctgaggactgaggggctgtgaacttggattagacaaagccttgagctgagggaaattgctggtgagcggtggcactgagagccggcagccgcaacactgccagcaggctggatatgagtgactttgtgtgaggggacatctgggtgtcacccctagagtggtcattctactcaactcctaaaagggatggctcttcagaatactttacaaagtaactgtacgtcgtattcaaaagacttacctaacaaagtgttttggagaggctaaaaacgaagggatacgcaatggaataccaggcacatgcaaactagacggccggggtgggttgtaatccaggctacttttgctttccc

SEQ ID NO: 240950 - DNA, 588 bp, Homo sapiens
gctgatgtacaggaggcttcctcaggcgtgtgctcgggatcagcccccgtgtcctaggagggaagcagaaccaagcaggggagttggcccacaaagaagcagctgcagcagcagcagggtccagccactcccccagggtgtcctggggccgctctgcccttcagaggtgccccactgaggcaaggtgctcagacctgtctatgcttctgtggatcagtcgttgcctgagggctgcctgaggackgaggggctgtgaacttggattagacaaagccttgagctgagggaaattgctggtgagcggtggcactgagagccggcagccgcaacactgccagcaggctggatatgagtgactttgtgtgaggggacatctgggtgtcacccctagagtggtcattctactcaactcctaaaagggatggctcttcagaatactttacaaagtaactgtacgtcgtattcaaaagacttacctaacaaagtgttttggagaggctaaaaacgaagggatacgcaatggaataccaggcacatgcaaactagacggccggggtgggttgtaatccaggctacttttgctttccc

SEQ ID NO: 240951 - DNA, 522 bp, Homo sapiens
ccattcatcacaatctgactctcccaattgaaatagacatttcattgataaattcctaattgcccaaagaggcacctgacaggactttcctctcttaatcacctccttctgaaaacattcttctccctgatttcctcattgtgtttcagaccatttcttttgaggccaatatggttcatatacagtaggaagagtaaaaagctattagagattagacaaagctattgaagttggacaaagctattgaaatcccagctctgccctttacaagtgatatgaccttgatctctgtgagcttggtcggccttctcatttgcaaatttgggataacaacaataggtagcttgcagtgttgtttgaagaacaaatakgctgggtgtggtagctcatgcctgtgatcccagcattttgggaggccaagccggaaggattgcttgataccaggggtttgagaccagcctggacaacatagcaagaccccatctctacaaaaaatagaaaaccttagctgggtgtggtggt

SEQ ID NO: 240952 - DNA, 522 bp, Homo sapiens
ccattcatcacaatctgactctcccaattgaaatagacatttcattgataaattcctaattgcccaaagaggcacctgacaggactttcctctcttaatcacctccttctgaaaacattcttctccctgatttcctcattgtgtttcagaccatttcttttgaggccaatatggttcatatacagtaggaagagtaaaaagctattagagattagacaaagctattgaagttggacaaagctattgaaatcccagctctgccctttacaagtgatatgaccttgatctctgtgagcttggtcggccttctcatttgcaaatttgggataacaacaataggtagcttgcagtgttgtttgaagaacaaatatgctgggtgtggtagctcatgcctgtgatcccagcaytttgggaggccaagccggaaggattgcttgataccaggggtttgagaccagcctggacaacatagcaagaccccatctctacaaaaaatagaaaaccttagctgggtgtggtggt

SEQ ID NO: 240953 - DNA, 571 bp, Homo sapiens
agatactatttgtcaatctaaagtggtcaagaacattatggctacaatcccttgctgttcagttacttttttgtattcagacaatttttcaaaagaatgacctctcttaaaaggttatgttttataaaaagtcacttgaaagagggataaaattttctatctcaaaatgttcctctgcaattayaagcagcaaaacatggagagacacaggtctttatactgactttagactcattctgtttagataactgtatcacagaagtattagatcaacaaaggttcaaatcatttcttcactaagtttcactctcccatcaaaatccaatgctcagctctcaaagtcagcaggagatttcagtgtaagcagagcaatgatttctgtgcctacaggttgtctttcctaagagaagaaaaaaatggtaactattaatcaatagaaaatccaacaccagtggaacaaatgtgtgcttgctaaagcagcattttcagaacccacattgaatcttcagcatggaaacaaagtgcctgtgcctggaggctcctccagaccttttgcatccctagaatcttg

SEQ ID NO: 240954 - DNA, 636 bp, Homo sapiens
tgaatttaaaaatattttctccattactttgagttatcactttaaacataggtaatatcaagatatgtttctgaattatatatttaattatgaccactaaagagcacccatgaaatggaagtgttaacagcaatgttctgttgtaggaagataatcatattggttatgtctgctttatagtaaagttattgttgattgatttgccttttcctaacttaagtctttttggtcttttcttctatttgttctgagagaccctgttcaaagggacattttattttcctttgtacaacagtatttgcctgacatttactctcctctaataaataatattaaactctagtcctaatacatttacttacctaaggaaatcggccttstgatggacccccggaggtgagatacatttctggatgaggatctgttgagaagttgagcatttgttcagctactaagtcactgccaccacctcgttagctaaacatactctgtgctcattccttcatcagtaaattttggttgggacacatgacaggtgataatagaggttattagctgcaatgcttattaaaatatttgaagatatactttagcacattttaataattattgagactgtcccttagtaacagtagc

SEQ ID NO: 240955 - DNA, 362 bp, Homo sapiens
gctgcagagggctatgaaaacgctcatgggtgctgacaggagcccctggtggstggtgggttgggaatacaggggctctgtagggggtgaaggaactgtgcttgacaccaatcaatgggagcctggagaaactgaggcagggactggaatcgtgctgagactcaaacgttttgagttagagtactcaccaggtactctaactcaatcatatgccttgggtataaggaaattaggaataattggaactgtggctggccccaaatttcatgccctatttatagccattcatcagatttagaatgaggtaaaggaaggattctttttattattttttaaaatacccacctcattttttacaccca

SEQ ID NO: 240956 - DNA, 414 bp, Homo sapiens
tttttcctttttttttttttttttggagtctcgctctgtcaccaggttggagtgcagtggcacaatctccactcactgcaacccccgcctcccaggttcaagcgactctcctacctcaccccyccgagtagctgggactacaggcacacaccaccatgcccagctaatttttgtatttttagaagagacaagatttcaccatgttggccaggatagtctctatctctagacctcgtgatccacccgccttggcctcccaaagtgctgggattacaggcatgagccaccatgcccggcctctattgtttcaaaagaaggttataaggacctaggaagttcaagagcctgaacactttgtgatgtcatccaagtctttgtatccaatcactgattcaattattttagtgcaaatat

SEQ ID NO: 240957 - DNA, 516 bp, Homo sapiens
ttgtttatccatttagcagctgatggacgttgaggtacttccggtttttgacccttgtaaataatgctgttgtgaacattccagcacaaatctkgtgtagacatatgttttgatttttcttggatagatttctaggtgtggagttgttggatcatatggtaaccatatgtttaactttttaagaaactgtcaaactggtttccaaagtgactattatttgacctttccaccagcccaccagcaatagtagaggattccagttttcccacataatcagcaaggcttggtattctctgtgtttttaaaagcataatcatattcatgggtgtaggtggtatattagtgtggttttaatttgcatctacctaaagactgatgactttgagtaccctgttatatgctttttagccatttatatttcttctttgttaaaatgtgcatccatgccctttgctgatttttaaaattaggtttcttcttgttgagttaacagagttctttatatattgtgaattc

SEQ ID NO: 240958 - DNA, 522 bp, Homo sapiens
actatactacaaagttacagtcaccaaagtagcatggtgctagaacaaaacagatacatagaccaatggaacaggttagagaacccagaaataaagctgcacacctacaaccattggatcttcaacaaagttgacaataacaagtaatggaaacagtacttcctattcaacaagcagtgtcaggataactggctrgttatatacagaaaattaaaactggaacccttcctttcaccatataaaaaatctactcaatataaagttaaaaaaaacttatatatgtaaaacctaaaactgtaaatgccctagaagaaatctaggaaatactattctggacattagccttggcaaagacttcatgacaaagactccaaaagcaaatgtagcaacaacaacaaaaattgacaagtgagatctaattaaagatcttctgtacagcaaattagactatcaacagaataaaaagatagtctacagaatgggagaaagtatttgcaaactatgatttctgagaaaggtcta

SEQ ID NO: 240959 - DNA, 555 bp, Homo sapiens
cttttctttaaaggagaccaatcacatcctgaagaccttgatgtcctaaatactcaatagtgtgaaatagttctcaatgctattgatactactgatactcaatagtatcaataatttaaatgtctttatcttgctaagaacaatgattcctaccgcatattgatttctcatgatgcactagaagactgtaaaatataatgtatgtgctttatgtcactagattttcaaatcaaccctatgaggcagagtttccccattttagagaagactattgtcttagtcgacttgagtctcagaatactatagcaaaataacatagactgggtagtttaaatgacaggcatttcccccagttctggaggctggggttccaagataaaggtgccagccaacttagtttctggtgtgggccctctttctggcttgcagacagccatattcatactgagtcattacttggtgggcgttgagggagagagagagtgagtgagagagagagagtgtgtgtgtgtgtgtgtgtgtgtgtgwgagagagagagagagagagacagagac

SEQ ID NO: 240960 - DNA, 553 bp, Homo sapiens
ttccattttttggctatttcctatatcttttaggtatacttcattctttttctattttttttcttttttctcctctgactgtgctttttccaattgcttatcttccagctcattaactctttcttctgcttgatcaattctgctgttgagaacctctgatgtattytttagtatgttaactgaatttttcagctccagaatttcctcttggttctttttaattgtttcaatttctttgttaaatttatttgataggattttgaattccttcttgttatcttgtgttatcttgaattttactgagcttcttcaagacagctactttaaattctctgtctgaaaggtcacatatctctgtcactccaagattggtgcttggtgacttatttagtttgtttcatgagaccatgttttcctggatggtctttatgcttatgaatgtttgttgatgtctggacattgaaaagtgaaatatttatcgtgatgtttgcagtctgggattgtttgtacccattcttcttgggaaggttttccaagtattcaaaggaaattg

SEQ ID NO: 240961 - DNA, 314 bp, Homo sapiens
tcctccatctggctacttccccacaatctctctctacacctggatcaacaaaagacagtaatcctcttgagtcaggaagcacttcatgaacgcataccttrtaaatatcaaaagacacagagactagtagggtctcaatgaatatacttaattaatagtgagaaatttaatcacatacattttacttgattaaattactctttctctttcctgcagctcttcaggctccaggaaacccagccttatgttgctttagatgttttgatcatcactttgctagaaagattctttaaaatccacaattccagatgcag

SEQ ID NO: 240962 - DNA, 314 bp, Homo sapiens
tcctccatctggctacttccccacaatctctctctacacctggatcaacaaaagacagtaatcctcttgagtcaggaagcacttcatgaacgcataccttgtaaatatcaaaagacacagagactagtagggtctcaatgaatatacttaattaatagtgagaaatttaatcacatamattttacttgattaaattactctttctctttcctgcagctcttcaggctccaggaaacccagccttatgttgctttagatgttttgatcatcactttgctagaaagattctttaaaatccacaattccagatgcag

SEQ ID NO: 240963 - DNA, 314 bp, Homo sapiens
tcctccatctggctacttccccacaatctctctctacacctggatcaacaaaagacagtaatcctcttgagtcaggaagcacttcatgaacgcataccttgtaaatatcaaaagacacagagactagtagggtctcaatgaatatacttaattaatagtgagaaatttaatcacatacattttacttgattaaattactctttctctttcctgcagctcttcaggctccaggaaamccagccttatgttgctttagatgttttgatcatcactttgctagaaagattctttaaaatccacaattccagatgcag

SEQ ID NO: 240964 - DNA, 314 bp, Homo sapiens
tcctccatctggctacttccccacaatctctctctacacctggatcaacaaaagacagtaatcctcttgagtcaggaagcacttcatgaacgcataccttgtaaatatcaaaagacacagagactagtagggtctcaatgaatatacttaattaatagtgagaaatttaatcacatacattttacttgattaaattactctttctctttcctgcagctcttcaggctccaggaaacccagccttatgttgctttasatgttttgatcatcactttgctagaaagattctttaaaatccacaattccagatgcag

SEQ ID NO: 240965 - DNA, 593 bp, Homo sapiens
gagatcttcagaaatgcaggaatcaatgcttatttgtgtgaggggggagataaatcagtaaagttcccagaaacggaaccgcaggatgttgtaatctccagaaacgctaagaaaatgaagtatctgcaaagataacaaggaaaaaaggccttggttgagtcacttagttagctgactagtgctggcttgctcctattctgctattgccccagagaaaatggagtaggaaacaatgtggagactcctcccaccagtgtttttagctttcgtttctgttagtcagagaaaatgaacagtttcctggcaagggctggagcatgtggtgaggggaaatgggggatgagaaattactttaatgggtacagttaacatttttcgggtgatgtgcacactgaaatctctgacttcaccaatatggcatatatccatgtaacgaaattacacttgtatctcataamtgtatataaacacaaataagttttttttcttacaaaattcgatagctgaaaggagttccaacattagaactttcttacccagcagacttacatgtgagtcattagagacttatattcccttaaatgatgctcaaa

SEQ ID NO: 240966 - DNA, 464 bp, Homo sapiens
tctattgctaccaatactttactgcatctcctggttggggaaatgtctkctatgaaatcgctatttgtttaaatactacctgaagtattcatccaattattaataactgacaagcctgggctttccagatcagaaagtcattatgaatatgtaaatccttccttaaatttatatgaaggagtttaacactagctgtcctcttgaccatgactaggttactttacctcaatgattagattcacgaatgctcagattttctgcattattcctggataaacaaacgtggatagtggactctcaacatgacagcatcgaagacttgaaaatcctggaaaatgcactgaacttccggtagtgtgaggagtctgtttaatcctctgctcagcagtgtatttttctctgttaaggacagtgggtgccctttagcgtgctgtaaccccaggatgtcaaataaatggcatcaa

SEQ ID NO: 240967 - DNA, 464 bp, Homo sapiens
tctattgctaccaatactttactgcatctcctggttggggaaatgtctgctatgaaatcgctatttgtttaaatactacctgaagtattcatccaattattaataactgacaagcctgggctttccagatcagaaagtcattatgaatatgtaaatccttccttaaatttatatgaaggagtttaacactagctgtcctcttgaccatgactaggttactttacctcaatgattagattcacgaatgctcagattttctgcattattcctggataaacaaacgtggatagtggactctcaacatgacagcatcgaagmcttgaaaatcctggaaaatgcactgaacttccggtagtgtgaggagtctgtttaatcctctgctcagcagtgtatttttctctgttaaggacagtgggtgccctttagcgtgctgtaaccccaggatgtcaaataaatggcatcaa

SEQ ID NO: 240968 - DNA, 544 bp, Homo sapiens
tgaattacctataagtcttctctgatacgcaatctgacacaagctwtttaacaatataaaatgtctgaaataataaatattacagaccttccatactgctcattatgattacctgagttggagttattttcagaggatcataaatacattctatctacctttagatttcttgttataatttcaagtgcactaaggttcaaagaaaaattagactgagtcttttacacaaaaccactttaatttttatttaaaaaaggacaaaaagataaaaaggggtaagtagagaaagctgggtaaagaaaatacattcaactagaattaaaatgttagaagatagtaaataagtacgttcccttgagcacatggtagaatatgagtagttgcatcaagaaaaggctatgatgttttaaggaaaaagttcctatgctggaggagaagaaaaagatagttaaagtctatgttaaaattcactcaactctgaactttaaaacaacagttatcaaagaagagaaaaattagaggactacaccaccagtcaattcat

SEQ ID NO: 240969 - DNA, 489 bp, Homo sapiens
tgttctactaaagaattctactaaaagaatcaccccatcagaacacaaacttacatgaaagaaaaatgctactgagtcataagagggattacactcagacagacagacatatcaggaagcctacagacatatcaggaagcrtaacagaaatagatacactataactgtaacatctaaagaagctgagatttcataatatgtaacaaatgattatggctatgtcataaagtgtccaaactgttttagtagagtcctagggattctagagaggtgcccaaaagctaccacagagttaagcatgcaaggttccaacccccaagtaagtgccccaccaaatctattcttccatcaaaatagtgctacctttattggttttaaatattggacttcacaaagatttcatctaagaaacaaacagttccattgctttaaaaaaaaagtagtagtagtagtagtagtagtagtaaagagaagcactgaaacagaaag

SEQ ID NO: 240970 - DNA, 622 bp, Homo sapiens
actgctttgccttggctggtcaacacatttgtacacctggataggcacagttttcagaaatcctttcaagcatctaccaattctcctgtctacaagtttaccttcctcccatttctcattcctaatgacaagggaaatatccagtgttatctgaagtggtcataaaagacattttttttctttttatgtgaggaattgaaacttatggctttagattatggggcttaccatcaaggaaagggcgtagcgtggtcagaggacaaaacttcttcctgcatttctcaggaaggctttgattagtgtgtccacctatgagcaattttttttggggggggcrctgggaaatatacttaagtgattaaatccaagtgtagacatgagagctttacctaaagccaggtctaattaccatacctgagaatcagggagtatttaaaatttgagaaataattttctatacttgaaagtcacttatgtaggtaggcctcagattataataaataacatttattgtgctatactatgtggtaggcatgaaggtaagtatttttacctatattatatcacttatttcttacaaatggagcaagggagcaagcaaacaagggaggtattatcatcc

SEQ ID NO: 240971 - DNA, 622 bp, Homo sapiens
actgctttgccttggctggtcaacacatttgtacacctggataggcacagttttcagaaatcctttcaagcatctaccaattctcctgtctacaagtttaccttcctcccatttctcattcctaatgacaagggaaatatccagtgttatctgaagtggtcataaaagacattttttttctttttatgtgaggaattgaaacttatggctttagattatggggcttaccatcaaggaaagggcgtagcgtggtcagaggacaaaacttcttcctgcatttctcaggaaggctttgattagtgtgtccacctatgagcaattttttttggggggggcactgggaaatatacttaagtgattaaatccaagtgtagacatgagagctttacctaaagccaggtctaattaccatacctgagaatcagggagtatttaaaatttgagaaataattttctatacttgaaagtcacttatgtaggtaggcctcagattataataaataacrtttattgtgctatactatgtggtaggcatgaaggtaagtatttttacctatattatatcacttatttcttacaaatggagcaagggagcaagcaaacaagggaggtattatcatcc

SEQ ID NO: 240972 - DNA, 453 bp, Homo sapiens
tatagtttgcaaaaattttcttccattctataggctggctgtttactttattgattgtttcttttgctatggaaaagctttttagtttaattaagtcccatttgtctatttttggttttgttccatttgctttttgggtcttggtcataaattctttgcctaggccaatgttcaggagagttttcctatgtttccttstaggatatttgtagttccaagtcttatatttaaaactttaatttgtcttgagttaacattttatatggtgaaaggtatgcatccagtttcattcttctgcatatggttaatgtctgcacatggcaaattttcttcacaccatttattgaataggatgccatttattcagtgtatatttttattgactttgccaaagataagttcattgtaagtatgtagccttatttctgggttctccattctattccacttttc

SEQ ID NO: 240973 - DNA, 547 bp, Homo sapiens
gcttgacatctttccaatgcataaaaatgataaatattcaagttgatgaatactgtaaataccttaacttatcattaaacattatatgcatgtaataaaatatcatgtcctcatagatatgtgcaaatattatctgtaaataaaaacccccttgatgttgatcttggcaataattttttggatatgaaatcaaaaacacaggcagcaatagcaaaataaacaagtggaactacatcaaattaaaaagtttatttttttgcttttttaacttttattttaagttcggggtacgtgtgcargtttgttacacagataaaacatgtgtcatgggggtttattgtacagactatttcatcgcttgagtattaagcctagtacacattagttatttttcctgatgctctccctcctccaaatctccaccctccaataggcccctgagtgtgttattccactcttaatttgttcatgtgttcttatcatttagctcccacatatattgagaacatgcagtatttggttttctgtttctgtgttagtttgctaa

SEQ ID NO: 240974 - DNA, 547 bp, Homo sapiens
gcttgacatctttccaatgcataaaaatgataaatattcaagttgatgaatactgtaaataccttaacttatcattaaacattatatgcatgtaataaaatatcatgtcctcatagatatgtgcaaatattatctgtaaataaaaacccccttgatgttgatcttggcaataattttttggatatgaaatcaaaaacacaggcagcaatagcaaaataaacaagtggaactacatcaaattaaaaagtttatttttttgcttttttaacttttattttaagttcggggtacgtgtgcaggtttgttacacagataaaacatgtgtcatgggggtttattgtacagactatttcatcgcttgagtattaagcctagtacacattagttatttttcctgatgctctccctcctccaaatctccaccctccaatargcccctgagtgtgttattccactcttaatttgttcatgtgttcttatcatttagctcccacatatattgagaacatgcagtatttggttttctgtttctgtgttagtttgctaa

SEQ ID NO: 240975 - DNA, 476 bp, Homo sapiens
ctcagttggaaatgcagaaatctcctgcctgcattgatctcctggaaactgaacaccaaagctgttcctattcgaatatcttgccagacaccagcagtaaagaatcttaagagctgtgagacaaaagcaccaggtaacctataaagaaaaacttatcacattaacagcagatttcccagcagaaaccctacaagctagaaaaaaaamattggccctattttcaccctcctaaaacaaaacaattatcagccaagaatcttgtatccagtgaaacaaagcatcatatatgaagaaaagacacagtcttttcagacaaacaaatgctgagagaatttgccactaccagaccacaattacaagaactgctaaaagaagctctaaatcttgaaacaaatcctggaaacacatcaaaacagaacctctaaagcataaatcacacaaaaccaataaaacagaaaaaaatttaagggaggagc

SEQ ID NO: 240976 - DNA, 472 bp, Homo sapiens
gaagtataatatctctacaattagaactgtgaaatactggtgaaagaagttgaagaggacacacataaaaaggaaagatatctcatgttcatggattggaagaaccaatattgttaaaatgtccatgctacccaaagcgatctacagattcaatacaatctctatgaaagtagcaataattggccaggtgcagtggcttatgcctgtaatcccagcactttgggaggccaagggargcagatcacctgaggtcaggagttcgagaccagcctggccaacatggtgaaaccgtgtctctactaaaaatacaaaaagtggccaggcgtggtggcacatgcctgtagtcccagctactcaggaggcaggagaatcacttgaacccaggaggcggaggttgcagtgagctgagatggtgctgctgcactccagcctaggtgacaaagcaagactctgtctcaaaaaaacaaaaaat

SEQ ID NO: 240977 - DNA, 584 bp, Homo sapiens
tcacttaggccggaggttgcaatttttttttgtcaaaaaatcagaccttggtgataacttgagcagtaggctataagtaactagtaggctagcytactataagtaggctaggcatattaatagcgtataaggtgctctcacagacatgttttccctttgatactcaccatagccctgtgaagttgatagctactatcccccattttacagataaattttctaatctgtaatcaaaatagctgctctttgcttgaagaaaaagtccagagggacaccctatatgtcaagagagctccagggggtgggtaatttctttcataattgctagaagagccaattctgaatgtgaggctttttctatctgctttattacaaccagagatggaataggaaggctttcagttacagtttatcaattccttctgcttttgccagttaatctctagctttactcttttgaaaaaactacctgtttcccactccacttctgctaccaccactaccaagtcagagtcctctttctattccagccaaacctcttcctgttcttgagaattgcatcacattcttggcttaacgtaacc

SEQ ID NO: 240978 - DNA, 584 bp, Homo sapiens
tcacttaggccggaggttgcaatttttttttgtcaaaaaatcagaccttggtgataacttgagcagtaggctataagtaactagtaggctagcttactataagtaggctaggcatattaatagcgtataaggtgctctcacagacatgttttccctttgatactcaccatagccctgtgaagttgatagctactatcccccattttacagataaattttctaatctgtaatcaaaatagctgctctttgcttgaagaaaaagtccagagggacaccctatatgtcaagagagctccagggggtgggtaatttctttcataattgctagaagagccaattctgaatgtgaggctttttctrtctgctttattacaaccagagatggaataggaaggctttcagttacagtttatcaattccttctgcttttgccagttaatctctagctttactcttttgaaaaaactacctgtttcccactccacttctgctaccaccactaccaagtcagagtcctctttctattccagccaaacctcttcctgttcttgagaattgcatcacattcttggcttaacgtaacc

SEQ ID NO: 240979 - DNA, 571 bp, Homo sapiens
ttcaaaattgcataaccattttagtgactaaagcactgagactcatccaataatactgtgrtttgataattacacagttgtgaatttatgatactgttaaattggggagacatcttggtgcatacaggtcaaccttttcatacatcattatatacaaaaagtacacacctacttaggaattgaagtgtaatacttcctagcataaaatgcttaaaagaagattttaagggagtgatacagtgagcattcctatatgaattttcctgcttatctcaagcatagcagaagatgtgaaatttctaggtaagttttttttttttttttgacagggtcttgctctgtcacccgagctgaaatgcagcagtggtaacatggttcactgcagcctcaacctcctgggatcaagtggtcctcccacctcagcctcccgagtagctgggactagagacatgcatcaccatgcccagttagttttttaattttttgtagagacagggtctcactttgtggcccagcctggtcttgaactcctgggctcaagccatccttctgccttggactcccaaagtgt

SEQ ID NO: 240980 - DNA, 571 bp, Homo sapiens
ttcaaaattgcataaccattttagtgactaaagcactgagactcatccaataatactgtggtttgataattacacagttgtgaatttatgatactgttaaattggggagacatcttgrtgcatacaggtcaaccttttcatacatcattatatacaaaaagtacacacctacttaggaattgaagtgtaatacttcctagcataaaatgcttaaaagaagattttaagggagtgatacagtgagcattcctatatgaattttcctgcttatctcaagcatagcagaagatgtgaaatttctaggtaagttttttttttttttttgacagggtcttgctctgtcacccgagctgaaatgcagcagtggtaacatggttcactgcagcctcaacctcctgggatcaagtggtcctcccacctcagcctcccgagtagctgggactagagacatgcatcaccatgcccagttagttttttaattttttgtagagacagggtctcactttgtggcccagcctggtcttgaactcctgggctcaagccatccttctgccttggactcccaaagtgt

SEQ ID NO: 240981 - DNA, 571 bp, Homo sapiens
ttcaaaattgcataaccattttagtgactaaagcactgagactcatccaataatactgtggtttgataattacacagttgtgaatttatgatactgttaaattggggagacatcttggtgcatacaggtcaaccttttcatacatcattatatacaaaaagtacacacctacttaggaattgaagtgtaatacttcctagcataaaatgcttaaaagaagattttaagggagtgatacagtgagcattcctatatgaattttcctgcttatctcaagcatagcagaagatgtgaaatttctaggtaagttttttttttttttttgacagggtcttgctctgtcacccgagctgaaatgcagcagtggtaacatggttcactgcagcctcaacctcctgggatcaagtggtcctcccacctcagcctcccragtagctgggactagagacatgcatcaccatgcccagttagttttttaattttttgtagagacagggtctcactttgtggcccagcctggtcttgaactcctgggctcaagccatccttctgccttggactcccaaagtgt

SEQ ID NO: 240982 - DNA, 590 bp, Homo sapiens
aaggaacaaaagatacagggacagaaacagcaagatatgtttgggggaatctcaagtaatactgttattgtgtgaagttcacaacaggggcagggaggacaggagatggggcccaatgacgaaaaggccttgtatgtaccatgtttagaagtttgaattttatcctataggagtcagggagaggttctatgggtaggatttttatcccaacaggattgtaaactcccacatccaattagtcacacctccattttttttttctgtttctttaacattgtctcrgattcattccttctgaaatctaccttattagttcaggtcttcttaaatttgtgcctggactgttcaccaactcttgactggtcctggggctccagttcacctcttgctcccaacaatcaattttctacagaattatcagagcaatcttcctttccatcaatctcaactctgttcaaaaactttcaatagttttatgtgacctaagaggtagctgcctccccaccctttcagcttgccattcaaggctgcataatttggtcccaaccccctttccgtccttgactcctctcactgctaacagagacaga

SEQ ID NO: 240983 - DNA, 477 bp, Homo sapiens
tgaggtatatcatcagtaatatgggctaataactgtgctagtagtaacatttcatgattgtttacrctgcatcagcttccagtgctaagcacttttgtcttttattgtatgattctcacaaatcctcataaggtaggtaatgcttttattcctttctcccttctcaaaggattcttaggaagcctaggtgtgacactaattatagatgcactttgtaaccattaagggttaatgcaaaaaatgaaatattattgtgatgttcaataatagtaccatgatgttcaacaagtacatatttaacgaataactgcacttgttgaatgccatgacagttgtgggctataattaaatgagtctcaaaatattttgtgtctgtctcctgaacaaaccaaataaaaagcaatagaaggaatgaaaaacgttgtcatcaccaatttgctaattgtatgccatgccggaccacagaagagagaattc

SEQ ID NO: 240984 - DNA, 491 bp, Homo sapiens
  misc_feature (1)...(491): n = A,T,C or G
nnnnnnnnnnnnnnnnntgtgcaaacttgaggaagtgaggtatatcatcagtaatatgggctaataactgtgctagtagtaacatttcatgattgtttacgctgcatcagcttccagtgctaagcacttttgtcttttattgtatgattctcacaaatcctcataaggtaggtaatgcttttattcctttctcccttctcaaaggattcttaggaagcctaggtgtgacactaattatagatgcactttgtaaccattaagggttaatgcaaaaaatgaaatattattgtgatgttcaataatagtaccatgatgttcaacaagtacatatttaaygaataactgcacttgttgaatgccatgacagttgtgggctataattaaatgagtctcaaaatattttgtgtctgtctcctgaacaaaccaaataaaaagcaatagaaggaatgaaaaacgttgtcatcaccaatttgctaattgtatgccatgcc

SEQ ID NO: 240985 - DNA, 491 bp, Homo sapiens
  misc_feature (1)...(491): n = A,T,C or G
nnnnnnnnnnnnnnnnntgtgcaaacttgaggaagtgaggtatatcatcagtaatatgggctaataactgtgctagtagtaacatttcatgattgtttacgctgcatcagcttccagtgctaagcacttttgtcttttattgtatgattctcacaaatcctcataaggtaggtaatgcttttattcctttctcccttctcaaaggattcttaggaagcctaggtgtgacactaattatagatgcactttgtaaccattaagggttaatgcaaaaaatgaaatattattgtgatgttcaataatagtaccatgatgttcaacaagtacatatttaacgaataactgcayttgttgaatgccatgacagttgtgggctataattaaatgagtctcaaaatattttgtgtctgtctcctgaacaaaccaaataaaaagcaatagaaggaatgaaaaacgttgtcatcaccaatttgctaattgtatgccatgcc

SEQ ID NO: 240986 - DNA, 533 bp, Homo sapiens
tatgtgtgagaaaaaacacaataccctgttacacccycttcaactgtgggcaggtagattatttactttgtgggttgatgtaacacaatttttaatcccatgttggctacgctctgccacttccccccaccgttagtgggtgtgtgctcaggcagtgtaaactcaggaaggtaatgcaaaaccaggaaagtaaatctgcttcttatacctctcaccccacatcagcctcctcctctctttttacttcattctcttcagctttaaaaaaacagaggtaaatgtattttcagttgtctttggcacagccctgttttggaaatcatagacagccagctggaccaggagtcaggaagccaggggctttcatctggatctgacattggttaactgtgggccttcaggaaagttagatcagtcctccaggcttttgttccttttctgtacaatgaaaagaagactagagtatttatgaagtgcccactgtgcaccatgtgacttcaattgtattactttatttaatccataagagaaag

SEQ ID NO: 240987 - DNA, 549 bp, Homo sapiens
ctatgtgtgagaaaaaacacaataccctgttacaccctcttcaaytgtgggcaggtagattatttactttgtgggttgatgtaacacaatttttaatcccatgttggctacgctctgccacttccccccaccgttagtgggtgtgtgctcaggcagtgtaaactcaggaaggtaatgcaaaaccaggaaagtaaatctgcttcttatacctctcaccccacatcagcctcctcctctctttttacttcattctcttcagctttaaaaaaacagaggtaaatgtattttcagttgtctttggcacagccctgttttggaaatcatagacagccagctggaccaggagtcaggaagccaggggctttcatctggatctgacattggttaactgtgggccttcaggaaagttagatcagtcctccaggcttttgttccttttctgtacaatgaaaagaagactagagtatttatgaagtgcccactgtgcaccatgtgacttcaattgtattactttatttaatccataagagaaagaactctactagctag

SEQ ID NO: 240988 - DNA, 640 bp, Homo sapiens
aattcatttctttgtcatttgaagccttctgtggcttcatgctgctttatgtgtttgtaaatattcagtatcttttctagtttacacttttgtcacaactgctattaagccacctatggacacattctaatataaattattttggccactgtgagtgggagggaaagaatcagttcacagggataaatttgcatgttgagaagataatatataatagtttgcaaaacacttctatgtacattgtatcttttatagagacaaggccatgtttttatttgtrgagactgagacagagaccccatgagatctaatgcagagtcacatgactccaaagccaggtcttctatctgctctttggtatataactggatcattattctattgacagaaataaggaatcttcttatttttcaaaggcacccttttgcccttggaaggtatatttagaaatcctttaccagactagaaagaagacagttatattttcctgccttttgataaaaaacagtgtgttttttctaaatcttgttgtgtttgactagagtctgattaaggtaccttttgggaaattaaggttctatagaaattactgggctcaatctagtgatacaaatatgtgttgtttgatttatcaacacat

SEQ ID NO: 240989 - DNA, 582 bp, Homo sapiens
acatgactccaaagccaggtcttctatctgctctttggtatataactggatcattattctrttgacagaaataaggaatcttcttatttttcaaaggcacccttttgcccttggaaggtatatttagaaatcctttaccagactagaaagaagacagttatattttcctgccttttgataaaaaacagtgtgttttttctaaatcttgttgtgtttgactagagtctgattaaggtaccttttgggaaattaaggttctatagaaattactgggctcaatctagtgatacaaatatgtgttgtttgatttatcaacacattacaaaccttaactttggagttttaatatctggttatctttaatatctggttatcttctttctgaagtgtatgtacacaaaattgatgctaaataaggtcttgttgttttggcaaatagtgaaatgcaaggtattggtagatcagtactgttataactttggtgcaaagttgctgcatgcagattggctgtgggaccttgttcattttttgagaactaatgtagagtttgaaaaaacaccgtaagcctgcattccagaagtt

SEQ ID NO: 240990 - DNA, 582 bp, Homo sapiens
acatgactccaaagccaggtcttctatctgctctttggtatataactggatcattattctattgacagaaataaggaatcttcttatttttcaaaggcacccttttgcccttggaaggtatatttagaaatcctttaccagastagaaagaagacagttatattttcctgccttttgataaaaaacagtgtgttttttctaaatcttgttgtgtttgactagagtctgattaaggtaccttttgggaaattaaggttctatagaaattactgggctcaatctagtgatacaaatatgtgttgtttgatttatcaacacattacaaaccttaactttggagttttaatatctggttatctttaatatctggttatcttctttctgaagtgtatgtacacaaaattgatgctaaataaggtcttgttgttttggcaaatagtgaaatgcaaggtattggtagatcagtactgttataactttggtgcaaagttgctgcatgcagattggctgtgggaccttgttcattttttgagaactaatgtagagtttgaaaaaacaccgtaagcctgcattccagaagtt

SEQ ID NO: 240991 - DNA, 508 bp, Homo sapiens
taatgctggttttcaaacttgagtgcacatcaagttttggaggacttgttagaatacagattgctgggctcacccccagagtttctgatctggtaggtctggagcgggacctggtagattgcatttctaaaaagcgtccaggtaatactgctgctgtttgggaaagtacactttgagagtcactggcttacagcaatctcaaggtgtttggatttttgggcaggggtgctgtgcaggcgttgctgggatctcttcacagcacctccactgcatagaggtgagcctccagatgttttcattcattcaacwaatatatgtacctattgtgtgctgggcactgcttaagttgcgaggggatattgtgaagaaagtaagcaaaacccctttgtttgtagaatttcagtgagcatagtcctgggttaacctgacaacagtcctactgtttattgatgcttataggtgagcctatttctctttctagctttcttccacttaatttactttcttt

SEQ ID NO: 240992 - DNA, 549 bp, Homo sapiens
ctatgtgtgagaaaaaacacaataccctgttacaccctcttcaactgtgggcaggtagattatttactttgtgggttgatgtaacacaatttttaatcccatgttggctacgctctgccacttccccccaccgttagtgggtgtgtgctcaggcagtgtaaactcaggaaggtaatgcaaaaccaggaaagtaaatctgcttcttatacctctcaccccacatcagcctcctcctctctttttacttcattctcttcagctttaaaaaaacagaggtaaatgtattttcagttgtctttggcacagccctgttttggaaatcatagacagccagctggaccaggagtcaggaagccaggggctytcatctggatctgacattggttaactgtgggccttcaggaaagttagatcagtcctccaggcttttgttccttttctgtacaatgaaaagaagactagagtatttatgaagtgcccactgtgcaccatgtgacttcaattgtattactttatttaatccataagagaaagaactctactagctag

SEQ ID NO: 240993 - DNA, 549 bp, Homo sapiens
ctatgtgtgagaaaaaacacaataccctgttacaccctcttcaactgtgggcaggtagattatttactttgtgggttgatgtaacacaatttttaatcccatgttggctacgctctgccacttccccccaccgttagtgggtgtgtgctcaggcagtgtaaactcaggaaggtaatgcaaaaccaggaaagtaaatctgcttcttatacctctcaccccacatcagcctcctcctctctttttacttcattctcttcagctttaaaaaaacagaggtaaatgtattttcagttgtctttggcacagccctgttttggaaatcatagacagccagctggaccaggagtcaggaagccaggggctttcatctggatctgacattggttaactgtgggccttcaggaaagttagatcagtcctccaggcttttgttccttttctgtacaatgaaaagaagactagagtatttatgaagtgcycactgtgcaccatgtgacttcaattgtattactttatttaatccataagagaaagaactctactagctag

SEQ ID NO: 240994 - DNA, 549 bp, Homo sapiens
ctatgtgtgagaaaaaacacaataccctgttacaccctcttcaactgtgggcaggtagattatttactttgtgggttgatgtaacacaatttttaatcccatgttggctacgctctgccacttccccccaccgttagtgggtgtgtgctcaggcagtgtaaactcaggaaggtaatgcaaaaccaggaaagtaaatctgcttcttatacctctcaccccacatcagcctcctcctctctttttacttcattctcttcagctttaaaaaaacagaggtaaatgtattttcagttgtctttggcacagccctgttttggaaatcatagacagccagctggaccaggagtcaggaagccaggggctttcatctggatctgacattggttaactgtgggccttcaggaaagttagatcagtcctccaggcttttgttccttttctgtacaatgaaaagaagactagagtatttatgaagtgccyactgtgcaccatgtgacttcaattgtattactttatttaatccataagagaaagaactctactagctag

SEQ ID NO: 240995 - DNA, 549 bp, Homo sapiens
ttttgtatttttagtagagacagggtttcaccatattggccgggctggtcttgaactccttacctcatgatctgcctgcctcggccttccaaagtgctggaattacaggtgtgagccactgctcctggcccggaagttgatattcaaacaggagcagcatatgcaaagacagtgagctctgagagagtagatggatccagactcctattgctgatagcgtcctgcaggattgggcttcaatgtgactaacctacaattgcctccaggtgctccacccactgagtccttgtgtctctgctgaggtccttggagagttactggagagggctctgtgtcagatkaccttgaggaggctctgatttagccttttgtaaaatgcaaagagttgaggtcttctccacgcaagagctcgctgatgtcaatgaggtattgaggatggggccatctcctatttctgtggccagtactgagttttgttatccttcctttaggtaaggagtgccaatggaccgatgcctgcctgtctcatccctgtgcaaatggaagtac

SEQ ID NO: 240996 - DNA, 407 bp, Homo sapiens
acccagcaatcttcattactgagtatatatctaaaggaaaataaaccattctaccaaaaagacacatgcactcacatgttcatcacagcactattcacaatagcaaagacatggaatcaatctaggtgttcatcaacagtggattggattttttaaaatagggtatatacatagcatggtataatacacagtcaaaaaaatgagtgaaatcatatcctttgtagcaacatggatggagctagaggtcattatcctgagtgaattaaggcagaaacagaaaaccaaatgtgttagtaagatctcacaagtgggagttaagcattgggtactcatggacatamagatgacaacaataggtactggggactactagaggcaggaaggaggaagggggacaaagcttgaaa

SEQ ID NO: 240997 - DNA, 556 bp, Homo sapiens
gcattaatttgtgaacatttatattcagttcagctgtatttatggcacaagatctcatttccaaaatggcactaattttccttaagtgtaacagcactctatttttagcagtaattatatttttaaaggttaatttgtagaacaaatgttttaactatactttttttctactctatactccccagttacaatatttacaaagggctgaagtctatataaaaaaatgatctttggctgggcatggtggctcatgcctgtaatmccagcactttgggaggtcgaggcaggaggatcacgaggttaggagtttgagaccagcctgaccaacatgaagaaaccctgcctctactaaaaatacaaaattagccaggcatggaggcaggctcctgtaatcccaactactcgggaggctgaggcaggagaatcgcttgaacccgggaggcggaggttgcggtgagttgagattgtgccattgcactccagcctgggtgacaaagcgagtctcaaaaaaaaaaaaagacatcttttactttcccccatccctcattttagtcaa

SEQ ID NO: 240998 - DNA, 556 bp, Homo sapiens
gcattaatttgtgaacatttatattcagttcagctgtatttatggcacaagatctcatttccaaaatggcactaattttccttaagtgtaacagcactctatttttagcagtaattatatttttaaaggttaatttgtagaacaaatgttttaactatactttttttctactctatactccccagttacaatatttacaaagggctgaagtctatataaaaaaatgatctttggctgggcatggtggctcatgcctgtaatcccagcactttgggaggtcgaggcaggmggatcacgaggttaggagtttgagaccagcctgaccaacatgaagaaaccctgcctctactaaaaatacaaaattagccaggcatggaggcaggctcctgtaatcccaactactcgggaggctgaggcaggagaatcgcttgaacccgggaggcggaggttgcggtgagttgagattgtgccattgcactccagcctgggtgacaaagcgagtctcaaaaaaaaaaaaagacatcttttactttcccccatccctcattttagtcaa

SEQ ID NO: 240999 - DNA, 584 bp, Homo sapiens
atttatggcacaagatctcatttccaaaatggcactaattttccttaagtgtaacagcactctatttttagcagtaattatatttttaaaggttaatttgtagaacaaatgttttaactatactttttttctactctatactccccagttacaatatttacaaagggctgaagtctatataaaaaaatgatctttggctgggcatggtggctcatgcctgtaatcccagcactttgggaggtcgaggcaggaggatcacgaggttaggagtttgagaccagcctgaccaacatgaagaaaccctgyctctactaaaaatacaaaattagccaggcatggaggcaggctcctgtaatcccaactactcgggaggctgaggcaggagaatcgcttgaacccgggaggcggaggttgcggtgagttgagattgtgccattgcactccagcctgggtgacaaagcgagtctcaaaaaaaaaaaaagacatcttttactttcccccatccctcattttagtcaaacttctcccacctcatttctgccctggttggggaagtgcaagagtttcagataaggtacctatgt

SEQ ID NO: 241000 - DNA, 497 bp, Homo sapiens
attctgcatagaaagagtatcgataatgggaactggcaactgagcatgctaaatcaaattccatgaatasagttttcataagatgtctttactacatgcattttgctaatatttccctaaaatattcaccaactctacagagttatactttgtgttaaggtactattgagttataagggaaatagccatatcaggtagctagtgacataataccagttgtgaaaattcagacaaaatgagtcgacaaatccccaaaaatggcaaattaagccctgtgacaaaataagttattgcatcatacagaaatagcccaaatctggaaattttgaattaaaattgtaatcctgtaaaacaagttttggggtgaatggatttctttaataccaataatatttttaattcccaccacagatggatttgctgaatatgctaatgctgtgaatgagaaaacaattttggggtaggtatacccacaagtaatctgatgacaaaataaa

SEQ ID NO: 241001 - DNA, 497 bp, Homo sapiens
attctgcatagaaagagtatcgataatgggaactggcaactgagcatgctaaatcaaattccatgaatagagttttcataagatgtctttactacatgcattttgctaatatttccctaaaatattcaccaactctacagagttatactttgtgttaaggtactattgagttataagggaaatagccatatcaggtagctagtgacataataccagttgtgaaaattcagacaaaatgagtcgacaaatccccaaaaatggcaaattaagccctgtgacaaaataagttattgcatcatacagaaatagcccaaatctggaaattttgaattaaaattgtaatcctgtaaaacaagttttggggtgaatggatttctttaawaccaataatatttttaattcccaccacagatggatttgctgaatatgctaatgctgtgaatgagaaaacaattttggggtaggtatacccacaagtaatctgatgacaaaataaa

SEQ ID NO: 241002 - DNA, 571 bp, Homo sapiens
ttcctttgactccagcctcctcataaacttccctcacggcagcaccgccaggttcctcctcgggttcyattcctcctcctgggacaatccactggtctgggtaccggctgctactcaccagcagcacctcgtcctcctgctcgctccggaagcacaggcacgccgcccgcttcttgaagccctcgcggtcgtaggtccgcgtctggttgggcttgaacttcatcatagaggcgggctcctgctgctgctgctgctgctccggccgccgccaccccgccggggagtgggggcgagggcgagtcgggcgcaggagcgcctgggagcgctagtcggtgcgggaggtgcggcgaggccggtcagtcccggggccggcggccgctccgacgcgggcgggacgggacgctagcgcgggtcactggaaccagggtgccgagatgaaagctccgcctctgcccagttgtccgccgctctccatggagcccgactcccgctcgcctccgctccctccggccgtagccgccaggggaagggcggctagaggcgcgcgccacgcggagacagttgcgaagac

SEQ ID NO: 241003 - DNA, 502 bp, Homo sapiens
ggagaaggatgcggacggggccagtgactcgtagtagatccctccgcgcggagctcgggccggcgcttcttcctgcgggaaacccctgggtgcccaaggcggcggggccgaggccgcggcgacagtggggcggggcttgcggtgggaggaggcggctgaggcggaaggacacacgaggctgcttcgctgcacacaagagaaagtttcagccaaacttcgggcggctgaggcggcggccgaggagcggcggactcsgggcgcggggagtcgaggcatttgcgcctgggcttcggagcgtagcgccagggcctgagcctttgaagcaggaggaggggaggagagagtggggctcctctatcgggaccccctccccatgtggatctgcccaggcggcggcggcggaggaggcgaccgagaagatgcccgccctgcgccccgctctgctgtgggcgctgctggcgctctggctgtgctgcgcgacccccgcgcatggtgagtatcg

SEQ ID NO: 241004 - DNA, 502 bp, Homo sapiens
ggagaaggatgcggacggggccagtgactcgtagtagatccctccgcgcggagctcgggccggcgcttcttcctgcgggaaacccctgggtgcccaaggcggcggggccgaggccgcggcgacagtggggcggggcttgcggtgggaggaggcggctgaggcggaaggacacacgaggctgcttcgctgcacacaagagaaagtttcagccaaacttcgggcggctgaggcggcggccgaggagcggcggactccgggcgcggggagtcgaggcatttgcgcctgggcttcggagcgtagcgccagggcctgagcctttgaagcaggaggaggggaggagagagtggggctcctctatcgggaccccctccccatgtggatctgcccaggcggcggcggcggaggaggcgaccgagaagatrcccgccctgcgccccgctctgctgtgggcgctgctggcgctctggctgtgctgcgcgacccccgcgcatggtgagtatcg

SEQ ID NO: 241005 - DNA, 408 bp, Homo sapiens
tgaggaattttaggtaaaagaccgtatcctgagattcatgcaagtctttggcattatgttactatttaaagtaagtaatatgtagtggcttctctgacatattctttctaagagagttaaggaaaatagttgtaactaaaagcaaacattgaaacagtttaaggtaggtttacgtagcaacagaattattcgttatgtttacagataattaactcrtatttatactttgctgattttctctggcacctttacaagatttttttatttttgtaatataaaaagtaattatgtttgaaaaagtagttaaggatgtttgaagaatctagaaaagcataaataaaatgtccacaatcatgctgccattaattttttggtatacgtctttggtttttttacccttagatttag

SEQ ID NO: 241006 - DNA, 408 bp, Homo sapiens
tgaggaattttaggtaaaagaccgtatcctgagattcatgcaagtctttggcattatgttactatttaaagtaagtaatatgtagtggcttctctgacatattctttctaagagagttaaggaaaatagttgtaactaaaagcaaacattgaaacagtttaaggtaggtttacgtagcaacagaattattcgttatgtttacagataattaactcatatttatactttgctgattttctctggcacctttacaagatttttttatttttgtaawataaaaagtaattatgtttgaaaaagtagttaaggatgtttgaagaatctagaaaagcataaataaaatgtccacaatcatgctgccattaattttttggtatacgtctttggtttttttacccttagatttag

SEQ ID NO: 241007 - DNA, 596 bp, Homo sapiens
agagtaaaatcagaggacttttggtgcactgcttagatcctaaatctttgaatattagtggtgccttagaagatggataggtaggagaagggtgagaggaagggagctgaggagactagaagggactgttatttcctggaataatcattaccaatttcttcatcacgttttcttaatgacacrgtttcaaacgttttcttcatcttgattgctgtcttctgtgtatatgctggtttgtgtgaggttttactaaaccagtatgtggattaatctagtttcacagtgacaggtaagtgatttagaaaatcattcctttagcacatgttaacttgaacgtttggaggtagaatgcctagagtgagggtgaaggagaggacctggggacaggaagagagggcagctgggagcaattatgctccttccctcagacctttttggccttgactcttgattcttgtacttctaccagacagagaggcggtaggcttgtggccatgttttgcgaggaaaatcagaatctaagaatctctaaggcaagagcaagaatggattgggataggggaagtgataggaaaacaaaggcactaagaagaggg

SEQ ID NO: 241008 - DNA, 498 bp, Homo sapiens
tacctttttaagtggttgattccctgtgagcttaaatttagtgcttctcttgccagaccgttgtcttacatacacacttgcagcagttttagccttgtgtaactaatgaggaggtcagattccatcgaggctgaaatacctaccaccattgtatgctcaagaaaacaggctctcatgttggccagttgtttgggatagaagatggttagacctttctatcctttttaaacacaagattctttttcattccccttatcttrtttaaatatattgttccttctctttggttgttctttgctttcttatgcatctgtgaggggctagctgaaagtgtgagttgtggaacaattcatttacataagtgtatattgaattatctgtgcacctagagggtgatgggcactgtgagggatattaaaaaagagacacagtacagttcttaccctaggatcccctgcttggagtgggacagtggtcaagacatatacaaccacaaac

SEQ ID NO: 241009 - DNA, 498 bp, Homo sapiens
tacctttttaagtggttgattccctgtgagcttaaatttagtgcttctcttgccagaccgttgtcttacatacacacttgcagcagttttagccttgtgtaactaatgaggaggtcagattccatcgaggctgaaatacctaccaccattgtatgctcaagaaaacaggctctcatgttggccagttgtttgggatagaagatggttagacctttctatcctttttaaacacaagattctttttcattccccttatcttgtttaaatatattgttccttctstttggttgttctttgctttcttatgcatctgtgaggggctagctgaaagtgtgagttgtggaacaattcatttacataagtgtatattgaattatctgtgcacctagagggtgatgggcactgtgagggatattaaaaaagagacacagtacagttcttaccctaggatcccctgcttggagtgggacagtggtcaagacatatacaaccacaaac

SEQ ID NO: 241010 - DNA, 584 bp, Homo sapiens
atcagtgtgtatttaatgctttattcagatgagggggtgaaaaacctaacacatgtaaactaagtgaggtggggtttcagagataattcccagcctcacaattcctcrtgaagttcttttcctgtgggaaacttttaatttggaagcatgcaacctaatgtgggaaccaagattaacattttctgaaatacttctacaagaaaagcagaaatggtctgtccaggaagctgaatttacatagtagaaaaatgagctgccctgcagtatttggtagtctttgtgtattggttgtgataaaagtgtgtatgtgtgtgtgtacgtgtgtgagagtgagagattgtatacttgtctttgtttccttcacatacaactagtaaggccctagaaaaactacactagaaagtgtgttttaccacaagcgtcccagttctggacaccaatctatacacaaatacttttttttaaagttctttttgtttttccttcttgctgagtaagctatagtatttccttttttttctttctttttatttgagagaaggggggttgagagtagagtgggaatggcaagaagtagtatgaca

SEQ ID NO: 241011 - DNA, 537 bp, Homo sapiens
ttcatggcacataataagtgctcataatttgtttgcttcatcggaattctctctgtagtctacttctcagtcaaataactgtgactacctccatttcctcacaatccaktctccttatgttccttctgttacaggaattgcagcctcatcacctatcacaatatttctcaacccttttcttttcattattgccttcctaaggaggcttttccgatgtttttaaaaattgctctcctctatcaaattttggtaccatagtgtgatggttaattttgtgtgtcaactttagtgggctacggattgctgagatcactggtaaaacattatttgtgggtgtgtctgggagggtgttcttggaaaaggttagcatttgaattggtagagtgagtaaaagatcacccttggcagtgtgagtgggcatcaagcaatcccttgaaggcctgaataaaacagagaggtggaggaagcacaagttcactctctcttctggagctgggacatccatctcctcctgcccttggatatcagtagtgtttc

SEQ ID NO: 241012 - DNA, 537 bp, Homo sapiens
ttcatggcacataataagtgctcataatttgtttgcttcatcggaattctctctgtagtctacttctcagtcaaataactgtgactacctccatttcctcacaatccagtctccttatgttccttctgttacaggaattgcagcctcatcacctatcacaatatttctcaacccttttcttttcattattgccttcctaaggaggcttttccgatgtttttaaaaattgctctcctctatcaaattttggtaccatagtgtgatggttaattttgtgtgtcaactttagygggctacggattgctgagatcactggtaaaacattatttgtgggtgtgtctgggagggtgttcttggaaaaggttagcatttgaattggtagagtgagtaaaagatcacccttggcagtgtgagtgggcatcaagcaatcccttgaaggcctgaataaaacagagaggtggaggaagcacaagttcactctctcttctggagctgggacatccatctcctcctgcccttggatatcagtagtgtttc

SEQ ID NO: 241013 - DNA, 537 bp, Homo sapiens
ttcatggcacataataagtgctcataatttgtttgcttcatcggaattctctctgtagtctacttctcagtcaaataactgtgactacctccatttcctcacaatccagtctccttatgttccttctgttacaggaattgcagcctcatcacctatcacaatatttctcaacccttttcttttcattattgccttcctaaggaggcttttccgatgtttttaaaaattgctctcctctatcaaattttggtaccatagtgtgatggttaattttgtgtgtcaactttagtgggctacggattgctgagatcactggtaaaacattatttgtgggtgtgtctgggagggtgttcttggaaaaggttagcatttgaattggtagagtgagtaaaagatcacccttggcagtgtgagtgggcatcawgcaatcccttgaaggcctgaataaaacagagaggtggaggaagcacaagttcactctctcttctggagctgggacatccatctcctcctgcccttggatatcagtagtgtttc

SEQ ID NO: 241014 - DNA, 617 bp, Homo sapiens
gttaccagtaatataggtaactgttgaagctctaaatatagaagacaaactagaggagcttgtttcttgaagaattcttgtcacacttgacattttttacagagatttcttaaaacaggggcatatcttctttggctaacatatgcagactaaaatgaaagagtatagtatattataaaatcaataaaaggtaagataaattkaggcctaaaaataaagaataaatacactcagttgattctgaagctctaatttacagatgcaaaattgtaccagtacattaactcatatgtcaaaacaacatctagagaaacaaaaaatgaaagtaaaatggaaaaagataaaagaagtgaggcaaggagaagagaatgggcaaaaggagataggaaaaacaggaatttttttttaaagggctaaaattttagtgaatcagatgtggaaaacagttggattaacattgagatcaaatgagaaaggagcaaataaggaaagatgtattacaaaccaagagtaaaaaagggaaaacaaaataacaaaagcaaatttatttaaaaagaataaaggaagacgtgataatgaagtaaatttaaaaagtacggaataataaaaagaaattg

SEQ ID NO: 241015 - DNA, 593 bp, Homo sapiens
cttgtcacacttgacattttttacagagatttcttaaaacaggggcatatcttctttggctaacatatgcagactaaaatgaaagagtatagtatattataaaatcaataaaaggtaagataaattgaggcctaaaaataaagaataaatacactcagttgattctgaagctctaatttacagatgcaaaattgtaccagtacattaactcatatgtcaaaacaacatctagagaaacaaaaaatgaaagtaaaatggaaaaagataaaagaagtgaggcaaggagaagagaatgggcaaraggagataggaaaaacaggaatttttttttaaagggctaaaattttagtgaatcagatgtggaaaacagttggattaacattgagatcaaatgagaaaggagcaaataaggaaagatgtattacaaaccaagagtaaaaaagggaaaacaaaataacaaaagcaaatttatttaaaaagaataaaggaagacgtgataatgaagtaaatttaaaaagtacggaataataaaaagaaattgcaaaaaataccttttgaaaataaacatactaataacttgacaataaagtgaa

SEQ ID NO: 241016 - DNA, 617 bp, Homo sapiens
gttaccagtaatataggtaactgttgaagctctaaatatagaagacaaactagaggagcttgtttcttgaagaattcttgtcacacttgacattttttacagagatttcttaaaacaggggcatatcttctttggctaacatatgcagactaaaatgaaagagtatagtatattataaaatcaataaaaggtaagataaattgaggcctaaaaataaagaataaatacactcagttgattctgaagctctaatttacagatgcaaaattgtaccagtacattaactcatatgtcaaaacaacatctagagaaacaaaaaatgaaagtaaaatggaaaaagataaaagaagtgaggcaaggagaagagaatgggcaaaaggagataggaaaaacaggaatttttttttwaagggctaaaattttagtgaatcagatgtggaaaacagttggattaacattgagatcaaatgagaaaggagcaaataaggaaagatgtattacaaaccaagagtaaaaaagggaaaacaaaataacaaaagcaaatttatttaaaaagaataaaggaagacgtgataatgaagtaaatttaaaaagtacggaataataaaaagaaattg

SEQ ID NO: 241017 - DNA, 479 bp, Homo sapiens
ttttgtttgtttgaggaaggctgtgagataatttcataatagcttttctakgtttcctgcaaataattttttttcttctgcctcaattgaaaatttttaagaggaatatgtatccattctgtttatttcagggaagatgctggagaaataaaatttggtaatatgaaatttctcttcttttccttcatttttgtgaggagtagttcttctttgctttggtggaggtacttgcttagtaagcattttaagtgagtttatccaacacatttttatttcttaccaggaatgtaattacaacttttttccagtgagatctgttctgacaccaggatttagttttttaatgttataaacaagatttttttttcaagtcagaaataattttcttcactaaagtgaaaattaagctgtgatgacagtaaagcttaacaataggttgtttggattggaataaagataacattggaaataaaggtttt

SEQ ID NO: 241018 - DNA, 403 bp, Homo sapiens
agatctctctcatctgcagctcccagactatgctacaccacattgccacagccactgtgcacatcacagcttacagtaacrtactttccacttttcaaattatgacccaattttcataatcactccttttgtggatgtattcactcattcagtaaattatttattaagcagctactctgtgccaggaatagtcaagacactgaggatatagtagtgagcaaaatacataaatccttgctctcatagagcatgggttacagggggaggaatagacaacagcccagaaaaataagtcaggtaaaatgataagcgttggaagaataaagcaaggaagaacaggatatgctagaggctgagggatgggaggaagatagcaagtttaaatacgattgtcaggaaaaga

SEQ ID NO: 241019 - DNA, 403 bp, Homo sapiens
agatctctctcatctgcagctcccagactatgctacaccacattgccacagccactgtgcacatcacagcttacagtaacgtactttccacttttcaaattatgacccaattttcataatcactmcttttgtggatgtattcactcattcagtaaattatttattaagcagctactctgtgccaggaatagtcaagacactgaggatatagtagtgagcaaaatacataaatccttgctctcatagagcatgggttacagggggaggaatagacaacagcccagaaaaataagtcaggtaaaatgataagcgttggaagaataaagcaaggaagaacaggatatgctagaggctgagggatgggaggaagatagcaagtttaaatacgattgtcaggaaaaga

SEQ ID NO: 241020 - DNA, 514 bp, Homo sapiens
tttataagttgttttggccactactagaagcagcctttcagggaggtagcaaaggcatttttagggaacatttttaggagtcttcatctgggaatcaccccaagcagggagctcctcagaaacattctcatgccccggaccttcgtgctcaccacgcttgactgtgtagggagtttgagataaaatggtctacagtcattcatttygggtaccttcctctggactctacatttctggtcacttttctgtcatcacccagcttcttaggtcagtacccggtgatactcatggtgatccgggaaggctggaccagggaagtggaggacaggctgtgctgatggtttattaaagtctgtggcttcttactcctccacaagactcctcatcagagggtgcggcttgggtcatgctgggcactcagcagctttgtggtgggtatcggtttgtgcttcctcccctttgctttcgattcaatgctttcctgttgcagtctgagcagctctatttaaccgca

SEQ ID NO: 241021 - DNA, 514 bp, Homo sapiens
tttataagttgttttggccactactagaagcagcctttcagggaggtagcaaaggcatttttagggaacatttttaggagtcttcatctgggaatcaccccaagcagggagctcctcagaaacattctcatgccccggaccttcgtgctcaccacgcttgactgtgtagggagtttgagataaaatggtctacagtcattcatttcgggtaccttcctctggactctacatttctggtcacttttctgtcatcacccagcttcttaggtcagtacccggtgatactcatggtgatccgggaaggctggaccagggaagtggaggacaggctgtgctgatggtttattaaagtctgtggcttcttactcctccayaagactcctcatcagagggtgcggcttgggtcatgctgggcactcagcagctttgtggtgggtatcggtttgtgcttcctcccctttgctttcgattcaatgctttcctgttgcagtctgagcagctctatttaaccgca

SEQ ID NO: 241022 - DNA, 268 bp, Homo sapiens
gggagaaaggaacaagcttgrccaattcattcaactccttataaaaatgatgaggaggctgaaaaccaagaattttgattgggaacagaatacaagcagctgaatcagatgaattactaagcaacaaagatcctgtttttatacaaatatccttagtacaaaaacaaaagaaggaaaactgtaggggggagtaatgtgctaagtaagcagaattgcctcaaaaagaagttgttctagttactctttcagagtgggaatcttagattct

SEQ ID NO: 241023 - DNA, 268 bp, Homo sapiens
gggagaaaggaacaagcttgaccaattcattcaactccttataaaaatgatgaggaggctgaaaaccaagaattttgattgggaacagaatacaagcagctgaakcagatgaattactaagcaacaaagatcctgtttttatacaaatatccttagtacaaaaacaaaagaaggaaaactgtaggggggagtaatgtgctaagtaagcagaattgcctcaaaaagaagttgttctagttactctttcagagtgggaatcttagattct

SEQ ID NO: 241024 - DNA, 611 bp, Homo sapiens
cttatgaactattagaaataactccctcttgcattttcacacatggggaatgtgatgttctcttgggtattatgctaatcatattttggcaggtttctctgragcagatgcagaaatgatcataccactttccagggtgtattattttagctcctttgacttgggccctaagtctgttttacctgatgttcctgaaagatgttcctgatgtccttcactgttctttcatgctggatgttcttgcctatgctgcctcctcagctatcaccctctcttcccctttttaatgtagaactcattcttaatgatttgtcaaaggcaccgtatttcactgaaatgccttctatattccctaccctccaagtggattgtagaccttctaaggtcttttgacatctgcatatctctagcacagcacttatcacggtgattatttatctgttcatctttccaagtagacactctcattttaactccctaccctagtcgccagcatccccagcatagtgcctgtaataaaatggtgccacaatgaaaatttgaaaaatgaatgaacgtgataaacatagatgagaataatatattctacaattttttaaatgtactgaaat

SEQ ID NO: 241025 - DNA, 611 bp, Homo sapiens
cttatgaactattagaaataactccctcttgcattttcacacatggggaatgtgatgttctcttgggtattatgctaatcatattttggcaggtttctctggagcagatgcagaaatgatcataccactttccagggtgtattattttagctcctttgacttgggccctaagtctgttttacctgatgttcctgaaagatgttcctgatgtccytcactgttctttcatgctggatgttcttgcctatgctgcctcctcagctatcaccctctcttcccctttttaatgtagaactcattcttaatgatttgtcaaaggcaccgtatttcactgaaatgccttctatattccctaccctccaagtggattgtagaccttctaaggtcttttgacatctgcatatctctagcacagcacttatcacggtgattatttatctgttcatctttccaagtagacactctcattttaactccctaccctagtcgccagcatccccagcatagtgcctgtaataaaatggtgccacaatgaaaatttgaaaaatgaatgaacgtgataaacatagatgagaataatatattctacaattttttaaatgtactgaaat

SEQ ID NO: 241026 - DNA, 611 bp, Homo sapiens
cttatgaactattagaaataactccctcttgcattttcacacatggggaatgtgatgttctcttgggtattatgctaatcatattttggcaggtttctctggagcagatgcagaaatgatcataccactttccagggtgtattattttagctcctttgacttgggccctaagtctgttttacctgatgttcctgaaagatgttcctgatgtccttcactgttctttcatgctggatgttcttgcctatgctgcctcctcagctatcaccctctcttcccctttttaatgtagaactcattcttaatgatttgtcaaaggcaccstatttcactgaaatgccttctatattccctaccctccaagtggattgtagaccttctaaggtcttttgacatctgcatatctctagcacagcacttatcacggtgattatttatctgttcatctttccaagtagacactctcattttaactccctaccctagtcgccagcatccccagcatagtgcctgtaataaaatggtgccacaatgaaaatttgaaaaatgaatgaacgtgataaacatagatgagaataatatattctacaattttttaaatgtactgaaat

SEQ ID NO: 241027 - DNA, 611 bp, Homo sapiens
cttatgaactattagaaataactccctcttgcattttcacacatggggaatgtgatgttctcttgggtattatgctaatcatattttggcaggtttctctggagcagatgcagaaatgatcataccactttccagggtgtattattttagctcctttgacttgggccctaagtctgttttacctgatgttcctgaaagatgttcctgatgtccttcactgttctttcatgctggatgttcttgcctatgctgcctcctcagctatcaccctctcttcccctttttaatgtagaactcattcttaatgatttgtcaaaggcaccgtatttcactgaaatgccttctatattccctaccctccaagtggattgtagaccttctaaggtcttttgacatctgcatatctctagcacagcacttatcacggtgattatttatctgttcatctttccaagtagacactctcattttaactccctaccctagtcgccagcatccccagcatagtgcctgtmataaaatggtgccacaatgaaaatttgaaaaatgaatgaacgtgataaacatagatgagaataatatattctacaattttttaaatgtactgaaat

SEQ ID NO: 241028 - DNA, 548 bp, Homo sapiens
ttttggtcatattcccataactatttcaccaaattaaagtccatttctttcttcaaagggagttcagccctgtaaatcattctaaaaatgttttttrtaaatgtgaattttttatataatgatgcagtgccctaaaatatgaaaagagaaaacaagtcttgtaagccaattgacaaaaaaaattttttaaagttaaacagatgtgacaatcttagcagtagtccttatattaaaatgtatattaaaatcccacattatcgcaaatccggcccttgccaaacaattgttagcaaaggccatgtaatagcccacaggacaactctgtaccatggatctttgctaaagaagctcaggcagattccttcacaagcaaagcacaaatgttcgggggatcatctttttccctgcaactgatacgtcatttgtattccaggatattttatagagtgataggctatcttccctgtcctcatttctttccttctttatgtattgtagcaagtgctgctgagaaacgctaagctacagaaaagcacttcagcacttag

SEQ ID NO: 241029 - DNA, 595 bp, Homo sapiens
caggctttggcactttagtgccatttttactgcttaatggaattaatccaaatagatggtaaaatgttctctcctcaatctgatccaaccatcaatttctactgcctttgctaatyaaccacagctccaatagaaataaacacaaacatgtatttgaatgacttattcccttttgctaatctgtattcttgatcttctcctaagggcaatgggagaaatgtacaatgttccccaaacttcattctaattactggcctgaatctctcagacacaggacagataatccttttgctatccctcttcttcctgttttgaaccatggtagtacttggaagattcagactaagagaatatgcagttaaaaatgctacagaaagtataggtgaaacatgattggtcagagattgataacggttgaagctgagttattggggtttgttatatatgctgttctcaacatttgtaaaaacatgtttttcccatagtatgaaaattttaaaacaaaaccaattattctgaaaagcaataatctatggaatctgggctccaccagatgccttggattaaggtgaggaaataccagacaggataacgt

SEQ ID NO: 241030 - DNA, 531 bp, Homo sapiens
tctctgggactctgctccttctgttccctagggaggagggtggcctcagccacagcactggggatcctcaaagggctccagactgatgtctatgtagccatatagccccatcttttaaaaaaaatttcagttaacttttgtggatacatagtaggtatatatatttatggagtacatgtacatgagatattttgatacaggcatacaatgaatgcatgataatcacatcagggtaaatgagtatccatcacctcaagcattaatcctttgtgttacaaacagtctaattatactcttagttaccatgtacaatgaaattattattgacgatagtcaccctgttgtgctgttgaatactaggtcttcttcattctttctaactattttcacaccttctactttagcatcygcatcacctttcttaaggtctccctgagacaatggtctttgttcttttcttttaaccttgttcctcttgctccaaaaccctctctggctagactgaaccagaaaataaagaattaatacaca

SEQ ID NO: 241031 - DNA, 615 bp, Homo sapiens
atagcacctgtcatcattttaacttttcataatttataacaaacaaaatatgaaggaaccagtcatggaggtgtgcgcctataatcccagctacttgggaggctgaggcacaagatcgcttgaaccaaggaggcaaagtttatagtgaggtgatgccactgcactccagcctaggcaacagagcaagactctgtctcaaaaaaaaaaaaagattaattttcagatagtaaagcttgtttctttcaaattccatgtacaataaactcaagatctaaaattctattttgtatttggaaaatatccagtaaaatcaaaaactaatgtcaaagctataaaatattttacctattcaaatggtctcctgccatatataaatgctgaagaaattcaacatatttattttcatagcaagagaaatttattctctaacatagtctattataagaactgtacttctrttatttgcaacaattagccactggtcttattgacattaggaccattaaataagagctgtccctagaactagtatacttagaaggttctacagcctgattacaaccagacacatcaagggccatacatgtatttttaactggaattcactataaagat

SEQ ID NO: 241032 - DNA, 615 bp, Homo sapiens
atagcacctgtcatcattttaacttttcataatttataacaaacaaaatatgaaggaaccagtcatggaggtgtgcgcctataatcccagctacttgggaggctgaggcacaagatcgcttgaaccaaggaggcaaagtttatagtgaggtgatgccactgcactccagcctaggcaacagagcaagactctgtctcaaaaaaaaaaaaagattaattttcagatagtaaagcttgtttctttcaaattccatgtacaataaactcaagatctaaaattctattttgtatttggaaaatatccagtaaaatcaaaaactaatgtcaaagctataaaatattttacctattcaaatggtctcctgccatatataaatgctgaagaaattcaacatatttattttcatagcaagagaaatttattctctaacatagtctattataagaactgtacttctattatttgcaacaattagccactggtcttattgacattrggaccattaaataagagctgtccctagaactagtatacttagaaggttctacagcctgattacaaccagacacatcaagggccatacatgtatttttaactggaattcactataaagat

SEQ ID NO: 241033 - DNA, 581 bp, Homo sapiens
gtgatccaaccgcctcggcctcccaaagtgccgggataacaggcatgaaccactgcaaccagcccagctattagaaatgtaaatatttcctatttgacctatcaagtagactctatcaagcacaaagataagcattattattttttatgaaatcatttttcagcaagaacatcaatagacttccaaataatgtacaccaaatttattttcataaataaatttcagtggaagaaagttaccacatgtagacttgaaattctgtaaactagaagtgtctgtattaataaacttgatggttttatttttctagcttctcctgatattccattaaaaagttcttttcattatacagatagaagctattttagtagagttggatctcgccatgytggccaggctggtctcagactcctgatctcaggtgatccgcctgcctcagcctcccaaagtgctgcgactaaagctctaagccaccgcgctgggccaggagcaaattcttaaagtaactaaagcatgaaccaggttgacttctttctccacagatttaccatagtaggtggagtcttctgtctctagaattc

SEQ ID NO: 241034 - DNA, 509 bp, Homo sapiens
tgtctgggaaaaccaagcccagcatatgtgtggtgaactcttcactcgttacacagagttaattatttttatagaccctagttcagcaaatgcctacattccttacagcctcttctgtctcatcttgattgtctccttcttaaatcccayaaatggtagataacgacctccaaattgggatgcaagtaactcagtcagtattcaagaaaatacaagtcattgtgggaaaaccatttgaacatttatttactcttttaaaatttatattttggtatatcttttataatgtccaaatatatttagattgcataccaatgaatgtataatattaatagatgcatgcttatttatttgttttgtgtatttgtgtgatcatagttgagattaactgggatactcgaagttcaggtttttcaaaaaacaaaattagatttaaacatctgttgaaatgctaggtggagaaagagatacaaagggagtccataaatagaattttattgctacattgc

SEQ ID NO: 241035 - DNA, 642 bp, Homo sapiens
attattagatcaagtagatcaactattttagctgttatttttctaattttaaaataatcttttttgaggcatttatgttctttataatttttctctaaacagtaagttaattctcttgttgatggaaattttaatggtttctgatttttctctaaaactggttatgaatcacgtcatgtttcaaaacatttgacttgtcttcagcaaaatgatagccgtttatagcaaactggaagttgtacagcaaatgctttggtttctaaaaccaggctttttgagttstagattctcagaactcagttttacatttcaaaagctctgtctgatagtccagggttttcataaagtatcacagagtcattccagagcagtagtaaggcaagtacatgctgtattatgaaaaatgaaaattcctttctgtcactactgtcgagggatgagaggagagtgggaaaaaggtgggagagagaaagaaaacagtgagaaaatgaaagagagggaaagaaccagagtgtttgattttgcaaatgttaatctctcttaaccacaggcaatggaggctccaaattcccttactctgcaatccaaggcaatatgttaagcctcctggaaatgtagatcacatcctgggagaagggcaag

SEQ ID NO: 241036 - DNA, 642 bp, Homo sapiens
attattagatcaagtagatcaactattttagctgttatttttctaattttaaaataatcttttttgaggcatttatgttctttataatttttctctaaacagtaagttaattctcttgttgatggaaattttaatggtttctgatttttctctaaaactggttatgaatcacgtcatgtttcaaaacatttgacttgtcttcagcaaaatgatagccgtttatagcaaactggaagttgtacagcaaatgctttggtttctaaaaccaggctttttgagttctagattctcagaactcagttttacatttcaaaagctctgtctgatagtccagggttttcataaagtatcacagagtcattccagagcagtagtaaggcaagtacatgctgtattatgaaaaatgaaaattcctttctgtcactactgtcsagggatgagaggagagtgggaaaaaggtgggagagagaaagaaaacagtgagaaaatgaaagagagggaaagaaccagagtgtttgattttgcaaatgttaatctctcttaaccacaggcaatggaggctccaaattcccttactctgcaatccaaggcaatatgttaagcctcctggaaatgtagatcacatcctgggagaagggcaag

SEQ ID NO: 241037 - DNA, 642 bp, Homo sapiens
attattagatcaagtagatcaactattttagctgttatttttctaattttaaaataatcttttttgaggcatttatgttctttataatttttctctaaacagtaagttaattctcttgttgatggaaattttaatggtttctgatttttctctaaaactggttatgaatcacgtcatgtttcaaaacatttgacttgtcttcagcaaaatgatagccgtttatagcaaactggaagttgtacagcaaatgctttggtttctaaaaccaggctttttgagttctagattctcagaactcagttttacatttcaaaagctctgtctgatagtccagggttttcataaagtatcacagagtcattccagagcagtagtaaggcaagtacatgctgtattatgaaaaatgaaaattcctttctgtcactactgtcgagggatgagaggagagtgggaaaaaggtgggagagagaaagaaaayagtgagaaaatgaaagagagggaaagaaccagagtgtttgattttgcaaatgttaatctctcttaaccacaggcaatggaggctccaaattcccttactctgcaatccaaggcaatatgttaagcctcctggaaatgtagatcacatcctgggagaagggcaag

SEQ ID NO: 241038 - DNA, 564 bp, Homo sapiens
gtgcccctggcagccttgaaatgaggggtcatttggggatcctgaaagctgaggttctagcccaggaagtgccccagagcccggccatcctgacacactgactctccttccatgctgggagacagcagctctgccctgcccacctgcccagaagtggccagctggctttttgccaggttctgccctctgcagccccagagctacacctgtcctttcttagaagctgccaatggccatgagtgtccaggmcactctgggaaggactgtagtaaaatagtcaatgtgtttaatccatgtttcccactggcccacccatgcctttgacccacaggacagtggccacgcatgtgcttgggaaaaccaccataacaggtccagacaagagtgctggcctgagcatgggtcacgctaacgtgggtggctcaattaaggaacagggatggacttcctgtcctgtcgcccccacacactcctgcttcttctagtggccatttctgtgtgaggctggagcacagtggaaggtctgtgaacctgtattaagcaaaatagaaactaaatgtggac

SEQ ID NO: 241039 - DNA, 281 bp, Homo sapiens
cataaatatgaacaagtattatgtgtcagttaaaaatatttttaaagaatgaaggaaaccgattttttaaatgaaaggaaagaaaattacctgacttggctgaatggccccatgtggtctctcattctccagtaggctacttcaggcctgttcacrtgacggcagaggcaagagtcccaggagcggcaacaaaacaatgcaaatcctcttccggcccaggctcaaaattatatattacttctaccccattttattggacaatgcaaattacactaccagtc

SEQ ID NO: 241040 - DNA, 281 bp, Homo sapiens
cataaatatgaacaagtattatgtgtcagttaaaaatatttttaaagaatgaaggaaaccgattttttaaatgaaaggaaagaaaattacctgacttggctgaatggccccatgtggtctctcattctccagtaggctacttcaggcctgttcacgtgacggcagaggcaagagtcccaggagcggcaacaaaacaatgcaaatcctcttccggcccaggctcaaaattatatattamttctaccccattttattggacaatgcaaattacactaccagtc

SEQ ID NO: 241041 - DNA, 529 bp, Homo sapiens
gagaattcctccagaggtgggaacagagaaaacttcatgcttggtaaagcacctgaggcacccattacaatctgggacaagatgaggacatcaacactcatgctgtattccacatgggaggccaagtcaacgcaagatgatttttaagagatataagagccaggcgcggtagctgacacctgtaatcccagcactttgggaagctgaggtgggaggctcacttgaggccaggagatcaagaccagcctaaccaacaaagcaagaccaagaccccttctctacaaaaaaataagaaaattagcctggcgtggcggtgcacacctgtggttccagctacactagaagctgaagggggaggttcacttgagccccgagtttgaggctgcagtgagccacattagcgccaccgcactacagcctgggtgacagagcaaragcctgtctccaaaaaaataaaataaaagctataaatactgcaaagaggcaaaaactgctgtggtttactgacaatatgatcatatctagcaaa

SEQ ID NO: 241042 - DNA, 510 bp, Homo sapiens
agtaaagatttggggggctattggaatggaatgaatgtatttcacatgtgagaaggacacaaatttaggggagactggggcagaatgctatggtttgaatttgcctgtctttcaaaatttgtggtaaaatgtagtcctcgttgttgtagtattaaaagatggggcctatggggaagtgattgagtcatgaaggatctgctctcacggacggattagtgccttgtaaccgggatggaggaaactaacttaggtctcttttytccttctgccatacgcagcaacaaagcaccatcttggaagcagagagccaccctcaccagaactgaatgcaggcaccgtgaccttgaacttcccagcctccagaactgtgagaaatcaatttctgttctttataacttacccagtctcaggtattttgttacagcaacaccagtggactaagtcacagtctcaggaagaaagcatgcattcctcttttctccctcttagtgctgccaggacctgcagaac

SEQ ID NO: 241043 - DNA, 488 bp, Homo sapiens
cttggtggtctgaatcaatcacctcagtcaataccatacttccattctttacctgttgactcaaaaccagaaggagcccaaactgactgggcagcagtcttaactttcagttcaatggaatcatcataatgtctcctggtgaaagcatttctccctcacaactagagacctttaggccggcacagtataaagtcataggaatgggaagcaacaattttgctagctggtcactaagggtaatggtgggtggttttacttccatttccaccctttgattctttgacccatgaatccagtctatggaagagacaacaccaaatattggacactgacttagagcacagagaaccttgccccagcactcaaggtattgccacctaactggcactataactgactcttcacaaaggtattgcagcattttatcaagccatctgcttcagaatagtggagaacatggttaaacyagtgaattacatgagcgtgca

SEQ ID NO: 241044 - DNA, 608 bp, Homo sapiens
atctcatcgtggcatgtatcagtactttattcctttatgttactaatttttcattatatgaacatagagcattttatttcttcattcrtcaattggtggacacaggttgtttccactttttggctattatggataatgcttctctgaacatctgtaaacaagtttatgtggacatacactttcatttctcttggatagatacctagatgtggaattctgggtcatttgttaattccatgtccaacaatttgaagaaccaatgcaccgtattccagagtggaaacacaattttacaatcgctcagcaatatattaaggttccagttttttcacatcttcaccaatactttttaatttcagacatcctagatgatgcaaagttatctcacagtggctttgatttgcatttctctagacctaaccattttcatatctttccacgtgcttattggccattgacatagcttctttggcaaatacctactcctcactttttagttgaattatttgtcttttcattgtttaattgtaaaagttgtcttatattcttttttgtttgtttgtttgagatggagtctcgctctgttgcccaggctggagtgtagtggc

SEQ ID NO: 241045 - DNA, 608 bp, Homo sapiens
atctcatcgtggcatgtatcagtactttattcctttatgttactaatttttcattatatgaacatagagcattttatttcttcattcatcaattggtggacacaggttgtttccactttttggctattatggataatgcttctctgaacatctgtaaacaagtttatgtggacatacactttcatttctcttggatagatacctagatgtggaattctgggtcatttgttaattccatgtccaacaatttgaagaaccaatgcaccgtattccagagtggaarcacaattttacaatcgctcagcaatatattaaggttccagttttttcacatcttcaccaatactttttaatttcagacatcctagatgatgcaaagttatctcacagtggctttgatttgcatttctctagacctaaccattttcatatctttccacgtgcttattggccattgacatagcttctttggcaaatacctactcctcactttttagttgaattatttgtcttttcattgtttaattgtaaaagttgtcttatattcttttttgtttgtttgtttgagatggagtctcgctctgttgcccaggctggagtgtagtggc

SEQ ID NO: 241046 - DNA, 546 bp, Homo sapiens
tatgattttgtgagtcaataattctggaagagtgaggtgaggctgttcttgcttgaagtctcttttttttttttttttttgagacggagtctcgatctgttacccagcctggagtgcagtggtgagatctcggctcactgcaagctctgcctcccggattcatgcttttctcctgcctcagcctcccgagtagctgggactacaggcacccgctgccacgcccggctaattttttgtatttttagtacagacagggtttcgccgtgttagtcaggatggtctcgatctcctgaccttgggatccacccacctcgscctcccaaagtgctgggattacaggtgtgagccaccgcacctggcctgaagtctcttgggtaattgtagtccgatgttgactacggtcatctgagggcttgactgggatggccatccaagatggtgctctcacgtggctggcagttgatactctgtaggatggatggaatcagctggaactgtcaacagattgctgcctcttcagcctggtgttctccacgtagccagaca

SEQ ID NO: 241047 - DNA, 425 bp, Homo sapiens
ggttaagattgctccattctattttttttttttttaaataaagtcagggtattgctctgttgaccaggctggagtgcagtggtgcaatcatagctcactttaaccttgaactcctaggctcaagctatcctcccacctcagcctcccaagtagctgggactacaggtgggtgccatgatgcctgtataatttttttgttttttctagagatggggtctcactatgttgcccagggtggtcttgaaytcctaggctcaagccatccttccgcctcagcctcccatactgctgagattacaggggtgagccacagtgcccagccgtgactgctccattcttgaagagcaagacaagaccactggcttttcttatatgaagtcacagtgagagctatcacccaaccaggaagagtacttacgctgatt

SEQ ID NO: 241048 - DNA, 615 bp, Homo sapiens
tgcttataaaacaatagctctacattgaaaattctcaggatagtctgggcatggtggattatgcctgtaatcccagtactttgggaagccgaggcaggtggatcacctgaggtcgggagttcgagaccagcctgaccaacatggagaagccctgtctctactaaaaatacaacaacaacaacaaaaataagaaattagccaggtatggtggcacatgcctgtaatcccagctactcgggaggctgaggcrggagaatcgcttgaacccaggaggcagaggttgtggtgagccaagattgcaccattgcactccagcctgggcaacaagagtgaaactctgtctgggaaaaaaaaaaagaaaaaagaaagaaatttctcaggatagaagccttttagatgctggcaagggcatatatgcacatagaatactttaaaatgatgtcaaatataagaaatgactttttacagtggagagctctttgatgtcatctacgtgatagattccaaccaagtctcattttatatttaatgtgaaatattatagatgtctataattttaccattatcttaaaaactgagatacttccattagtgtgtgattgctggattccagta

SEQ ID NO: 241049 - DNA, 635 bp, Homo sapiens
tcctggtgctatccccaaaccaccactcttaactcttaaagtaaataaataatctttgctggcaaggctatgctgaacctccttaggcactctctaattagatgtcctggttcctcccaattcttagtcctttaatacctgtttttctccttctcttattctgtttagtttttcatttcatacaaaactgtatccaggccatcaccaataattctaaatgacaaatgtttcttctaacagtcccacaatatcacccctttccacaaaatcttccttcagcttaatctctcccactctaggttcccatgctgcccctaatcctgctcgaagcagtcctgagaaacatcgcccattatctctccataccatccccccaaatttttgccgtcccaacactttaccactatctcattttatttttcttattaatataagaagacaggaatgtcaggcctctgagtccaagttaagccatcatatcccctatgacctgcacgtacacatccagatggccggttcctgccttaactgatgacattccaccacaaaagaagtgaaaatggcctgttcctgccttaactgatgrcattgtcttgtgaaattccttctcctggctcatcctggctcaaaacctc

SEQ ID NO: 241050 - DNA, 430 bp, Homo sapiens
ctagaacctgcgaggtggaggttgcagtgagccaggattgcgccactgcactccagcttgggtgacagaatragagtcagcctcaaaaaaaaaaaaaaaaaaagaggctcaaacttcccagcataggctgtaggttctgcataatctgtccacaagctatagaccaccttcatttccatcctccaatccccatatgtcacttcttctctttgaaatcagccatgccaaaattttgcagtccatcaagcctttgcctttattcatgcttctgtgatttggcacatgttattccacctacctgaaatgctgctgtgctcttcctccttgtagtccatctggaagatccctgatcaatttttaaagaccctgccaaaatgtccccttttcatggaaaatgtgctttcctaacactttgtatgcacctgaactt

SEQ ID NO: 241051 - DNA, 430 bp, Homo sapiens
ctagaacctgcgaggtggaggttgcagtgagccaggattgcgccactgcactccagcttgggtgacagaatgagagtcagyctcaaaaaaaaaaaaaaaaaaagaggctcaaacttcccagcataggctgtaggttctgcataatctgtccacaagctatagaccaccttcatttccatcctccaatccccatatgtcacttcttctctttgaaatcagccatgccaaaattttgcagtccatcaagcctttgcctttattcatgcttctgtgatttggcacatgttattccacctacctgaaatgctgctgtgctcttcctccttgtagtccatctggaagatccctgatcaatttttaaagaccctgccaaaatgtccccttttcatggaaaatgtgctttcctaacactttgtatgcacctgaactt

SEQ ID NO: 241052 - DNA, 494 bp, Homo sapiens
tgacatgagatttggacggggactcagatccaaatcatatcatggcagaaggataagggggagcaggcatgccacatggcaaaagcaggagcaagagagagcaaggtgcttcacacttttaaacatccagatctygcaagaagtcattcaccatcacaagtgatggtgtctcgaaaagtggtggtcatttttgcaatacaccatatgtaaccatcaatctagtagtaaaaaccacaaccacaaaggaaggattacatgaatgtgaccactgacccgtaagtcacagcccagctgaccactcaatcactatgcatatgccacagcaagtgtcttagactgtgtttcccagaagtctaagatggggactcctaacactcagaaagcactcaataaatgtaagatttttttccttcattctgccgtataagttgtttacctaagtaggtaagttagtggtaattccaacatttatctgtctaaatatcaagaaaaca

SEQ ID NO: 241053 - DNA, 544 bp, Homo sapiens
tttttggtggagcctttaggtttttcttggtttaagattatattatcagcaaagaggaacaatttgactacccttttcctgtttttattccttttagttgtttatcttgcctaattgctctggttagaacttccagttctatgttaaataggactggtgaaagtgtacatctttgtgaaggaacttagggaactgattttactgtttttattggttttcttgttaaggatgggtccttaagattggattaataattgggtaaaaaatttacagtcaaatgtaacacaaattgtctacagaattcaaagaggtctaccaaagayccctaaaaattgagtgcaatatgtaacaacttctcttgaattaaagtacatgacttgtaattcaccattttaaccatattaaaggatacagtttagtgacacttagtacattcacatgttatgcaaccatcaccgctatctagttctgtaagattttatatatctcaaagtattttccaattttcttcatgattttcaaaatttgacacatatgctgctta

SEQ ID NO: 241054 - DNA, 536 bp, Homo sapiens
ttgggcatatattcctgattagaaggtcatttgaatttgttaactgaaataatgttctgaaagtgatgaagtgattcttgctttgtacaataggtagataagatgtaggtaactaagtaggtagataagaagacaataatttaacagtcattagatgaataagtaaaaattaatatatacacatgaacaaaaaacacaaatgcacacacttaaccacacacatatagacatgcatacacacagacatacccacagaagtacacatttgcacgtacaagtacatgccacatacacaaacacacagacatccacacacatatgtgagaaagacaaataytaggatcattctatagaaaacacagacaaaactcacagaatatcaaggaagataatatcagaagggcagaaaaagaacagaaggaagataatttgaaacatgttaaaaaataaagagttcagtctgcatgattaagggttcattctaagcagattatcacgttgtaggcagatttcccgaactcatattgtgcattgcc

SEQ ID NO: 241055 - DNA, 536 bp, Homo sapiens
ttgggcatatattcctgattagaaggtcatttgaatttgttaactgaaataatgttctgaaagtgatgaagtgattcttgctttgtacaataggtagataagatgtaggtaactaagtaggtagataagaagacaataatttaacagtcattagatgaataagtaaaaattaatatatacacatgaacaaaaaacacaaatgcacacacttaaccacacacatatagacatgcatacacacagacatacccacagaagtacacatttgcacgtacaagtacatgccacatacacaaacacacagacatccacacacatatgtgagaaagacaaatattaggatcattctatagaaaacacagacaaaactcacagaatatcaaggaagataatatcagaagggcagaaaaagaacagaaggaagataatttgaaacaygttaaaaaataaagagttcagtctgcatgattaagggttcattctaagcagattatcacgttgtaggcagatttcccgaactcatattgtgcattgcc

SEQ ID NO: 241056 - DNA, 588 bp, Homo sapiens
aagctttcatttgcctccaggcagtatgcatgcaccttccaaatccttcacttctttctcgtcaaaggaagagaaaaagttcagtaattccttgaaaatgaatcttccaaaattgtctctaaatgcatcacaccacatggcaggaccatatgtgttggggagattgtttcggccaagatacatgacttcccttggtgccaacccctgttcttactraagataatggccttttattcatataggaggactgtaatttatggttcaattctccagcatatttttttctcttttgtacctttctcactttttagaaaacttccagacacacttgaataagaagagaaggggcctgtattgcaaggctattacagaggcggctaagactgccaagcagctgacctccgaagtacaggctctgaagtaaaggctccattgacagtttgaaacataaacacagtaaggtaggcaagaccattggaagtcatcatagattttcagtctatttaggaataatttctactacaaacttggccaaattggagagagattgcacttagttggctattttaagaaatacttaccttatag

SEQ ID NO: 241057 - DNA, 671 bp, Homo sapiens
aagtccccacccgattagctagacacagaacactgattggtgcgtttacaaacctttagctagacacagagtgctggttggtgcatttacaatcctttagctagacagaaaagctctccaagtccccactcatcccagaagcccagctggcttcacatcttactggcacttgcggcgggactttgcagcacctagcccaggcactctggcgctcagagggagctcctcccagacaatcaataggaaaagagggcaaatgagaaagagatggagacccgccatcttggccaacgaccctgcgaagagggaacggcsgttcactcatgggacccagcctcccatcaagcccagcaggcgccagctggctgtgcctagtgtggggcctgccaagcctgcgcccacccagaaccctcacaggcccaccctgtgagcgctgtgtgcagccctggctcccacccacacctctcttttcacacttccccgcgagcagagggagcgagctccagcctcagccagccccatagaggggccctcatagcgcagtggctggctgaagggctcctcgagtgtggctagagcagacactgaggccgaggaggcactgagagtgagcgagggctgctagcacattgtcacctctcattaggagggccagaagcaaggagccagca

SEQ ID NO: 241058 - DNA, 671 bp, Homo sapiens
aagtccccacccgattagctagacacagaacactgattggtgcgtttacaaacctttagctagacacagagtgctggttggtgcatttacaatcctttagctagacagaaaagctctccaagtccccactcatcccagaagcccagctggcttcacatcttactggcacttgcggcgggactttgcagcacctagcccaggcactctggcgctcagagggagctcctcccagacaatcaataggaaaagagggcaaatgagaaagagatggagacccgccatcttggccaacgaccctgcgaagagggaacggccgttcackcatgggacccagcctcccatcaagcccagcaggcgccagctggctgtgcctagtgtggggcctgccaagcctgcgcccacccagaaccctcacaggcccaccctgtgagcgctgtgtgcagccctggctcccacccacacctctcttttcacacttccccgcgagcagagggagcgagctccagcctcagccagccccatagaggggccctcatagcgcagtggctggctgaagggctcctcgagtgtggctagagcagacactgaggccgaggaggcactgagagtgagcgagggctgctagcacattgtcacctctcattaggagggccagaagcaaggagccagca

SEQ ID NO: 241059 - DNA, 671 bp, Homo sapiens
aagtccccacccgattagctagacacagaacactgattggtgcgtttacaaacctttagctagacacagagtgctggttggtgcatttacaatcctttagctagacagaaaagctctccaagtccccactcatcccagaagcccagctggcttcacatcttactggcacttgcggcgggactttgcagcacctagcccaggcactctggcgctcagagggagctcctcccagacaatcaataggaaaagagggcaaatgagaaagagatggagacccgccatcttggccaacgaccctgcgaagagggaacggccgttcactcatgggacccagcctcccatcaagcccagcaggcgccagctggctgtgcctagtgtggggcctgccaagcctgcgcccacccagaaccctcacaggcccaccctgtgagcgctgtgtgcagccctggctcccacccrcacctctcttttcacacttccccgcgagcagagggagcgagctccagcctcagccagccccatagaggggccctcatagcgcagtggctggctgaagggctcctcgagtgtggctagagcagacactgaggccgaggaggcactgagagtgagcgagggctgctagcacattgtcacctctcattaggagggccagaagcaaggagccagca

SEQ ID NO: 241060 - DNA, 671 bp, Homo sapiens
aagtccccacccgattagctagacacagaacactgattggtgcgtttacaaacctttagctagacacagagtgctggttggtgcatttacaatcctttagctagacagaaaagctctccaagtccccactcatcccagaagcccagctggcttcacatcttactggcacttgcggcgggactttgcagcacctagcccaggcactctggcgctcagagggagctcctcccagacaatcaataggaaaagagggcaaatgagaaagagatggagacccgccatcttggccaacgaccctgcgaagagggaacggccgttcactcatgggacccagcctcccatcaagcccagcaggcgccagctggctgtgcctagtgtggggcctgccaagcctgcgcccacccagaaccctcacaggcccaccctgtgagcgctgtgtgcagccctggctcccacccacacctctcttttcacacttccccgcgagcagagggagcgagctccagcctcagccagccccatagaggggccctcatagygcagtggctggctgaagggctcctcgagtgtggctagagcagacactgaggccgaggaggcactgagagtgagcgagggctgctagcacattgtcacctctcattaggagggccagaagcaaggagccagca

SEQ ID NO: 241061 - DNA, 532 bp, Homo sapiens
atgctaactaaaataagccaggcacagaagaacaaataccacataattccacttacatgaagggtctaatatagacaaactcatagaaacagagagtagaatgctggttgtcaggggctggggtagagaggaagagacagttgctgttcaatgggtgtaatgtttcagttatgcaaggtgartaagttctagagatcccctgtacaacactgtacctacagttaacaatactgtgttgtgcaaataaaaatttgttaagagggtctagatctcaagttaagtgtcttcaacaaaataaagaaaataaaagtattgttaacatgattaaaaagttaaagaaggcctaataaaataaaatagactttaaagtacaatataaagatcatctagacaaatgctgaaaacacattatatacatatttaacaccaattccttatcttataaaatgcatcaaccagaaaattatagcacttatcacacatcacactacataaacatatatttgctgcaatccctttattgtttatttat

SEQ ID NO: 241062 - DNA, 532 bp, Homo sapiens
atgctaactaaaataagccaggcacagaagaacaaataccacataattccacttacatgaagggtctaatatagacaaactcatagaaacagagagtagaatgctggttgtcaggggctggggtagagaggaagagacagttgctgttcaatgggtgtaatgtttcagttatgcaaggtgagtaagttctagagatcccctgtacaacactgtacctacagttaacaatactgtgttgtgcaaataaaaatttgttaagagggtctagatctcaagttaagtgtcttcaacaaaataaagaaaataaaagtattgttaacatgattaaaaagttaaagaaggcctaataaaataaaatagactttaaagtacaatataaagatcatctagacaaatgctgaaaacacattatatacatatttaacaccaattccttaycttataaaatgcatcaaccagaaaattatagcacttatcacacatcacactacataaacatatatttgctgcaatccctttattgtttatttat

SEQ ID NO: 241063 - DNA, 563 bp, Homo sapiens
aaatatctaaatgcattggcaacaacaaattagaaaacatagtagaaaaatatctaaatgcagcaaaacctcacgttcctggatgagaagacacacaccaagacgttcattctttttaaataaatcttgcaaagaatacacctaaactsttagtattttttgcctttggccaagaaaactgaagagaaaaggaaagaaaaatgagaagcaagatttttcatcctttaaccagtatgttttatattattttgaattaatataatcatgtgtacatgcataacttttgtagtttaagaaaacaatggtataaaaatatttttaactctaatattgcaaataatgtaatttttacaatattaagggtaaaaggtgtatggatgatctgccataagttcttaaagaatattaatctatttaaataatataatttgccaatgtgcttctctgcttccaaacactagaagccaaccaaatgttaagttcctcgaaagcaagaatgtttttcatctttgtaaacccagtgtttaccacaatgctgatatttggtggtgcttaataagtac

SEQ ID NO: 241064 - DNA, 563 bp, Homo sapiens
aaatatctaaatgcattggcaacaacaaattagaaaacatagtagaaaaatatctaaatgcagcaaaacctcacgttcctggatgagaagacacacaccaagacgttcattctttttaaataaatcttgcaaagaatacacctaaactcttagtattttttgcctttggccaagaaaactgaagagaaaaggaaagaaaaatgagaagcaagatttttcatcctttaaccagtatgttttatattattttgaattaatataatyatgtgtacatgcataacttttgtagtttaagaaaacaatggtataaaaatatttttaactctaatattgcaaataatgtaatttttacaatattaagggtaaaaggtgtatggatgatctgccataagttcttaaagaatattaatctatttaaataatataatttgccaatgtgcttctctgcttccaaacactagaagccaaccaaatgttaagttcctcgaaagcaagaatgtttttcatctttgtaaacccagtgtttaccacaatgctgatatttggtggtgcttaataagtac

SEQ ID NO: 241065 - DNA, 553 bp, Homo sapiens
tgattcctattctcaaagtgctttataattggatagttgcagtacttgaggatttccccaattacctcgctgtctattatgagaatatcatgtatttctgctacaaaatgaagatttactaacttataaaacatatacatatatatatttatgwatatgtatgtatatatatgctttgcatagatagatattgcatagataggtaaatattgcacatatgggtaatgtgtatatctgccaataatgtcctcgataaatagcaataagggtaaaatattttaaaaatcaaagaattactaacagtgagtggtgtgagtcctgttttctagatttaaaaggtctgtaaagatacagaagaattgatccaatactcttctaataagccacaaatatcagctttgagtagtccactaactattttgtttctattgttttgtaaaattgttagaagatgagataatttacaaaagtgttgaaggtgtggggaaagtcacccctagaggggcagtggtcccctctttttacccttgccctcacattttaaagcttcagt

SEQ ID NO: 241066 - DNA, 553 bp, Homo sapiens
tgattcctattctcaaagtgctttataattggatagttgcagtacttgaggatttccccaattacctcgctgtctattatgagaatatcatgtatttctgctacaaaatgaagatttactaacttataaaacatatacatatatatatttatgaatatgtatgtatatatatgctttgcatagatagatattgcatagataggtaaatattgcacatatgggtaatgtgtatatctgccaataatgtcctcgataaatagcaataagggtaaaatattttaaaaatcaaagaattactaacagtgagtggtgtgagtcctgttttctagatttaaaaggtctgtaaagatacagaagaattgatccaatactcttctaataagccacaaatatcagctttgagtagtccacyaactattttgtttctattgttttgtaaaattgttagaagatgagataatttacaaaagtgttgaaggtgtggggaaagtcacccctagaggggcagtggtcccctctttttacccttgccctcacattttaaagcttcagt

SEQ ID NO: 241067 - DNA, 576 bp, Homo sapiens
ctgaatctctaattagtatagatatagttcctcttaaacatttcagtgrgtgagttttcctgacatatctccctggtatcttttactttagcagcttagtccctgatctaataacataaagaatcaagaaaaacaaaatcattaaggggaaattcatatagcgaggagaatatgaaagaaataaagctagatcctctgaatgtcattgacctctagaaaggaactgaaacagtgggcctgtggggtagaacataagaaggaggaagggccctgagaggtaattagagacaggaaagcaaaaccagaaataactggtcaattctttttctaccttctgaaaatcattataaatggtctctgtaccttcaataaccagaggtccctgctcctaaagaatttgtacttaattccttcatagaaggaacattggtaggaattagtgttttatgcaagcatcttcttgttatatccattaagctttgcctggagaaaacttttgttatgatttggactcattaggggtgtcttgggaaaaaaaattatataaagttttgagattgggtttgtgagtttagt

SEQ ID NO: 241068 - DNA, 576 bp, Homo sapiens
ctgaatctctaattagtatagatatagttcctcttaaacatttcagtgagtgagttttcctgacatatctccctggtatcttttactttagcagcttagtccctgatctaataacataaagaatcaagaaaaacaaaatcattaaggggaaattcatatagcgaggagaatatgaaagaaataaagctagatcctctgaatgtcattgacctctagaaaggaactgaaacagtgggcctgtggggtagaacataagaaggaggaagggccctgagaggtaattagagacaggaaagcaaaaccagaaataactggtcaattcttttyctaccttctgaaaatcattataaatggtctctgtaccttcaataaccagaggtccctgctcctaaagaatttgtacttaattccttcatagaaggaacattggtaggaattagtgttttatgcaagcatcttcttgttatatccattaagctttgcctggagaaaacttttgttatgatttggactcattaggggtgtcttgggaaaaaaaattatataaagttttgagattgggtttgtgagtttagt

SEQ ID NO: 241069 - DNA, 651 bp, Homo sapiens
caaccaaagttcttgctatctgggaaaagacagatgtctttgcttcaatcaagatgcaaagctagagaaaaaaaaaaagaaaaaaaagcaatgaaaatacttcatttcattatttgaaaatgtgaattgccctgagctggctttgagccatagttcttatccacagtatccatcaacatgtattcaagtccctcaatattgaatacttcattttcattaatgaaataattacatcaaatgctgtctcataacattcagttgaattcattcattgtcaaaaatgtcattcgatttaaaatagttcacagtattatgcagtttattgacaaatatgatgtttaaatctatttaataagagtggttgtgtccagaggaaaggaaagatgrgaaccacaaaaggtctgccaagaaaaagaaccagagagcctcctttattttaacattgttgttgacctatatgtgcttatcccttaacccttgaatcttaactaaaatgaaagtaaagtaatttttgaatgcttaaactaacaagaacaaaaagggtacaagaagagacaacagtagacaaaagattacaacaaatttttgaatatgggaaacaagtaacaagtgaattaacaaaatcgagatctttggaaaaaatactgaaca

SEQ ID NO: 241070 - DNA, 601 bp, Homo sapiens
cttctgaacaagcaaaacacaacccatttaacaaatgggcaaaagacatgaccagacacttctgaaaagaagacatacaagttgtcaacaaacagatgaaaaactgttccacatcactactcaccagagagatgaaagtcaaaaccacaatgagatcccatctcacacyagtcagaatgactgttattaaaattcaaaaaacaacagatgttagactatggagaaagaggaatgcttacacactgttaatgggaatgcaaattagttcaagcactgtggaaagaagtttgaatatttctcaaaaaactcaaaatagaactaccattcaacccagcaattccattactggttatatacccaaaagaaaataaatcagtctacaaaaaagacacatgcactgatatgttcatcgcagtactattcacaatagcaaagatgtggagtcaacctaggtgcccatcaacagtggtttggataaagaaattgtggtacatatacaccatggaatactatgcagccataaaaaagaacaaaatcatgtcctttgcaacaacatgaatgcagttgagggccattatcctaagtgaattaatgcaggaac

SEQ ID NO: 241071 - DNA, 601 bp, Homo sapiens
cttctgaacaagcaaaacacaacccatttaacaaatgggcaaaagacatgaccagacacttctgaaaagaagacatacaagttgtcaacaaacagatgaaaaactgttccacatcactactcaccagagagatgaaagtcaaaaccacaatgagatcccatctcacaccagtcagaatgactgttattaaaattcaaaaaacaacagatgttagactatggagaaagaggaatgcttacacactgttaatgggaatgcaaattagttcaascactgtggaaagaagtttgaatatttctcaaaaaactcaaaatagaactaccattcaacccagcaattccattactggttatatacccaaaagaaaataaatcagtctacaaaaaagacacatgcactgatatgttcatcgcagtactattcacaatagcaaagatgtggagtcaacctaggtgcccatcaacagtggtttggataaagaaattgtggtacatatacaccatggaatactatgcagccataaaaaagaacaaaatcatgtcctttgcaacaacatgaatgcagttgagggccattatcctaagtgaattaatgcaggaac

SEQ ID NO: 241072 - DNA, 598 bp, Homo sapiens
cattcctctgttcaaaagtgccacagcaaactccttattctagcattcaaaaataaaaaaggacattatcccaatgttcctgattgtaaagtgtatcctttactataatctcaggtgttataggacatcagcataatccaaaacatgttttataatcatcttctcagagtctttacttatgcagaactcttttcctaaaataggttccccaaaccctgcagatcaaaaccagatccagatttcaaggctaaacacaaaatcaccattttcaagaaacctttcctcatttctgtaattaactgaaaacatatgtggcttttaaccagaactttctctggacttcttagaaaatttttacttcactctaattaccttgtgttgtgtatttgactaaataagactaaagtctcctaaaagactaaactttgcataagactctttgttactcatttatgcaacttctgtgtctrttattggaataaatgaaaatgtgttgtgcttttcatatacacagagaacactgtacttcaggtggactttttttcactgttgatcaggcaacgtgttcagtaatggaaactgatggatgaaaaaagat

SEQ ID NO: 241073 - DNA, 342 bp, Homo sapiens
attgaaaagcattttctatagttagtataaagttgttctatgttaacaagaactgtctacccaaatatcacgaaataaatctgtttacagaatcctttcttctacaatctcatgcttacatcctgcttaagggaaagatggaaacttggtacaactatttatactgcatctctattggcattagctaaatgcactgcaaaggctccaccttgttaccctgacttgagtggcctttcattgtgtgtgtgtgtgtgtgtgtgtktgtgtgtgtgtgtgtgtgtgtgtgtgtgtgtgtatgtgtgtgtgttctgggcatgcaggatttctggcaaagagttttga

SEQ ID NO: 241074 - DNA, 628 bp, Homo sapiens
aattttaattttttcataattaagctcttaatatataacagaacataattttattttgctgagacatgaacttgactcatgtgctctttgaggctggtgtagtgcttggggaaagtcagctgttagcccgtgactgggcaagctggctacttagaactctcctcttacttagatatactatgcagacttgtgcttctctataatgatattttgaagtgtaaggatagtgaaaattccaggaactaatctaaatgtcaagagcctagtgtgtttcattttaattagtaaagagaatgtggtttcctcacttaagttttaaaatcttaccacagcttttgcagacaaacagttggaatattgggtagcaaaaacatcttgaagaaatgagcctgtaaactgaaaattgtgtgagaaactctatcctaatcagctttggaagccaaccacattagaccatttgtaaacacrtgcatctttatgaagaaacatcttggcattctgtctttaatatatgaaagtaagaaggaagtgacttcctatcattcaaaatatgcatattgagatttagaaggcaaaataaattctgatcttgggcactaatagttaaattcttaaaatagattttgat

SEQ ID NO: 241075 - DNA, 447 bp, Homo sapiens
gaattcaccactactgcatagacagctcctaccatcactacaacatgcaaattattctctttgccaccctccactctccactgacccagatccattctctctgtgttctgtgtatgcctgaaaggctgaaccctasagagtgcatggcatgggctaatgaaaagcctaacaaggaatcagaaggaaggaagagagaggtcaggccagttattggcttgctcatgcctgctttaatgctaggattcttacattggatgtgactctctctgatttcagctcctgccaggcagcgcctcctccaaggctttggctcacagggctttggtgaactgttccccaccccttcaggtttaggaatggtaacaccttgatgttgccagtcagggggtccctctgcttctcttgtttgttttctaatccaaatgccacatatctctagctagtaca

SEQ ID NO: 241076 - DNA, 617 bp, Homo sapiens
acacctgtcaacagaagatggattaacattaactaaaaacttgagcacttagttaaaatatcaattaaatcttttagaattttgaagtcacatttcttctaaaatggaacccaattgtttctaagatggttttttataacaccctaaagcaaaaaaaaaacttacttagctgtgctaaaatgatttggatattttaaattctcaatcacaatcaatctgatattaactcttagaaattcagaaataccactaatgatcacagcaaggacctcaccatttcatgctgcctaaacctgctaaaacacagactctccactgcctgttcgaaaaggaaggtcttatttaaaaagaaggatcacattgtcttttttcaatcccagatctacaratattttgcttgaaaagctgattgtggaaacctggattatttccataactaaagcaatgtgattaagttcctacaggctttagataatcatccaaactttttgattgttataatcaggtcagagtttcaatcaatgaggctatcctaacgctattgactaaataaagaatctggacaagatggcacctaaaaacaagaactccgttattctgagcaaaagccttaagac

SEQ ID NO: 241077 - DNA, 605 bp, Homo sapiens
caaggacctcaccatttcatgctgcctaaacctgctaaaacacagactctccactgcctgttcgaaaaggaaggtcttatttaaaaagaaggatcacattgtcttttttcaatcccagatctacaaatattttgcttgaaaagctgattgtggaaacctggattatttccataactaaagcaatgtgattaagttcctacaggctttagataatcatccaaactttttgattgttataatcaggtcagagtttcaatcaatgaggctatcctaacgctattgactaaataaagaatctggacaagatggcacctaaaaacaagaactccrttattctgagcaaaagccttaagacagttcttttgctatggttcaaacaatgtgacaacaagggactagcatgatgtagatatttacatactaatgcataatgggcaggggcattttgggggggcaaatcagggtgattctgtacattatttcattttctaatacatgcaatggtctttcactgagacagatgcacccttattatagttaggctatttgggcttcaatagcatttctgaaccagttaaaatttgctaggtaagttattttgccaa

SEQ ID NO: 241078 - DNA, 587 bp, Homo sapiens
ggaatctatctcgtccaatatcattagatgctttcattaaaaaaaaaacttggctaatttgacaggaaaaaacgactgtatattattgctcttttaagtaacaatcctttcattaatggtaagtctgaatattttcctgtatcttatttagatattttcattttcactttttaatttgtttacattctttgtactgcaattttaatctttttcttgtcagtttgtttgactttattatacatttaagatatcaacccggccgggtgcggtggctcaagcctgtaatcccagcactttgggaggccgaggcgggcggatcacgaggtcaggagatggagaccacggtgaaaccccatctctactaaaaataaaaaaattagccgggcgtggtggcgggcacctgtagtcccagctactcaggaggctgaggcaggagaatggcgtgaacccggaaggtggagcttgcagtgagccgagattgygccactgcactccagcctgggcgacagagcgagactccgtctcaaaaaaaaaaaaaaaaaaagatatcaacccttcgtaatattgttgcacatacacacacaatt

SEQ ID NO: 241079 - DNA, 586 bp, Homo sapiens
ccagtgggagcatagagaaaaatctgtggaattttgtgatgtcctgcttagaagtattgtctgtgttcataatactgggtaggtaaaaggctgttctgttcagcttttgcctctgagactagtgcaaaacagacaaagggagacccttgacttgctcccgtccttagtgactggtggtaagaagacacttgccttcatttctctaacacagtcattgttaacttttttcaggggaagaaatatgattccccaggggacrtttttattagtgctcacaggagagtctaggcaaccctaggaaagcataatgccaagaaccagtaataagggattatgcttcagattaactttgggtgttcaaggtttgttttgcttgagtgactgactcatgtggtactctaatgggagcattctgtaatcattactgttgtgctttctgtaggaaatgccataatcttaacagatgcaattcatatttatggaaatgtctaatgctttctttgagtttcactaagccccacactctgtaacagtgaagtcagcaggtgagcacagggcatagctggcttctcatgctgcaattctt

SEQ ID NO: 241080 - DNA, 491 bp, Homo sapiens
tcttttgtgggtctttatccccaaataatctgtttgtggaccaacttctgcaagctcaggagggctaaagtggagctgtaagccctcaaaccctcagtaaacaggccagagggaatgaagagctgacctctacctcagccattagctgggcctacctaggatggatctgatcctatattccaggataagtcttattttttcattcatctcctttgcagcacctatcactgctggaattaaatgattttcagtatttctgtgtatgtgaaaaaccttgtctaaagtttttctcttccactaaattgtagagtatccaaagggaagaatgtttctgcctttttcatttttgtatcttcagccagtacaggcctcgtccatggtaggcactgaataaacatttgttgaataamtgaacctaagacattttattacaaagttcaattcagcttaaaggcaacataatatattgattaagaacatgggtttgaatt

SEQ ID NO: 241081 - DNA, 601 bp, Homo sapiens
tacagctgtgctgaaatgttgaaattcacaagtctgggtagataaaggatatataggagttgtctggattactctggcgttgtctggattgttctctaagtttgaaataatttcaaagtaaaaggttttttaagtattggagtacagtaaataaatggagcccggctgtctgccaccacttagctgtcttactttggacaagtcactgagcctttctaaccctcagtttccttgcctttcaagtggggataacataatatcagttctttttgcattatagggttgtgtgcatgacaggtattctaactgcaaagatgtgtagacatagctgtgacattttcatctaaacccttccatacctccagggctttgtatggatcataaggctttgttcccttctatgtattagacacttgtgtttataaaccatgaggagatgatactactactaccagtaccattaataataacatcttggctagccttaaaaagtaataatcatatctgacacttacatagtactccagcttgaatagtactcatgagcctccgggtgccagacactgttctaagtactttacwtgcgttatctcatttaacc

SEQ ID NO: 241082 - DNA, 409 bp, Homo sapiens
tacttagttcagcacacctaggcctgatctgtgccaccctctacaattaacctgaccatttcactctgtctctgacttcccattagctgtaccttggcacaggctgtgccctctgctggtaaacaggacctggtcctcagcagttgcagaactgcatcttagctcatctgatgctgaccaatgatctcctgggcttgcagaactaagctataagcataaagttcatacagctccctccattctgttttcctaaccaaaggctgaaaattaactcttgctgtccaggagcagggacattagtttttgtttctttggtggtggtgttggcaggggagggaggttgggcaatgaattactgaaccatattttacactgyaacaaaaaaccaacaggctacttttcaacattt

SEQ ID NO: 241083 - DNA, 427 bp, Homo sapiens
tttattctttcatatgaactactatttaactgatcctggggatatttacacattaaatcatatctttaattactgagtggcaaagccttatgaaaataaactgaatgagcagatttgggagttggaaagttttccgtgggagtcctgaagatatttacatccacctttgcttctctaaacrccaggcttaaatccaatatactgtaatgaaaagcaaaggtcccatcaggtttcacagattatctttttaaaagactcgtatctttgtcatctaacagtctatgtttgagacacttttggaatatgagttacaacgccattatggaccacagctaattaggccaggcatggacaacttactagaagacaatttgctttgcctaatgtggttgcaaatgaaaattcttcacaataggtaaactgttaa

SEQ ID NO: 241084 - DNA, 333 bp, Homo sapiens
atttttactaatgctctaatatgacaagaatatggctcctttagatacattttattctgtctctgactcttgctttcttctgcatatgtcttactaaaaatagtatgtgtgtatatgcatgtttgtgtgtgtgaacttacagcaaaagagagctattggaggcattctaatcacagttttcctactgctgtaatatctgcatgatgaaaaaagcatttagartaaaattgcaataagtttaattgtaagtactttcaatttaaatatgaaaatgaatgggcatgaaaataattcatggtattcagagatggaaaggattttgttacagacctt

SEQ ID NO: 241085 - DNA, 527 bp, Homo sapiens
aagagagtcttttcaataaatggtactgtaacaaatggatgttcatatgtaaaataaatgacacagatcctacccatttcacaaaagtctacttaaaatggtcagagacctaaatgaaaataaaaaaactatgaaacttctagaagaaaatttatgtcatcttagattttataatgaatattatatataacactaaaattgtaattcacaaaggaaaaaatgataaaagctgcaccttatttaaattaaatacttctgccctacaaaatataccattaaggaaatgaaagtaaagtgaacagattaggtaaaatatttacaaaccacacatctgataaaggacttgtatttagaatatgaaaataacccttaaaactcatcaataagataaatacctagatttaaaaaagggataatgttctatacagacatcacattaamtatatatatatttatatgtatacaatatagattaaaaaatgggataatgttctacacagatgccacactatatatatatatatata

SEQ ID NO: 241086 - DNA, 415 bp, Homo sapiens
agatctaaatctagcccagagttctgacctgagcactgagttagattattcgcctgccttctggacaccttctcttggatgtgccataggaccaggcttgcatgactgcactcattatctgccctttccctgcatttcccagcctggttaatagcattagggcacctaggtcagagccttggttgatctcgtcccttactctctctccttaccatctgcactgtcacatctcagttcctgccstcaccatttcttgcctggtctcttgtgatcaatctgtaactggtatctcaggctcccggcatgatgctcctcaaaactgcccaaatgcactagttaaaatgcaaatgtgacctcttcctttcccaaaattctccagtatatcctcatctccaggagcccagaccgtgtgcaa

SEQ ID NO: 241087 - DNA, 392 bp, Homo sapiens
tgacctgagcactgagttagattattcgcctgccttctggacaccttctcttggatgtgccataggaccaggcttgcatgactgcactcattatctgccctttccctgcatttcccagcctggttaatagcattagggcacctaggtcagagccttggttgatctcgtcccttactctctctccttaccatctgcactgtcacatctcagttcctgccgtcaccatttcttgcctggtctcttgtgatcaatctgtaactggtatctcaggctcccggcatgatgctcctcaaaactgcccaaatgcactagttaaaatgcaaatgtgacctcttcctttcccmaaattctccagtatatcctcatctccaggagcccagaccgtgtgcaag

SEQ ID NO: 241088 - DNA, 647 bp, Homo sapiens
tagtgatactttatcaaagcagcccttgcaaattagcatattggtctagttactgaactttactattttaattctaaataggaagatatttctatgaattaaagtatataacatacagcaatatacaaatgaaaactattactatgctgataatctaaaataaaagtgttacattctaattacgactagggtagttttgatacctctcataaacctgaaaaagaaaatattctaaacacatttatctacatggttctcaaattcacacttaaaagcagttttgtggaaaccccaaagtccacaaggtggcatattcagaagggaggtttacgtagcaacagagagtaaacacgagaagaaaaamtgttattcagattttcaatagtaccatgaagatgtacttgtgtatctttattgttttatgtcctgaagagtgagtatttaaatgttattgaaatgaatttatatcattcatcctatctttggcttctaatattggactgtccacaggtcgtcattcattcattacattatctcaatttcatcattctgggatactactacttaaatttgaactgtcacatttttcacctcaaagattttagaaagcacaaatcattcaggataaattataaaagaatgaccat

SEQ ID NO: 241089 - DNA, 539 bp, Homo sapiens
aatatgtccataccgaaaagtttttgtttttctttttaagagactatgggtcttgctgtgttgcccaggctggactcaagctcctggactcaaatgatcctcctgcctcagtctctagagtagctgggactagaggtgggcaccaccatgcccagcttttatctgtatttttgatctccttgtcctatgagtttctatgaaggtttgttgacatctctaatgatacctcttgattcatctatgttttaaaactcattactcattgcttgataaatgttggagccgtagagttagcagcatgtatgcttacaattgtacactctcagtgagaagcaggatgaagaggaggcagtttgtctggactgagatccacgaaccctgggaatctggaggcagagggtattgttgagatgaccagaaagcagccagttggcccacatctatttcatcaagtcctcagcccrgtggaggtttgtgctgccctcagacaccagtgacctgggatttctgcagtcagagggagctaataatggtgccag

SEQ ID NO: 241090 - DNA, 471 bp, Homo sapiens
ttgtatatattcattgctatcattcatcaagtttgggaaattttcatttattattacttcaaatatattttatgtcccattctatctcctcttctactggtatactamattcgcttatgtatgactgttcgatatcatctattaagtttttgagcttttgttcaatttgtgtcatttttttctctgttcttcaacttgtgtaatttctattgatctgtcttcgagttcacttattcctgttatgtccattttgctgttaaatccatctagtgatttttttcataaattatattttgtattttaaaatttccttttttattgcctttatttctctgctgaggcttcctatttctctactgaggttttcatgaattgataaatccaaggtctctgtcataattgaggttggttctgatgttctgcctcatcaaactgtgcctttttagtatgctttgtgatttttttgtcaaa

SEQ ID NO: 241091 - DNA, 429 bp, Homo sapiens
ccgaagcaggaaggcaaagggctaaaaattcacaaaggtggccaggtgcagtggctcactcctgtaatcccagcactttggaaggccgaggcgggtggatcaataggtcaggagatcaagaccaccctggctaacacagtgaaaccccatctctactaaaaatacaaaaaattagccaagcatgggggcacacacctgtaatcycagctagtcaggaggctgaggcaggagaataacttgaacccaggaggcagagattgcagtgagccaagatcatgccactgcactccagcctgggtgacagagtgatactccatccaaaaaaaaaaaatcacaaaggtgcaggtgtgatgacaactgtgcttcttcagtgcccttacaatggtgccatgaaatttactaagctcacctgagcaaagatgaggaccc

SEQ ID NO: 241092 - DNA, 611 bp, Homo sapiens
acataacaagttccctacttccttaccagatgaaaggtttttggcaggattttctggcttctgtttgcccactgaggatgatagaatttgaagatatattaaattggtatccctgtgtgaaaccaagaaagacagaaggtttcaaaagagaaaaagagctttctccaggttgggggtaagggacaggtctgcctgtccttgaacagaagggacttttacttcttccctggaagcactcaaaagtgtggcaggacatcagggagcatattcacatagttaactaggtaggttagatgccaagcttaggttctcargcttgttcaagatcctcttgaagcacaaagcatggcatggaaatggcacaccagtgaatctgatgatatcacatggctgcagcaaaattcagcttttaccagtgtggacagatacctctagtgattaatgtcctaatgcttagatatggcgtaaaacccagaacctcagcacaaacctgaagtgggaaaaagcctagaaataactgaggttgaatttctcactaagttgataggaatagctactcagaattgaaattaaatgatttacagacaataatgaaatgtaattttgcttca

SEQ ID NO: 241093 - DNA, 571 bp, Homo sapiens
ttgctcacactcttaaaagtagaatttgcatgtaggtacttgtcattcttccatgctctgctgcttctgtgtgtatgatggtgtattaagtttcggagcttatgagaagaaacactaatggaatcaggaagaatgcagtcatttatttaaatattctacaaattgataaaaacrtatgtttttaaaatgattttgaatacaacagagtctttccattttaacttgatttttggtattgcaaatatttaagcagtgcttaaacagtctctaactgaatccaaatgatgttattataattgctgtatgaatggaacaaaatgctttaactcctcccaggagaacattgtatttgtctcttccacactctctttggaggaatagattgatttaggcaaatacattacaggagtaaagacctttttaaagattgcctcctaatctctactccactccattctagctctattatatcatgtctctctgagtataaacatatactttcagtacaagttactattcggtccacaattttcagaaaattgtggttgttaaatatcttcacacaggccta

SEQ ID NO: 241094 - DNA, 610 bp, Homo sapiens
tgtgctatgcagcagttctaactctagattacattaagaagtgggggtagtyggagtcattgtgtagcttctaacttgtacagggagaatttactaattcagaaattgtgtgattaacagaaattttaaaagaaacctttgctataagcaagacagaggcataactcttgtgaattactcacagtgtagaaagacagattagattaacacatctgtacaaatgaaccctgtgagatcaggaaacaaaaatatatacctaagaaagcttcactactgatcctgccttaaatgttttacttgcaaaagaaaacaattaccattttgttcccaagcatacattttcaaaggcttggttcttgtaaatgtgtatttttcttcgattttcaaaatttttcacattgcatgtatcattatagtttttaaaatgatcatatgtagatccagtgttctttacaaaacatttttgagagcgttaataaatttccatctcacatacattgctgattgtttcagcatcatcattatctcttgcattttgaacctacaggggagctttattaaaaatttaagagttctgggtctttgaaagcatagaagatatggtgtagtg

SEQ ID NO: 241095 - DNA, 673 bp, Homo sapiens
cactaaaggaaaaaaagaaaatttgccaggcttaataaatgatacaagaatttaaatcaaagatattcacaaattggcatgcagaagaaattttaaaagccccacatgtaagtttactttctgaattgtcaatgttataggaataaggagaattattaaaaacttcaagattgtaaaaaaaaaaaaaaaagcaggttagcaccaaagaagcaaggctaagacctatatatttatcaaaagctgtgggtcatggaagataaagataaaacaacctcagatttttaagagaagtgctattcaagctggtattcatctctgagacaaactgtccatcaattataaatgaaaataaatgcattttcgtaaatgatagcattttaaacaactctcctccatgtactatttcagaagcagagctcaagaaaatgaaatcctaaaaggacaattctgaacaggcattgaaagtagttataagactaaacatcagtggctctaaaatgcayatctaaaagacattggctagtgaacagtcgagtaattatataaaaagctggaatatactagtgatgtatatatatattatatatacataaatgtttctttttcttacaagataaaatagttgaaaattagaaaagtcaggaaaaacaaacacacaaaacaaaacgacaac

SEQ ID NO: 241096 - DNA, 573 bp, Homo sapiens
ttgtcggttccctgacaccatttttcattcatgtgaaattcctttcttctctcttcatggaatactcttccttcaactttcccatgaccaaatctccttgcaatttaggtctcagcaaaataccattttcttagagactttctttgtctatccagtttgaggtatgtgtttttgtttacgagtttactttataatttattttcccccaacactgaagcgaaagttacatggaattacagattgtgtcacccttattctctgctatatcaacagtaaaaggatagwtggctgctccttactgtgtaaaaactctgttttatagaaaaacatacaacataatattggatactaatatgtaaatatatattcctaaccatccaattattattaataatttggcaaattaataataaaataatttaataacttatttaacattttctatatttacaaaagtttattctgtacattttgaaatatcagctttatatttgtatttatatttcatatgtcaaaagtgacatttagatttctttcttcagaaagtttaaaagtctagtatatttttgctaa

SEQ ID NO: 241097 - DNA, 561 bp, Homo sapiens
gctttttcacgcatttttcagacacatacaaatgggtagctttaaaactataggagtaaactgaacatttgcctctcaacatataagattatatatataaactcatttttgagatattgcatagagatagcacataaaatagaacaaaaatagtatttaaaagagaaactgtgaaaacaaatgtcaaattatataaactttagagagaaagcaatactgtaaatcaagtcctcttataggtttttgagttaaaactggaaacccagtgtccctatgatcttgttgaaagtctaaaggaatcatcaaaaacaaaagcaaaacacaacaatccagaaaagaaaacaacatcctgcaggyaggcaggaaagaagggaacaaaacaaaagatagcttctaatctagttgatcaagaaaaatattttgtttacctttatataacagacatggtaatgtgcaactcggatctgtgtaacatctcagatatcttgggaacgttccttataacttctatgagcaggcagcatgctcccctcatcttgactaaactttttgccttgtaga

SEQ ID NO: 241098 - DNA, 561 bp, Homo sapiens
gctttttcacgcatttttcagacacatacaaatgggtagctttaaaactataggagtaaactgaacatttgcctctcaacatataagattatatatataaactcatttttgagatattgcatagagatagcacataaaatagaacaaaaatagtatttaaaagagaaactgtgaaaacaaatgtcaaattatataaactttagagagaaagcaatactgtaaatcaagtcctcttataggtttttgagttaaaactggaaacccagtgtccctatgatcttgttgaaagtctaaaggaatcatcaaaaacaaaagcaaaacacaacaatccagaaaagaaaacaacatcctgcaggtaggcaggaaagaagggaacaaaacaaaagatagcttctaatctagttgatcaagaaaaatattttgtttacctttatataacagacatggtaatgtgcaactcggatctstgtaacatctcagatatcttgggaacgttccttataacttctatgagcaggcagcatgctcccctcatcttgactaaactttttgccttgtaga

SEQ ID NO: 241099 - DNA, 528 bp, Homo sapiens
attctctataatctttcagaagttagatacatgtcactttttgttcattattttatctaaaatgaatatgtacataagccacattaacccactagaaatttattttattgcattagatacattttatatattttaattatttatttactaaaataatctatacttttatatattggtaatcttaatagaaaaaatacacattttggcatttgtttttaatatttttactttagatttacaaaattatagcaaagataatacagagagtttctgtgtaccccacatctggttgcacttattttaacatcttacattgttatrttacactcgtcacaattaatttaaatattgataaattcctattaacaaaagaacatacattatttagaatctttatttttccctaacatctttttctgttccaatattcactgaggattccactttacatgtattattgatgttttcatagagtccttttgactgtgacagtttctctgacattccttgtttttgatgactttgaca

SEQ ID NO: 241100 - DNA, 577 bp, Homo sapiens
ggttgtgagtatagagattttactgggatgggggtatgaatatttgctcaacatttatagcagagtttttaatatagcagaaataaattaaataactcattttttaatgagaaagaaataactggtcaaaaatttaagccaattgtcaagggtgcaatgacrttctgtgtttatatcataatcttaaatttacagatttatcaatatttttaaagctttcattcctacataaggaagaaaacactaatttaattgttcatgtattcatttattcttgaaagaattcatttagctaataaaatatttattgggagccaacaccaggcactacaagtaatatggtgattaagacttctgttcttcccatttgtgaagtttgcatcctaatgggttacaaagacaataaatcagaaccttaagctgggggcatcagagaacatacctgtaaacattacaatcgatctttgaataaaattcccttgaaaagctgaaacagcaattacaaggaaaaaataattaagagtttagaagcatgaatgtgcatccataatcagtgtggcaaaggcatatgtggaca

SEQ ID NO: 241101 - DNA, 476 bp, Homo sapiens
aagccctgttgtctatttttcccctctttgtgtctatgcctctagtttgtgtctgtgttttctagtttgtgtgcatagaggtgttcataattgtctgtgagaaattttatattttggtgaggttggtggtaacgtcatttttgtcgtttatgattcatgattgtgcttatttgaatcttctctctttttttttttttttttttttttttttttgagacagagtctcactctgtcacccagactagggtgcagatctcggctcactgcaacccccacctcccaggttcaagcgattctcgtgcctcagccttctgagcatytgggattacaggcatgtgctaccacacttggataacttttgcattttttgtagagatggggtttcaccatgttagtcagcctagtctcaaactgccgatcccagatgatccacccccacttggcctcccaaagtgctggaattacaggcataagcc

SEQ ID NO: 241102 - DNA, 471 bp, Homo sapiens
gattttttcctttccattgactttgttgaacctgataactatgtgtcttggggatatgtatagaataagacagtgtttctctgaatttcttaaatttgtgtgtcaatctctctagggaggttggggaaattttcatgaaaaatgtcctcacatatgtttttcaagttgcttgctcacyctccatctctttcaggaatgacaatgagtggtaggtttggtcttttcgtcccatatttcacaggagttttgttcatttttaaaattcttttttaaaatttctgtctgcctccagtggtttgaaggagcagtgtttgagtcctgagattcttttctcagcttggtctcttctgttattaatgcttccagttgcattctgaaattcttgcagtaaatttttatttcctgaagttcagttcggttctttttaaagtggctatgccatcttttaactcttgaccattttactatttt

SEQ ID NO: 241103 - DNA, 586 bp, Homo sapiens
cctttccttttctgatcttaattgaacactgtcatcccctttatccttagaggagttacattgtctggtaccactgcctatttatcaactagagatcagtccctctcaatattttgtagttttatttatttttctattttcatatatatatcattttgtattaagctcaactatgtatttctggttgcttctttttatatttttctgtcattgctatgtgtttggagcagtgaatgtttcttggtgttaattctttagacaggttaatgaaagctaaacttattttacctaacaagttgtcaraaattaacagtaatggcaatgcatagtgttggtgtgggtataataacacaaatattataacatagtctagatagtatttcaaaacagaaaagagtctagcaaccttgttaaagcaaatactttcctagtttggttttccttacgaagtctgttacacttgtttaattcaacccaataggattttcagaactcacaggtgaaggcaggtgaataaatacacctggagagaaagaaagaaccatatgacagctgttgaagacagattttggccatctgttgcaaa

SEQ ID NO: 241104 - DNA, 586 bp, Homo sapiens
cctttccttttctgatcttaattgaacactgtcatcccctttatccttagaggagttacattgtctggtaccactgcctatttatcaactagagatcagtccctctcaatattttgtagttttatttatttttctattttcatatatatatcattttgtattaagctcaactatgtatttctggttgcttctttttatatttttctgtcattgctatgtgtttggagcagtgaatgtttcttggtgttaattctttagacaggttaatgaaagctaaacttattttacctaacaagttgtcaaaaattaacagtaatggcaatgcatagtgttggtgtgggtataataacacaaatattataacatagtctagatagtatttcaaaacagaaaagagtctagcaaccttgttmaagcaaatactttcctagtttggttttccttacgaagtctgttacacttgtttaattcaacccaataggattttcagaactcacaggtgaaggcaggtgaataaatacacctggagagaaagaaagaaccatatgacagctgttgaagacagattttggccatctgttgcaaa

SEQ ID NO: 241105 - DNA, 586 bp, Homo sapiens
ctccttgtaattccctttgacatcatttttcacatctcctcttcctcacttcaacccacactttgcttcttctcaaaacaacatgcttgctctggactccaggatttgacacttactccttctatcagaaatactctcctaaagaaacttgtattgctttgtctctcagtttttttatctgcttagttttcactacatcagaaagccttatctgaccatccaatgctatatattaaactgaaccatgtaataatgcaagttttatatattttggctttacagtctatttgcctatggtaatttccactctccatctctctgtcatatgttttcatggactttgcagcacttaataactgtctaatctcatacttagtttttatgtgtttatsgactgtctgtcttctcctactagatggaagctgcacagtgatgagacttttattgcctttgaacagcatccagcataggaagcaatcaagtaaataatcaattaaaatgtattaaacatataacgtaccattttatagattaaatttttttaaaaaaatctctcattttatcaagcaaaaattggaagatctgt

SEQ ID NO: 241106 - DNA, 318 bp, Homo sapiens
tgtcccagctgccttaagtttctgctccatgtattctggaacagcactccttggctgccccagctgtggctcaaacagtcccctatgtaccttargctgccactctggaggaaacaagaggtaaaccttggtggcatccacacagtgctaactctgcaggtgcacagagtgcaagagctggacaggcatggctgcctccacctggatttcaaaaggtgcttcagagagccttagaacccaggcagaggactgtcacaggggccaagccaccacagaaagccccactaggttggtgatggggctgccactaggacccca

SEQ ID NO: 241107 - DNA, 443 bp, Homo sapiens
gtgtgtatatgtattctcattttagrcatctgtttcataagtgctgaaacaaacaataatcctccaatatctctgagcaaatctagtgtttatattctggatttcaaataccattttctacaaaagggcaccaagtctcgttggatttatgggctggggcatggagaatacaagaagattctggaatatctcctatctgagagttaagtaatactcaaagaatgatagtaacacaattcaatatatttccacttaacacttcagagtgttttgtgtgtgtgtgtgtgtgtgtgtgtgtgtgtattggtgtgtgtgtatgagacagagagagagaaagatggcaatctgattttaaaatttctaggttaaagctaatcttaattaaaccttacaaacaaatatatctcattttaatcagttggagtataaggtaagattttcat

SEQ ID NO: 241108 - DNA, 507 bp, Homo sapiens
gatggggagccctgataactttgattctgtgtcttaaaacttcaattcatgcttcatataattatcaatttaattattgctggtggtgttctctttctctcttcaccctggtatactacggagtgatacaggaaaataaattgttattcgaattttaaataggctgcaaagttggaaagcactttaaaatctgaggctggttggcttatccacaacaggaaagggaagtatgttacactaatgatgagaatagatctttgatttctgattatatcttagtttcttcacctgtgaaatagagacctgtcctaaaacagtccttgtactttgctcacagtttggtgagtcataaatttgggaaggtcttgcctgggcatttctctgcacgggcctrcaccagggctgaacgtgcacaatggctcactggtgtggctggcaatggcaacagctgtcagctgggatcccagagggggccactgaccaggcatgtagtccctccagcatgac

SEQ ID NO: 241109 - DNA, 491 bp, Homo sapiens
aatatgccttcactttccattcagtgaacacaatgctcattctttttggacatrtatggaaaatttacaaaaatcaatgaagtactaggtgataggagaaccctcagataattttatagagttaattctcaaccagtatgcaataaaattagatattaatctaacaaaaagggaggtgaaaaaaatttattctatttagaaacgaaaaaacatatcactatacagcccttgaattaacaagggaaccattaggaaagatagtgaaaaggctgtctgtcaaatctgctggacaacaatgctgtaaattctaaaaatatatataatgcaattacagaaaaatatttcaaattgatagattttgtgataggcccacaagtgtttgttaaattattttccatatttttctgtatatttaaaatatttaataattaaaaatttaaataaacatatattggacatggttaaaatattactcagacaaaaattaaggg

SEQ ID NO: 241110 - DNA, 491 bp, Homo sapiens
aatatgccttcactttccattcagtgaacacaatgctcattctttttggacatgtatggaaaatttacaaaaatcaatgaagtactaggtgataggagaaccctcagataattttatagagttaattctcaaccagtatgcaataaaattagatattaatctaacaaaaagggaggtgaaaaaaatttattctatttagaaacgaaaaaacatatcactatacagcccttgaattaacaagggaaccattaggaaagatartgaaaaggctgtctgtcaaatctgctggacaacaatgctgtaaattctaaaaatatatataatgcaattacagaaaaatatttcaaattgatagattttgtgataggcccacaagtgtttgttaaattattttccatatttttctgtatatttaaaatatttaataattaaaaatttaaataaacatatattggacatggttaaaatattactcagacaaaaattaaggg

SEQ ID NO: 241111 - DNA, 392 bp, Homo sapiens
ctgacttttagccaggtagacaagctatcgacttggtatgatgaaacatcactgagttcatttttatgcctttgtttcctctctgtctcagctgcaagtgtccactgcttgggaaagtgtgggaagctgacttggaagcttgtcgattgcttatccagwgcctacagctccaggaagccaggggaagcctgtctgtagaagatgagaggcagatggatgacttagagggagctgctcctcctattccccccaggctccactccgaggataaaaggaagacccctttgaaggtattggaagaatggaagactcacctcatcccctctctgcactgtgctggaggtgaacagaaagaggtctgtccttttcacatggcctccagaggggaccct

SEQ ID NO: 241112 - DNA, 392 bp, Homo sapiens
caacttttggcatatttagttccattttcattctaatttagtggctagaattagaatatgcagtctaatatagaattaccatatatagcatacattatatatgtcatatataatatagttattatattcactatagattatatatgccatacatgatatttaacatatatactatacattatrtattgtatgtcatatatgatgtttacttatatatttagaatctgcatattacaatatattattatttatttgaatgaaacattcaaatatatgtatttatcccattaattgtttttaccaaaaccagatcataatgaatgtttataatgttcttctttcataaacacaactaaagtttggcctgagatatatgtattacaaattaaaat

SEQ ID NO: 241113 - DNA, 392 bp, Homo sapiens
caacttttggcatatttagttccattttcattctaatttagtggctagaattagaatatgcagtctaatatagaattaccatatatagcatacattatatatgtcatatataatatagttattatattcactatagattatatatgccatacatgatatttaacatatatactatacattatatattgtatgtcatatatgatgtttamttatatatttagaatctgcatattacaatatattattatttatttgaatgaaacattcaaatatatgtatttatcccattaattgtttttaccaaaaccagatcataatgaatgtttataatgttcttctttcataaacacaactaaagtttggcctgagatatatgtattacaaattaaaat

SEQ ID NO: 241114 - DNA, 392 bp, Homo sapiens
caacttttggcatatttagttccattttcattctaatttagtggctagaattagaatatgcagtctaatatagaattaccatatatagcatacattatatatgtcatatataatatagttattatattcactatagattatatatgccatacatgatatttaacatatatactatacattatatattgtatgtcatatatgatgtttacttatatatttagaatctrcatattacaatatattattatttatttgaatgaaacattcaaatatatgtatttatcccattaattgtttttaccaaaaccagatcataatgaatgtttataatgttcttctttcataaacacaactaaagtttggcctgagatatatgtattacaaattaaaat

SEQ ID NO: 241115 - DNA, 392 bp, Homo sapiens
caacttttggcatatttagttccattttcattctaatttagtggctagaattagaatatgcagtctaatatagaattaccatatatagcatacattatatatgtcatatataatatagttattatattcactatagattatatatgccatacatgatatttaacatatatactatacattatatattgtatgtcatatatgatgtttacttatatatttagaatctgyatattacaatatattattatttatttgaatgaaacattcaaatatatgtatttatcccattaattgtttttaccaaaaccagatcataatgaatgtttataatgttcttctttcataaacacaactaaagtttggcctgagatatatgtattacaaattaaaat

SEQ ID NO: 241116 - DNA, 585 bp, Homo sapiens
ttaaactgcaggaggaaactggccattccaggtttagacagctgcccctttgaaagagaggaaagtgtgtccatgctggggagaggcarctgcaggaaacgtcctgagcttgtgaaagtctgaccccaggaaccaccctgagctgacctcccaacattctggttcctactcctcaggctcagaccctggttggttcacggccctggggtcatctacacctctttggccttgaccttggacattcggcccagccaccttccactccacttttttttctcatagattcaccgttttcatcctgcccatattctcccagcatccagccaatacctagttttcccagcatctagccccagttcctagttctgctgcccctgctctaggctggtcagttatatagcgttgcttccctgcaggtgaggtggcatgtgacagggtagggtaggtctgacacccctgcactctctctacccacaccgtgaaaaatagtgagacaacagcattgcattcttcattttgaaagaggtttgaatgtttttatttgtggaaggtagatgtcatgaagagttgcataattaaactagt

SEQ ID NO: 241117 - DNA, 615 bp, Homo sapiens
ccttcctgtctaagcaaggagctgtgtctacctatgtaagtatcaagacagacaggtctttgagatgtgctccagggttcaagggcaatggggcagaactctctgagggtggtgactcactgggaagcaacagccacacaccaccccacaggacaaaacagtggaagtggaggcatcaacatagttcagaataattgattttacttttttcatggacaactgagtcacaggatgatgtcccagttctgaaaacactttctcactctctgttctttgggtacctttgccagcatgaagttacttactrtaactcagcattctcactcgcgttactcaaaggtgaaaagctggaagaatgagttaatcttacttccacattcaaatgtggctattagggcagtgatggaagctcagagcctgtgcttttggacaggctgatttcctgtagctactctgtcttcctttggtgtgggatcatgtagtccatctagtgatcataatgtaagcttggagggaaatgatttggaaataattgggaaggtaaaatgatatgacatgaaatgcctgctattctaaaacacaaatcttattttatgtgcaactgctgttttggat

SEQ ID NO: 241118 - DNA, 524 bp, Homo sapiens
gttaggaaagcctttccttcaaaacaagaaaagaagccgccaaccccgaattggaactggcctcttcacatctggaccacagcatgggaggcggaggcaactcttcccttctcggtaccctgagcagacgtaccagtcacagtaattaatataaaaggtgtccttcctcttgaggcatcacttttaaagcaaaaacaagggaggctgaggcaggagaatggcgtgaacccrggaggcggagcttgcagtgagccgagatcccgccactgcactccagcctgggcgacagagcgagactccgtctcaaaaaaaaaaaaaaaaagcaaaaacaaaaacaaaaagccctctcacacacacacaaaaacctgtttctgtttccctatgtaatgaagacccctgaggttggcagcagtgttgtccaccgccaactccctgtggtcgatctggaagcttcatctagggaggggctcatgaaggggcctcatgagtaacccctctcctgaggattgttattttcaagtacc

SEQ ID NO: 241119 - DNA, 549 bp, Homo sapiens
gatcactacaggcacaaggcattaccatcagtctcagagaaggcctgacaccctgttatagatcagagagtcctggccaccactaaaggtcttggaaagacacggggaaggcaagcagaagcacaggtggcctgaagacatctccttccggccaagagtccccctgctcaycccccaccccacccaggcaccaccctccacagctaaaggtgtttatgctgtaggaaccctgtggtggtaggagatcgggggtgatagggctgcttggataggaaacatatgtgattgttggcactgctcttcatactgttgtcaaattcctcactgcttctgtgtacttggggtgacagtctgacagcctgtgaggtcagacaaagcccagattacttccctctcgcctttccgtctcgcacttgtgggctgccattcttaaaggagtcacgtgtgggctttctttgccagaagtaggcatggcttacatcttttgggtttgggcactggaaatgactctgcttcccctgcagacacaccctgatgaggctgcaggcc

SEQ ID NO: 241120 - DNA, 628 bp, Homo sapiens
ctttactcactctctatcaagcttttctcatcctaggagtctagtgtggcttcatcagccctgggctgaaaattgacctgaatgatattgagtttctcaaaatcacctctctacttctttctttcactctaaccatgatgcacagctgttgtgtgcagggagtctcatcaaccccctctccactttggtgagtggttttccataagatatgcaaatagatctgtgtaggttctggcccttcagacttatatggatgtgtctgagtcacatgatatacagaaaytagactcccatggaaacacccgtatttcccaaattcttggtttcagctgacgacgtattccttgagtatataattgcctatttgtgttgagtttcccctttctcgtttgcttactcctctatcaaagtggtatttttgaacttacaaagacccatctgaacatgtgagaataagagcgagggcacaaaagacaagaaagaaaaataagttcccaattttgtagacactaaaatctctctcactttctttagggaacactaaaaagggggcaggtagggagggtcaaattcaccaatcgacatttccgaatctccaaggagtgagtagttggaaaggcacaccggg

SEQ ID NO: 241121 - DNA, 628 bp, Homo sapiens
ctttactcactctctatcaagcttttctcatcctaggagtctagtgtggcttcatcagccctgggctgaaaattgacctgaatgatattgagtttctcaaaatcacctctctacttctttctttcactctaaccatgatgcacagctgttgtgtgcagggagtctcatcaaccccctctccactttggtgagtggttttccataagatatgcaaatagatctgtgtaggttctggcccttcagacttatatggatgtgtctgagtcacatgatatacagaaactagactcccatggaaacacccgtatttcccaaattcttggtttcagctgacgacgtattccttgagtatataattgcctatttgtgttgagtttcccctttctcgtttgcttactcctctatcaaagtggtatttttgaacttacaaagacccatctgaacatgtgagaataagagcgagggcacaaaagamaagaaagaaaaataagttcccaattttgtagacactaaaatctctctcactttctttagggaacactaaaaagggggcaggtagggagggtcaaattcaccaatcgacatttccgaatctccaaggagtgagtagttggaaaggcacaccggg

SEQ ID NO: 241122 - DNA, 628 bp, Homo sapiens
ctttactcactctctatcaagcttttctcatcctaggagtctagtgtggcttcatcagccctgggctgaaaattgacctgaatgatattgagtttctcaaaatcacctctctacttctttctttcactctaaccatgatgcacagctgttgtgtgcagggagtctcatcaaccccctctccactttggtgagtggttttccataagatatgcaaatagatctgtgtaggttctggcccttcagacttatatggatgtgtctgagtcacatgatatacagaaactagactcccatggaaacacccgtatttcccaaattcttggtttcagctgacgacgtattccttgagtatataattgcctatttgtgttgagtttcccctttctcgtttgcttactcctctatcaaagtggtatttttgaacttacaaagacccatctgaacatgtgagaataagagcgagggcacaaaagacaagraagaaaaataagttcccaattttgtagacactaaaatctctctcactttctttagggaacactaaaaagggggcaggtagggagggtcaaattcaccaatcgacatttccgaatctccaaggagtgagtagttggaaaggcacaccggg

SEQ ID NO: 241123 - DNA, 628 bp, Homo sapiens
ctttactcactctctatcaagcttttctcatcctaggagtctagtgtggcttcatcagccctgggctgaaaattgacctgaatgatattgagtttctcaaaatcacctctctacttctttctttcactctaaccatgatgcacagctgttgtgtgcagggagtctcatcaaccccctctccactttggtgagtggttttccataagatatgcaaatagatctgtgtaggttctggcccttcagacttatatggatgtgtctgagtcacatgatatacagaaactagactcccatggaaacacccgtatttcccaaattcttggtttcagctgacgacgtattccttgagtatataattgcctatttgtgttgagtttcccctttctcgtttgcttactcctctatcaaagtggtatttttgaacttacaaagacccatctgaacatgtgagaataagagcgagggcacaaaagacaagaaagaaaaataagttcccaattttgtagacactaaaatctctctcactttctttagggaayactaaaaagggggcaggtagggagggtcaaattcaccaatcgacatttccgaatctccaaggagtgagtagttggaaaggcacaccggg

SEQ ID NO: 241124 - DNA, 345 bp, Homo sapiens
  misc_feature (1)...(345): n = A,T,C or G
gggaggcaggtacctatggcttgggagaaagccatagtctctcatgggtagacrtgtctgtgctgttggagagacagtctccaccttcctccacaaagcagcggcaggtagaccctggccacactggattggaacagagaccccagggcactgtgagttccatctccctgtgcctctgacagccttgggcacatcattattgtctacacacacgggagaggctcattactgattcagttagacatatggatccctgagatgcctccctgagcattatttacagtagaaccaaaaggggtggctgagctctggctcgcttcgcntcagtctnccagctgggtgtgt

SEQ ID NO: 241125 - DNA, 428 bp, Homo sapiens
ttccacaggctaaattctttgaaggagaattactgggtccaagaggagaatcttataaagattcttggttacaaattgcagattgcttgtcaaaaagattaaccgagttgtttgtcctccaatagcgtctaagggtatttgactcattacatctgttttagcaattagtatcttgcatctaaatggccttgctcagcagtgggaatgtagcctttgctgggggccttgaacagtcaggccaagtaggggagcaaagctggagaaaatgtgtgtgtggggtggccccatagccagcagatcttgttctgttcttccccaacraacacagataataacaagtgaactgctctacttcagggatttaagttagaggttacaaagaactttctgtccatgaagaggacagaaatacagaataccaggactgc

SEQ ID NO: 241126 - DNA, 503 bp, Homo sapiens
cacagccacacgtttaccctttgatgcaatctactcacctcttgggttctattccaaagatattcttgcaaaaatgcaaaatgactgaaaagtaaggtcattcattatgtactattttaaatagtaaaaaatgaaagtagcttaaagctccactcatagaaggcagatttataagcatttgtaaatcataatggatttaggtaggacataccatgaraactccttctagcctctcctaaaaagaatagggagacattaacttgaatgacagtacaaagggaagggaaataaccaagctttagtggcaagtaggaagagattagtgaatgcttccaataatccagcaagcggcatatgataatgataattcatgatataacttcaaaaaatctttgaaatgtttccaaattatatttaaaaattgtatgtatttaaatgttttcattattaaaatgaatgaattaaaagggcaattcaagatctggaaaagaaggcaacaggta

SEQ ID NO: 241127 - DNA, 503 bp, Homo sapiens
cacagccacacgtttaccctttgatgcaatctactcacctcttgggttctattccaaagatattcttgcaaaaatgcaaaatgactgaaaagtaaggtcattcattatgtactattttaaatagtaaaaaatgaaagtagcttaaagctccactcatagaaggcagatttataagcatttgtaaatcataatggatttaggtaggacataccatgagaactccttctagcctctcctaaaaagaatagggagacattaacttgaatgacagtacaaagggaagggaaataaccaagctttagtggcaagtaggaagagattagtgaatgcttccaataatycagcaagcggcatatgataatgataattcatgatataacttcaaaaaatctttgaaatgtttccaaattatatttaaaaattgtatgtatttaaatgttttcattattaaaatgaatgaattaaaagggcaattcaagatctggaaaagaaggcaacaggta

SEQ ID NO: 241128 - DNA, 427 bp, Homo sapiens
agttttcatgttttttgcataaaattgtccataatatccaattattaccttttaaaatgtctgcagacttacaatttgatagatttgggaggaaaaaaagtctgcagaatccatagttatgttttcctttttattattgttattgttaatctttgccttattttttcttaaaaaaccttaccaggattatgcaaattttgttagccctttcaatgaacaactttatctttgttaacctttcctattttccctctagcctctatatcttttaycttctcttttatgtttttcatctctttgtgtctctgcactgaattctggataatttcttcaaatataacttccaactttctatttttctcttttgctgtgtttaatctgttgttaaatcatccatataattttaaatttcaattattacattttt

SEQ ID NO: 241129 - DNA, 529 bp, Homo sapiens
aattttaggacttaagaattcctgagctgagcagcatattttccttgcagttctgggttcagctctaaaacaggagcatgtatagatagaactctatgtacggtgcttataaattcaggccctagaactcaactacctctgtccaaaccctgaaactactacttcctagctacgggcaaggtacttgcatcccctaagcttgagtcttcttgtttattcttgtttgtgccataaagacaatgatagtatatatcacatatggttaaatacacacacaaaaaaacactaagaacaacatatggcacaaagaaaatagtcaataaattctggctatttttattaaaaggcaagtgaaattatgaaaggcatttggttaaacctaagatgagatctgcctaggtctggccyatatcaactattgattttctatgattatcatcttaatctgtgcatccatttagtaattaatgattctctttgttactattaaatatgaggactcaaattgaaggtcatctcctcctaacca

SEQ ID NO: 241130 - DNA, 578 bp, Homo sapiens
ggctgtactatttggcattccaacagcaatcaatgagcatttttattgctctgcattctcactagtatttggcactgtcagtttctttttttaaaaaaacgtttaaccatgctaataggtgtgtggtaatatcttrtggttttaattttttcttccctagagactaatgatgctgagcatcttttcatatgcttttttgccatctctatgtcttgcttggtgaagtctctggatattttgctcactatttattgattgtttacttattgttgaattctagtggttcattatatattctgaatacatccattaaaagttatatgatttgcaatttttttctccatctgtggcttgtcttttcattctcttaacagtatctttcacagaacaatactttcagttttgatacagtccaatttacctacttttttgattgtttgtggttattgcatagtatctaaaattcatgactaaagccattgtcatccagatgtttatcctacctaggagttttatagttttatgctgtatatttaggtctatgatcaattttgagttaatttttgaataccttgtga

SEQ ID NO: 241131 - DNA, 480 bp, Homo sapiens
cttctgtaatctagacactgcctgcatcatttgactcgtggctcttcctacatcttgaaaagccagaaatgtagcatattacctcctttttaacctccatttctgtccctacttattctttctctttgacaatgatgctcttgcaccttcttataagggccyttttgatcactgtggacccacgtgcataatctaggataacctcccttactcaagatccttcacttaatcgcatctagcaagtcctttttaccatataaggtaatatgttactatttctggagattaggttgtggacatcattggggagctattttcaatctaccacaaaggatttagtttccaacattgatagcacaactggtggggaaaaaaaatagtttgatttggccgggagcggtggctcacacctgtaatcccagcactttgggaggccgagacaggtggatcacctgagatcaggagttcaagaccagccta

SEQ ID NO: 241132 - DNA, 524 bp, Homo sapiens
gtctgttttgttacaaaaccaccaccctcaccaccacccctatcaacaaatgtcaatatccaaattcacagaagcgatcagtggagttttagtttactgtcactttctgtatattgtgtgttagatagtcacaccttctggtgaagtgtcatatccacacattgaatacaccaggctctataagcacatcacaaatactaaaatataaagagaatgaaagagagagagacagagagagagagaataaaggtagggggcaggtattggtatctatgcatgtggtatcagaggaaatcttcactcactaggaccttgcttttgtcttggaaaaggagggaaagacaaatctttttttattttaacttttaggtccaggggtaaatttgcaggttcattayataggaaaacagtgtcatggaggtttgttgtatagattatttcatcacccagctattaagtctagtatcctatagttattttttctgatcctctccctccaaccaccctccactctctgataggcc

SEQ ID NO: 241133 - DNA, 582 bp, Homo sapiens
cgcagcttttcagaccaaaacattagtgccttgatcattttaagtggtttagttattgtaagaatgtaagctcatgttttattactccagttatatggtactgtgccatccttaaraagtattttgaattttgaaaaaagttctcttttcctagagaacaattacgatggatgtaaggtagtcttctggcaaaggatgagaaacatcagaatatgcccatgtgtaatagttagagaataatgagagttttgggaattacagcgggatacagaaaaataatgtttaggtccaaaatttgctaccataattaaccttaaacaaattcaccaaaagccgtgattaataaaatctgttcactttatagaagtaactctaacatgattatggaatggttaaatctgggggcacacaccctacctaagtaccatggcaaaggctcccagctgtaaggctggtgtgcaacatctactttaacagactctgcagcatggctgttgcataggtgggccgagcctgtctgctctcaatcgcattctgaaggtactggatgcctccacagcgttcccagatttcttcaaactg

SEQ ID NO: 241134 - DNA, 385 bp, Homo sapiens
cactcccaccccagtcttcccacagttgccggccaatgcctgaaatctgatcacagaacatcagcttctctgtcaaaggtcatatcctaagtcatttgatgatgyaggaagaaccccagggagcacataccctggaggccaggcatggcagtctgtaattggaagtcctggcctgcagacagttattcgcaattagtattgttagaccaatggtatgtgaaaatgcacagtacagggttgtgcacacattagagggtgaaataacacactgaaatgggaatcaggacactgagttctacccccgttctgctgccagctgttcccctgaacatgccattttacttcatcagatctcagttttcttatccgtacaacgggagtgttg

SEQ ID NO: 241135 - DNA, 600 bp, Homo sapiens
attgaacctgactttggggctctacaaatgcttttcagtacagaagatgtctgagctggctttgaaaatgggtgcagtgtggggaggagggaaagttaataagcagaaggtggaaaaattgaagagaaaataattcataggaacttgaagacatagaagtgtatattgtatgtgggaaggaacaggggtcagtttagtgtcagtaaaggacaagatattggccaaggggataatgatggcagraagtgaatggtaaggtacctgggggtggggtgcagattctggagggtcttaaatgccattctaaacagttggatcttgttcaatgggtccagcaatgaactgttagtacagattcttagtaaaaagattaacttcagaataaatgtagtcaaggagataccttctccttcctcctctcccaacacacccagaaaaccatttcttctctgcccactcacacacataaacccatttcagcagtgcaggagtagggatagggagggtatgccagacctgtgaatgagaacatggtgaaaacaaaagaccttgtggaattcaaaccaaccagagtcggtggctgcatgtggggggtgggag

SEQ ID NO: 241136 - DNA, 626 bp, Homo sapiens
tgaatatcaagaaaaataattatgatggcaattcaacaaagtgatagctttaaaatgagcttcaacaaaaaacatgcattcacaggcatgatcatagcacactgcagcctcgaactcttggccttaaggaccaaggaactctgctttagcctctagagtagctgggaccacaggcatgtgccaccayacctggctgaagtcctgcaagtttgcaaagagtacttcaacctatggaaattatatttgtaaacagagctaaataatcctcacagtgcttaggccaataaaaattatgagtcattataatgatattataacggtagctttcaaaatggactagactggaataaatttaagaggtttaaaaatgatgatcaacatgattaaactttactgtagattatgatttgacaaaactgatgaaaatggaaaagcagttagacttttacacgtcacctcttttcttgtttgtactgaagaactgaataatgttattaccactttagcaaataattattggcttataagttagagaaaaatatgctttcatatgggattactgtgctagaatttctccttgtgcaattataaattaccaatgcttattgacctacagaaagataata

SEQ ID NO: 241137 - DNA, 626 bp, Homo sapiens
tgaatatcaagaaaaataattatgatggcaattcaacaaagtgatagctttaaaatgagcttcaacaaaaaacatgcattcacaggcatgatcatagcacactgcagcctcgaactcttggccttaaggaccaaggaactctgctttagcctctagagtagctgggaccacaggcatgtgccaccatacctggctgaagtcctgcaagtttgcaaagagtacttcaacctatggaaattatatttgtaaacagagctaaataatcctcacagtgcttaggccaataaaaattatgagtcattataatgatattataacggtagctttcaaaatggactagactggaataaatttaagaggtttaaaaatgatgrtcaacatgattaaactttactgtagattatgatttgacaaaactgatgaaaatggaaaagcagttagacttttacacgtcacctcttttcttgtttgtactgaagaactgaataatgttattaccactttagcaaataattattggcttataagttagagaaaaatatgctttcatatgggattactgtgctagaatttctccttgtgcaattataaattaccaatgcttattgacctacagaaagataata

SEQ ID NO: 241138 - DNA, 626 bp, Homo sapiens
tgaatatcaagaaaaataattatgatggcaattcaacaaagtgatagctttaaaatgagcttcaacaaaaaacatgcattcacaggcatgatcatagcacactgcagcctcgaactcttggccttaaggaccaaggaactctgctttagcctctagagtagctgggaccacaggcatgtgccaccatacctggctgaagtcctgcaagtttgcaaagagtacttcaacctatggaaattatatttgtaaacagagctaaataatcctcacagtgcttaggccaataaaaattatgagtcattataatgatattataacggtagctttcaaaatggactagactggaataaatttaagaggtttaaaaatgatgatcaacatgattaaacttyactgtagattatgatttgacaaaactgatgaaaatggaaaagcagttagacttttacacgtcacctcttttcttgtttgtactgaagaactgaataatgttattaccactttagcaaataattattggcttataagttagagaaaaatatgctttcatatgggattactgtgctagaatttctccttgtgcaattataaattaccaatgcttattgacctacagaaagataata

SEQ ID NO: 241139 - DNA, 613 bp, Homo sapiens
gttttcattaatcttagatgtatgtatagataacatttatttcaatgtttagtgttagaagtgtttggrgtctttatttagcgatttagtggtgttttcgtgaccagaaatatgccctaggaacttaactgctgtttttattaattcacctgtagtgaaattggttttgtgttaccttgttttgcttaaagtcacagtttccaaatacctatagacaatgttaagtgaggacttcctgtaagtagtttagattgaggagcttccacacactgacaaactcgtttagtggctactgtgttaggcaccacgaaagagacaccagatgtagcggagagcaaggaagatgaggcttgtcccctgcctggatggttttaatgagaaactgtgctcagggcaacttcatggacatcatgtgacttgtgcagtcacacagagcctcacactcagatggtccctgagcctgattttcatgctctgtgaacatcatcttgaaattcttaataatttttaaagagggagccctcatttttatcttgcacagggcctcacaagctatgcggccaattctgacaacaagtgaagggagtgttaaaaaaaggtgaagtcactgggg

SEQ ID NO: 241140 - DNA, 472 bp, Homo sapiens
tctgaattccattttcttttaaaagaaactagagctctttggaaaaaacggtttattccaggtctgggcaagaaaatgaacaagaggagtctttaaagaagaattattgaagaatactagggtcatattaaaaagatagcagagtaagattatagatgctggccaagtatgttcaatttgagccccagtgagatcatcatacaatgatatgcatttaggagtgsggtgcatcctacagaaaggggagaaatgatactgtaaagaggaagctaaaactggatgccagagggctcatctctgccacccagagtagatggtatgttagcaacaagacttgctcacaggcctccaaccagattgtggtgggctctggcatgggacagagtggagggcaagtgtctccagctatgaagaactgcagaatcagagctgacactgaggaagagacatgcgatctgactcctgtcccttg

SEQ ID NO: 241141 - DNA, 490 bp, Homo sapiens
aatcctttttatatgttgctggactcagattgctaatatgtttttaaggatttttgcttttgttaaggcaggataatacatggtcaagttttcgtttcctgtcatgtctttatctgctttggtatcagggaaatacttgccttatatagtgagttggcaagcattttccctttattttcagaaagcatttgcatatgatagtcacaagctctgttaatggtcaacattctctttyactttccaattgcttctctgtaatactggcctgctattttactcaatgaattcttccctcaaatctcttgaagaatatcaattataattttaaaggacctttcttgttttctttatgttttctattttagtgggagccattcttttagagtacttagctttgaacttttagttatttcaacatttttcaatttttgatatgttgcttgtataatgtttataaataagagtctacatatatgaggattagcagcta

SEQ ID NO: 241142 - DNA, 320 bp, Homo sapiens
atttgtttaaaacagtaatttccactgaattggctccaagtagtcttctattagctctttggtacatgagtacacttcggagtgaaaataaaattcaatattgatttttaaaaccttgtttacgttatcactaactcactaccaccattagcaaatatccaataaaatcaaacaaaacatactgcaatagagtatctgttatacttaaaagtctaaacaagaagtcatagcttyatatatcagcagagaatttcaaatctgcatttattcattgaacaaataaaatcagacattcaggataaagaccatgtatgaggcac

SEQ ID NO: 241143 - DNA, 437 bp, Homo sapiens
tgtacacaagtgttcacaaccacttactcatagcagccagaagcaatccaaatgtcatcaattggtgaatggataaacaaaaacaatggcatgtccataaaactgaatattgatcagtaagaatgattagcatgcaacatatggaataatctcaaaaacatcatgctaagtgaaagaagtcacacattaaaaagttcatagtggatgattccatttatcccatatttctagaaaaggcaaaacagtagcaacagaaagcagatcagtggttgactgaggtctgcagtaggaacaggaattgactgcaaagaggtactaaggtgatggaagtgttctaagactggtggtratggtttatgtaaaaacttaccatcataaatcaaactccacagccaaaaacaggtgaatcatatgacatgtaaactatacatcagtaa

SEQ ID NO: 241144 - DNA, 437 bp, Homo sapiens
tgtacacaagtgttcacaaccacttactcatagcagccagaagcaatccaaatgtcatcaattggtgaatggataaacaaaaacaatggcatgtccataaaactgaatattgatcagtaagaatgattagcatgcaacatatggaataatctcaaaaacatcatgctaagtgaaagaagtcacacattaaaaagttcatagtggatgattccatttatcccatatttctagaaaaggcaaaacagtagcaacagaaagcagatcagtggttgactgaggtctgcagtaggaacaggaattgactgcaaagaggtactaaggtgatggaagtgttctaagactggtggtaatggtttatgtamaaacttaccatcataaatcaaactccacagccaaaaacaggtgaatcatatgacatgtaaactatacatcagtaa

SEQ ID NO: 241145 - DNA, 560 bp, Homo sapiens
ttgggaaaatcatttaatctgtgctttagtttactcatttgtaaatttagagttgttataagggttaagtaagattatacacataaaacatttagaacagggccagatagagttagcacttgagtctctgattcataacagccaacaacctatttctataaatcataaattactttgcctgtgacatgaaagacatgtgacgtattgttggcattaagaaatggcctcagtttggaggatcaaattaattttccaatagaatttacagattttataagaaatacacaagtggtttatctacctgaaatttgtaaacagggtaattgatccagttataactatgttgttgggactctgtatttgtacattaccactgatatctgtgtgctagcagagatttgaattttctgttctgtctcctgaagagcccctgactgacagaacatttgaatactgtgattatatggatccagtgatcatatgaatcactggatttgtttcatttttatcayaaataaatgaaagagaaaggatcgtagaacgttaggatcctagaattc

SEQ ID NO: 241146 - DNA, 371 bp, Homo sapiens
acagccacatgcataaaaaaattgttaaaatgtcataagtgatcactcacaaagaagtcacaataaataataaagtcacaaaaatatgcctttgatttcatttacataaagttcaagaacagaaaaaattaaaaatatwtaattaatgattttatacagagatacatattcacagagttacacatacatttacatatacttaatatctaggaaagcaaaggaatagttaccatagagagagagggattactctagaagaaggagacagatatgaaatcagaagttctcatgaagattctccggggaactagaaattacttcttaaactggtggtcgttgcatgcatatccacttaacaattactccttaaa

SEQ ID NO: 241147 - DNA, 583 bp, Homo sapiens
agagcattttacttttttattttgcatgaacacccatgcaattcaatctcttattattttcgtaaaataaatttctagaagtgaatttcctgggttaaaaggtatgcaaaaatgtgatgcagagtttgcatcataattctgacagcagtatttcraaggtaaattaattatttatatattggtgctgggtttttttcaattacaaatattataaaagtgtagaaaggcttaaaatgcttagttacctaaattaggcattatttcaacaattctccagggaggacttagacttgctctcttgaaaaaaaaaaaagaaatatagaatggcaaaatacattaagcaaagaattaattctatacatctctttaatcccatacctagtttattcctgcagatgtggtatgtgcttagtgtgcttgattaattggaggttactaaatttgcctcattcacaggaggtttccacttttctggggatgcccagaaaagttagaagcaactattgaatagagacaataagacaccaagctacaaaaattcataggcttttactataaaatggtgattgactagattttcaag

SEQ ID NO: 241148 - DNA, 583 bp, Homo sapiens
agagcattttacttttttattttgcatgaacacccatgcaattcaatctcttattattttcgtaaaataaatttctagaagtgaatttcctgggttaaaaggtatgcaaaaatgtgatgcagagtttgcatcataattctgacagcagtatttcaaargtaaattaattatttatatattggtgctgggtttttttcaattacaaatattataaaagtgtagaaaggcttaaaatgcttagttacctaaattaggcattatttcaacaattctccagggaggacttagacttgctctcttgaaaaaaaaaaaagaaatatagaatggcaaaatacattaagcaaagaattaattctatacatctctttaatcccatacctagtttattcctgcagatgtggtatgtgcttagtgtgcttgattaattggaggttactaaatttgcctcattcacaggaggtttccacttttctggggatgcccagaaaagttagaagcaactattgaatagagacaataagacaccaagctacaaaaattcataggcttttactataaaatggtgattgactagattttcaag

SEQ ID NO: 241149 - DNA, 583 bp, Homo sapiens
agagcattttacttttttattttgcatgaacacccatgcaattcaatctcttattattttcgtaaaataaatttctagaagtgaatttcctgggttaaaaggtatgcaaaaatgtgatgcagagtttgcatcataattctgacagcagtatttcaaaggtaaattaattatttatatattggtgctgggtttttttcaattacaaatattataaaagtgtagaaaggcttaaaatgcttagttacctaaattaggcattatttcaacaattctccagggaggacttagacttgctctcttgaaaaaaaaaaaagaaatatagaatggcaaaatacattaagcaaagaattaattctatacatctctttaatcccatacctagtttattcctgcagatgtggtatgtgcttagtgtgcttgattaattggaggttactaaatttgcctcattcacaggaggtttccacttttctggggatgcccagaaaagttagaagcaactaytgaatagagacaataagacaccaagctacaaaaattcataggcttttactataaaatggtgattgactagattttcaag

SEQ ID NO: 241150 - DNA, 569 bp, Homo sapiens
taaatagtaaatatattttctaatccttatgattttctttataacattttcttttcactagcttactttaagaatatagtatataatacatgtaacattaaaaatacatgataatggactgtttatattatcaataaggcttccaatcagcagtaggctataaataattaagttttagggtagtcaaaatgtatatatagattttcaactgtacaggggatcagtgctcctaactcccacattggtcaaaagtcaatggtaatagttttcaaagaaatactccaacaaaaayattcattttgaatataattattttagatagttttggatacccttttctttattatttgatcaataatttaattagtcccccatataagaagagaataaaggctaatgtatctatacttgctttttgcagtgttagctattgactataaaagtcatcaaatatcagctaatgaggaaaattagaaaacccatgaagaattgcaaggcaagagtagagatctatttggaatactttggtgaagtttgccctaagtctggtaaaatcaatataatacctt

SEQ ID NO: 241151 - DNA, 569 bp, Homo sapiens
taaatagtaaatatattttctaatccttatgattttctttataacattttcttttcactagcttactttaagaatatagtatataatacatgtaacattaaaaatacatgataatggactgtttatattatcaataaggcttccaatcagcagtaggctataaataattaagttttagggtagtcaaaatgtatatatagattttcaactgtacaggggatcagtgctcctaactcccacattggtcaaaagtcaatggtaatagttttcaaagaaatactccaacaaaaatattmattttgaatataattattttagatagttttggatacccttttctttattatttgatcaataatttaattagtcccccatataagaagagaataaaggctaatgtatctatacttgctttttgcagtgttagctattgactataaaagtcatcaaatatcagctaatgaggaaaattagaaaacccatgaagaattgcaaggcaagagtagagatctatttggaatactttggtgaagtttgccctaagtctggtaaaatcaatataatacctt

SEQ ID NO: 241152 - DNA, 569 bp, Homo sapiens
tgagcaaattaaagtgttaaaaacacaataaggcaagtgacgagttggagaaatattcacaacatataaaactgacaaattgtttacatatttaatacataaataacttgtataaatcagtagaaagatggatactcttttattcaacaaatatttattaatgaatgtctattttatgacaagcactgtactaggctaaattaaaataaattttatgtaaatcacagagcatgtgaaacatttatctattaggcagttttagtaaacacacatttatcctttcttcaagtatctttgttttttctccttattcagtcaatatttgtggaatttttttaaagtatattaggattccttcagaatgggcaaatggtaaggtcaaaagttaagagtaataatttatcctttcatacyttggttggatttctcaagattgacctctaattgatctaaatactttttaactgaatactgccaaaataaaacttttatcttatgcagctatgctaaagataataaacataaagcagtaattgctgcatataaattgcttactatgagccaacttc

SEQ ID NO: 241153 - DNA, 600 bp, Homo sapiens
aggggccagctccaataacaccttcccagagagaccttccccttccatgattactcaattttagatagtatccttgaattttgtgttcaccattgcatttccttcttattttattcatagtacttattgttaacccatattttctatttgctttcttgcttgcagcctgtgtcttcaagttaaaaatgcaaactccctaagatcagggaggtattatctgttttactgttcctagcacagtgtctgtcacacattaggttggcaatacatttttgttgaacgaatgaatgatactaggtatgagtgagagggttgaaaaagaaatattatttacttttatattcaatgctatctagtggaaaaaattayataaatataatttcactcaaattttatttagccaagctctaggaagaaaaggtacatgatgtgaatgtgtataatggtgaatcttacaacagtctggaagagtcaggatagttgagactgtcttttaagctcaacttgaaagatgaggacaaactcattaagcaaaaaggtaggagaaaagcattccaaccagaagaaaatttttgcagttccaatgcatggaaagaggag

SEQ ID NO: 241154 - DNA, 598 bp, Homo sapiens
ccttgactgtggagaaaaaccctgctgtaggaaagaggcttgcaaatttgtgctatagttttaaaatattgttttatgtatttgcatgcaactacgcacattagaataatgtctttggattactttcataatattttgattagttattttcaaaatctcctttattttgcttcagttctgaggcttaaaattaatggtataacttgagccataaataagaaataccaatataacaaaacaacacacacttttatatatgcagggattgtccagaggcgtttggcaggaatataagcccttcatcagagggtttatagcggattcctattatcctaatatattaaaatttctaactgtacatgttataaattaggaaagaccatgaaatttgggagttatgyggattcgattgaatctctgctctgcacttaccaataagagctgccgccattcttattgagactctgttatgtgccaagcacttaaatcttatccttaaacctcgtcagaattctgtaaagtggttattaatatcctcattttgaatttgagggtaaatgctgaaagaggttaaaggccttgcacaaggtcattaaat

SEQ ID NO: 241155 - DNA, 598 bp, Homo sapiens
ccttgactgtggagaaaaaccctgctgtaggaaagaggcttgcaaatttgtgctatagttttaaaatattgttttatgtatttgcatgcaactacgcacattagaataatgtctttggattactttcataatattttgattagttattttcaaaatctcctttattttgcttcagttctgaggcttaaaattaatggtataacttgagccataaataagaaataccaatataacaaaacaacacacacttttatatatgcagggattgtccagaggcgtttggcaggaatataagcccttcatcagagggtttatagcggattcctattatcctaatatattaaaatttctaactgtacatgttataaattaggaaagaccatgaaatttgggagttatgtggattcgattgaatctctgctctgcacttaccaataagagctgccgccattcttattgagactctgttaygtgccaagcacttaaatcttatccttaaacctcgtcagaattctgtaaagtggttattaatatcctcattttgaatttgagggtaaatgctgaaagaggttaaaggccttgcacaaggtcattaaat

SEQ ID NO: 241156 - DNA, 597 bp, Homo sapiens
tgttattacaaacaaacctttgaatctttttttattaatgagcagctcaaaaagacgcctttcattcagaagaatgttggttcttctgattatctcccttttaaaaaagcttttcctttgttcacatgctgttctaagccagggatagtcaatgccacaagtcaatgcttgagaacagttaggrgtccagggcatctggagcgtgacataagaattcttaaggttcagaaggaaaaatgcaaagcagaatgcagtgcaatcttctattaatttataatttgcctttggccatccttggccccacccagtatccctcgccaattgaattagtaaacttcaaattaggttatttacttggtgaattatccacagtggctgaaacattattcccatcaaagaagatgtaaataccaactgaaggaacaagccaggacaaatatggaatcagacatagaatttatgcgtatacatgtctgtttttgcctcagtcattgtgatgtatttagttttgtcttcgaccaatttgcaaagacaaaaaagaaaatatattattatatcttagaaaaattgaatgcatgaataacattctatttgctc

SEQ ID NO: 241157 - DNA, 578 bp, Homo sapiens
attcacattactaaatcaaaataaaacctaatttctgtccatgaataacttgtatgcaaatcacagagtatatgcagcattcacgtaacaaagaggttataatgggttgtattttctttccrgtaatgttcttcatatgcttgaattttggtcacaattaacagaggcttcgtagaggcatttcatgatttttttcataataaaataggcagggagtgaggtagaaacaaaagtttcaaattgcttttcttcctttgacctatttcctaagtataagatataaatgactcaaatcatttttctaagctctagcaaaatgtaaactatagtttaagagcctgtggtgtctcttcactattatctaactacaaacatgtttctacccaaattgtaatcaaattagaggaaacaaagacaattacatatatattttttcactatcagcatttcattttattatgactttgatcacttctctattaagaacattttcaggaatatttataaatgtgtttatgacatcaagttgtgcaacccaagcagttgcaaaggatgctgtacttagggtgacttcctgc

SEQ ID NO: 241158 - DNA, 578 bp, Homo sapiens
attcacattactaaatcaaaataaaacctaatttctgtccatgaataacttgtatgcaaatcacagagtatatgcagcattcacgtaacaaagaggttataatgggttgtattttctttccggtaatgttcttcatatgcttgaattttggtcacaattaacagaggcttcgtagaggcatttcatgatttttttcataayaaaataggcagggagtgaggtagaaacaaaagtttcaaattgcttttcttcctttgacctatttcctaagtataagatataaatgactcaaatcatttttctaagctctagcaaaatgtaaactatagtttaagagcctgtggtgtctcttcactattatctaactacaaacatgtttctacccaaattgtaatcaaattagaggaaacaaagacaattacatatatattttttcactatcagcatttcattttattatgactttgatcacttctctattaagaacattttcaggaatatttataaatgtgtttatgacatcaagttgtgcaacccaagcagttgcaaaggatgctgtacttagggtgacttcctgc

SEQ ID NO: 241159 - DNA, 578 bp, Homo sapiens
attcacattactaaatcaaaataaaacctaatttctgtccatgaataacttgtatgcaaatcacagagtatatgcagcattcacgtaacaaagaggttataatgggttgtattttctttccggtaatgttcttcatatgcttgaattttggtcacaattaacagaggcttcgtagaggcatttcatgatttttttcataataaaataggcagggagtgaggtagaaacaaaagtttcaaattgcttttcttcctttgacctatttcctaagtataagatataaatgactcaaatcatttttctaagctctagcaaaatgtaaactatagtttaagagcctgtggtgtctcttcactattatctaactacaaacatgtttctacccaaattgtaatcaaattagaggaaacaaagacaattacatatatattttttcactatcagcatttcattttattatgaytttgatcacttctctattaagaacattttcaggaatatttataaatgtgtttatgacatcaagttgtgcaacccaagcagttgcaaaggatgctgtacttagggtgacttcctgc

SEQ ID NO: 241160 - DNA, 478 bp, Homo sapiens
ttttccctgagtagtgggtctcaacagtgggcttaaaatattcagtataccggctgagcacagtggctcatgcctgtaatcccagcactttgggagaccaaggcgggcagatcacatgaggtcaggagttagagaccagcctggccaacatagcgaaaccctgtctctactaaaaatagaaaaaaaatatctgggcatggtggcaggtggcaggagaatcacttgaacctgggggtggaggttgcagtgagccaagatcatgccacttcactccagcttgggcagaagagtgaaactccatatcaaaataawaataataataataataattcagtataccatgctgtaaacagatgggctgtcatccaggcattgttgttccattcatagagcatgggcaaagtggatttagcacagttcttaagtgacttaagattttcagaatagtaaatgagcattcacttctaggtaaagtcac

SEQ ID NO: 241161 - DNA, 602 bp, Homo sapiens
gggactctgagttctcatatatctgaaaatgttgctgttttaccctcacacttgattgaaaggtgatctgcgtatgattcagtgatgaacagcagttgccccgagaattttgaaggcattactccactatctctagcatctaatgttactactgataatttaaatgatatttcaatggtattcatttatatggtcaattttgaagttgatttttgtataaaaattttccaacgtacacaaaagttgcacaaacagcagaaagaatttttcctgaactatctgagaataaattatcaacctaaagcctcaacaccctgactactttagtgtgtatttcctatgaacaaagacatttaacattctttcacgataatgaaatgcagccatcaaaatcagaagattaacactgatgcaatactatcacttaagtcttttaactctttargccacctctttgaatcctattcaagtttgacccgttgttccaacaagacttatatttaaaagctccagttcagaatcaccccttgaaggtctctttagttttcttcatctggaacaactcttcggtttttccttgacttttataaccttgacactat

SEQ ID NO: 241162 - DNA, 602 bp, Homo sapiens
cgcttgagctccaaggttggaggccacagtgatttttgatggtgccacgaaactccagccttcgtgacagagtgagaccccgtctcaaaaacaaaaaacaaaaaacaaacaataggtgcacatatacatcgttaattaccaaaatmaataacatgtatatttaaaggaaagtttaggatgtgtccaaagagtttgaaggatcttagatataaaggatatttctttataatgtagaataatgtagaaatgagttgagtaaatataacagtttgagagaacaaaatcactggagaatgggagattagtggattaggaaaaaaaagggaactgtcaagaaaattaaagacaaggaggtgatagatatcagagcaaagaagaggaagctcttaacaatcactgagagccaactgcgaagactgggtgtagtttagaaagaaaaccagagaggattataggcagctcgaaaaaaaaaaagagagagataaacaagaatgagcagaaggctggtcttgattggtggtaatttgtacaccctgtagaaggatgtaaagaatatgggcttactgaggaaaaaaaaattaaacataaaaaattagtgaaaa

SEQ ID NO: 241163 - DNA, 602 bp, Homo sapiens
cgcttgagctccaaggttggaggccacagtgatttttgatggtgccacgaaactccagccttcgtgacagagtgagaccccgtctcaaaaacaaaaaacaaaaaacaaacaataggtgcacatatacatcgttaattaccaaaatcaataacatgtatatttaaaggaaagtttaggatgtgtccaaagagtttgaaggatcttagatataaaggatatttctttataatgtagaataatgtagaaatgagttgagtaaatataacagtttgagagaacaaaatcactggagaatrggagattagtggattaggaaaaaaaagggaactgtcaagaaaattaaagacaaggaggtgatagatatcagagcaaagaagaggaagctcttaacaatcactgagagccaactgcgaagactgggtgtagtttagaaagaaaaccagagaggattataggcagctcgaaaaaaaaaaagagagagataaacaagaatgagcagaaggctggtcttgattggtggtaatttgtacaccctgtagaaggatgtaaagaatatgggcttactgaggaaaaaaaaattaaacataaaaaattagtgaaaa

SEQ ID NO: 241164 - DNA, 602 bp, Homo sapiens
cgcttgagctccaaggttggaggccacagtgatttttgatggtgccacgaaactccagccttcgtgacagagtgagaccccgtctcaaaaacaaaaaacaaaaaacaaacaataggtgcacatatacatcgttaattaccaaaatcaataacatgtatatttaaaggaaagtttaggatgtgtccaaagagtttgaaggatcttagatataaaggatatttctttataatgtagaataatgtagaaatgagttgagtaaatataacagtttgagagaacaaaatcactggagaatgggagattagtggattaggaaaaaaaagggaactgtcaagaaaattaaagacaaggaggtgatagatatcagagcaaagaagaggaagctcttaacaatcactgagagccaactgcgaagactgggtgtagtttagaaagaaaascagagaggattataggcagctcgaaaaaaaaaaagagagagataaacaagaatgagcagaaggctggtcttgattggtggtaatttgtacaccctgtagaaggatgtaaagaatatgggcttactgaggaaaaaaaaattaaacataaaaaattagtgaaaa

SEQ ID NO: 241165 - DNA, 519 bp, Homo sapiens
  misc_feature (1)...(519): n = A,T,C or G
gtgttgcatggcncaggccatgggggacagccctcccgcccagggcccttttacctcctgccttttccgctcctcagtggagagctggtccaggatgcccaattccaccacctggggggacacaggcccaggagctctcggtcacacgtcctagaagcctgggccaaagtctcccttctttcctcctcctgatggaccagggccaacatggacagccaccccacggggctcaggtaggtccgatcctggagtaggcctgtcctgccgagggcctatccccgtcaccttcctctctgtgcaaccckccttgggtcagccccccgctcctcccagccgccagagccccaaagcagcccagaaagagcatggggcatccagagggagaggccagagggcggggggggatcttgtcccaaagatcttcctggcagatggagaggtgcggagcccacccagggagggagtgtggagggcaggactgtgactcagaccccacctgggcgaggcgagtcactgccc

SEQ ID NO: 241166 - DNA, 519 bp, Homo sapiens
  misc_feature (1)...(519): n = A,T,C or G
gtgttgcatggcncaggccatgggggacagccctcccgcccagggcccttttacctcctgccttttccgctcctcagtggagagctggtccaggatgcccaattccaccacctggggggacacaggcccaggagctctcggtcacacgtcctagaagcctgggccaaagtctcccttctttcctcctcctgatggaccagggccaacatggacagccaccccacggggctcaggtaggtccgatcctggagtaggcctgtcctgccgagggcctatccccgtcaccttcctctctgtgcaacccgccttgggtcagccccccgctccycccagccgccagagccccaaagcagcccagaaagagcatggggcatccagagggagaggccagagggcggggggggatcttgtcccaaagatcttcctggcagatggagaggtgcggagcccacccagggagggagtgtggagggcaggactgtgactcagaccccacctgggcgaggcgagtcactgccc

SEQ ID NO: 241167 - DNA, 621 bp, Homo sapiens
ttctgctactgatgaacacacaccaaccaaacagcaaggtgctaggaaatacagagaattccctcttctactgtttgcaatcaacaagacagcaattgttcttggttgaatggcttattctgggaattcttctgacaggagggatcagatagcatctgtctcttacaagcaaaggcattaagccaatgaagagttattattccagacaacaacaaatgaagtcagagcacggaaccaggtggtatcctgctcataaaaccacttgatgcaccaacattgtccttttttcttagctgggccaactaaggctaacttccttagctgcatgattcttaataaaataaaattatactaatctgaatgtctcttaaatatttagacagaagccctcaacagtgtagtaatgccaacaacactaggcccagcaatttatctatttattttcaaaagtttgagcaaagtagtaccttattacattatcaaggcctacaaaagtcgtgttttttctacaactttttttatccaacaaattcatttacaycttgtttctaccactcgaaatgtttaaaagcaaaaaagcagcatgtctttcattaaaataatttaattcaataatacaat

SEQ ID NO: 241168 - DNA, 532 bp, Homo sapiens
tctggtgtgtatagatgatatctttttatraaaataatggaacacagatttagtaatgacatcctgggcaggatgtcctaataatttccagggtcagtcatttcctttcccatgtattttcccctcttcgtggttctgttatgcatccctggtttcccttaattcctcagaaacatatcctagctactgaccaaagtgcccttcaaatataattaactggtaaatcctagatagacaccttatggttaccacgtgtatcaaataaaacaaacaaaaatcccccatttttttctcatttggtattaatggacttattcatcacccttggtcctaaattatgctgaagacagactaaagtacagtgatcttttagcaaacctatgttttctcaaaaatataggtttcagtaccaccaacccttctttttacttccttctctagaagccttaatgataaatgcttagcaagattttaaaccccaacagtaaaattataactattttgaaaacataatgcttgctacaggttaatt

SEQ ID NO: 241169 - DNA, 636 bp, Homo sapiens
agatctgaaccctgaatgtgtgtgtgaggcgctgccacgattaaaaacagaccggcaaaaacacacacacaaaaaaacaaacaaacaacarcaacaacaaaaaaaaaagaaagaaaagaaagaatgacttcgaatttggaaatttattttagaaatttagaaatacttgttggcttatatgtcacttgaaacttaatttgccattcaagatgttcattcatttaggagcacttcattcatttcagaagttcagccaggtgcaatgtgtaatcccagcacttcgggaggctgaggtgggtggatcacctgagcccaggagttagaggtcagcttgggcaacatggaccctctctctactaaaaaaagccaggcgtggtggctgcgcctgtaatcccaattacttgggaggttgaggtaagaggatggcttgagctgggaggtggaggttgcagtgagtgagctgagatcgttccactgcactccggcttaggtgacagagtgagaccctgtctcaaaaaaaaaaagaaaagaaaaccaaaaaaccaaagtttacattcacgaatgaaactggtgtctgcttttttccccctctcctttttatcgtatttggtaacaagtagaagattaaaaagttag

SEQ ID NO: 241170 - DNA, 636 bp, Homo sapiens
agatctgaaccctgaatgtgtgtgtgaggcgctgccacgattaaaaacagaccggcaaaaacacacacacaaaaaaacaaacaaacaacagcaacaamaaaaaaaaaagaaagaaaagaaagaatgacttcgaatttggaaatttattttagaaatttagaaatacttgttggcttatatgtcacttgaaacttaatttgccattcaagatgttcattcatttaggagcacttcattcatttcagaagttcagccaggtgcaatgtgtaatcccagcacttcgggaggctgaggtgggtggatcacctgagcccaggagttagaggtcagcttgggcaacatggaccctctctctactaaaaaaagccaggcgtggtggctgcgcctgtaatcccaattacttgggaggttgaggtaagaggatggcttgagctgggaggtggaggttgcagtgagtgagctgagatcgttccactgcactccggcttaggtgacagagtgagaccctgtctcaaaaaaaaaaagaaaagaaaaccaaaaaaccaaagtttacattcacgaatgaaactggtgtctgcttttttccccctctcctttttatcgtatttggtaacaagtagaagattaaaaagttag

SEQ ID NO: 241171 - DNA, 577 bp, Homo sapiens
ggctttgtctgaatttctttgggtttgtccttgtcggatttcactcatcttcttgggttacctatgtctactttaaaaattaaatttatagtcaaaaactttctgacaaagaaagcacaagtccttcatgtcttcactggtgaattccatcaaacctttaatgaagacataatataattgtcrgaagaatagctaatggatgctgggcttaatacttaagtgatgggataatctatgcagcaaaccaccatggcacacatttacctatgtaacaaacccatatatcctgtacatgtacccttgaacttaaaacaaaagtgaagaaaaaaaatcaattgtcgacagaatctcctagaaaattgaagaagaaggaatactttccaagtgattctattctagcaatactatgtaaataacagccagataaatatttatgatagacatagataaaataattcttaataaatgttagtgaaattgaaatcaataacatgtaaataaattagtgtaattcactatattaacagactaaaaatgaaaaactctgtgaacatctcaataaatacaaaaaaaaagc

SEQ ID NO: 241172 - DNA, 549 bp, Homo sapiens
aaatgtacttaatatgttccttttgaagattaaatgagaaaatgtgtgcataatttcagcatgtgctacatacagtaggtgttcaataaatagcagcttcctctcctatttgtcttctatgtgctgtgcaaatayttttccctaaggacaacttgattacagctcctcaagcatgtttgaccactgcctatggagtagaatccaaattcctcagcatttccaccttattttcaataataatattaatgatgtaaactaaaaataaaattctaagcccttgaccatctgaatggacttgccctcttggccaagggcattccaaacttttaacctgaaaaactagttcaggccatgatgggagtgagattggggagagggtcagacatgcctcattttaccctccttttggaattcaggaaaagttgactggcattttcatcaacacagacgtgaagactgatagaacagactctttaagtctgacaagaaacatttacagtctattctctctgaaacctgctatggtggaggctaagtgataaaaccttg

SEQ ID NO: 241173 - DNA, 493 bp, Homo sapiens
attcatccttcaagattcagttgaacctactctttggaatcattttcaaccagaggtggtgtatgatttagaaaagattgagcacatggcttctagtcttcgctgtaccatctcttgagttccacttgtacatatgtaaaatgaaagcartgggccagatgacccctgagtgttgttttattttttagctctacttataagggaacacttccatttgcactaaatatactgtatgaatgtttaagtatttctgggtatcttgagtattcagaggtggcactaatgaaggagtgtaggctttccctgcaatgttgaaccttggtgtacattttgtcctctttaaaaaaccaatcaaacaaatttgctacctagaatacagtgtgtataggtcttttggtcattagccttataataggtagtcatttaaaatattttccaaagttacttaggtaatttcttgttttccatacctcattcataatagttttattac

SEQ ID NO: 241174 - DNA, 589 bp, Homo sapiens
ttgtgtagcacttcccccttctctctctctctctcctgctgccacgtgaagaagtgctggcttccaagcacttgatttggcccttctgccaggattgttaagtttcctgaggcctccccagtcatgcctcctgtacagcctgcagaactgtgagttcaattaaacctcttttcttcataaattacccagtctcaggtagttctttataacagtatgagaatggacgaatacgggtacacatcaacataaagatggaaataatggacactggkgactccaaaagggggagggtgggaagatggaaagggttaaaaaggtaccaattgggtacaatgctcactatttgggtgatgggtacactagaaacctaatgcccaccagtatgcaatatacccatgtaacaaacatgcacatgtacccccgaacctaaaattaaatttttaaaaaaagaatgcatcctagtgtgactggggacatttgcataatcaagggcaattcccataacttcttccttatcttgatttctctgcctctgtaggggctgaggctgggctaagcttggagatgctggaactcacagtgatgggga

SEQ ID NO: 241175 - DNA, 596 bp, Homo sapiens
gaattcaactggctgttaataatagaaactttctgttgaaaattctagcaaagtgcataaagaagaccagcaaaaaaaaaaaaaatttmtattctgacatcgggatggggcttgtgggttcaaacaagaagaagaagaaagtattaaatcagtataaatccatcagaccttccatatacatgaataagatagacactgaatggacactggagatgcaggtgggtctgtgttgctgagattcaagatcatgagtttaattaaataattaattaaattgctgttgttattgttgctatcattgtttaactattctagttggattttagatataaacatataatcaatgtaggtatccaaaatacataggtttttgagcttatggcatgagaagataatagggggagtacaaagaaggaaactagaggagtattatcttttaccctgcaaactgtggaaaagaaacataaaagggaaactcatacagcagaccactgattcctatttcaggggaatatcttgtggctggacaaaagttgtacctaaggaacagggatggattttctgatgtttatattaaaagccactagaagacagga

SEQ ID NO: 241176 - DNA, 571 bp, Homo sapiens
gaattcaactggctgttaataatagaaactttctgttgaaaattctagcaaagtgcataaagaagaccagcaaaaaaaaaaaaaatttatattctgacatcgggatggggcttgtgggttcaaacaagaagaagaagaaagtattaaatcagtataaatccatcagaccttccatatacatgaataagatagacactgaatggacactggagatgcaggtgggtctgtgttgctgagattcaagatcatgagtttaattaaataattaattaaattgctgttgttattgttgctatcattgtttaactattctagttggattttagrtataaacatataatcaatgtaggtatccaaaatacataggtttttgagcttatggcatgagaagataatagggggagtacaaagaaggaaactagaggagtattatcttttaccctgcaaactgtggaaaagaaacataaaagggaaactcatacagcagaccactgattcctatttcaggggaatatcttgtggctggacaaaagttgtacctaaggaacagggatggattttctgatgttta

SEQ ID NO: 241177 - DNA, 489 bp, Homo sapiens
cccccaaatctcaaaccattacagcatgaactcaaaatcctaagactcgtcagctcagaactcccaaatttcatcatctaactcattaggcattgttcggatataggcatgggctgtttcaactgcaacattccaggagtgagattttacttccattttattctgcctgcccctrtgccaacaaactaatcatccttatgttatcagtaaaggcctttctccttggaattacttttagattatctcttttcacaatatggaaacatcaatgattagaagcattgtgccatttggtgcctcaaattgctggaatctgaatttatccacagtctcttctatgttctaagttgctattatttatttttcataacttctgccaaaaatgtttcaacaaagatacacgggggttgaaggacacttcattcataaacaatggcagaaaagatggtaaaacactcctggtatctttatgtgttgcttttagtttta

SEQ ID NO: 241178 - DNA, 608 bp, Homo sapiens
tttttatgcgaaatttccaagtagactggggttaccaactttgttgttatgaattattttgttccccacatggatgtttagtaacataaatataygcactgtgtctttgaaaaccagggttgtgagtgtcttacacagaggaaaggagaatggttaaagagccattaaaggcatgtccctgctttcctctctaatgctccttgcagccctgggtttggccatctgccctttgctttagatatctgtccactcatccacaggcctttcctattatcttgaaagattccaaacttcttcaagtgattacttttctaagcttttatagtccattttctcacttttaactggtttatgatgagaggttctttcattaattgtgcaataaggcttcaatccacacaggttttctgagattacaatgaattttttccctgggtctttctgactctaaatcacttgtgaaatttcttggcagtaaaagaacaaatcttctttgttgttgttgttgttgtaccaatgtaaatagtgtgtttggtcataacaaaaccaaggcagtcttttttttttttttttatcttcaagggatgatgacgaaatacaaagcgatg

SEQ ID NO: 241179 - DNA, 713 bp, Homo sapiens
aaaaagaatgaggatggtctttaccaatagtcatgaagagatttccaraagaaatttaaaaaagcaagaacaaaatatagagcagtgtgtatggtgttgctaccattggtataaaaatgggaatgtatataattcagttgcatgtgtattacacattggaaactacagaagtaggtgcaaggggattagaggtgaggagaactttcccccatatgtactttagtttgagattttaaatttgccactatgttaaagatagtttagaaagaagttggctctttgctaaacgaaggttgaaatggtttaagtacaaagtgttagtcagagtcaagaataaaatgcaaaggaaaacaggtttttaatttatgtgcgacttcaatgttaatacttttgattctttttactttcatatttgtgtgtagatattgtgggaaaaatgaatttttttccttctttcttgataagcattttgatagagagcttacttgataaataaaaggtatttcaaaccaataaaattttcaggaccaaacaaaagacacaacttttaattagaaaattttatgtaagcctaaaaaataaaaatgcttaatgtaggaaactaattataggtgaaaaacacaattgaatattgtacaataccaatcaagttttagaacatgaaggtataaagttcaaaataaaattattttgataagatttcaaattaatgt

SEQ ID NO: 241180 - DNA, 464 bp, Homo sapiens
gacattttctccatcaaacctgcctcccactctcccattcccaaagtcgtcttcatttcaattagtgaggactccattcttccagtttgcaggacaaacctaatraatagcctctacacttctttctttcacatatacaaaatctgtccacttatctactgtgttggttctaccttccggtgagacttacaacccaatggcttctcatcaccttccatcactttgtacaagcccctctccagcctcacctggatcatcacattagctcctaactgatctctactgacactcttgctacgctttcctcagtctattttcaacacagtgtcaagtaagacaggtcgtgtccctcttctaagcataaccctccattgtttcctatttaatgcaaaggaaaagccaacacctatggtgacgccctctaaggccttatctgatctgccttcctcaccgccactccccaa

SEQ ID NO: 241181 - DNA, 464 bp, Homo sapiens
gacattttctccatcaaacctgcctcccactctcccattcccaaagtcgtcttcatttcaattagtgaggactccattcttccagtttgcaggacaaacctaatgaatagcctctacacttctttctttcacatatacaaaatctgtccacttatctactgtgttggttctaccttccggtgagacttacaacccaatggcttctcatcaccttccatcactttgtacaagcccctctccagcctcacctggatcatcacattagctcctaactgatctctactgacactcttgctacgctttcctcagtctattttcaacacagtgtcaagtaagwcaggtcgtgtccctcttctaagcataaccctccattgtttcctatttaatgcaaaggaaaagccaacacctatggtgacgccctctaaggccttatctgatctgccttcctcaccgccactccccaa

SEQ ID NO: 241182 - DNA, 576 bp, Homo sapiens
cactccagcctcttttccatttcatcctgagtgcatcctattacttagccctcrctggatcactcacaggtctttgaatatgacctgtgctttcatgactataaggttttgttcatgctgtctcctctgaaccttatgcccttcttttcaattgacttctattgggagattggcatttattcattattttttcttaaatagcatttattgagtccattctacttgccatgcaatgtggtaggccctgtgcctgtcctcaaggggctgagactccagactgggaagaggctcattaaggaaacaatcacacatctacaatatacactacaatacatacacagactaaggcagagacctgaagggacaatgcaaaatttcactttaaatatatgcaagaccataaaacaccatttcaaaagcatagaagaggaagggtttctcaattcagagaccagggaaaagtccagggtggcaaaagtgaaggtcaagttggggaaagtgtgttgccgaaatgtttcttttttgcactctcactccctccccagcgactcaaaggtcagattctgttggaagctt

SEQ ID NO: 241183 - DNA, 564 bp, Homo sapiens
aaaacaaaatatatcagatttttcaataattcattcctatgcaaaccagtcattgtcttgacaattgattttgacttcaacaatgtaatatatataaagagagagagagagagcagaagcaaatgcagcctgcctttccttagcttactaaattgtcgaatcaaaacaatggagagaggcaaaaaaaaatgtataaagcaggtggaatagtattgagcttatggaggagtagaaagtgaaagataacttgccaattgatttgaaaacatggatcgaggctgagaaactccttacttgagtaggatttgaaacggcgtctcctagtcttttctagctttaacagctrtttgtaaaacccctcatccgtgtttctaacaagtactgcttcctgctacaggtcgatacatacagtaattctcctacttgcagccaaaagtatttttctggagagttctgtctttctgatggtaaagtacaaagtcaggtgttatgatcaaggggtggctggcaccatctccaatactgtgacgttacatgtacgatttaatggttccctctcttcag

SEQ ID NO: 241184 - DNA, 572 bp, Homo sapiens
aagcttcagttagctgtaatcctgccactgcactccagcctgggtgatggagcaagaacctgtctcaaacaaacgaacgaacaaaaaactggtaacatttactgrtatttctatatctggcaattttcccgaaacttcacataaagtatcttgcacggctgtcacagcatcctcatgaggaagattttattattgtacctattttataggtaagaaaattatgtttagaaaaagtttaagatttgccccaaacagacaactaggaggtggtacagccagaagtctgcctcttgagctttatcagccgatagctaagtataaagaaaggcagatacacccattgacgtaatttggatatttgtccccacccaaatctcacgttgaattgcaatctgcaatgctggagggccagcctggtgggaggtgtttggatcacgggggcagatctctcctggcttgctgctctctttatgatagtgagtgagttctcgcaagatctgcttgtttaaaagcgtgtggcaccttccccgcaactctttctcttgctcctgcattcgtcatgtaaagtgcct

SEQ ID NO: 241185 - DNA, 584 bp, Homo sapiens
gctgtccatctgaccatgtacaatcattagaaaagaaagtaggtagaagagagggatgagagtctaacctatatacagaggggtcgccaaggtgtagtatgggaccagaggctatcagagaccttcattctgggatcttaagcctctagagtagcccaaagcccattctcagctgagagcccagccatacaggtggatgtggcaagagagccaagcatcatgcccaatactgacactcgttaagacccagatatccttgtatgtatggtaagacacctcactatcaaaacttyatgcccaaagacaagaggtgtcagatcagaagacctcactggagaacagacaggagatcctggacatagcaaggaggctacaaactgctttcattatcatttcagctgccactataattctgttgcctagttgatgggaatggccatcccgagcagaaggggtaataggccatcaatcgggaaaggcttctgaagatgatgcttcagacaggatcaagtcgaggatccagggtgtgatcagtaagactgccagaatctgtctgcaggcccctggatagaatactacttctt

SEQ ID NO: 241186 - DNA, 687 bp, Homo sapiens
actggtaacttggtgtccttagctgttaatagtaaaagcaagcttgactatgtaaagtaatgaatatggagtacagacaacttattaacactttaagttcaggggtatgtgtgcaggtttgttacataggtagacttgggtcatgggggtttatatagattttgtcacccaggtattaagcctactacccgttagttatttttacctgatcctctccttcctcccaccctctattaagccccagtgtgtggtgttcccctgtgtcrtgtgtcctcatttagctcccacttacaagtgaatatgcagtatctggtcttctgttcctgaatttgctaaggataatggcctccagctcatccatgttactgcaaagagcatgatcttgttcttttgtggctgcctagtattccatggtgtatatgtaccacactctttatccagtctatcattggtcatttaagtggatttcgtgtctttgctattgtgaagagtgctgcagtgaacatacatgtgcatgtgtctttgatagaatgacttatatgtctctgggtctatacctggtaatgggtttcctgggttgaatagtatttgtctttagacctttgaggaatcgccactgtcttccacagtggctgaactaattcacactcccaacagtgtataagcattctttttctccacaatctt

SEQ ID NO: 241187 - DNA, 574 bp, Homo sapiens
tcaaacctcaaaccaagtaggttaataaaagataggccatgtcagcttggataaccaccgagataaaaatcccaggaacagccaggaagacacactatggatcatggctcatctctcaaacccacaagaagccagaagacagtaaccatctaaacagtgccgagggagagaacccagagctctatatctgaccaataaaaaaaaaaaaaatcccckttagaagttgatgtgagacagagatacagacaaaagcttaggatgttaccagcagagtcatacttaatactgagggaaattctttagtgagaaggcaggtcattccagatagaattgcaggtcagctggcaggaatcaagtacacaggaaaggtgaaagtcagaagaaatgagttgagattcagaggaaaggtttgtacacaaacaaggcggaaagaagccttgcttgagcacagcagtccctagttaaggctgacaagctgcatattcagtagctggttactagaatcacttcccatcccaggaatgcgagctgctgtgacaggtcaacaggtctgacaggagaccccaggaggctt

SEQ ID NO: 241188 - DNA, 546 bp, Homo sapiens
caagctggctttacaactcacccccacaaaaagccccaaaacaagtatacagtaccaagactatcaccagccatatatcagaactgaaatatgagaatgagactcttcttggggccacagagaagtgaaaaaactgagaagatgataaaagaatcaaacttacacatccacaatgcctctcacctcagtctgcccagcactaaccatgtggaaaatttcccctgactcacagtttctacactggaataagtgaggtcaagttgggcaattagtttcctcattattttgggttccctggcaggtgacctgtctctacttcaacccatgggaagaattgcaagtgwctgaggtgagaaatacccctaaggtcacccagaacaatgggggatataggactaccattcccagccctggaaactctgttctgtaacttgtgcaaaggagatgccaagtcagagtggctgttcagcagcaccatgctgtaggagttctcctaggcatgaactcctagttagtctccccacacagctgggatattccctctgg

SEQ ID NO: 241189 - DNA, 586 bp, Homo sapiens
ggcctggcattttctctataggaatgttttttaactacagaattgattttaaaaacaaacaaacaaatacgaactgggctctaaaatcaggaagaagaacaatgttgtctgcatccactacttcttttcaacattgtactagagattctagccagagaaactagggaggaaaaagaaataaaaggcatccatgttggaaggaagatgtgaaactatctctatttgcagatgacatgatcctgtaggcagaatattctaaagaatatgcacacacgcacacatacacacaaactactggagctagtaaatgactaggaaaaatgtgggatacaaaatccaaatatagaaatygattgtatttctgtagtctagcaaacaattatcagaatataaaatttaaaaataattccacctacaataccatcaagaagaataaaatacttagaaataaatgcaaccaaaaagttaaagatttgtacactaaaaatgacagaacattattaaaagcaatgaaagggaacctaaataaatggaaagatatcccatgctcctggattggaacacttaatattactaggatagcagt

SEQ ID NO: 241190 - DNA, 586 bp, Homo sapiens
ggcctggcattttctctataggaatgttttttaactacagaattgattttaaaaacaaacaaacaaatacgaactgggctctaaaatcaggaagaagaacaatgttgtctgcatccactacttcttttcaacattgtactagagattctagccagagaaactagggaggaaaaagaaataaaaggcatccatgttggaaggaagatgtgaaactatctctatttgcagatgacatgatcctgtaggcagaatattctaaagaatatgcacacacgcacacatacacacaaactactggagctagtaaatgactaggaaaaatgtgggatacaaaatccaaatatagaaatcgattgtatttctgtagtctagcaaacaattatcagaatataaaatttaaaaataattccacctacaataccatcaagaagaataaaatacttagaaataaatgcaaccaaaaagttaaagatttgtacactaaaaatgacagaacattattaaaagcaatgaaagggaacctaaataaatggaaagatatcccatgctcctggaytggaacacttaatattactaggatagcagt

SEQ ID NO: 241191 - DNA, 555 bp, Homo sapiens
tagacagtctggccctgggagcctattcccatctcctagactatgatgttataatgcttgaagtttgtctgtcactaacaggtctcagggctgggagggccacgtgagaacctagatggacccgatttycccacagttttctctacaaaacccgtctgggcttaagccgtttgaagctagttccatgccacagttctgcattattttgtgttaagctagacctcaggtccttatagagagcttcaaacttctacaccaaccattgggtgtttactggcctctttccccttttctttccccaatttctgctgtctaaacagattccatcatccccagaaatgctgcctggacccagagtcagatcccatgagatccagtgtcttaccgccctgccctgctttgtcacccatacccagcagaggccctctgcctgggtcatttgtttctacctcagcacatcctagggctagggtgaggaagcccacagaagttaacatcttcccagaaccctctaggcttctcatgcttgtttcctaggatattagtctagaacac

SEQ ID NO: 241192 - DNA, 555 bp, Homo sapiens
tagacagtctggccctgggagcctattcccatctcctagactatgatgttataatgcttgaagtttgtctgtcactaacaggtctcagggctgggagggccacgtgagaacctagatggacccgatttccccacagttttctctacaaaacccgtctgggcttaagccgtttgaagcwagttccatgccacagttctgcattattttgtgttaagctagacctcaggtccttatagagagcttcaaacttctacaccaaccattgggtgtttactggcctctttccccttttctttccccaatttctgctgtctaaacagattccatcatccccagaaatgctgcctggacccagagtcagatcccatgagatccagtgtcttaccgccctgccctgctttgtcacccatacccagcagaggccctctgcctgggtcatttgtttctacctcagcacatcctagggctagggtgaggaagcccacagaagttaacatcttcccagaaccctctaggcttctcatgcttgtttcctaggatattagtctagaacac

SEQ ID NO: 241193 - DNA, 555 bp, Homo sapiens
tagacagtctggccctgggagcctattcccatctcctagactatgatgttataatgcttgaagtttgtctgtcactaacaggtctcagggctgggagggccacgtgagaacctagatggacccgatttccccacagttttctctacaaaacccgtctgggcttaagccgtttgaagctagttccatgccacagttctgcattattttgtgttaagctagacctcaggtccttatagagagcttcaaacttctacaccaaccattgggtgtttactggcctctttccycttttctttccccaatttctgctgtctaaacagattccatcatccccagaaatgctgcctggacccagagtcagatcccatgagatccagtgtcttaccgccctgccctgctttgtcacccatacccagcagaggccctctgcctgggtcatttgtttctacctcagcacatcctagggctagggtgaggaagcccacagaagttaacatcttcccagaaccctctaggcttctcatgcttgtttcctaggatattagtctagaacac

SEQ ID NO: 241194 - DNA, 574 bp, Homo sapiens
gaatcatgaataaggatcgccctgctaactcaatttcacttgtcagctttaagctttcatactgcactctaagttcacacaaataccacaaaatgtgtgtgcatgcatgtatatatatatatatacatatgtatatttacatatataaataaactatactgctgttatgtaattccctcaggacacaaaaacsttttctggcaagagcctcatgtttcagcctttgagagatgttgacacgttaagttccccatcttcactccccagcatcccttccccccgcaattcatgactttcctctggtttagtacaggagttcctctccagtgcagttggagaaactcatattagctctaagcaggaacttccctaggcaagtttcagtgccttagagtgacagcaagcctgagtgtggggaaggagactcaggggcctcccgtcccaccctctggttccagagactctgtgatgcatccatacgcagaagttcagcagataggtcagcaaagaaacccaaactctccaagccaggctgcctggggagtgtccacgccagtaccagagcttcagagcc

SEQ ID NO: 241195 - DNA, 489 bp, Homo sapiens
cattcaacccccaagcttagaagggccccaaagtcatagctgcagggagcaactaggttcacaggaacagcaatgattccctgtcacagctgaggcaaggagatgggcagtgatgaagttggtagggagacaacttcccagtccatgaggacaagcgtcagtccaggtaatagtaagcagtgccatcataacagattcagatccaggcagtgtgacaaaggtttcttttgttcacatcaagggggtaaggtggtatgcgcaaggctcttcctagtgtaggcctaggtatggcctgtcttcagctkcattgtctagaataggtggagcctccaggcagggtcacttctgcatggcaaaagcctggggaaggcagagccactccaattcctcaagccagaagcaacattgcctttactcatatcatgttgggggagatcagtcatgtgaccagaagcacggggactaggaaatagagaaggcatatagatg

SEQ ID NO: 241196 - DNA, 288 bp, Homo sapiens
gttcccaggagacaccagcatactcccctccacagagcaaaggctagcagtgggtcacaagcccatccctaaaccaaccactacaaagaggaatgaaattaacaggttcrggtcaaagtaattccttggaggagaggatgggatgttggggattcaaacacaaagactactccagtgttgtaataagggtgtgtttatgatgttctcatcagccaggcccagtaagagaggagagtaggcaccaaacctttcatagctggagtgcatggctgtatgtaactgtcctag

SEQ ID NO: 241197 - DNA, 453 bp, Homo sapiens
caacgcaggtttgaaaattatacttatttgaaaactgagggaagcctgaaaacagagacacttggagctgtcttcctttggcaaacacagcagcatcgtctgttcccagaggacaaaatcctggcagtgatgccttcgtttagactgtctacaggccagtctagtccccagtggcttcctgcaaccagcaagagaaggaaggacactcagcaaagggataaatgacgggtttcttggcttaccagtcttgtcctgccccacagcaatcaaaagcttwtatggtcagaggcaaagtatatttccataaaagattccccaaaaccagacattttctaaaaatgatttgctcaagatgatagattcttgaaaatttctttcaagaatcttgaaagaaattttccaggcaatagcttcacaagctatccatagcactttattctctccatgaagacc

SEQ ID NO: 241198 - DNA, 442 bp, Homo sapiens
catttatctaatacatataagcacacttcaaggggcagtagcacaatctgaggagacaagtatcaggataaaattcagatataatatagccactggaattatcagagagggaatttttttatatagatttatggagtacaggtatagatttgttacatggatatattgcatagtggagaagtttgagtttttagtgtaaccatcacccaaatagtgtacattttacctattaggtattttctcatccctcaccaccctcctgcctttctaggtctccgtggaataccacygaagcataaaaaagaataaaatcatgtcttttatagcaccatggatggaactgaaggtcattatcaaaagtgaaataaccccaaaacagaaagtcaaatactgcatattctcctttataagtgggagctaaataatgtgtacacatagatac

SEQ ID NO: 241199 - DNA, 638 bp, Homo sapiens
ttaatccaactttatcaataatcatattaaatgtgaatgatctaaataaaccagttttaaaaatagatattgttggagaggatttttttaaagggtccaactgtatgttctctagaagaaacccactttaaaaacatgaaaagattaaaagtaaaggagtagagaaaaaactatcatgttaacatcaaccaaaagaaagctggagtagctgtattaattttagacaaaatagagttctgagcaaaaaaaaaattatcagagataaagatgggcattacataatgataaaggggtcaattctctaataagacataacaactattaacatccctaacaacatccctaatatccctaacaaaatacgtgaagcaaaaactgctaaaactacaatgagatatagagaaatagactatttatagttggagatttcaayatccctgtttcagcaactgatagaacaagcaggtagaaaatcagtaaaaacaaacaaacaaaaagcaaaacaacaacaacaaaaaattggcctgaatagcactagtaatcaacttgatctagttgacacttataaaatactacatcaaccaatgacagaatacacatgcttctcaagttcacatgacacactcaccaagacaggc

SEQ ID NO: 241200 - DNA, 638 bp, Homo sapiens
ttaatccaactttatcaataatcatattaaatgtgaatgatctaaataaaccagttttaaaaatagatattgttggagaggatttttttaaagggtccaactgtatgttctctagaagaaacccactttaaaaacatgaaaagattaaaagtaaaggagtagagaaaaaactatcatgttaacatcaaccaaaagaaagctggagtagctgtattaattttagacaaaatagagttctgagcaaaaaaaaaattatcagagataaagatgggcattacataatgataaaggggtcaattctctaataagacataacaactattaacatccctaacaacatccctaatatccctaacaaaatacgtgaagcaaaaactgctaaaactacaatgagatatagagaaatagactatttatagttggagatttcaatatccctgtttcagcaactgatagaacaagcaggtagaaaatcagtaaaaacaaacaaacaaaaagcaaaacaacaacaacaaaaaattggcctgaatagcactagtaatcaacttgatctagttgacacttataaaatactacatcaaccaatgrcagaatacacatgcttctcaagttcacatgacacactcaccaagacaggc

SEQ ID NO: 241201 - DNA, 563 bp, Homo sapiens
ctgacacatgctactaaatggatgaaccttgaggatattatgctcggtgaaataagccagtcacaaataaacaaaaaatgtataattccacttayatgaagtactcagagtagtcaaattcatacagacagaaagttggtaattaccaggggctggagggggtgagaaatgggaagttattgcttaatgggtaaagagtttcagttcgagcagattagttctggagatggatggtggcgataggtgcacaacattgtaaatgtacttaatgccgctacttaaaatgttgtgccccagcactttgggaggccgaggtgggtggatcatgaggtcaagagatcgagaacatcctggccaacatggtgaaaccccgtctctactaaaaatacaaaaagtagctgggcgtggtggggcgtgcctgtagtcccagctgctccggaggctgagacaggagaatcacttgaacccgggaggtggagcttgcagtgagccgagatcgcgctactccactccagcctggcgacagagcaaaactccatctcaaaaaaaccccccatagaaca

SEQ ID NO: 241202 - DNA, 563 bp, Homo sapiens
ctgacacatgctactaaatggatgaaccttgaggatattatgctcggtgaaataagccagtcacaaataaacaaaaaatgtataattccacttacatgaagtactcagagtagtcaaattcatacagacagaaagttggtaattaccaggggctggagggggtgagaaatgggaagttattgcttaatgggtaaagagtttcagttcgagcagattagttctggagatggatggtggcgataggtgcacaacattgtaaatgtacttaatgccgctacttaaaatgttgtgccccagcactttgggaggccgaggtgggtggatcatgaggtcaagagatcgagaacatcctggccaacatggkgaaaccccgtctctactaaaaatacaaaaagtagctgggcgtggtggggcgtgcctgtagtcccagctgctccggaggctgagacaggagaatcacttgaacccgggaggtggagcttgcagtgagccgagatcgcgctactccactccagcctggcgacagagcaaaactccatctcaaaaaaaccccccatagaaca

SEQ ID NO: 241203 - DNA, 526 bp, Homo sapiens
aaacaacagacaacagcagaaataggtcagcccagatatcatatttgggattattaggcatagattataaaacaagtaatatcatcaagttcaaaataataaacaaaaagttcaaaaatatctataggaaataaaaaaccataaaaaatgacaaagaagagacttagggcttcaagttctttcaatgtaacaaaaacctggaaaagagtagaaatcacatcacttcttattcctggagcttcttctctgattctgatcagcaatacaattttcaacatggtcaatgaatatacctcaaagaatcaggtaacagaatatatcttgtttatgctgtctrtgacatagttatctcagaaagtcagtggaaataattgttcatgaccccttctcacacaacataaacctccaaacaaacaagaataaactgagttccatttagttgcttttagcatatagtaagtagaaatataaataatcactattttatctttttaccacataggatgttattttagcacttatagac

SEQ ID NO: 241204 - DNA, 544 bp, Homo sapiens
cagtaaaattgctgagtcatatatatttgttactaactttttaagaaactgccacactgttttccaaagtgtctgtaccacttgatatttccaacaaatttgcatgatgattccaggttctccacttgattatcaacacttggaattgtctttgtgtttatagccactttaatgagtgtrtagaggtatatcattatgattttaatttgcatttcccttacaactcacatagttaaatctattttatgcaccatgattggcaatttgaatattctctttagtaaagtgtctactcaaatcttttgctcatttaaattttatttttgagtataaaactctttatatagtctagatacaagttctttatcaaaaatatgactggcaaatgttttctccctatgaagaacttgtttttccattggcttagtgatattttttgtaacacaaacattttacattttgataaggttcaatttgtctgtttttttatgcaccatgtttttggggtcattcattaggaacttttcatctactcaagatcaca

SEQ ID NO: 241205 - DNA, 282 bp, Homo sapiens
caggattcttcctgactcgaagccacttaattttttttttttttttagagaatttactttagaaaacttgtaaattattttcctgtcattttaaaatgtaaatatttttgaaagcctcttgccaatttttcaacccaggaatgtctttctcaagaaccagggagtcatctatttaaagtgyaatcatcaggaaagatagtgcccctattgcccactctctgtaggaaggtaggagcctaacttctggcatgccctgatgccagttaaaaaactacttcctgc

SEQ ID NO: 241206 - DNA, 641 bp, Homo sapiens
tagctaatactactatttaatgatatttggaaattgatgaggacacttctgattgctatagacttagcagtgctactggtgggtagagtatagatggcagggatgtttaaatcctgcattgtgtgggggtagtgtcaaatgtcaaatgttaaaccatgaaggtggttcctggtgatattcactttgtaaaaaaaaaatatatatatattatatatatatatataatatatatatatatgctttgtttatttcttttgtttttcttgtttttttgttttgattttcttttattatactttaagttctgagatacatgtgcagaacgtgcaggtttgttacatagatgtacatgtgcctttgtggtttgytgcacccatcaatccatcatctacattaggtatttttcctaatgctagcactcaccttgccctccaccctccgacaagcccctgtgtgtgatgttcgcctcgctgtgcctgtatattctcattgttcaactcccactgatgagtgagaacatgcggtgtttgatttcctgccgctgtgttagtttgctgagaattatggtttccagcttcatccatgtacctgcaaaagatatgaactcactcttttttatggctgcatcttatttcgtggtg

SEQ ID NO: 241207 - DNA, 367 bp, Homo sapiens
aattaggcacaataaagagaatataaggagtacttatagtatggaaggtgcagatttaaagatcaatatcattagacaaacttggtgaagattaaactggtaggaaaaatgttcctctgtcatcagcaagcttttattcaaatgttattttctcttacagtttcaagtagttgtatgtgtcatttctayacacaatgatgtccatagacagagaaaggacccctggatgtcttgtgtttctttcttggggataaacaatccccctttagatgtcctcaggagatctctttcaagtttctatgggcatgattaggccacatgttcatgcagcaggaaggatctcaaagtacagggctgtactcaggtc

SEQ ID NO: 241208 - DNA, 560 bp, Homo sapiens
tctccactctgtgctgacgagaacccattttcaggagtcttccatttcatagaataaaagaagatcagcacttcatatcttcatttgaggcaaaatggagcctattcaaaagagagtgtttagggatactgaagaaaggaaacaccctcttttccttaaattcttcatcttcatcttcccaggtgatccagcctacaacatggggagtcatcctagattccaccckcaaattcattcccccacacccacccattgccagctccttgagtcccagcaagcttaacaccccctaaaatcctgaaagctttcctacacaatcctaagccccgccttctacctccaaaatacacctcgagttgacccacttctagccatccccatggccacttctccaatgtaaggcagcagcaagcctcgccttgatcactgcagaccccttctaactactctctccaatctctcatcaccacacctgagtgccagatgggctcatctagccaaatggaatcatgccactccactgcttaaagccctttcatcctttacattctacttagcat

SEQ ID NO: 241209 - DNA, 575 bp, Homo sapiens
ttgctcaatgactgatctgttccctgagcacaggggagaaaggaatgagagggagagggtgacgactctgttcttctcagcgctttgatggtrcggttctatctcagcaggctccacttcaaagccctttgccagtggtcgttaatgagtcctcccttctccagatggaagaggactttgctgacaggaagggaggtcaagtgctggctcagtaccttccagctgggattaagacatcagaagccctggggtaatgtaagcatgttctgaatactagatcctaagactaaagggagctgaaaatcagctagataattccatctgaaatgaatatttcttagagtcagggaggcagcctttttttttttcctttgggcattgcaaggaagtgcttatgaaacaggaagcccagtgtcctaggcttggtggtagtcaggctcatgttaccctaggaaggatatctgccctgccaccagggggtccttgtactccaggaagaactgaccagaacaagtgccgcattcagctctgagaataaacaccaaaacacaagaccaggctgtagacgcaagagt

SEQ ID NO: 241210 - DNA, 565 bp, Homo sapiens
gttgggccatttgtttccctttcagatttagggacttgaagatcttgccctatctctcctgtccctcagggctggattaactgaaggactttgttaccttagagaagcacacctgggagagggatgtgaatgtatttgcatcttgttagccatcaggaagggacgtggacaatctggtataatggagaaggggtcagtgycaatgatgaagatccccataggggtgtgagtaggtgggcaggcacaaatgcccacatgtgcttgacaccgcaactcagcttccagcgctctagctacagtggaactgagggagggcagggtgtagagaagggagctccaggccaaatttctttgtcactttggcaacacctgcaccaccttctggcccagggctttggctgccgtctttgccctcagcctctgccacaggtccacagtcttccttgttcaccccagcaggttgcttcctgcatcatgctgtccactgcactgcttcatgtctcctgggccacagggctgtttttgtaggcctttcataatctgctcctcctctccaattagcctt

SEQ ID NO: 241211 - DNA, 555 bp, Homo sapiens
gaggttcatagacactgccccactccaagcccatccactgacagtgaaaccactgtcaagtgtgacacactgagatatggactacaaggagaacctggttaagggggatattagcgagttcacttttggacagttgaatttgaggtgtttcaaaaaaaaattttttttttgagacagagtttcgcccttgtcacccaggctagagtgcaatggtgctatctcatctcactgcaacctccrcctcctaggttcaagtgattctcctgcctcagtctcccaatagctgggattacaggtatgcgccaccatgcctggctaatttttttgtattattagtagagacagggttttgccatgttggccaggctggttttgaactcctgacctcaggtgatccacccgccttggcctcccaaagtgctgggattacaggtgtgagctaccgtgcccgcccgaggtgtttcaaatttgacatccaagtggaaatgtctagcaggcaggtgggtgtaccggtgtggagtttaggtgaaaagggtaggctggagacagagatct

SEQ ID NO: 241212 - DNA, 538 bp, Homo sapiens
agtgaggtgctccaagtgagtaatattgtttytggtcaaacccaggtcatgacaataaagaaatgagactggttttcttgtctggctcctgaaatgatgctgaagacagttctgaacttttaggggttctagaaacattctgagcaatggcagtattggtgttatgctccagtacagaaactaatgcctttatcttatttgtctgttgacctctgtgcttctaacttgactgcaggttcattgagggcaaagtcagattcttttcaactgtgtttctgtagcgcacctcactcactgctgtgccccagcaattgctcaatacaagttggctgaccgagtgaatataaagtatctgcagcaaatgatccttcatcagctctcagaagctcctgaaaatatgctgatgatgcttgtgcagacaaactacaccctcctccccaccctccctgccttctgctgccatattggtttcaccagaggggaggaataacatcgtcctgtgccagttgtaccatccatgggaaaatcccacggacat

SEQ ID NO: 241213 - DNA, 609 bp, Homo sapiens
ggttgtctggtgtgtgtccctgcctctgggggacactcttggtctattttaggtgaacagttctctctccggttcagagaaccttcccttggtcacatattctcactcttcagaaayagatttttggcattaacccttcctcctgtgattcaccctccttccttcatgcatctgacctgcagttagtggcaaagggaggctgagggaagcagaagccaggatctgagcagagggagtgaagggcagacagtgttctagctcatcgggtcacctgctgggcctcagagctgatgccctgggagagagtggggttcagccttccccggggctccttcctttcttttggctcctggaaactctggaatatttcctgggagcctgagagtttgggggccatgccttgaggataatggagtgcaagagttctgggggcagtggtggggtgacccacctgggaaagggaggcatcccatccctcctgtgacatggggcagtggggactgtgaagaaggtgaggaggcctcatgcagccttgagtgagagtcaccctcatgcacttgagagcctctttcttccccttctgacaggggcatagatcctggagtagga

SEQ ID NO: 241214 - DNA, 567 bp, Homo sapiens
aatacatcactttttaatagatgtaggggaggtgaattattcaatctggttaacacatgaaacagcaaatcttacatgtagtcatgaagttattgcttttggaaatgatctattggcctgctattatcaccaaaatggaaaggaataaagacaagctctgtaaacagttgctggagtttgggaggagaggamagaggaggaaattaaaatgaggggagaaatctcacctgtacaaaaagcccagcagtcctgtttagcatatctctaatcattgctgacaacaacatctaggacttactatgtgcttcacacatattatctcatttaatctcaaatcagcccacaagggaggctgtgtatttatctaccgctaaggcacagagaggttagatagcttgcccagggtcattcagtcagtaagggcagagtctgactctggggattgtgcccttcaccttcgcattacattgccctccaggaaagtccaggaggggattttctttccccatataaatgcatgtaaggattccaatggctgtaaccattaggatatctttttcagaatgc

SEQ ID NO: 241215 - DNA, 546 bp, Homo sapiens
accataagaagcagatctaacaccaaattgctataatcagtctgacacagataatgagcagaaaaagttagaaagggggctatacttaatgcccatgagcagcgtagctctggcttgtttaaactcagtgatcactcagcaaatgatgctaaattttcagatgcttttgtttagaaaacagccccaccccaaaagacaatgaggtggggtgtccttagagactatccatgtttccatgttttatggatttctcacagagagacagctatcacagaaaatattcaaaggacctkcatcatactgtggtcagctgcctctgcattcactgggaatttgttagtaaatacgtgaaaacgattttgtttttaaaactttatagccttctcaaactatctctacagtagtacttatatttattgtaagaccagtaacagaagatattttgaaaagaacacttctgccttctgaagtctttaaattcatgaccaaaaccaacaatgcacaaaaaaggaaatacatgtggctggtactatgcagggtcagtgg

SEQ ID NO: 241216 - DNA, 554 bp, Homo sapiens
aaaaatctttacatgtagaaatgctaagttactcctgtgatatctaaaagtctgataatgcccaaaaggatgattacatgctggaaaattcttcctattttgagaacacatgttgaacatgtgatagatgcaaagatccaattgattatttctctttgtgtatatgatgttgccctgattgccctcaaactgttttacattagagaggtttgctttctataacagacataccagatcccttgaaggggtagggtatcattgatgttgtgccatcaaaagacatatgcctaatggggaagagagtgaatgagggcacacagtggtgagaacctgtcatgtgtgctagatatcattaaagtctcacaattgaatattttaaaaaaagtaaatactgcattctgctccataataatatgcatattatataaagataaaaaattgctttttaaataacttkccatcacaaaaatgggcacaacaggaagctgcatcatgtttgaggtgcagctttcagtcctttatgacatagcgcttaatatccctcagttaggaga

SEQ ID NO: 241217 - DNA, 635 bp, Homo sapiens
ttgaaacagctgaccacttcctccttgacgctgttctcttgtatcctggaactctccattggcctggtatccctcctacctcactgtcctcgtcttctcaggctgcattgccagctttttctccattgctcagcttctaaaagtttgagtggccccaaaattagtcctcatacttgtctttcctatttgcactttattttgcagttttgcggctttacatgctgtctgaggtcaagaactgcacaatttatgtctctagtcagagcctctccactgaactccagtgcatgtatttctattgatgtgatatttcctcttgaatgtctgagagaaacatgaacatttaacctgctgtcttagtccattttctgtagcttgcaacagaatacctgaaactggataagttataaggaaaagaaatctgtttcttatagttatggagactgagtagtctaaggctgaggcaccacatctggtgagggccttcctgctgrtggggactctctacagagttctggggcaacacagggcatcacatggcgagggggctgagggtccgaactcagatctcacttcctcttataaagccagagtcccactcctgtgataacacactaattcattaatccattaat

SEQ ID NO: 241218 - DNA, 558 bp, Homo sapiens
tttatttttgaaatgaacaaaaaatactctctgaaatatcccaagaagccacaaagagcattagcttttgaccattggctctgatgttccctgtcttctttatgatgagaattctcaccaccatttttggccatggccactggtgttgcagactcagcccttcctctcctctgggctgcattggcatgattttgtcttaccagcaggtaaagcctgaaaccacctttttcagtgggcctagaaacttccactttgkctctgaagatgaaagccatgtgctgcttctcaactgagagcctctctgtgatgttagagatgttttgcagcaatggcattctctggacatgcacaataccactaagaagaccaagttctgccccttgtcctttggtggctctcctgaactactctgctagcatcagagcctccaaaattttagtaagtgtttcagtgttttaaattgtgttattctgcaatgagtatgtctttccaaaaaggatttgacctacaccttcaagcctgtgatggtgaaagcattgatgcatctgcttttcccat

SEQ ID NO: 241219 - DNA, 488 bp, Homo sapiens
ctaatgctgtaaaaggcctggcacaagctaaaacaaaacagaacagcaaaataccttttgttttagctagtgctacttttgtacttttatgtaattagcattaaaataatttccacagcagctattctctatttcataagatctctaccaagcctcctagaacatttcaaaaaccaaaaacttgccaagaatatggtgaaaaccatcaaggaagtcataacctttagattgaacatgctgaattatcgcctcctggggacagctgccagtcagagttgargcaccaagaagcagagccacaccagacccagagggtgcagacagcagagtatttctgctctgccaggctcagtgagtcacgcatttggcctcctccactaagatcatgtattctaccagatttcgattcatggagtccaaagatgaatgaatcaaacactgcttaagggcaatgtatacattgggattcctccccacctcttccctaa

SEQ ID NO: 241220 - DNA, 428 bp, Homo sapiens
acaaaacatagagaaggcttctaatcagaccctttaaagaactcagaataaaggtgccactcaccctttttcggggtgtcctgctttctttgtggagtttcaaaagtcacgggcagatttttctcaggtctaaagctctgctttcttgtattgcattacctgatgtctttgtctttggtgggggtaccagagattaccttgtactgtgagagaatttggccttggtgtgtgtartggtggcagagaaccacaatcttagggatggctaaggacagtttataggaaatggtcattactacagggggctacttatttctttgtacatttaaattaagaaaattgtacaggctttcttggccctattccttaaagggatctaccataaagctagtaatctaatcaagctaaattgaaaataacacctatca

SEQ ID NO: 241221 - DNA, 532 bp, Homo sapiens
aaccttattttgaatcctttggctcacttgtgagggtagctgttacaactgacaagtggagtccatgaaaagtcaacaccaaaaggtgggctctttgaaaagcagctggaaaagaaagtggaagaggaatgggaggccaggctgcatttgaaaggaagggtgttaattaggaacccctcattttaaagaggggctagaccccttgctcaaggcttaataagaggcttcagaactcgtcctgctggctccccccagccttcaccccagctcccctctgtaatataagcagagagctagggaaagaargagaaagagggcaagtgttagtcaatgtggtgttcacaaggggaggtgacttcctccccaaagctaggtggagacttggatgtgctctgagactgggggtgccctcggagtagagcagaacatggtgaccctgggaaagctcttgaagaacctggcttgtgtgctgggagtttggaggcacccatgaacgttgaggccaaaacctggagatttctgaaggcagaag

SEQ ID NO: 241222 - DNA, 572 bp, Homo sapiens
gtttcacctcacctggtactgacggatagactggttaccagggctgagtgtaaattctgttcctgtatgggaggagacagaggtgcccgacccaggcttgctggagggcagcactgttgtggccaggaccaccgctggaacatctcccagtgctctttccatctatcttcaaagcaggatttcactgcacaattgaatgcttttcattctgttgcccaggctggagtgcagtgatgctatcttggtttactgcaatctctgcctcccaggctcaaacaatcttcctgtctcagcctcccaagtagctgggacttcaggcatgwgccactaagcctggctaagttttgaattttttgtagagatgggtttcgccatgttggctgggctggtcttgaatccctgggctcaagcaatttgcccgccttggcctcaccaagtgctgtgattacaggcgtgagccacccgcacccagtctaaacaatttatggttgttgttgttttttaatgagttcatggaaagttgatttcttctgtccatcaatcttaaaaagagttctcctcttactggaaac

SEQ ID NO: 241223 - DNA, 572 bp, Homo sapiens
gtttcacctcacctggtactgacggatagactggttaccagggctgagtgtaaattctgttcctgtatgggaggagacagaggtgcccgacccaggcttgctggagggcagcactgttgtggccaggaccaccgctggaacatctcccagtgctctttccatctatcttcaaagcaggatttcactgcacaattgaatgcttttcattctgttgcccaggctggagtgcagtgatgctatcttggtttactgcaatctctgcctcccaggctcaaacaatcttcctgtctcagcctcccaagtagctgggacttcaggcatgagccacyaagcctggctaagttttgaattttttgtagagatgggtttcgccatgttggctgggctggtcttgaatccctgggctcaagcaatttgcccgccttggcctcaccaagtgctgtgattacaggcgtgagccacccgcacccagtctaaacaatttatggttgttgttgttttttaatgagttcatggaaagttgatttcttctgtccatcaatcttaaaaagagttctcctcttactggaaac

SEQ ID NO: 241224 - DNA, 369 bp, Homo sapiens
tcctaaagtttagtctttgtggtacattaaaacatackccacacacaaacacacaaaaccttattttgatagagtaccaagttgctctctaactctaggtttgttattctgtccactatttgcttcagcaatactacaatgatttgacttacacccatctctttctcaagctgctattaccttgtcaaaaatcttacggaataagacacgttcctgaataatatttatcactattttcctattatctgataaagctttcatactattaccagaaatatcattctagaatattgttcttatgttatcatttttattttttgcaaattttagtggtctccaatgacctggataatggttttgaaacagaaa

SEQ ID NO: 241225 - DNA, 369 bp, Homo sapiens
tcctaaagtttagtctttgtggtacattaaaacatactccacacacaaacacacaaaaccttattttgatagagtaccaagttgctctctaactctaggtttgttattytgtccactatttgcttcagcaatactacaatgatttgacttacacccatctctttctcaagctgctattaccttgtcaaaaatcttacggaataagacacgttcctgaataatatttatcactattttcctattatctgataaagctttcatactattaccagaaatatcattctagaatattgttcttatgttatcatttttattttttgcaaattttagtggtctccaatgacctggataatggttttgaaacagaaa

SEQ ID NO: 241226 - DNA, 637 bp, Homo sapiens
aagctttcagcaaatgggagacatgtttactctaccctttaattgtrgtcccattttcaagaatttcctcaattccttagccttcttccaaaatcctttgttggaaaaaataaggcattctcactttatgtattttcatgaaaagatcacatgcaacattctcattcattcattcatttatacttgaagattttgaatagcaaatgggagaactattcccctgattatcacaaagttttctttagttctttctctgtagtacctacttaccacttgggagtatttatctttcaatgccccttcggtaatgttattttcccaatctttggtctccggtctgttgggaagaaacctccaattgctacttaagattctcttggggaattaggatggcaacatgaattagcactaagtattccctcatctttgcaggctgataactcagaaaacctccaggggcagcaagtcccgtctcactgtaccttgaatttacttggccctggtcccttaattgataacgctcctccatattgagtgaggctaatggaatacaccatgtaatcagcctacttctctcaacatcttgaggtggggaggcagtagacatgagcattacaagttacagatgaatcataac

SEQ ID NO: 241227 - DNA, 637 bp, Homo sapiens
aagctttcagcaaatgggagacatgtttactctaccctttaattgtggtcccattttcaagaatttcctcaattccttagccttcttccaaaatcctttgttggaaaaaataaggcattctcactttatgtattttcatgaaaagatcacatgcaacattctcattcattcattcatttatacttgaagattttgaatagcaaatgggagaactattcccctgattatcacaaagttttctttagttctttctctgtagtacctacttaccacttgggagtatttatctttcaatgccccttcrgtaatgttattttcccaatctttggtctccggtctgttgggaagaaacctccaattgctacttaagattctcttggggaattaggatggcaacatgaattagcactaagtattccctcatctttgcaggctgataactcagaaaacctccaggggcagcaagtcccgtctcactgtaccttgaatttacttggccctggtcccttaattgataacgctcctccatattgagtgaggctaatggaatacaccatgtaatcagcctacttctctcaacatcttgaggtggggaggcagtagacatgagcattacaagttacagatgaatcataac

SEQ ID NO: 241228 - DNA, 512 bp, Homo sapiens
taaagcatatgcatcttacaattcagaaacatactttattatttctctatatcaccaaggtctatctaagtcctcattcataaagagtagctaatatatgtatgttggatgaatgaaaggattaagatgagtaaaattaaastaaaccattctgtgatctcctctgttgctcccttgttgatagggaacttatttggtgtaagtcttgcctctggatctgagaaaatttggaatattatgtcaagaaaatcatcctggaagctaaatgaatgctaaagttaaatggaaacatattgataaagtgaatttaaaaaatagttggggaaggtgatttttctgaaagatattcaaaacttgcaaaatattactaaatgtttcaagaaacccttcagctatcaagagaagcactcctctggtaacttgaagaaatatgcatccttcaagtgctacattattcacattggaagaaacagcttcataaataaatcacaaggcagaaatgcagagttttt

SEQ ID NO: 241229 - DNA, 512 bp, Homo sapiens
taaagcatatgcatcttacaattcagaaacatactttattatttctctatatcaccaaggtctatctaagtcctcattcataaagagtagctaatatatgtatgttggatgaatgaaaggattaagatgagtaaaattaaactaaaccattctgtgatctcctctgttgctcccttgttgatagggaacttatttggtgtaagtcttgcctstggatctgagaaaatttggaatattatgtcaagaaaatcatcctggaagctaaatgaatgctaaagttaaatggaaacatattgataaagtgaatttaaaaaatagttggggaaggtgatttttctgaaagatattcaaaacttgcaaaatattactaaatgtttcaagaaacccttcagctatcaagagaagcactcctctggtaacttgaagaaatatgcatccttcaagtgctacattattcacattggaagaaacagcttcataaataaatcacaaggcagaaatgcagagttttt

SEQ ID NO: 241230 - DNA, 546 bp, Homo sapiens
aggtgctactgctccaaacaggctactaggcttcctcccaccaatccatgatcctctcccatttccccctaacacctccttcagtggggccttaatrgggtcacaggccagctttcagcgtcaggcttttccttgctagcaggcctgtctacctcgagggtagtcacactagtcagtaccctgtttagcatggtagcctggcaaatgtgcctaacttcctagagcaactcaagatcagtggcactttacagggaaatttacaaacatttggcatcagcaaaaaataaagacttattttaaagccacagagacttgaaggatgtctacagaatctgaccttgattattcaaaatgatattaatttttttttgtttgtttgctttagtttccaacttgaaagccattacaatttattaatgttttgcctcatgaacttttggtcagtattgtattatttctattgtttgaaatatagagtcagatatctatatggtccaataaactactttttacaaatgttctatcttcactttaagataaaacata

SEQ ID NO: 241231 - DNA, 546 bp, Homo sapiens
aggtgctactgctccaaacaggctactaggcttcctcccaccaatccatgatcctctcccatttccccctaacacctccttcagtggggccttaatggggtcacaggccagctttcagcgtcaggcttttccttgctagcaggcctgtctacctcgagggtagtcacactagtcagtaccctgtttagcatggtagcctggcaaatgtgcctaacttcctagagcaactcaagatcagtggcactttacagggaaatttacaaacatttggcatcagcaaaaaataaagacttattttaaagccacagagacttgaaggatgtctacagaatctgaccttgattattcaaaatgatattaatttttktttgtttgtttgctttagtttccaacttgaaagccattacaatttattaatgttttgcctcatgaacttttggtcagtattgtattatttctattgtttgaaatatagagtcagatatctatatggtccaataaactactttttacaaatgttctatcttcactttaagataaaacata

SEQ ID NO: 241232 - DNA, 546 bp, Homo sapiens
aggtgctactgctccaaacaggctactaggcttcctcccaccaatccatgatcctctcccatttccccctaacacctccttcagtggggccttaatggggtcacaggccagctttcagcgtcaggcttttccttgctagcaggcctgtctacctcgagggtagtcacactagtcagtaccctgtttagcatggtagcctggcaaatgtgcctaacttcctagagcaactcaagatcagtggcactttacagggaaatttacaaacatttggcatcagcaaaaaataaagacttattttaaagccacagagacttgaaggatgtctacagaatctgaccttgattattcaaaatgatattaatttttttttgtttgtttgctttagtttccaacttgaaagccattacaatttattaatgttttgcctcatgaacttttggtcagtattgtattatttctattgtttgaaatatagwgtcagatatctatatggtccaataaactactttttacaaatgttctatcttcactttaagataaaacata

SEQ ID NO: 241233 - DNA, 534 bp, Homo sapiens
aggctggctgtctttgctcattcctaagcatgagctaagctagctttgtgggaaaaaaaaaatagtttatagtttaaataatagcccttccccaaacctaaactcttcttgtaaaactaatgaaagaccaccaagttaggatgagaggrcctggaattttagataattatctaaattattcttgaggtcataagatttttaacttccccaattactcttgaagataacatctattattgtatagataatactatcgtaaaacctaagattagccttttgagatgtcttttcatgtttttgcatttctgacaaccagatggctccatgtggcctgttgtggcccccacccaggaagtgactcagcacaagagaacagcttcgacatcctatgagggtcatttcaaaaccaactaatcagtgctcccaactcactggccccctgcccaccaaattatccttaaaaactccaggccccaaattctcaaggagactgatttgaataataataaaacttgtgtctcctgtgcagccagc

SEQ ID NO: 241234 - DNA, 534 bp, Homo sapiens
aggctggctgtctttgctcattcctaagcatgagctaagctagctttgtgggaaaaaaaaaatagtttatagtttaaataatagcccttccccaaacctaaactcttcttgtaaaactaatgaaagaccaccaagttaggatgagagggcctggaattttagataattatctaaattattcttgaggtcataagatttttaacttccccaattactcttgaagataacatctattattgtatagataatactatcgtaaaacctaagattagccttttgagatgtcttttcatgtttttgcatttctgacaaccagatggctccatgtggcctgttgtggcccccacccaggaagtgactcagcacaagagaacagcttcgacatcctatgagggtcatttcaaaaccaactaatcagtgctcccaactcactggccccctgcccaccaaattatccttaaaaactccaggccccaaattctcaaggagaytgatttgaataataataaaacttgtgtctcctgtgcagccagc

SEQ ID NO: 241235 - DNA, 653 bp, Homo sapiens
ctgttttgcattgccataaaggaatacctgaggctgggtaatttataaagacaaggggcttaattggcttcagtcttcaggctgtacaggaagcatagtgctggcatctgcttctaacaagggcctcagaaagcttacaatcatggtggaaggcgaaggggtgtcagtgtgtcacatggcgagagcagggaccagagagggaagagagagatcacagggtcttttaaacaaccagatcttatatgaccaaactgagcgaactcactcatcacttaggggatggcactaaatcactcatgggggatctgcccccattatccaaacatctcccaccaggccccacctccaacattgggaaccatatttcaacatgagattttgaagtgacaaacatccaaaccatttcagggaatcatttcaaaggrgagttgaaagaggccgaacctgactggaaattcatagtattacctaagtccatcagccaacttgcaaagattcctagggagcctaagtgtggccaggtagggagaaaggagacaaacagaatgcacccctcacactgtatttgaataaatagtgagactgaaaagtactaaaatataaaagaaaattatctaaagcatgcaaaagatttatgtcaaaaaattttaaag

SEQ ID NO: 241236 - DNA, 349 bp, Homo sapiens
aatttaagattgagaaacagactgaccccttctccagttacacaccacacacacacacacacacacacacacacaccatgaaggatgctccactgttctgttcatacagtcttttttttttttttttgagactgttcatgcagtcttagaccccacccccatacctcagatcaaawctctcccatagcctggggtggcccttacctgtctggccaaaagcatgagagaggctggtcaagaccaagaaacacaacagcttctccatggtcacgtcctgctgccagtgatacaagggcctgaattcactcctttggaaaagatgtattcggctgaaagttcaggggctaga

SEQ ID NO: 241237 - DNA, 451 bp, Homo sapiens
gtgaagttttcaccattaaaacaatgctttatcatccaaatcatacttgttcttctctttgctttccagttatgaatttgttacctttttgcatttgattatttccagtggtttggttctttttttttttttttttttttacatactcttgagcaatgctaatctgcgccccytactcccttaagtccttcttggtaaataatgttaatcttccaataggaagaagtggagtacattaccatttaagcaccatttatccagcctacttacaaataaagctatggagccaccttatacatgtgaaattccttaaaaccctggctttctattaaaatgtacttttatatatactatctatgaagaattcactaaagcatgaatcaccttataatgagaagctaaaaatgtatcaaaacgaacataagtataggtaatccacatcaaacatact

SEQ ID NO: 241238 - DNA, 396 bp, Homo sapiens
aatgagaatcattacaaaatcattacaatccacctggcccaattctgtgtttgccttgtccactcacaacacccttggagggttaactgaactggggtctgctcgcctggcacagtaaatccaggtatctacatcaaggcttcttacagctatagaagagaaggcatttatttgtagggtgccaaggaaggaggaccaggcagccattgtttaaatcctgacctcccagtgtcttgtaagcaagggtttttttttttttttttttttttttgagacggagtctygctctgtcgcccaggctggagtgcagtggcgggatctcgactcactgcaagctccgcctcccgggaagcaagggtttttaaaggcaggggaaggagagtagaagttacaagc

SEQ ID NO: 241239 - DNA, 588 bp, Homo sapiens
ggtatctacagttatggccctgagaatgggatgcctttcaatcacttctgaaaggaagtcttgtgaaatggagacaataagccactatcactgttaacatcaatayaggattagctcagaacttagaggggcaaataatgactaacatcatgtatatttcagaagcaggcaatccctgccatttgctgaagaaagttgctgtgagtccccaaagaacctggatccacccaggccccaggtctctgtgggcagggttggtgtggaggtgacgaagcccagcagaggcctcccactcccaggctttgtggtgacaggagctgggatagggctccactttgcatcatgagataaaacatgtgtagtgctaccatttagcccagactatacacatatacatatacgttaccaaaagcatcacagaaactgcagccttgcctgcttctctcctactgatggaagaggggctcaagtggcccagaataataaacaggacctgcacaagaatccaggaagacctatctacaccctcaggtgcttccccatccctgcttagccactctaccccattgcccaccctctctcccaacc

SEQ ID NO: 241240 - DNA, 588 bp, Homo sapiens
ggtatctacagttatggccctgagaatgggatgcctttcaatcacttctgaaaggaagtcttgtgaaatggagacaataagccactatcactgttaacatcaatacaggattagctcagaacttagaggggcaaataatgactaacatcatgtatatttcagaagyaggcaatccctgccatttgctgaagaaagttgctgtgagtccccaaagaacctggatccacccaggccccaggtctctgtgggcagggttggtgtggaggtgacgaagcccagcagaggcctcccactcccaggctttgtggtgacaggagctgggatagggctccactttgcatcatgagataaaacatgtgtagtgctaccatttagcccagactatacacatatacatatacgttaccaaaagcatcacagaaactgcagccttgcctgcttctctcctactgatggaagaggggctcaagtggcccagaataataaacaggacctgcacaagaatccaggaagacctatctacaccctcaggtgcttccccatccctgcttagccactctaccccattgcccaccctctctcccaacc

SEQ ID NO: 241241 - DNA, 626 bp, Homo sapiens
tttgtaaagtttatacacatacacacattttttttaaacttgaaacatgagtataattgtgcaaaaatctgtctggattttggatttcttccttagggcagattcctagaagtggaatttactgagtaaaagagtttacacaattttaaataattcacaacatacagccaaattattttcaacaaatatgccaaccaacaatatatgagaatgctcaataagaacattttgaaaacactggtcactgtcattttttcagctattatgaagagtaaaaacaaaataatatctcacgatattactttaaataaagtgaattattaaataatatctcagcaatttagtttttattcattttttgagacaagtgcctcttagacttcaactaatctataattaatgtagttaatatattaggggagaaagcaactatttactttgataatgtacattcctttagctcttaagagtctctgcatttttcagatccacaattagaatgtccatttgtaaggaagacatgatgtttcaaaatctaaaacatcgtaagaaggttggaaactgttcaacagtgagyaatagaatcaaactatttttaaaaataaactatttttaaagaaaatgat

SEQ ID NO: 241242 - DNA, 458 bp, Homo sapiens
ttttggttgatttttaaagtgatgtgtttagaagaattgctttaggatagcttgttttgtctctttctcagaaggttctctattaatttgtgtaggtgattattgatttctttctatggccctttacttgataggaaatacctgtggaacaaaaagaaggcgctttctctaattttcccatatctgaagaaactattaaacttctcaaaggtaatgttcttggaaatatcgtatgatgttagaacgtattattttaacagaagcactccactatttttgttaagatgaaccaggatgtattcttattgtaggctgatatatgcagtcatataatgaagtaggcctgtgtattcaatttagtactatagtagtgatggttcttcatgcttcttaaacaagtggttaaagytttttcaggccctctgtggtggctcacacctgtaattgattgaggccag

SEQ ID NO: 241243 - DNA, 461 bp, Homo sapiens
atcaaggtttttgtatctttttggttgatttttaaagtgatgtgtttagaagaattgctttaggatagcttgttttgtctctttctcagaaggttctctattaatttgtgtaggtgattattgatttctttctatggccctttacttgataggaaatacctgtggaacaaaaagaaggcgctttctctaattttcccatatctgaagaaactattaaacttctcaaaggtaatgttcttggaaatatcgtatgatgttagaacgtattattttaacagaagcactccactatttttgttaagatgaaccaggatgtattcttattgtaggctgatatatgcagtcatataatgaagtaggcctgtgtattcaatttagtactatagtagtgatggttcttcatgcttcttaaacaagtggttaaagcttyttcaggccctctgtggtggctcacacctgta

SEQ ID NO: 241244 - DNA, 404 bp, Homo sapiens
ataagtgtccatgtatggctacatggataagtaaaatgtagtatataaacaaaatagaatattattcaaccttaaaaaacaaggaaatcctgccatttgagacaacacagatgaacctgaaggacattacactaagtgagataagccagtcatagaaggacaaatactgcatgattccacttacatgaggtatccaaaatagtcaaactcatggaaaaacagaataaaatggtggttgccagaggctgggggaagggggaaatgggaggttgatgttcaattggtataaagtttcarttacgtaagatgaataagttctaaagctatgctgtacaatattgtattacttaactaattactgtaattgtacaatattgctatacttaacaatactgtattgtgaa

SEQ ID NO: 241245 - DNA, 492 bp, Homo sapiens
gtgagggcccaggagatatgggtgtggccacaacagtatctgctgcaacacacaacttcttccarctacctgaaggatgaaggaataagttcaatggcatttcaaggcatcttccaactttataattctttgattatgtaaagaaaacatgtaaaagtgttctaattactataatataaaaatatacatgaacacctgatgatttaagtttaagaaggcaaggaccatgagtatctggttcagtactatagccccttgtttgcactgtgcccgtgctgtgtctggcacatagaaagctttctaatcagtcaatgtttgttgaacaaatgagtaagtaggtaattataatcaaaaggtacgcaattcagttcacatttacacttctctggtcaactagtcatctacagccttttgtttatttgaacagaagcctcttctctaacaaaggtcagcaaatattctacagaatcagttttcagtgagggaaagagt

SEQ ID NO: 241246 - DNA, 571 bp, Homo sapiens
aactgatgtaaaaatccatacagcagagacagcgtcaacattttatttttcttccaaaggaaaatactttttttatttcaggtagctcatcctctctaggctgcagactgaatacattctttttaagtctaagcattaattagacagataaagaaatgtagctccctttgttcagaaggagaattctattgagcctttgacaatgaagctgcttaagggacagcytgagttgctgtttctgcagagtttctgtagaaggaagataaagaggctcactagtggaggactctgtctttgtgccatcttcttgctgcttcttctgggctccagtgggaagtagagccctaaaaagtaaataaaaggtccatgaaggccaaaatgaatcctgtgacttaaagccagaaaccagaatgcaccactggcgcacctaatagcctcagaaagtgtttgagtggttgttcccatcttacgccctgctacttcccactagcatcagatgacagattatggtgagctcacaaaaaagcccctaaggaacccagccaagataggtttcttacaggtacagaag

SEQ ID NO: 241247 - DNA, 607 bp, Homo sapiens
gcgcacctaatagcctcagaaagtgtttgagtggttgttcccatcttacgccctgctacttcccactagcatcagatgacagattatggtgagctcacaaaaaagcccctaaggaacccagccaagatrggtttcttacaggtacagaaggctccttgaggccacactaccagtttaccaggtgcttgggagggggaggttcattttgcgcatccacagtttgctttaaaaactgtcttatgtaacaggagagaagccataaacaccagcactctcaaggtcacctccactgaatgcagggcttggggaacactgtataactcctgaaaaggtgccaagtgccaaccctaggcagctctctggctgcaattttgtgtccctactttgaacagattatccagctgaaccactctactacagtccttgctgcccttaggccactgtcatacatctcactttaccccaacagtcaaaaccttggctttttacttttcctttttctgtttttggacttaaaagcttttaattgcagtaaaatatacatacaagacaatgcacatatcataagcatccagcacggtaaattttcacgaatatgtccatgtaa

SEQ ID NO: 241248 - DNA, 640 bp, Homo sapiens
gtctttgtttaatctgggaaaataattatagtccccaatggtatggcacctgctataaataggaaaaagcagtggcacagatttactgatgactggtaccatcgtatccactttgggatatatggatttaatattggatccaaagctgatttttaaaggtctgacctttaaaaatctactttcctaaggctccatttcctcatataaaaatggtgcygggaaaaaacatttcgctagatgtctactacatgacaagctctctgttgataatgtggatgcattacttcatttaatagtctgataggtgtttagcatcatctccaatatataggttgagaacctgaaggtcacagaagttaaataacctgaccagagacaatggctattcagtgacacagctagaatttgaatctagttctacttgactttaatatctctcaaatttcagctgcaccacaccagcttatagagataatatacttgcttgtagagataatatgctaggacagaattttgagttttgaatgcagaaatgtataagaaaaataactaatgttatgacatacctggtaagcattcaatgttagcttagcagggaggcaaacttgactttacaaaaagtttccaaattttatatatt

SEQ ID NO: 241249 - DNA, 453 bp, Homo sapiens
gtttatactgttatctagcctcttgtcagccttagattctacagatgatagctagaccaagttttacaatcttagtacaaatcctaaattagtaatgtgtctcaaattcttcctattaaaagaaattgtcaaagtcagaaatgggcaaaacatcgcatttacaggttacattacaaaatatttctctgtatcatattagatatagattatcattatcatactyttaaaacttgaaattatatcatttaaaagcaagcttacagccttagcaaataaaaattaagagtactttgataatgatttataactttacaattataaagttaggaaatttcaaggtgttttaagatattggactgaggtaaattatagtgaaacagatgaccttaatactatattataacaaaaaaaatcattgtatttagtaggcattctccaaaaaatcaatgacca

SEQ ID NO: 241250 - DNA, 453 bp, Homo sapiens
gtttatactgttatctagcctcttgtcagccttagattctacagatgatagctagaccaagttttacaatcttagtacaaatcctaaattagtaatgtgtctcaaattcttcctattaaaagaaattgtcaaagtcagaaatgggcaaaacatcgcatttacaggttacattacaaaatatttctctgtatcatattagatatagattatcattatcatacttttaaaacttgaaattatatcatttaaaagcaagcttacagccttagcaaataaaaattaagagtactttgataatgatttataactttacaattataaagttaggaaatttcaaggtgttttaagatattggactgaggtaaattatagtgaaacagatgaccttaatactataytataacaaaaaaaatcattgtatttagtaggcattctccaaaaaatcaatgacca

SEQ ID NO: 241251 - DNA, 436 bp, Homo sapiens
accatgtttgtgaagtcatccattaccaagctaatcacaatcccccctcttcttcaaaagccttagaaatatcctatggaaacattttatatattgtgatgctatgttagtcayccattttctctcttactacttgaaaaatgcttgaagacaaggtccatgacttctgtctttatcctcattactgctccttgttgagaactcggcattttgtacaaattcaataaatgctattgaatagtgtgtgcctgaaatgaaatttaggtcctatagaattatctacttcaagatctcatttaaaaatagttcttgcaaataagaattcattacttgagtttatataccttaggattaccttttttttttttcaaccaactcatttcaaataatataaactctaggattaaatgcaaacactttgcaatcagattaccta

SEQ ID NO: 241252 - DNA, 553 bp, Homo sapiens
ggtcagcctaccaaaaaaaaaaaaaaaatgagtgtttaaagtaagaatggctattgcagacttgttcaatgctttacatgggggaaaaaaatgaaccgccacaaacaaagaagcattagatcagaagagttcaagagcctaataaacatcttcatgaaaagttaaaatggctgcctcatttgtctgcagcatgaggcaggcagcactgagggtgcttctaacttcctttccaaatcagaggcaatttactggcttcaaaataaaggarggaaaagagaagaggcttgtctggtcaatgatttattcatggagccaagaaaatgtttctcttctaaaatgatatttttcctgggttctagcctttcaatcttcctccagtctgggaatatatgtttctctcctccatgtatttttcagtggtttccattattacgtgacacactgttcacctcgatctacagcactgagacctccgtggggttgcccttgcttagagaattttgcagtgccaaaactcagaactgatgctttgtcttgcctgaggagctgagca

SEQ ID NO: 241253 - DNA, 419 bp, Homo sapiens
aattctggatgctgagaaatccaagatccaggcaccaacagatatggcgtctggtgagggtttgctctctgcttcktaaatggtgccttgttgctgtgtcctcacatggaggaagggatgaacactcttgttgctgtgtcctcacatggtagaagggaaaaactctgtgtcctccaatggcgaaaggggtgggagggactaggggactgccttcagcctctcttataaggacactaatcccattcatgagggcagagtcctcatgacttaatcactttccttaagaccccacttctcaataccctaacattggacatttgttcccaaatatcaatctgggggaacaccatcttccagactatagcagtatccttaaaaaaattgcaaaggtaagtgtacaataatatgtataagaattc

SEQ ID NO: 241254 - DNA, 373 bp, Homo sapiens
gttcctccctaagttaagatattacatatccaaagatgatgaataggaacaaaacctaggctgcttcaggcagttctcccctctctaaggatactacattcccaaaacattcaacagttattcttgagaactacaagaaagaaagaagagaaaactaggtcagtccaaggccacccaaacaactgtcttgagtttttgtattctacrtacaagtccttcatgttttgcgaatatattttcctagtctgtggcttgtcttttcattgtcttagtggcatttttagggcagatttttaaacctttaataaagataaatttatctggtttttttttcttttaaggatcatacttttggtgtcatatataataaatc

SEQ ID NO: 241255 - DNA, 474 bp, Homo sapiens
ccactgtggtttgagagtatagttggtatgatttcaatttttttgaacttattgaaacttgctttatggccatacatgtggtctatcttagactatgttctgtgtgcagataagaatgtatattctttggttgatgggtggagtatcctgcagatatctattaggtcctattgctcatgtgttgaatttaagtccaaaatgtctttgttaattttctatgttaataatttgtctaatgctgtcagtagggcattaaaatcccccactattattgtgtaactgttcaagtcttttgtaggcctagaagtacttgttttattattaatctgggtattctaatgttgggtgtgtttatatttagaataattaagccttcttgttgaactgaacttgttatcattrtgtaatgttcccctttgtccttttttactgttgttagtttaaagtctgttttatctaatatgagaataatta

SEQ ID NO: 241256 - DNA, 500 bp, Homo sapiens
actgtggtttgagagtatagttggtatgatttcaatttttttgaacttattgaaacttgctttatggccatacatgtggtctatcttagactatgttctgtgtgcagataagaatgtatattctttggttgatgggtggagtatcctgcagatatctattaggtcctattgctcatgtgttgaatttaagtccaaaatgtctttgttaattttctatgttaataatttgtctaatgctgtcagtagggcattaaaatcccccactattattgtgtaactgttcaagtcttttgtaggcctagaagtacttgttttattattaatctgggtattctaatgttgggtgtgtttatatttagaataattaagccttcttgttgaactgaacttgttatcattgtgtaatgttcccctttgtccttttttactgttgttagtttaaagtctgttttatctaatatragaataattaccccactctttttaattttctgtttgtt

SEQ ID NO: 241257 - DNA, 602 bp, Homo sapiens
aagaatcacacatattttgtccacagcacagagatagcaaagcaaacttttcccctagtgccatttccccagggatgggaatgattgatttttattggttcagcttctaggatactcacatctcaattcagccaattttctttggagagagcacactccagtacacttaatgtattttctttcttttcttttctttttttcttttttttttttttttgacagaatttcgctcttgttgcccaggctggagtgcaatagcgtgatctcggctcactgcaacctccgcctgccgggttcaagygattgtcctgccttagcctcccgagtagctgggattacaggcacccaccaccacacccagctaacttttgtatttttagtagagatggggtttcaccatgttggccaggctggtctcgaactcctgacctcagatgatccacccacctcagcctcccaaagtgctgggattacaggcatgagccaccacacccggccatatagttaattgcattttctaaccaaagagttgagagagatttgtcatctttacagtccagagaagatgaacctccagcctcctcttccaattgtgtaagctt

SEQ ID NO: 241258 - DNA, 659 bp, Homo sapiens
tacatatatttgttctaaactgaaaggtagttatttgtcactataagttatttgtcactataagtaataagtgacttgcccaaagtcacactagcagataggaagggctcaaacacmaatgagatttccagtgctcttttcaaaatcctgatgtattgctagagggtaatgatacctgccctacattacccttgtgggcctcaaaagaaataatgcttttgaaagtactttgaagaatataaactcactgtatagttttaagtttctacagtccccaatgggtatgtgaatgttccatttcctatgtagctgggttcaaaaccagtgacataaattcctggttccaccaggtgttctgttctcttttctgaaagcaaatgctaaggacaaggcctcatccaaagatgaattcagagaaagagagagaaatacaataaaaatgacaaatagatattggacaaagacataaagtaaacatggcaagaaagcaaattgctgctgcccttctctgaacagacagaaaatgctgagcaatgaccaaagaggagatgctggaaggatggagaccaatgccagagatggggatgggatctcagagcatgctccaaactcacatagcttatattaactatgacagtttgagagatgatgagctggaa

SEQ ID NO: 241259 - DNA, 642 bp, Homo sapiens
gaattccatactagctataccacagcatttaggggcttgcttttagaatttctgtgagacattacacaaaagttcaaatcaggagctttatccaactcagcctgtgcttttcagtacaaacttctccttccactttgcccctgccacacagaactctgctttaccaattaaaggattattacagttttctccaagtgctcttctttgccacgacccactagttccaacatcttctgagactcaggatttcagggtgtctgatctgcccactctgagccagcctacccatcacatcattaccatcatctgatcatcccactcatgacacatgtttaggtrctgagggagagaagagaatgttttctgtttggctatggaccactgttttttacttctggtcaaagccgctctaaatttgcagctacattttctaccaaaagagcaaagggcagctggttttagctctagtatctctctgcttgcactgcctctgctctctagcatgtgttctttgcatctcttatcaagaatgtctcttttccttcctttgtctcttacctctgatctagggtatcttttatggactcttcctctgcattttggattttctatcatagattctgttaactttcctgttatgct

SEQ ID NO: 241260 - DNA, 625 bp, Homo sapiens
ggtccagctgcaccatttctggcataaatgtcttcagctcctggaaggaagcaaggccaaaggaagctgcacatgtcttggatgagctaaggacctgctgctaatccttgccagggtctctggcacccaggaaagagctttgggagaatacgggaacagggacaggttggttgttgcacccacagtgagataacacagaggctcttaatgcagagaggccaaagcctttcctaaatgcctttgcagayggatttgatcaaacagagtctagctggagctgtaataaccctgaccctctacacccctggaaggattttgttccaggcaatgtaggctgcccaaacacacagagcgtgagttatgcattctacaaaattagttcataaatcctgaaatgggcttttgaaaaaaaagaaaaacaaagcaaatcaagatgaataaatattaatgaatcacctcctctctgtggcaagaggaacatgaggcagagctaataactgtcaacaaataacatcgacattgaatatttcatggagctgtgggggtggacctcagagatggggtcagtcacccacatgtgcagtgggcagcacttagagaccttcacaagctgcagaagataaac

SEQ ID NO: 241261 - DNA, 551 bp, Homo sapiens
gggtctagcttctcacatatagtaggtgctcaataaatcaacatatgtttgttgaactgaattgaatttccttccaggggaagaaaataactttgccctcttctcatagataggtggaaatccatgaaataaattctttccccagggacagataacccatggagcctgacctcctcagaggcagacacaagtgatatcatcctcccaatcattattgttatcattctatatggctgccaagggcttgaacaggtgacacagaaatgtaagacctggcagacaataagtggttcttaagcgacagcccccattcagcaccatctctttcaaggctccccctcccccaggggctgccaatcacrcctctttccccaagcacaaaattcacttaaaacatttttttttaaagaattaacagactgaagaacaggagcagactttctcctggctctctgtcacatccccacccagacagctaaaacgtttcacttgtcagtcatcagtaaataccaggtttaagctttgtactgtacatccccagaatagacatc

SEQ ID NO: 241262 - DNA, 544 bp, Homo sapiens
tatgggaattcaagaaaatctcttccctgtcaataagccctttggctggcactctttcccacagctactataagcaccaaatggggtccaggttaccctattatttaagatattcaacttctggtgcaagatttcccagtggacccgcagattgtcttttcgcctcctcacytcactgtttctgtgggtctgtaaactaggtgtccttgctgcagggacaacctcacattcacactctgtgacccacctgggggaatgactactgattagactatgggctcttcccattcacaatccaatctgaggcctgaggcattgtcagacggcccctccgtcatcttgggctctctctgctgtgtcttactatgcagacagaggaaagtgacagttttcatcatttcctgctaaatgattcagtgctgattcagccagtttcaactccacagcaatgcaataaaaaaaaaaaaaagagagagagaaaaaaagacccagaatagaggagcaaatgcttatcaaccattctgaggtattgttacaggtaggc

SEQ ID NO: 241263 - DNA, 544 bp, Homo sapiens
tatgggaattcaagaaaatctcttccctgtcaataagccctttggctggcactctttcccacagctactataagcaccaaatggggtccaggttaccctattatttaagatattcaacttctggtgcaagatttcccagtggacccgcagattgtcttttcgcctcctcacctcactgtttctgtgggtctgtaaactaggtgtccttgctgcagggacaacctcacattcacactctgtgacccacctgggggaatgactactgattagactatgggctcttcccattcacaatccaatctgaggcctgaggcattgtcagacggcccctccgtcatcttgggctctctctgctgtgtcttactatgcagacagaggaaagtgacagttttcatcatttcctgctaaatgattcagtgctgattcagccagtttcaactccacagcaatgcaataaaaaaaaaaaaaaragagagagaaaaaaagacccagaatagaggagcaaatgcttatcaaccattctgaggtattgttacaggtaggc

SEQ ID NO: 241264 - DNA, 544 bp, Homo sapiens
tatgggaattcaagaaaatctcttccctgtcaataagccctttggctggcactctttcccacagctactataagcaccaaatggggtccaggttaccctattatttaagatattcaacttctggtgcaagatttcccagtggacccgcagattgtcttttcgcctcctcacctcactgtttctgtgggtctgtaaactaggtgtccttgctgcagggacaacctcacattcacactctgtgacccacctgggggaatgactactgattagactatgggctcttcccattcacaatccaatctgaggcctgaggcattgtcagacggcccctccgtcatcttgggctctctctgctgtgtcttactatgcagacagaggaaagtgacagttttcatcatttcctgctaaatgattcagtgctgattcagccagtttcaactccacagcaatgcaataaaaaaaaaaaaaagagagagagaaraaaagacccagaatagaggagcaaatgcttatcaaccattctgaggtattgttacaggtaggc

SEQ ID NO: 241265 - DNA, 544 bp, Homo sapiens
tatgggaattcaagaaaatctcttccctgtcaataagccctttggctggcactctttcccacagctactataagcaccaaatggggtccaggttaccctattatttaagatattcaacttctggtgcaagatttcccagtggacccgcagattgtcttttcgcctcctcacctcactgtttctgtgggtctgtaaactaggtgtccttgctgcagggacaacctcacattcacactctgtgacccacctgggggaatgactactgattagactatgggctcttcccattcacaatccaatctgaggcctgaggcattgtcagacggcccctccgtcatcttgggctctctctgctgtgtcttactatgcagacagaggaaagtgacagttttcatcatttcctgctaaatgattcagtgctgattcagccagtttcaactccacagcaatgcaataaaaaaaaaaaaaagagagagagaaaaaaagacccagaatagaggagcaaatgcttaycaaccattctgaggtattgttacaggtaggc

SEQ ID NO: 241266 - DNA, 496 bp, Homo sapiens
aagcttggcccgtcctccctgtatttatttaaggtggcagaggagagccaccaacagatgaagttggatgatgagagatgatgagaagcatccacaggaatgtggcctggatgattgtttcttctgggcattcagctaccctgggtcctaaggattctgtgactgggccaaacttgagatamaacttcagtgacctgccttgtttatcaagcatttacttcctaaaaggatccgattggggtaattttaccaatgtccgaaccagagtcttttgcaccaaaattcccttgaaagttgacctcccttatgtccggccactgtgtagttgtctcggaattggatctgaatccagggcaatcatgtgtggcagaaaacatgtcatagcagtttggatgtgccaggtacattgactcacgttatctttacaaccacatgatgtaggtactatggttatcttcattttacatatgaggaaaccagggcacagagaggttag

SEQ ID NO: 241267 - DNA, 610 bp, Homo sapiens
  misc_feature (1)...(610): n = A,T,C or G
nnnnnnnnnnnnnnnnnnnnnnnnnnnnnagggtatttacaagccttataaagtgtctctccacaaaaattatgatacagtggataaaacaggcaatatcttaaccaggccatcagagttatcaccaccacagaggagcagatggacatggtgtgcctccagataccacccccgagaaggacacaacagcacgtatccagtgttccagccagaaaagcacagtggggatcgctaatcgtaagaaaatcaccagttaaatcccaaatgagaaaccgtctgttaaaaaaaaagggagaggggactgtatttttcaaaaattcagtgtcgtagaagcaatgactttgtggaaaagttccagattaaagaaactaaaaggatatgagaaccaaatgcaatccctgagcctcctctggaccctgtactggaggtgggggaacaccactaaggacgttaytgggtgaaccaacaaaactgggatatggataatagattggacacaaatattgcatcaaagtgaaatgtacagacctttcataagtgtactgcgcttatgtaagagattatccctatttttagaaaaacacgcttaagagtttagggaaaaaaaggc

SEQ ID NO: 241268 - DNA, 550 bp, Homo sapiens
ttttaaaaggaaagaaaagcagaatgatttattcaaaaaacttttaaattagattttctcaatgatatgttgtagatgtctttctatattaaatatatattaacataatcctttgttaatggatgattttaaaaaaacattttagattagcaggtacatgggcatgtttgctacatggctgtgttgyataatggtggggattgggcttctagtgtacccaacacccaaatataacgtaatcattcttacagctgtatattattttactctattaactgcaacaaaatttttttaaaaagtccattgttggttatttctaaaataaacatggaagttaaaacctgtacatatatttttatatatttgactgattatttcctctaggtatagtcctgtttgctgaactgataagtgaggtagtatttacatttaaatttctgaaaaatgttgccaggtcgccctcctgaaaggttgaaccaatttacacttcttgagtcacgtgtgatctctcccacccctgccactggccctgggcactatcagactttaa

SEQ ID NO: 241269 - DNA, 538 bp, Homo sapiens
attaggctatgctatctctcactatgtgaaattgtgaaaatgattttctccaaacaaccatacccagaaaatggaagttttaatagagtagatgagaagatgaaagggtccttttaaataatagatcccacaggaaaaaggctggatgggccctggaggggcgtgctgatcatcagcggtgaggctgtggggtggtgctgggccctgattggcagcaggggagatgcaggtctccagaagtggcacagaaacgcgggtgtagtgggagacaatgtaggacaaaggctgtataacaatgttccctagaacacktactggcttttccactgtggttaaaactgcataaaacaaaggcattttagggaaggagaggaaaaagatgagaatcctcattcttcagatttctggcaaagattactcaaatgtgttttaggcagagacgaaatggggcatcatgcttgatgatcacagatgaccgcaccgaatatgccttagatgtgagccaggatttcatgaactgggaatattgaaagctgta

SEQ ID NO: 241270 - DNA, 625 bp, Homo sapiens
taaagattgagctcatcaagatccagcaaaaaaggtatgttataaatgatgttattctgatttagttcttgctttctccaatttgtttatttttatgtgacctagctttatacattgcaatttaaaggaaatgaaaaacagttttgttattttcttgtgttatctgggagattatcttattcttttagggttcaagtgcatagagttggtgcaatcagccacagtttatgacacagtataatttatgcttcttgcattctgttttaaatttattttcaccttttattttccttccttttatccctttgtattatgtctaatatcacctcatcttcaccccaatccatgatgtcaccataagctatgtgaatacaatttacatgatggctttgggcttttcatctcttcacgtttcttcacaatattcattcagaatattgtgagttgtccatgctgtcccctgtagatatactagtttccttttcactgctgcatagcattccatcatttgtaataccacattgtacctatcaagtccctatttacagacatttacattgtttcgcactctttgatttgattaayaattctggacaatctctttgtgtatatgtagaatgatttt

SEQ ID NO: 241271 - DNA, 515 bp, Homo sapiens
ttgtggaatagaattggtgagaatgggcattattgtcctgttctagttctccagggaaatgcttccagctttttcccattcagtacaatgttggctgcaggtttgtcctagatggctgttattattttcaggcatgtttcttcaatgcctagtttctcaagggtttttattataaaaggatgttggattttattgaaggtttttcctgtgtctattaagatgatgatatggtttttgtttttaattctgtttatgtgatgaatcacatttattaatttgtgcaatgttgaaccaactttgcttcccaggaataaagcctacttgattgtgatgaatcacaattgatgtgctgctkgatttggtttgctggtattttactgagaatttttgcatctatgttcctcagggatattggcatgtggttttctttttttcattgtatttcttaccaagttttcttatcaggttgatgctggccttgtagaatgcgttagagtacctcctcttcaattgtt

SEQ ID NO: 241272 - DNA, 473 bp, Homo sapiens
tgaattaatataaataaattttcagaacttgaataaactcgtgaacttttagattgaaaggaaaatggtcttcagaacgttgtttaaatctgtcaataaatttcacaactttctttgtagcgttttcccaaatttgtttaagtttactccaaaatgaaattatagttcttgaatactttttgatatacgtctttatttttctcagtacatattattatttaggtattgcagattgcattggcaaattctttctaatatgatagcaaatttttatcatcagatcaatcaaatcattggaaagcattctcagtttttgtttttttttttttttttttwagttataaagaacaaatttatttctcacagttctggaggctgggtagttcaagatcaaggtgccagcatctaatgaggaccttcttgctgtgccatctcatggtggaagttagaaggaaacgagagcgtgagagaga

SEQ ID NO: 241273 - DNA, 452 bp, Homo sapiens
gaattcaaaatctgagatgattagaatatcaactgaagttaattattgttttatgttttatagtggcataggagaaggtctcactaataattttaatagtgtttttcagatattttgtttgttaatttttgtacatatgttgattttttttctttcaaacttattttgtacggtraactctttatttcagacaggcttcttttccttttatttgaataatcttttccaatgagcatattgctattaaaatgcccctccaatcatgtttttcattggtgagctcacagatattagtattgcagggcttggggaaaaacccaaagggatttaacattaaggaaactaaccaactctccaaatgcccagattagattgctttctgcctccctttgacaacttgcttcaaggaactactataaatgtttccctaaatgtttcccagtggattaaag

SEQ ID NO: 241274 - DNA, 415 bp, Homo sapiens
acattattaactagtttttagctctaaacttcagcttgattttacccattgcctagtttcatctgccaggtcaaagaagctggccattttttaaatgagtgtgcataatccttagggttttaataaccattaacaacatcaggcccttaagtttctatggagatgatgcttatttgtagatctaagatttgaagcataaattctcacatccagaacaaccgaagctcatattatgaagattgtctgataattacatcttttataccctttatctgatatctgaaaatttccaaggtagttttagtgggatagccaatattttaggagctaagcattcattattaaagcaagatttctgagaagccatgttgttwagagaaaaaaagaaaaagaatatagataaataaaggcaagg

SEQ ID NO: 241275 - DNA, 494 bp, Homo sapiens
aatgatcagggaaatgcaaatcaaaaccacaatgggataccacattactcctgcaagaatgcccataatcraaaaatagaaaaataatagatgttgttgggaatgtggtggaaagggaatgttttaagctgctggatagaatgtaaattagtacaacttctatgaaaaacagtatggatatttcttaaacaggtaaaagtagttctattattcaatctagaaaacccactactgggtatctacccaaaggaaaagaactcattatacgaagaagacatttgtacatgtatgtctatagcagcacagttcatcattgtaacaatgtggaaccaaacaaaatgcccataaactaatatgtagataaagaaaatgtggtatatatacacaccatggaatactactcagccataaaaaggaacaaaatcatgtatcttgcagcaacttggatggagttgaaagctgttattctagatgaagtaacaggagtgaaaatc

SEQ ID NO: 241276 - DNA, 494 bp, Homo sapiens
aatgatcagggaaatgcaaatcaaaaccacaatgggataccacattactcctgcaagaatgcccataatcgaaaaatagaaaaataatagatgttgttgggaatgtggtggaaagggaatgttttamgctgctggatagaatgtaaattagtacaacttctatgaaaaacagtatggatatttcttaaacaggtaaaagtagttctattattcaatctagaaaacccactactgggtatctacccaaaggaaaagaactcattatacgaagaagacatttgtacatgtatgtctatagcagcacagttcatcattgtaacaatgtggaaccaaacaaaatgcccataaactaatatgtagataaagaaaatgtggtatatatacacaccatggaatactactcagccataaaaaggaacaaaatcatgtatcttgcagcaacttggatggagttgaaagctgttattctagatgaagtaacaggagtgaaaatc

SEQ ID NO: 241277 - DNA, 494 bp, Homo sapiens
aatgatcagggaaatgcaaatcaaaaccacaatgggataccacattactcctgcaagaatgcccataatcgaaaaatagaaaaataatagatgttgttgggaatgtggtggaaagggaatgttttaagctgctggatagaatgtaaattagtacaacttctatgaaaaacagtatggatatttcttaaacaggtaaaagtagttctattattcaatctagaaawcccactactgggtatctacccaaaggaaaagaactcattatacgaagaagacatttgtacatgtatgtctatagcagcacagttcatcattgtaacaatgtggaaccaaacaaaatgcccataaactaatatgtagataaagaaaatgtggtatatatacacaccatggaatactactcagccataaaaaggaacaaaatcatgtatcttgcagcaacttggatggagttgaaagctgttattctagatgaagtaacaggagtgaaaatc

SEQ ID NO: 241278 - DNA, 436 bp, Homo sapiens
caaaacagaaggaaattatctcagcataataaaggccatatatgaaaagcgatacctaacatcatactcagtggtkaaatctgaaagctttcaaagctttggatgcccactctcaaaacttctaagcaagatgttactgtaaatcttagatagagcaattaggctagaaaaggaaatgaaaagcattcaaattggaaaggtatattaggccattcttgtattactagaaagaaatatgtgaggctgggtaatctataaagaaaagaaatttcattgcctcatcattcagcaagctgtacaagcatcgcaccagcatctgcttggcttctggggaggcttcagggggcttttactcatggcagaagacaaagcaggaacaggcaaatcacatagtgaaagcaggagtgtgggggaagtgccacacacttttaaggaa

SEQ ID NO: 241279 - DNA, 511 bp, Homo sapiens
gtacagaagtggagaaatatgactgatttgaaaactggaggaaaggcatagttcattcttctcctgatggacatgaagatgtatcagactcaatttactagttaggttagaaggaaaccttgcaaggcagtgctttgtagctaagtattctcactcacttgtgttaattaatttctctgaattatcactttttattctctttgtaatgaaataataagtatttggagaccgactgagctgaaaaagagagagatcacaagcttagttgcagtgacaccttttgcctctccataaaagtgaaactggctgacaaaatggagagcctgggacatcagggacaggagacmaaacagcgcagcaagtatgcagacaagacggctgcttttggtaattaaagatggcctggttaataccgggaggtaacaaagatggcatgcttagttattttatgtttgcctaaaatattaaaaactctcaatattttttccctgtaatctcataggctatcaat

SEQ ID NO: 241280 - DNA, 595 bp, Homo sapiens
agatcttcagcttctccagtgggggagaggggggagtgtttggaagaggggggtttccctttcccacttctgcagttggggcattcacagtatttggggtgtctcctgggtcctgcaggaggaatccacttccttcagagggtctgtggatcctcttagktttgctggtttgttcttgcagtggatctaaagctcagattcacagtgcgagactctgcatgctgctctctccggagatgcaatctaatcctgcctcccgtccaccatgatcccaggcattttttcatatatttattggacgtttgcatgttgtcttttgagaaatgtctgttcagacctctctccatttttgatgggactgtttgttttttgctgttgaaatgtttcacttccttacatattttgcatattaattccctgtcagatgaatagtttgtatcatctgtgggttgtctttccactctgttgagtgtttcctttgctgtacagaagcttttcagtttgatgtaatctcagttgtttatttttgctttgattgcctgtgcttttgaggccttattcataaaatcttttcccaaaccaacgtcctgaagaa

SEQ ID NO: 241281 - DNA, 455 bp, Homo sapiens
atttacccccccctacactcaatgtctggtgtatattccaagcacgggatccaaatcagatacttatatcccggggttacctcaaatacatttcttactctttgaaatattcttaataaaaaagttatgagaaagcaaaatagattacaacaggaaagaccataatgccatttgttattactaattgtgatgggaatattaaaattttccaaagagaaactacacattgatcactaaattggaatttccaatttatatattaataacctcatcttatgtacaaaagagattataaatttagttacaatgggctatggagrccaggaaagcagtagtcagtgatagagaatagaggatgaatactgggtgagaaaagcatattaccaagaagtaagcaaaataaacaaagagtaaaggaaatgtacatgtttcaaggacttagagacttatagaaa

SEQ ID NO: 241282 - DNA, 183 bp, Homo sapiens
aattgcatttgtatatactatcaataaaaattagaacttaaaattttaatatttactctttaaatttatcctawcaagcgtttatcatttcgtgtgttagaaaccttccaattccacttttctagttattttgaagtacacaatatgttattgttaactatagtcaccctattgtgctacaga

SEQ ID NO: 241283 - DNA, 585 bp, Homo sapiens
cctacagaccaatgttaagtgaaatcatcctttctaaaagtttagcagattacaggttttcatatgccatgggcaggaagccagcagtttctgggaacatgagaaaggtagggatttgtatctcctctatgttttcatggagtatgaattcattctgctcaaattattttattgaaacctcatctaagaacctggggctrgagagtcgcggcgatgcctgcagagtcacttggccgtcctcgtttcctgcatcttggtgactcccggccatcagtgcagatggggctccccgccactgtccccaagatatcccggggctcagcatttcatgtagttatttccggaccccaggcattcggaggcccatatggctttggctaccaggcagagccgtcgactgggaatgcagggaggtggttagaagctgggatgaagaacgacctgcgttcctcgtgtatactcacacgcacagttaatgtaaccctagggctagcactttggcaacaatttcccttgttctctctacagcccctcccagcctgctgtatcatgctctatgcaacagcttctcttcatttcaagcct

SEQ ID NO: 241284 - DNA, 536 bp, Homo sapiens
agaacaaatgggacttggagctggattgtgaagggccttccctgtatattttgcagaggaacttggacttactcttgaaagcaatggaatcattaatttgtagtggcaccagtttgcatagagtatgatttttccccaatagtatgtggtatcttgcctgtatgaatggtgaaggcagattcacatcaatccaggattatgttttgacccatgggtagagaaaaagacaaaaagaataaggaattcagagctgaccagagtggttagaatggctggagagaaaatgaagggaaatgcaggaaaagctgctgagagaagtcagaaaggtgaaaggacccayatatggatgggtgaagacgtgtggtggtgataagggagctaaagagccagaagaatgggaagttgttgttagaaagcaggatgcttgagtttcatatttcagaaattgaatagctcctgatgacaatgaaaaccagaatgtagccgggggcacaaggggatggagtgaagacgaaaatcactggaatcaaggtgaa

SEQ ID NO: 241285 - DNA, 305 bp, Homo sapiens
cctcaagccccgtaacttgtgagttacaagtcctagacrtgtcctctttctctcccctcacatccaatcaatctccaggtcctgcacattttctctcttaagtgtttctagaacttgtctcttcctctatagacattgtctatatttagacaaaaataccattgtctccatttggctcctcattacctcttgactagatagttacgatacatttaccttctttcctgactgtctgtactcaaccctaacccttaaactacacaaggcattactgccttctgctgttccagatggaccagtctggc

SEQ ID NO: 241286 - DNA, 377 bp, Homo sapiens
cagagtacttttcctcctgtatttctactgtttaattaatggcaccaccatccatcctgtcctcaagccccgtaacttgtgagttacaagtcctagacatgtcctctttctctcccctcacatccaatcaatctccaggtcctgcacattttctctcttaagtgtttctagarcttgtctcttcctctatagacattgtctatatttagacaaaaataccattgtctccatttggctcctcattacctcttgactagatagttacgatacatttaccttctttcctgactgtctgtactcaaccctaacccttaaactacacaaggcattactgccttctgctgttccagatggaccagtctggcttttctggtaag

SEQ ID NO: 241287 - DNA, 527 bp, Homo sapiens
aggcatgttgttttttccacttagccatatatcttggaaatcattccatatcagttatatagtaaacttactaattcttttttccatgaatgaataggacgctatttgactctctggaagtaccataagacacttaacaagtccccctttgataagcatgtaagttgttctttcacagttcgaacagtgctataatgtacatatatctttgtgcccatatgcaagtttaacaacaagttcaattcctaaaaatggaatcactaggtcagatggcatgggcrtttataattttgacaagtgtttccaaaaatgccctccaaagttgtaccaatttactctcccagcagcaatatatgaaagtacctgtttttctacaacctcatcaacggtttatctctttgatgtttgctagttgaaagatttgtacttaataagaaattagtcctttgtgtaggagttaaacccttgagtgacagagagaaggaagtgctggctgtttaccaggccagcactttctgaagtctaga

SEQ ID NO: 241288 - DNA, 527 bp, Homo sapiens
aggcatgttgttttttccacttagccatatatcttggaaatcattccatatcagttatatagtaaacttactaattcttttttccatgaatgaataggacgctatttgactctctggaagtaccataagacacttaacaagtccccctttgataagcatgtaagttgttctttcacagttcgaacagtgctataatgtacatatatctttgtgcccatatgcaagtttaacaacaagttcaattcctaaaaatggaatcactaggtcagatggcatgggcgtttataattttgacaagtgtttccaaaaatgccctccaaagttgtaccaatttactctcccagcagcaatatatgaaagtacctgtttttctacaacctcatcaacggtttatctctttgatgtttgctagttgaaagatttgtrcttaataagaaattagtcctttgtgtaggagttaaacccttgagtgacagagagaaggaagtgctggctgtttaccaggccagcactttctgaagtctaga

SEQ ID NO: 241289 - DNA, 328 bp, Homo sapiens
ctttttgctcttctaattagataatttcatgtgttctgtatccatgcttgctaattctttcctctgttggatgaagcctgctgttgaagctttctaatgagtttttcagtttagctattgtattatttatttccagtatttccatttgatatttaaaaattgtttctatttatctgtraaatttctcattttgttcttggattgttttccaaatttcatttagtttctgtcttttcttgtatttcttatgattccctgaactttttaaagaggattattctgactctctgtgagacatttcacagatccacaattcttctgggtctat

SEQ ID NO: 241290 - DNA, 537 bp, Homo sapiens
gtgtgcctggcctcttcttccatttggttgtaagagtcatctacttttgtggcatgtagttgtagttcattcattttcattgctacttaatattcccttgtatggacatatcacaatttctttgtccattctggcactttagayatttgggtttttcccattggggctattacaagtgctattgctaatgacatttttgtgtatatctcctggtatgcaagtgcaatctttaggatgtataccttggggtgaaattactggactatagggtatgcatatatttagttttattagatcatgccaaattgttttccaaagtggccacaaaatttagactcccatcagagatgtacggtaattgccattgctccgcatccttgccaaaatataatattattagacttcttatgttttgccagtctggcggagatgtaatggtgtctcactgtgatcttcgtttcatatccctaattaccaatgaaattgggcacttctacatatgtttataggctacttgagttttctgttttctgagtg

SEQ ID NO: 241291 - DNA, 537 bp, Homo sapiens
gtgtgcctggcctcttcttccatttggttgtaagagtcatctacttttgtggcatgtagttgtagttcattcattttcattgctacttaatattcccttgtatggacatatcacaatttctttgtccattctggcactttagatatttgggtttttcccattggggctattacaagtgctattgctaatgacatttttgtgtatatctcctggtatgcaagtgcaatctttaggatgtataycttggggtgaaattactggactatagggtatgcatatatttagttttattagatcatgccaaattgttttccaaagtggccacaaaatttagactcccatcagagatgtacggtaattgccattgctccgcatccttgccaaaatataatattattagacttcttatgttttgccagtctggcggagatgtaatggtgtctcactgtgatcttcgtttcatatccctaattaccaatgaaattgggcacttctacatatgtttataggctacttgagttttctgttttctgagtg

SEQ ID NO: 241292 - DNA, 537 bp, Homo sapiens
gtgtgcctggcctcttcttccatttggttgtaagagtcatctacttttgtggcatgtagttgtagttcattcattttcattgctacttaatattcccttgtatggacatatcacaatttctttgtccattctggcactttagatatttgggtttttcccattggggctattacaagtgctattgctaatgacatttttgtgtatatctcctggtatgcaagtgcaatctttaggatgtataccttggggtgaaattactggactatagggtatgcatatatttagttttattagatcatgccaaattgttttccaaagtggccacaaaatttagactcccatcagagatgtacggtaattgccattgctccgcatccttgccaaaatatratattattagacttcttatgttttgccagtctggcggagatgtaatggtgtctcactgtgatcttcgtttcatatccctaattaccaatgaaattgggcacttctacatatgtttataggctacttgagttttctgttttctgagtg

SEQ ID NO: 241293 - DNA, 609 bp, Homo sapiens
tatccactcaccagtagatttgatcttccttcagaggagaaatggcatctgccatagtaaaaaaattgctgtgattttaatttgcacttatgggataattagtaattttgaaaattttgtcttgtttttggcctcttgtctgcctttaaaaatgtttgtttatgttctttgcccaattttaatggagytatttatttttatttagttgagttccttgtgattctggatattagccctttgtcaaatgcataatttccaaatattttctcccattctgtagaatgcttgttaactctgctaattacatattttactacacaaaatcttgttagcttagttaagtcatattggtcttttttgtttttgttgtgtttgcttccaaggtcttaggcataaattattttaatagttcaatgtccagaggagtttctcctagatttgcttatttttcagtttttctttttttaatttataatttgtatagctttagatattacagttaagtatttcgctcatcttgagttactcttgtatatgttaagacatatggttccagttttattcttcagcatatgtctataaaatttcccaccattatttagtgaaaaa

SEQ ID NO: 241294 - DNA, 634 bp, Homo sapiens
tgcaatgaaatctttttttatataygcatcttttacgttttttttctttttcttttttaactaggaagattcaagtacatgacccttttgaaagtacagatatctcctgctgaatgtcagtaatcctttcctggaaatcaaatgttctgtgtaaagatattaactaggagcctatatcccattattttaagtgggaaaaaattatactgtgttgtacttcaacccaaaatccaaaaagtaattaagacaaaataaaatacctaaatatatgcaacaaaccattgtgttagagaagttaaatacttaaaacatcacgatcacccaacaacatggtgtgacaaaacagcgcctctgtgcattgcatactgtaccatccacatccagtgcgccatgaaatcttgcagcttgagacattataaaactctaggcagaaagaaggtctagctatgaaagactcagtgggaatgcattcaggactggcactaggtggtagagtacagtttacaatgaacagcatggagtgacacctcagagccagcagcctctgagacacacatccccgccatggaattggagcccctttccaaaagtccgcatgggattctgacattttaccaactgtagttggaatgca

SEQ ID NO: 241295 - DNA, 634 bp, Homo sapiens
tgcaatgaaatctttttttatatacgcatcttttacgttttttttctttttcttttttaactaggaagattcaagtacatgacccttttgaaagtacagatatctcctgctgaatgtcagtaatcctttcctggaaatcaaatgttctgtgtaaagatattaactaggagcctatatcccattattttaagtgggaaaaaattatactgtgttgtacttcaacccaaaatccaaaaagtaattaagacaaaataaaatacctaaatatatgcaacaaaccattrtgttagagaagttaaatacttaaaacatcacgatcacccaacaacatggtgtgacaaaacagcgcctctgtgcattgcatactgtaccatccacatccagtgcgccatgaaatcttgcagcttgagacattataaaactctaggcagaaagaaggtctagctatgaaagactcagtgggaatgcattcaggactggcactaggtggtagagtacagtttacaatgaacagcatggagtgacacctcagagccagcagcctctgagacacacatccccgccatggaattggagcccctttccaaaagtccgcatgggattctgacattttaccaactgtagttggaatgca

SEQ ID NO: 241296 - DNA, 425 bp, Homo sapiens
gactgaatctggatacctcaacatttggagtcagagcctgaaaaggatccctcaaaagtgcccaagaagcagcagaatgaggaaagacagcccagggagtgtggcacagctgctcctcaccacttcaggctcccctggagtccaakgcactggggcctcattcctgggtattataattgcctcctaagtggcctctggcttatgtctcctaccccagttgatgttcatcacatcagccagagtggctctgttaacacccaagccagttcctgcccatctgctgagaatcttcaagggctttcacctcactctgagtcgaagccaatatcttcacaatggcctggccctttgccaactgctgtggtttaaatgtttgtacccttcaaaacttaggttgaaatttgcttggcaacatggtggtggca

SEQ ID NO: 241297 - DNA, 566 bp, Homo sapiens
tgtgagcccaaagtctgcctggacgatgaatgcctgatgtgtggccactcctcagaagtgcacagcaggaaacttctagtggccaatgagcagtgctacatttttcattcatgtactttctgcaagttcaccttttacttttatcgaaatgayacaaatattagtacgataaggcttataacaaacatcatggtctcctgccccctcctctcacacctgaccctaacttccctgagagaacttctttttgctcttttcactcatgttatttccatgttttcaaatagtatgcttatccctccatgtgttgattttaaaaatttaggtattatccagcacagtggtgttcaaaggatggtccctggactggcagtgtcggcatcacctggtgagtattgatccacttattcactcatgtattctttatttttttaaaaaacaaatgtttactgaaggacatcataatctaagcgttgtctaggctggcacgttccaagacagtcatcatcagccacagatgacttctgagcccttgaaatggggctggtgtgcactgagctggaatt

SEQ ID NO: 241298 - DNA, 565 bp, Homo sapiens
tgtgagcccaaagtctgcctggacgatgaatgcctgatgtgtggccactcctcagaagtgcacagcaggaaacttctagtggccaatgagcagtgctacatttttcattcatgtactttctgcaagttcaccttttacttttatcgaaatgacacaaatattagtacgataaggcttataacaaacatcatggtctcctgccccctcctctcacacctgaccctaacttccctgagagaacttctttttgctcttttcactcrtgttatttccatgttttcaaatagtatgcttatccctccatgtgttgattttaaaaatttaggtattatccagcacagtggtgttcaaaggatggtccctggactggcagtgtcggcatcacctggtgagtattgatccacttattcactcatgtattctttatttttttaaaaaacaaatgtttactgaaggacatcataatctaagcgttgtctaggctggcacgttccaagacagtcatcatcagccacagatgacttctgagcccttgaaatggggctggtgtgcactgagctggaat

SEQ ID NO: 241299 - DNA, 551 bp, Homo sapiens
atcaaaactttacatcatactccataaatatatgtaattactacttatcaatttaaaaaaatgaaattaaaaacaatttcatttatagtagtatcaaaagggacacatttcttagaataaacttaaccaaaaaatacaagacttatacaytgatgactacaaaacattgttgaaataaatgaaaggcctaactaaataaatagaaagatttcccaaggccatggataggaagacaatattattgagatgacaattctctccaaactgatctatagatctaacacaatctttaccaaaattctaaccagctctttttcagaaattattaacaagctgatcctaaaattcatgtgaaaatgctagggacccagaatagccaaaacaatctaggaaaagaacaaacttgaagttttcacacttcctgattttcaaacttattataaagctatagtaatcagaccatatggtactgacataaggaaaacatagatcaatgaaatgtaattgagtgtccagaaataaaccctttatttatggtcaattgatttttc

SEQ ID NO: 241300 - DNA, 551 bp, Homo sapiens
atcaaaactttacatcatactccataaatatatgtaattactacttatcaatttaaaaaaatgaaattaaaaacaatttcatttatagtagtatcaaaagggacacatttcttagaataaacttaaccaaaaaatacaagacttatacattgatgactacaaaacattgttgaaataaatgaaaggcctaactaaataaatagaaagatttcccaaggccatggataggaagacaatattattgagatgacaattctctccaaactgatctatagatctaacacaatctttaccaaaattctaaccarctctttttcagaaattattaacaagctgatcctaaaattcatgtgaaaatgctagggacccagaatagccaaaacaatctaggaaaagaacaaacttgaagttttcacacttcctgattttcaaacttattataaagctatagtaatcagaccatatggtactgacataaggaaaacatagatcaatgaaatgtaattgagtgtccagaaataaaccctttatttatggtcaattgatttttc

SEQ ID NO: 241301 - DNA, 551 bp, Homo sapiens
atcaaaactttacatcatactccataaatatatgtaattactacttatcaatttaaaaaaatgaaattaaaaacaatttcatttatagtagtatcaaaagggacacatttcttagaataaacttaaccaaaaaatacaagacttatacattgatgactacaaaacattgttgaaataaatgaaaggcctaactaaataaatagaaagatttcccaaggccatggataggaagacaatattattgagatgacaattctctccaaactgatctatagatctaacacaatctttaccaaaattctaaccagctctttttcagaaattattaacaagctgatcctaaaattcatgtgaaaatgctagggacccagaatagccaaaacaatctaggaaaagaacaaacttgaagttttcacacttcctgattttcaaacttattataaagctatagtaatcagaccatatggtactgacataaggaaaacatagatcaatgaaatgtaatygagtgtccagaaataaaccctttatttatggtcaattgatttttc

SEQ ID NO: 241302 - DNA, 551 bp, Homo sapiens
gtgaggacatagagagaaggagccatctgcacaccaggaaatagaccctctctagacacctaatctgctgatgatttgattttggacttctcagccatgagaactgttagacatacattcctgttatttataagccacccagtttatggtattttgttagagcaacgtgaacagactaagacaagctgccacactgcctccagtaatactctcttctaagctattctatgctaaaattwaaaaaatcttgctattacattgtttttggattcttcacaagcttgcttatactccttcaaatatactcttgcctattaagataactcttaagcttgtgatgcctagacttaaagatatgtgaatgctaggtgtagttttactgtcagttattgtgtttttactatcacatcctcagcttggatctgtaagaggaaagatttgacataaataatttataaggtcctttccaatgttgaaaagcgattgtatttggtgtttgtacctgtgcatgttacagtcatgccactgtattggcttcttaaacttgcagt

SEQ ID NO: 241303 - DNA, 591 bp, Homo sapiens
ttggagttaatcctctcgaagcctaccattgctttatcaactaaaattatggaatattctaaatccctaaatcccttgtcatttcaacaatgctcatggcatcttcaccaggagtaggttgtatcttaagaaactactttcgttattcatctctaagaagcaactccttatctgctaaagttttatcatgggactgcagcaattcagtcacatcttcaggctccacttataattctagttctctggctatttcttttttaaaaaaaaattttccataagtaattggggtacaggtggtatttggttacatgagtaatttctttagtggtgatttgtgagaatttgatgcacccatcacccgagcagtatacactgtaccatatttgtagtcttctagccctgaccctcctcccactctttcccccaagtccccaaagtcattgcatcattcttatgcctttgcrtccccatatcttagctcccacatatcaatgagaacatatgatgtgtggtttgccattcctgagttacttcacttagaataatactctccaatctcatccaggtcactgcaaatgctattaattcatt

SEQ ID NO: 241304 - DNA, 447 bp, Homo sapiens
ttcctgagttacttcacttagaataatactctccaatctcatccaggtcactgcaaatgctattaattcattcctttttatggctgcatagtattccaccatataggtatataccacagtttctttatccacttgattgatgggcatttgggttcrttccacaattttgcaattgtgaattgcactgttgtaaatgtgtgtgcaagtatcttttttgagtaatgacttcctttcctctgggtagatagccaacagtgggattgctggatcaaatggtagttctacttttagttctttaaggaatctccatactgttttccataatggctgtactagtttacattcccaccagcagtgtagaagtgttccctgtttaccgcatccatgccagcatctactgttttttgattttttgattatggccattcttataggagtgaggtagta

SEQ ID NO: 241305 - DNA, 574 bp, Homo sapiens
agacactgtgtttgggggcaagtagacacctttgacaccttccatgttgaactcatggggtttagtggccagggacattgtcaaatatcaaaagtacttttaagttcagtcacttactagcaaggtgcttcctgacttcagggacaaaccatcaaagggaccaatccagaaaaagggttctcattgtccaggccttcttgttgtacaaccaaaagactggcagctggtgtttaacttttcccttcaagactcaagggttaacagtattatagttaagggcaatcctaatcataaacctaactgcatttgtataaaatggtagagtcagcctattccttcctgccttcagtcgtgttgttcgcttgtctttcttactaataaatgccctttgtggcattttttttccagaataaagcactttgatctgcattttaaaaacctgttcttgaagatatccattctcctcaatgattttcttaatggcatctggaaactyatctgctgcctcttcattggcagaagctgcttctcctgttatcttgacattttttaagccaaatctctttgtaaaatt

SEQ ID NO: 241306 - DNA, 595 bp, Homo sapiens
tggttgccaaaataagaaacatattaggagctgaaaagccaaatgagcacaactgaggaacaaattagtgattagaagaccaagtcatacaattctaccagaacactgaatggaaattctatgcaaaactatggagattataaaactcaagtggagacaaggagaaaaaatccagagtcataataatctatattcagaaagagaaataaagaagaaatggaatccagaaaattgtagaaaattgctctgagatgaaaaaaaagacttgatattccaatagagtctctggtttgaaatgggaatatcaaaagaatgtaacyagatttctgctgttgagatatttaactatattgcttttaaagtctgggataattctatatttaagtttaaaagagcacaaactacctcaattccattctgtctgctaaatgtgcataaacaatttctgcatggaatattttttaaagtctgctggatttattcaaataaggcatcaatccatcttactctgtttttagcagacatttggtacagggcaatacagcccatggataatcactcaatgtttgctagttaactaagaaacactaacagt

SEQ ID NO: 241307 - DNA, 543 bp, Homo sapiens
aagtccacacccaagcagagacactatttattaattaaatgtagatacctcccctacacacacttatgagactctgtgccagtgattcttgtattttttaaaagaaatatatcacacagtcaagcgtggttccttcaaagagagcatcaccctgctgactgagtccccttcttttaaagagaacaggcaacttctcaagggatactatctgtggatcattaaaggcccatctaactcaaaacatttccttttgttaacttgtcccagttctggaaatccctacccatggaacttcttttatttttattttaggataaaggcattacattttcaggaagtccctgtcaggctgcaaatatgtaacctggctaacctggagacattaggatggatatttttgttggttcccyagcagaaagctgtttcttgaaaaataagattggtttggtgggagggagtttaaagacactgatgcatgcagtcctgcagagaaaagtttacgtcctggagatttaccaaatgagagtttctgggtagtaacag

SEQ ID NO: 241308 - DNA, 527 bp, Homo sapiens
ctttgtttctcctaataactttgctagggccaataaatgtaagcttgacttttagcaactgttttactatatactgcaaatagagctgcttaaaaagcatattaacaaagccatttgtcaaatggatttgaaaggctttttaaaagtcaccaatgttaatgttttaaaaattgtggggtggagagaaacagtgttggaacagttcagcrttttgttttgagattaagtgcaactattgacaaggggattcctgaggtccatgcctcataaacactcagagtgctgtttaccagggtctctggtccctgccagaatataatctctgactaggtttgatctaaaaggaggattctatgcacctgtggcaactggcacttaggcggtgtcttggtgttaacagatttgaattcacatcttctgagcctcaaattgtactcagtgggcgaatacaggcatgcttttgctttggttccatagtatggtaagattaatattaagaaaatagaaggtataacttaattaccttt

SEQ ID NO: 241309 - DNA, 583 bp, Homo sapiens
ttggccttgggctcttcatgatctgggccctgctgctctccaactccatcaccttaacattctccatctcattcactgaactatagtgacactgacctttttcctgtaacttgaacacagtgcacataggcccattttagaggctttgtgcttggtggtccctttacttggtatccctttctctcgaatttccacaaggctcactccttcacttcatttatgtctttgcataaatatcacctcattgaagmcttctctcattccttactaaaataacctcccttctccctgcatattttatagccctgacgtaatatgtttggctgttatctatttgtcaccaaaatgtaagatccaacagggcagggctttatatactttaccacagtatcttcagcacctagaacataatgggtgctcaataatatttgttgaatatgttaatgaatgaaccaggattttctcccttgtggcctttttgagaggcagaactgcatgcaaattaaggaaaaaagtaggaggtttgaaatcaaatggacctcttatttccagccatgtcactttttagcaatgtgcctgtaag

SEQ ID NO: 241310 - DNA, 583 bp, Homo sapiens
ttggccttgggctcttcatgatctgggccctgctgctctccaactccatcaccttaacattctccatctcattcactgaactatagtgacactgacctttttcctgtaacttgaacacagtgcacataggcccattttagaggctttgtgcttggtggtccctttacttggtatccctttctctcgaatttccacaaggctcactccttcacttcatttatgtctttgcataaatatcacctcattgaagacttctctcattccttactaaaataacctcccttctccctgcatattttatagccctgacgtaatatgtttggctgttatctatttstcaccaaaatgtaagatccaacagggcagggctttatatactttaccacagtatcttcagcacctagaacataatgggtgctcaataatatttgttgaatatgttaatgaatgaaccaggattttctcccttgtggcctttttgagaggcagaactgcatgcaaattaaggaaaaaagtaggaggtttgaaatcaaatggacctcttatttccagccatgtcactttttagcaatgtgcctgtaag

SEQ ID NO: 241311 - DNA, 532 bp, Homo sapiens
ttaacgtgttcatgtttgtgcctcttagttttaagctggctactctactttcaggcatyaggattgtgtttttgcaagaaggaaaagggaagggcaaaatgtgaaggcattcgtacattgttggtaggaatgaaaaggatacagatgctttggaaaagagtctggaagttcattaaaaagttaagcatagagttatcatatgagctagcaattcactcctaggaatgtatccaagagaaagagaaaggaaaacatacattcatacaaacacaaaccaattcaagtgtttgtgaattggatacatttgcaaatgttcatagcatcagtacgcgtgagtcaaaaagtgaaaagaaaacccagatgtctatcaactgattaatggatagatatctaaatgatgaaatattattagttcataaaaaggaataaagtactgctacatgctataatgtgaatgatccctgaagacattatgtagtgaaagaggatggtgacaaaagatcacatattgcatgattccatttatttgaaa

SEQ ID NO: 241312 - DNA, 532 bp, Homo sapiens
cttaacgtgttcatgtttgtgcctcttagttttaagctggctactctactttcaggcattaggattgtgtttttgcaagaaggaaaagggaagggcaaaatgtgaaggcattcgtacattgttggtaggaatgaaaaggatacagatgctttggaaaagagtctggaagttcattaaaaagttaagcatagagttatcatatgagctagcaattcactcctaggaatgtatccaagagaaagagaaaggaaaacatacattcatacaaacacaaaccaattcaagtgtttgtgaattggatacatttgcaaatgttcatagcatcagtacgcgtgagtcaaaaagtgaaaagaaaacccagatgtctatcaactgattaatggatagatatctaaatgatgaaatattattagttcataaaaaggaataaagtactgctacatgctataatgtgaatgatccctgaagacattatgyagtgaaagaggatggtgacaaaagatcacatattgcatgattccatttatttgaa

SEQ ID NO: 241313 - DNA, 610 bp, Homo sapiens
ctcttgctccccaagtcccatggaggtgacacagagtgacctaggctaatgctgtgcatgtaatgggtttgtgtcatagctgaggaatccagaacttaggaagcccaaatcttttataataggctgaaaacaaacctgctcaatcttttccccaagggaaacattattttcattatactggaaagtaaacaaacgtgtcctccgctctggagggaggtactgtctttattttccgaggctgttcgttacataaacttccctgaaaaaatagctaataaataaataaataagaaagccgtcagtgcctctgctcacaaaatatgcaaaaacacaagaccyatggagaattttctcccaacaattataactatactcttgcatatactttcaagttccttgctgctctttctttccattgtatttacctggcaaacccccaccctgattaaataaaaacctcctatggcctgacacccaagcagctgatcatctgatgaacttaatctcccactcacctgaatgactatttctcattttctccgcttctcaaataaccaatatcttctcaccttcctccatctcaattgatagtcttgcttatttcactaaa

SEQ ID NO: 241314 - DNA, 568 bp, Homo sapiens
gcttttattatgttgatgtatgttccttatatccccatttttttkaggcttttttaaaatcatgaagggatgttgaattttatcaaatgcttctgtcagcatcaattgaaatgattatatggtttttgtccttaattctgtttatatgatgtatcacatttattggcatatgttgaaccatccttgcatccctgggataaatcccacttggtcatgttgaatgatctttttaatggattattgaatttggtttgctaatattctgttggggatttttgcctcaatattcataataaatattggcctgtagttttctttttttgatttgtctttgtctgattttgataaggtttcctttttattattggtttccggaagtttgattatgacaaatgttggtgtggtttctttgtgtttttcctactgagggtttattgagctttatttatttatttatttttaaatttatttgtaaaatttaattaattattttcaacttttaagtttaggggtacatgtgcaggatgtgcagatttgttacctacgtaaatgtgtgccattgtggttt

SEQ ID NO: 241315 - DNA, 568 bp, Homo sapiens
gcttttattatgttgatgtatgttccttatatccccattttttttaggcttttttaaaatcatgaagggatgttgaattttatcaaatgcttctktcagcatcaattgaaatgattatatggtttttgtccttaattctgtttatatgatgtatcacatttattggcatatgttgaaccatccttgcatccctgggataaatcccacttggtcatgttgaatgatctttttaatggattattgaatttggtttgctaatattctgttggggatttttgcctcaatattcataataaatattggcctgtagttttctttttttgatttgtctttgtctgattttgataaggtttcctttttattattggtttccggaagtttgattatgacaaatgttggtgtggtttctttgtgtttttcctactgagggtttattgagctttatttatttatttatttttaaatttatttgtaaaatttaattaattattttcaacttttaagtttaggggtacatgtgcaggatgtgcagatttgttacctacgtaaatgtgtgccattgtggttt

SEQ ID NO: 241316 - DNA, 568 bp, Homo sapiens
gcttttattatgttgatgtatgttccttatatccccattttttttaggcttttttaaaatcatgaagggatgttgaattttatcaaatgcttctgtcagcatcaattgaaatgattatatggtttttgtccttaattctgtttatatgatgtatcacatttattggcatatgttgaaccatccttgcatccctgggataaatcccacttggtcatgttgaatgatctttttaatggattattgaatttggtttgctaatattctgttggggatttttgcctcaatattcataataaatattggcctgtagttttctttttttgatttgtctttgtctgattttgataaggtttcctttttattattggtttccggaagtttgattatgacaaatgttggtgtggtttctttgtgtttttcctactgagggtttattgagctttatttatttatttatttttaaatttatttgtaaaatttaattaattattttcaacttttaagtttaggggtacatgtgcrggatgtgcagatttgttacctacgtaaatgtgtgccattgtggttt

SEQ ID NO: 241317 - DNA, 578 bp, Homo sapiens
ggattacagactgacaaggcagaatgtaggtgcatccagcccctgccacttcctgttcctccttagtgacaaatggtggaccagctctcccatcacctacactcctcaacacatactcacacatgcttttccctcataccatgggtccagcagataatttgtgcttcttccagtccacaacttggtttgagttggacaatgccagcctctcacagtacaggaggcttccaataataacatctcctaaatagttaatgtaacaaaagtgttaaagctttaaacataggaaaaaatatcacctataattacactgccctaatatcaaatctttattccattagcaaacaaacttttacatcatcgccaaggctttttgttcacttaagatttggtagtctttggactagaccctggaatagacaaagagcattagtggaaaaactggcaaaatccaaataaagtctggattttagttaatagtaatgtaccaatgttaattccatgrttttgacaagtgcaccattgtaatgtaagatattaaccttgcggaaagtcaggcaaagggtaggtgagaactc

SEQ ID NO: 241318 - DNA, 541 bp, Homo sapiens
aaacttttagtggtgatgcatagctttattatattgattgtggtgatggtagcaggagtgtatacatatgtccaaactcagcaaattgtatacatttatcgtgtgcagtttttgtatacccattatgcctcaacaaagctaaagagaaattaatcctctccttttatgtgctttcctagctgtgagtttcatagtatttgcttaatgtcttaccctgtcttactcttgcatgtgtatgcttcctcactagacccctgctgaccaggtttcattcaccttccaaaagcatttcatatgcattgtttaaacatgttgagatcactttttcttccttttccttcttccaatccyccatccccaccacactgccaagacctcctgaagagattatgttctatccaaaacctagcctattcctttcagctacaggagaattttacgaaacaggtggtaacactaataaattctatccaatagaactttacagtttataaggtgctttcactttcattatccattttatcattcatttttaaacaca

SEQ ID NO: 241319 - DNA, 516 bp, Homo sapiens
gacaggattgcagaaggaggaaatgccatccagcttaggtgatcagctctatgccagagggagaggcactctcttttttgatattggacttggcaaggctcttcttgctgtggaaatgatgagatctggaggtctaagactgggatgtagtcaagggaatggccaaaggagmagtttattgctcaaattcctgtctggcttttaagctgaaggagcaaaagaggtttctcaggctttatatggacaaccagatagggctctggggctgaagacctgactagtagtgcacatcacattttcctagaaggttatttgcctcggaacagggaagaggtggtatgatggagaagggggattggaactcaacggccattctaccttccttctagtgtgcttttctgtgctgcagcatctcaaaagataaaacttacctatctcagagtctcttgcaattggggttctagctgtctttggagtttggccaatcagatttgctcctgttagatttagaagaag

SEQ ID NO: 241320 - DNA, 516 bp, Homo sapiens
gacaggattgcagaaggaggaaatgccatccagcttaggtgatcagctctatgccagagggagaggcactctcttttttgatattggacttggcaaggctcttcttgctgtggaaatgatgagatctggaggtctaagactgggatgtagtcaagggaatggccaaaggagcagtttattgctcaaattcctgtctggcttttaagctgaaggagcaaaagaggtttctcaggctttatatggacaaccagatagggctctggggctgaagacctgactagtagtgcacatcacattttcctagaaggttatttgcctcggaacagggaagaggtggtatgatggagaagggggattggaactcaayggccattctaccttccttctagtgtgcttttctgtgctgcagcatctcaaaagataaaacttacctatctcagagtctcttgcaattggggttctagctgtctttggagtttggccaatcagatttgctcctgttagatttagaagaag

SEQ ID NO: 241321 - DNA, 386 bp, Homo sapiens
agggaaagaacctagcaagaaaggtagatgggacagctgtgaaattcttttctgtgaaattcttttaacaacaacaacaacaaaattgttgactataaaaagtggaagatgtcttagatataatccactgtgttcctttgactaatgaaataactctcagagtgtcarttagggtcctgagagtaaaaccactccaggaatgtctttctatacaggaaatgattacataggaaatggtaaaactgagaagccaaatgggatggagaggcaacctacagattggcaaaagtaggtagctgctactttccttagggctggagggccaataggaggaggtgtcattatcacaggccagaagccaggcccatctaataggagctagaatc

SEQ ID NO: 241322 - DNA, 431 bp, Homo sapiens
caagatggctgtggctaagagggaaagaacctagcaagaaaggtagatgggacagctgtgaaattcttttctgtgaaattcttttaacaacaacaacaacaaaattgttgactataaaaagtggaagatgtcttagatataatccactgtgttcctttgactaatgaaataactctcagagtgtcaattagggtcctgagagtaaaaccactccaggaatgtctttctatacaggaaatgattacataggaaatggtaaaactgagaagccaaatgggatggagaggcaacctacagattggcaaaagtaggtagctgmtactttccttagggctggagggccaataggaggaggtgtcattatcacaggccagaagccaggcccatctaataggagctagaatcttaggaccttggaaactttagaattc

SEQ ID NO: 241323 - DNA, 513 bp, Homo sapiens
ttttccccttgtttgttacaagtacacatacacacatgtatataaatacagacacatcttctctctcctctcttccctttattatttcatataaggaaggatattggtgattaacattacaatgtggtatataacttacagaatattcgggagtaactgtgactaagttcaaatatgcaaaaaagggtaggtgtggaggctgagtagccaaaggagtggactgtgccaggtattaagctattagcrtctctggttccaaaccaaccatcctttctgtgttctgctatgctgggattcggactatgaaaacacatttctctgttattagctggcttcctgctagcttctgccagactggaagactggaagagggagaaggactttctgctccccatttgtttgctattctagtttctgttaccccaggaatagctcattaccttaaagtgctagttgcttccagcagcagttggttccagtttccaacctctcttcctactcccaagccaacct

SEQ ID NO: 241324 - DNA, 547 bp, Homo sapiens
tggaaaccaaggcccagaaacttgaggtaatgtcactgttcacagcagtgagggagagaagmtgaagtttatatacaggtcctctgaccaggtcccctgaaaggtgatttcatgccttctccttggtcacttattgtcttctgggtccgcactttcctgcagcccaccttccaaacccctcagcccctatccccatcccagacactctgccagatccctggcaagtaagacaattacaaaaatccctcttggctttgatttttaaagtactaaattatgtgtgtgtgttttaaaattttccccatgtgaaccatgctttaaagggaccatatcactttttaaagagagggaataatctgaaaaccataagtattgagaatcccagaacataaaattttcccattactaactagtgcctattattcctgtcatttgattaaaattttccacaattcctatggataacctttttgaatacagccttaataatcagtgctagggcaaaatttcaccaaagtctgtatttatcctgttaatttccacgttg

SEQ ID NO: 241325 - DNA, 540 bp, Homo sapiens
atagtccaaaagctaggtctcttgcaccaaatgattatcctacttgtgaatgcaaaggaaaagttcttcaaggaaattagaagtgccactccagtgcatacatgaatgatgamaaagtgagacagcttcaatcctgatatagagaaagttttagtggtctggctaaaggatcaaacaagccacaatattcacttaagtcaaagcctaatccagagcaaagccccaactcttcctcaattctatgaaggctgaaagaagtaacgaagctgcagaagaaaagttggatgctaaaagttcacactgtttaagaaaagaagttgtctctataacataaatgtgcaaggtggagcagcaagtgctgatgtaaaagctgcagcaagttcttcagaagatctagctaagataatttatgaaagtactaaataacatattttcaatttagatgaaatagctttctattgggagaaagaagatgctatctaggactttcagagatacagaagaaaagtcaatgcctggtttcaaagcttcaaagcacag

SEQ ID NO: 241326 - DNA, 491 bp, Homo sapiens
aataagatcatatcttctcaacctattgccatgtgagatgcctgtacaaaccggggaaggaatgtacatccctgccttactgacgttgagcttggccatgtgacatatcttgaccaatggaatattggaaatattagacacttgtcatatccaatcaggagttttaactgtgtttgtatggcttgacttaatccttctcactctcacctccaccatgacaacagcatgtcctaaacattggtcactctttttgttgggttgcaatattaaatatatatgtatatatatgtatgagctgaatccagcccaactgatccacgacgtcatgtaacataagcaagaaataaatatttgttgtccttagcctctgagatactggggttgtttattattgcaacaaaacctgactaatacactcataaaataaaccatacatactgtcataactygttttctcatttcttacttaatcaactgccacatagagctac

SEQ ID NO: 241327 - DNA, 447 bp, Homo sapiens
aaaatctggtcaggtccctccctgcataaagcctgttcatgcctcctttgcttataggcttatgtccaaacttcttatcttgccattcaccatttggccactgcctgcctccctagcttcattcatcagtagtctcctatttgtctcaaatgttccatccagccccaactcccttttccacaggtctgcmggtctataatgctgggggtgacagtccatggttctgactcatctagcagtagctgctagagttttctctaccactgggatgctgagctcttgtctctataactggaacatatagatggatggatggatggatggatggatggatggatggatggatggatagatggatggagaaaaggaaaaccagggagaaatgtgtgcactctaggtagttccttagacttacacttttgaaatggagcagaatggttttcaggg

SEQ ID NO: 241328 - DNA, 425 bp, Homo sapiens
cgtcagcagagaaacagtaactagagcctttagggcaaagaacttgccaaggacaaatataggatgaaatacaggacaagcataggatgaaaagagaaggagccagggacagaatcagaataatccttagtattttaaggataagcagaaaagaaaactactatggagagtgagaaggagttttaaaaagtgaaagaagaatcaacagagtatcrtcattgaaataaaggaaagaaaaccttctcaaaggcctggtcaacacagtcaaacatggcagagttcaacactgaaaagaatccattagatttaatcaagcagattggcaggggagaagccttctggccccaaccctgaggatgagtgggaggcgagaaataagagacacaaagtgcggggtacagaagaatagtctgggtggtggaaag

SEQ ID NO: 241329 - DNA, 413 bp, Homo sapiens
agatctgacagtgaacataattcaaaataaaattaaaaaataaatgagtaaaatctatactctattacatggtgataagtgctatggaaaaaaattaagtcagggaggaatcaggactgctggagtgggaggattgcaatttttaaaagggttgctagraaaggcctcactgcaaagaaaaggtttgagcaagacattgaaagaggtgagggcatattcaccttttggatatttctgggaagaggaacagcaagtgcaaaggctctgaattgagcacgtgccaggagcggtcaagaagctagagggagaccagtgtacatggagtgtggtggagtagggtggagtagagtgcagtgaggaaggtactgtggattggaggcaggcaggggtgtggttagggtcatgcaagtaag

SEQ ID NO: 241330 - DNA, 406 bp, Homo sapiens
caaaataaaattaaaaaataaatgagtaaaatctatactctattacatggtgataagtgctatggaaaaaaattaagtcagggaggaatcaggactgctggagtgggaggattgcaatttttaaaagggttgctagaaaaggcctcactgcaaagaaaaggtttgagcaagacattgaaagaggtgagggcatattcaccttttggatatttctgggaagaggaacagcaagtgcaaaggctctgaattgagcacgtgccaggagcggtcaagaagctagagggagaccagtgtacatggagtgtggtggagtagggtggagtagagtgcagtgaggaaggtactgtggattggaggcaggcaggggtgtggttagggtyatgcaagtaaggtggtgtggggtaga

SEQ ID NO: 241331 - DNA, 399 bp, Homo sapiens
aatggtgctgctgtaaacattctcatgtagccataatgttcctgttaagtacagaaacatgcattgaaaggctataggagacgtgctaagtaaggtctgaggcctcatcagaccttaccagtttgctaaggttgaactagaccttagcagatcctgccagwttgcaccttattagcagtataattcaggtcgccatgtttccttgtcaacacctgggattttccattgtctgaactttagccattcaggtgggtgtgtaggttcattgcattgtagtttttattcgtatttccccagtcttactaagcacattttcaggcattcattagccatatttgtcctattttgttaagtacaaattttttgccaaattttatgtttttaagaatttgtgagagt

SEQ ID NO: 241332 - DNA, 622 bp, Homo sapiens
tacaatagctggtttctaattagagtatcttggtgtcctgatttcacctaatattgttctaatggactagtaaagtctctataaactccagaaatgcttgggtaggtccaaattaagtaaataagttttctaagcccttgctattgagtacagaactttacattctctgctaaattacwtggtctattagaaaaatatatgaaataaatataattcagtaggtctgaaattattctgaggataaaagtaacagagtagactatgacaggtccttaaagtctttcataaatggctcaaaaagcctaccaagttaaaataaaagggtaagataagccagttaaaaagaaaatagaaacgactttataaaactcaaatgcataatacttacctgagagccaatacagtgcagggcactttcctgtttctgcctttggtggtaagtagacagcaaatttcattttgcagtttagttcaacactagttttaacaaaaacaacaacaaaatattaatgcccctcattaatcaatacagaaacaaaataattatgcactatataaaaagtaagatatatactaaaggtccaaaataagttatttaatgttcaaaataagtggttccact

SEQ ID NO: 241333 - DNA, 421 bp, Homo sapiens
attttctgagggactttccctccctacctcaatctgaaagtctgtgggatgggggagccaaggctctgaacagctctttcatccatcttatgtgcaaggataaaaatctctaggaagaaaaaaaaaatcaagtttaagtctgccctgggctttgtatcattaaaaagttaattaaaactcttgctgtagtcattctccgatgcatagaacattatttaccttcttgattggtgtctaaaagrtgttttccttcatagggaagggcatgtgttttctcagctcatttcagaggatgccccgctgttagttactattcttggaagtcgtaacttcaagaacctgaagccagccatgagcccttcagctacttccaatcttgccagccttcctaaaaggtgtccttgctcatctccaaagggct

SEQ ID NO: 241334 - DNA, 248 bp, Homo sapiens
gaattcagaatcatgacatctcagagcttgacagagatcccgtttgctttcatgcagctgccctcagcagagtccataggatagtcacatacatttcagwttttttgttaatgtttctgatttttctttaagaatgcctagtgctgccccctcccccagtacagaagaaagtagcaaaaattctatgttcatgcaagaaatacataattttggaggaggaagatctgaatctggtgtatgctactggg

SEQ ID NO: 241335 - DNA, 396 bp, Homo sapiens
gctggtaggaattactactgaattttttatcttctaaatttgctgcaatatattattagtgttccttttatgttatatacataatatataattatatattctgttatgttatatattatgtatataagatgatataataatatgttcttttgtaataakaacaaatattttgaaatgacattgtgattgccagttttagtattgaagttactaaatgctcaagatgtttagagagaagaaaaaccctcatgatgaaatagtctaatattccagtactccatggaactgggggacttgagctcataggctctggatgcttgggggggacggcctgagaaagggcacagcggtgggaggggctgtcttgttccagtgggtcattcacaagtgagttgt

SEQ ID NO: 241336 - DNA, 507 bp, Homo sapiens
ccagctaattccagggtgcctcataacacatcatccttgccaaaaaggaactccttgggctatctattctttccatatttttatgccaaggattttctgtgtttcctctcccctggrcagcctcctactattcaattctcttgcaatattttatatttccaagaaattccactttatgatgaacaaaaattccatcatcttaatcatcttcacagaggactcattacaacttcttgaaattgatttaaacctggttttctcccaagcatacaatttcccttagccatttcaacctaacttattattcctccttatcagcattgtgttggtgcatgtgtgtgagtgatatggagggggagagaatccccagtgctagttccaaaacattgttcctccatcattgtataaatactccttgccctgtgagagttgaactctacaactctactaccctctgtgcttcccaacagacaattttctacaaatacataaaatttttcatttgac

SEQ ID NO: 241337 - DNA, 507 bp, Homo sapiens
ccagctaattccagggtgcctcataacacatcatccttgccaaaaaggaactccttgggctatctattctttccatatttttatgccaaggattttctgtgtttcctctcccctggacagcctcctactattcaattctcttgcaatattttatatttccaagaaattccacttyatgatgaacaaaaattccatcatcttaatcatcttcacagaggactcattacaacttcttgaaattgatttaaacctggttttctcccaagcatacaatttcccttagccatttcaacctaacttattattcctccttatcagcattgtgttggtgcatgtgtgtgagtgatatggagggggagagaatccccagtgctagttccaaaacattgttcctccatcattgtataaatactccttgccctgtgagagttgaactctacaactctactaccctctgtgcttcccaacagacaattttctacaaatacataaaatttttcatttgac

SEQ ID NO: 241338 - DNA, 507 bp, Homo sapiens
ccagctaattccagggtgcctcataacacatcatccttgccaaaaaggaactccttgggctatctattctttccatatttttatgccaaggattttctgtgtttcctctcccctggacagcctcctactattcaattctcttgcaatattttatatttccaagaaattccactttatgatgaacaaaaattccatcatcttaatcatcttcacagaggactcattacaacttcttgaaattgatttaaacctggttttctcccaagcatacaatttcccttagccatttcaacytaacttattattcctccttatcagcattgtgttggtgcatgtgtgtgagtgatatggagggggagagaatccccagtgctagttccaaaacattgttcctccatcattgtataaatactccttgccctgtgagagttgaactctacaactctactaccctctgtgcttcccaacagacaattttctacaaatacataaaatttttcatttgac

SEQ ID NO: 241339 - DNA, 625 bp, Homo sapiens
ctccagctgctttgtttcggttgactcttcagttttcttttaaataatataaagacagcctagtccttcctctgtgtctacgtcagggtcaagaaagtcaggtggcaggccaaaggaagtcagtcatcaactatatgtggctaccaaagctttacgtgtccatacaaatccaagattgtgtttgctaagtcagagtgagccaacatcaatttttagataatatttttctttactcaatacacttgagtaggaagaaagtcacacatgcacttcagtttctatgtgccaagaggagcctctcccaaacctcaaactccatcttagcatatcctcaaagcctagtgagtctcagagaaaagatgccagttgtcttgggagaataagttacttttcatatcaccccagattttgtcagaaagaacttcatctgacaatatttcctggtgctataaaatgttgccatttgttttattatgaattcactaagttgggttaattcaacaaaatgtatttagtgatttctcttctccccacgctgagcaaatttgctrtcagtctatgtccttagggaatttaccctctagctaacgtagatgaccactagtgaaatagtttttaggctatt

SEQ ID NO: 241340 - DNA, 635 bp, Homo sapiens
gtgatctgtctcactggttttaatgaacatatgttggggttagaaaaactgaatttgcttgcttttactaatatgagtatcggaaacatctactacaggatgtttaccaaatgaatcattatcacagttcctgctgtggttgaattttttgtttttaacctcaaacctttagagtgaaaagtgtcacttatattcccacagttgactcttcagtaattgttaagaatatcatctttggtaattgttaagaatttcatctttcacctggacttccctccagtctttgatccatatgtcactttgttactagaggtatcatgatgtagcttagtcttttatttataaamtacagatgatcctgatgttccactacctaaaacattcaggggctccccatagtctactgaagtaagtcttattgtggcatgaagaacatgagctggctccaataattcttttgaacttccctccaaacttatcactttctactttcaagcaggtccaccaagcttacaccatcacaagttgcagacagggacagagggaagaggatgagaccgttgaggtaattaggtaggaatcagatgatggagaattgcaagtgttgtactaagaagtcttggttttattctgca

SEQ ID NO: 241341 - DNA, 583 bp, Homo sapiens
acaaccattgcaaaattctaatataaagggaaaacttcacaaatatggaaaaaagatttgtacatgctccagaaaaaaaaaaagctggatataaaaactattacaggaatagattaacattaagtcaattctaatcatttttcaaggcagcacagatacacttaccaaaggaaaaaaatgagcccaaggagaaaagaatayaaattgcttatatggaaattagaagggatattactctattatttacagcttaaagaatcacattttcatattcaataaacttcaaatatcctcatatttcaaacaaacaaaatctggcattgtttctgtagttgcatcataactatatgccacaaaataaggaattctgtaatgacttcttcacgattatttctatgtttagatttttctgagcaggaaaggaaaaactaaaataagcactatttgaaaggatactagtagagcacacccctaccaaaaggaaaagaagacggcatttgtggtttccacagcccatttgacccagtttgcttaatttattttaaagcaatgtagtttctccttaagtccttgccttacagct

SEQ ID NO: 241342 - DNA, 581 bp, Homo sapiens
tacttcatctctctgcaattcagttacctcatttgcaatagaagcataataaaaatggtgcaaacgtaacagagtttttgtgaagatgaactgagttaatgtatgttaagcatttagaatagggyggagcctatattgaaaataaatgaatgaatcatacctatgtcattctgcatagcattttacagtgtttgtagactctgtggtcatatatggacccataagacttggagggtcacagagataaacatgagagaaaaatatacttgtattttattttaaccactgtttttgttttgctctttgaaataggcaataagatgccacattttacagactggcaagctaaaatttattgagatccaatgacttgtccaagatcacacccaactagtaggtaaccaacctgatgttcaaagacaggtatgtcatactccaaaccctattacctttatattataccacactatctatctcacattactacttgatttgaggctttatccctgacctactgagtgagactatgggttggatatgaccacctactcatatgctgaaaaacctcaccaattattttg

SEQ ID NO: 241343 - DNA, 581 bp, Homo sapiens
tacttcatctctctgcaattcagttacctcatttgcaatagaagcataataaaaatggtgcaaacgtaacagagtttttgtgaagatgaactgagttaatgtatgttaagcatttagaatagggtggagcctatattgaaaataaatgaatgaatcatacctatgtcattctgcatagcattttacagtgtttgtagactctgtggtcatatatggacccataagacttggagggtcacagarataaacatgagagaaaaatatacttgtattttattttaaccactgtttttgttttgctctttgaaataggcaataagatgccacattttacagactggcaagctaaaatttattgagatccaatgacttgtccaagatcacacccaactagtaggtaaccaacctgatgttcaaagacaggtatgtcatactccaaaccctattacctttatattataccacactatctatctcacattactacttgatttgaggctttatccctgacctactgagtgagactatgggttggatatgaccacctactcatatgctgaaaaacctcaccaattattttg

SEQ ID NO: 241344 - DNA, 581 bp, Homo sapiens
tacttcatctctctgcaattcagttacctcatttgcaatagaagcataataaaaatggtgcaaacgtaacagagtttttgtgaagatgaactgagttaatgtatgttaagcatttagaatagggtggagcctatattgaaaataaatgaatgaatcatacctatgtcattctgcatagcattttacagtgtttgtagactctgtggtcatatatggacccataagacttggagggtcacagagataaacatgagagaaaaatatacttgtattttattttaaccactgtttttgttttgctctttgaaataggcaataagatgccacattttacagactggcaagctaaaatttattgagatccaatgacttgtccaagatcacacccaactagtaggtaaccaacctgatgttcaaagacaggtatgtcwtactccaaaccctattacctttatattataccacactatctatctcacattactacttgatttgaggctttatccctgacctactgagtgagactatgggttggatatgaccacctactcatatgctgaaaaacctcaccaattattttg

SEQ ID NO: 241345 - DNA, 498 bp, Homo sapiens
ttagtgtgggcatttagtgccataaatttctctcttaacactgccttagttgtgtcccagagattctggtccattgtatctttgttctcatttgtttcaaagaagttcttgatttctgccttaattttattatttacccaaaagtcattcaggagcaggttgtttaatttccatgtaakggtatggttttgagtggtttccttaatcttgaattccatttatattatgctgtggtctgagagagtggttggtatgatttcagttcttgtgcatttgctcaggattggttatgtttgattatgaggtcgattttagagtttgtgccatgtgcagaagagaacaatgtatattctgtttaggggtagagggttctgcagatttctatcaggtccatttgatccagtttttagtttaggtcctgaatatctttgttaattttctgtctcgatgatctggctagtagtttcagtggggtgttgaagtctctcattattattt

SEQ ID NO: 241346 - DNA, 576 bp, Homo sapiens
ttatcttgcatgcaaatgcctaccaataagtccagtttgtttgctacgtcttgctcactggaaccaatcagcataatttcatcaatgtaatggacaagtgtcatatcttgcagaagcaagcggygatcaaggtctctccaaataagattatgacacaaagccggagagctgatatacccctgaagtaggatagtaaaggtatattgctggcctggccagctgaaggcacattgattctggtaggcctcatggacaggaatagagaaaaagatattttccaagtcaatagctgcatactaggtaccaggagatgagtgaatttgctcaagcacttaaaccacatctggtagagcagctgcaattggagtcaccacttggttaagcttacaataatccactgtcattctccaagatttatctgtcttctgtaaaggccaaattgaagagtttaactggggtacaatggaatcaccacccccgcatctctcaaggccttgatggtggcactaatttctgcaatggctccaggggtgcaatattgttttggtttactatttttctaaggtagaggcagct

SEQ ID NO: 241347 - DNA, 587 bp, Homo sapiens
agctgggtaagaataatatggttggctctatgtccatactcaaatctcatcttgaactgtaatccccatgggttggggaggggcccggtgggaggtgacttaatcgtggggatggacttcctctttgcttttctcatatggtgagtgagttctcatgagttctggttgtttgacagtgtgtggaactttccactttgccctttctgtctcttgatctgccatggtaagacatgcttgcttccctttcaccttccaccatgattgtaagtttcctgaggcctcctagtcatgctttcttttaaatctgcagaactgtgagtcagttaaacctttttcttcataaattatccagtctcagatagttctttatagctgtctgagaatggactaatacaaccaattagcaatcaaagtgagcggaataaagctatacacagcaawgtgtatggatctcacaaacataatttgaaattcagatctgtatcactagatacacaaaattattttggtcttctgtttcaaaagtaaaaataactaaattataataattaaagatacatacttaggtagtagaactgtgaagaaaa

SEQ ID NO: 241348 - DNA, 576 bp, Homo sapiens
attcataaattttcttttgtgtctggatttccaatgtgaaaaaatttattcaaaggaaaattccatgacacctattatttggttgctaaatgatccaatttttccatgaatgttaatgttttttgcctgtctgtctttgttgagagagtaaaataagtagaggggcttataatctcaattaaagcaaaagaaataatggttattacctaattgcatatgaaatacataaccagactttttttattacccagacttttaaaattttacawttattcacatcttcattatgtagactttctggattaataaaaaaaaaaaatcttcctttctcactctgccctttacagacagacttaaccgccaattacattttcctctctaggttcagctcccaaaactatttggtcttggcaaataatgacataatattaggtagtcttttaaaattttacaataattctcatcttcaatatgtagacattctggattaataaaaaaaatttactttctcactctgctcttcacagacagacttactgccaattacattcttttctctagcttcagcttgcaaaa

SEQ ID NO: 241349 - DNA, 555 bp, Homo sapiens
tccagctacatctagagcatctgttttctgccttactagttacagtgttctgagagtacataacatatcttaatcttcaaggggccacagaaatatagacagcagtctraacaaccagaatgatttgagaagcatcttaaaatctctggccaagtgtattggcaagattattctcctgtaccaggataatctgaaaagactgggagaggtggctactatattttttagaagaaaccaacacacagagtcaacaaacattaagagacagagaaatatattccaaataaaacaaaaagataaatccacagaaaccaacctgagtaagtttgagatatgtgacttatctgatggaaaatttaaactaatgaacataaggatgctcagtgaggttagggaagcagtgcaaaaacaaattaacaccctgaacaaaaaaacagagagtataaaaaagcaccaaacagaaaccatagatttgaagaatattataattgaactaaaaaatgcaataaagatatacaacagcagactagaacaagcagaagaaagaactagtga

SEQ ID NO: 241350 - DNA, 503 bp, Homo sapiens
ctctccttgcggctacgcttgcgcttcttaccatccttcttctgcgccttggtcaccgcctttttggagcccttttttggagcaggagcggacttagcaggttcaggcatgataaataaacacttcgtccacaacctaaagagaaatgcaagtgtcctcactctgcagctggtaatatttgtagagctcctatcgtaaactggcatttaaaagcttacacattgattggatgaattgtctctgtgtgccctgtggtatgcaaattaggtgattctagcgtttctttgcaattggttggttgttctagccaatcaaatagcgttatttacaattcgacctccaagtataatagtttctcacttgctaacaaaactcacttttacatttttgtcttcattgyttaacatcgtttttaagaattcaaaatgtccggacgcggcaagcaaggcggaaaggcccgagctaaggctaagacccgctcttcgcgggccggactccagttc

SEQ ID NO: 241351 - DNA, 588 bp, Homo sapiens
attctagaaaataaacatgtaattataagacaaattgaaatgaaaagcttactgcatgtgtttaacagcagccaattggacctaccggtagaaatttaataaactatgtaatcagatcttaaggaattatctgaaatgcagagataaaaatgcaaaagtgagtttaagaaacctggaattagggctgggcaaggtgactcatgcttgtaatcccagcactttcagaggccaaggcaggaggattgcttgagcccaggagttggagaccagcctgaataatatggcaaacccccgactctactgaaaatacaaaaaattagccaggcatggtggtgcgtgcttgtggtcccagctactcaggaggctgaggtgagagaatcacttgagctagggaaatcaaggctgcagagagccatgatcacaccactgcactccagcctgggcaatgagagtgagaccttgtctcaaataataaataaataaawgaaaagagacctagaattagtagtaaaatatgatctgacgttgacctaatcacagtaccagaagaaacaatcagggagaatgatgcaaatgtgagatttaaaa

SEQ ID NO: 241352 - DNA, 483 bp, Homo sapiens
tgctgctggctcagaagggtaaaagagcagaaatgatggggcttctytcattctatgaggaaatagacctatgtagaggaggctacctgtggtaaaaccttatcctcatcacttaaaattctaggcttattctctgaccatatcaagttttcaaatggtaaaagaattggattcaagagaaatatgaataaacttttgttttcacttttctccctcctctccccccattctcccttcctttattttcttgtccttagttttcttttcacttttttgtctactattatttgcccaaactcaactgtaggctagaacaaaaaaaaattgaaaattaaaatgtgccccttttgttgttagacttgcttaaacaattggggtaatgaaccttggacactagattttaaaacacacacatttgagcttcagtgcactgaaataaatatatttttaacaattaaaaaataaaattgcatgtttaaaaaa

SEQ ID NO: 241353 - DNA, 625 bp, Homo sapiens
gatgctgccgaagggtctgggcagagcccagtctctctagtctgctttttagttcaggtgttcacaatggagtctaatatttcatcacatagctcaggtttctaagccttttctcttgactcactcaactcctggttctaatctccttcgctttagttccttctgtgtctcctcctctaagtcagtggtctctggacagtttcctctggaacagtgtctaagagagcaagtcccaartatcaattttaagagcaatgtgagctggtggcataagactcacctgaggagcctgttaagtaaagattcctgggtcctgcacctgaaagttctgacttgataggtctgagataaggttcttgcatatgtatttttaacagggatttctaatgtgtatcctaatctggaaaccacttttccaaaggacagcaaaagcttacccagacaaaaatgctacccagaactggaactactgaaattttcattgtcccattgttaatcccatcagccaaaggccattgtcaaaatgtataaatgagctaacttacagattgtagactctgctttaggctgtgaattccttaagggaggggccttgcctttttgtttttgtatctcttgcagccag

SEQ ID NO: 241354 - DNA, 557 bp, Homo sapiens
ctattaccttttcaaatgtgatggccaataatgcacttaatgccttaattgaaaatatagcgcccacgtttaggctagtagaaaacattgactcaaaaaatggaacccatttcgcctcaaactgttacatttgatgcttgccttgttataccttgtggagmcttgtcaggtcaaagacagctctccaattcagaaaagtacctctgtacttcctggctgtcctcagactggacattagtgaatttggatcatttagtctgggaaagtttcaatgaagaccccagtgtcaactgggagttttgcccccttgacacagagcttttatgacgtagttggtccaactacatgcaagtgagagcaaggatggctgccccaaccagtagttgtaatttctaaaaccataccttcattttactaaagatatagctccccctaactttcaggtaaactagtgcaactcaatacaggttattatttcaaaccttcaaagttcttccccttctctaagcgaattcccttctttaagctggttttatgatatgggagctgagttttca

SEQ ID NO: 241355 - DNA, 557 bp, Homo sapiens
ctattaccttttcaaatgtgatggccaataatgcacttaatgccttaattgaaaatatagcgcccacgtttaggctagtagaaaacattgactcaaaaaatggaacccatttcgcctcaaactgttacatttgatgcttgccttgttataccttgtggagacttgtcaggtcaaagacagctctccaattcagaaaagtacctctgtacttcctggctgtcctcagactggacattagtgaatttggatcatttagtctgggaaagtttcaatgaagaccccagtgtcaactgggagttttgcccccttgacacagagcttttatgacgtagttggtccaactacatgcaagwgagagcaaggatggctgccccaaccagtagttgtaatttctaaaaccataccttcattttactaaagatatagctccccctaactttcaggtaaactagtgcaactcaatacaggttattatttcaaaccttcaaagttcttccccttctctaagcgaattcccttctttaagctggttttatgatatgggagctgagttttca

SEQ ID NO: 241356 - DNA, 557 bp, Homo sapiens
ctattaccttttcaaatgtgatggccaataatgcacttaatgccttaattgaaaatatagcgcccacgtttaggctagtagaaaacattgactcaaaaaatggaacccatttcgcctcaaactgttacatttgatgcttgccttgttataccttgtggagacttgtcaggtcaaagacagctctccaattcagaaaagtacctctgtacttcctggctgtcctcagactggacattagtgaatttggatcatttagtctgggaaagtttcaatgaagaccccagtgtcaactgggagttttgcccccttgacacagagcttttatgacgtagttggtccaactacatgcaagtgagagcaaggatggctgccccaaccagtagttgtaatttctaaaaccataccttcattttactaaagatatagctccccctaactttcaggtaaactagtgcaactcaatacaggttattatttcaaaccttcaaagttcttccccttctctaarcgaattcccttctttaagctggttttatgatatgggagctgagttttca

SEQ ID NO: 241357 - DNA, 557 bp, Homo sapiens
ctattaccttttcaaatgtgatggccaataatgcacttaatgccttaattgaaaatatagcgcccacgtttaggctagtagaaaacattgactcaaaaaatggaacccatttcgcctcaaactgttacatttgatgcttgccttgttataccttgtggagacttgtcaggtcaaagacagctctccaattcagaaaagtacctctgtacttcctggctgtcctcagactggacattagtgaatttggatcatttagtctgggaaagtttcaatgaagaccccagtgtcaactgggagttttgcccccttgacacagagcttttatgacgtagttggtccaactacatgcaagtgagagcaaggatggctgccccaaccagtagttgtaatttctaaaaccataccttcattttactaaagatatagctccccctaactttcaggtaaactagtgcaactcaatacaggttattatttcaaaccttcaaagttcttccccttctctaagcsaattcccttctttaagctggttttatgatatgggagctgagttttca

SEQ ID NO: 241358 - DNA, 652 bp, Homo sapiens
ctaacaaattttacctgtactttataaaaacaaatgtaatcaaattagtaacatgtattaagactcctctctctcattttttccctcttcatttcttttactttataccatttcctttgctactacattacattgtgtagtaacagcaacacagatttatgttctcaagagagttaaacacccacctttctttttcagtggcaatgactaagtaaggaagttacattttccaaaaaaaatgtgaagttcagttcagttctgctcacaaatatacttgagtaaatatttttgtaaatataaattattaaayagtaactttttaatactgaaaagtaatgaatagacagcattagaatttgatgagggtttttggtttgtttaccatatagaaggaaaaccaaattaactttcccttcctgaatagttgctttgagttaattaaaaaactgatccaaatatgcaaacattagactattagcactaaaatagcttgtcatccagagctcttcattatagtcttttcatttggggtcacacagttgatccattattacttctaataaaaatttaattaaataccagccaagtcttctgccatttaggtccggtccgaggattaggtagcactggacagactaaaaagtgccatggt

SEQ ID NO: 241359 - DNA, 583 bp, Homo sapiens
ttgcatgcatctaggcttcctaatgaaggtctgctgtgtggacagcactgagcagtctggttctgtacttttcccagttctgaagggatcctggaatgaggcctgttattgtttgtcagtagaccaattactggtggctttgaagatctccttcatgcacgtttcctggttctgtcactgtttctactacattcttggtggagtcaagtgctggagtcctgtgctgagtccatagcaggaatagggtcacagaatttcactccatgtcctaaactactagggatcaaagatcctaacttgtccaaagacatcctatctgagatcagatggggtccaggtaaaaccctgagaaaaaagtgagagactktaacaccttcatcatcctctttctttatcctttgtttagcccagtgtgcatcagttatgttcttttaggtcacaaagagctcaggtttccttagacaatccatgttactgggacctgatcatggccatcaccagcagacaccaattttttttgtccttccaagcctcttctcaactaatttgacccttccttggccattgctaatgcagttaccct

SEQ ID NO: 241360 - DNA, 583 bp, Homo sapiens
ttgcatgcatctaggcttcctaatgaaggtctgctgtgtggacagcactgagcagtctggttctgtacttttcccagttctgaagggatcctggaatgaggcctgttattgtttgtcagtagaccaattactggtggctttgaagatctccttcatgcacgtttcctggttctgtcactgtttctactacattcttggtggagtcaagtgctggagtcctgtgctgagtccatagcaggaatagggtcacagaatttcactccatgtcctaaactactagggatcaaagatcctaacttgtccaaagacatcctatctgagatcagatggggtccaggtaaaaccctgagaaaaaagtgagagactttaacaccttcatcatcctctttcttyatcctttgtttagcccagtgtgcatcagttatgttcttttaggtcacaaagagctcaggtttccttagacaatccatgttactgggacctgatcatggccatcaccagcagacaccaattttttttgtccttccaagcctcttctcaactaatttgacccttccttggccattgctaatgcagttaccct

SEQ ID NO: 241361 - DNA, 488 bp, Homo sapiens
aattaacataatttatttaaaagttaaaagcactgtgggagtactgacatcagtaaaatgacataataagaagtcctagcccctccacagaaatattgattaagcaataatacatggagcaaaatacctttatgagaattccagaatccaattaaaaagttgcagtatcccaggtgagcacaaagctgggaacacttgcattaaaacaggtaagaagagcaattttactttacctgcatcagyccattcccaacaccaagagagaatgtcctggctccctgcttctcggtcaagggaaaagagaagagtggaacatgcatgtaaagttctagctctttggagggctgtctgggggactggtttctgtcagtacctcattcagagcactgacagaactggcagagtttgcattcctggaggcccactgagaacaagaagaggagggcatggcttggtccagtcagcatgacttggtgtgaatagaaaag

SEQ ID NO: 241362 - DNA, 573 bp, Homo sapiens
aagctttccaattttataaagcagtaaattttctgtggttggcagtgtttagattagatgtatgtttgtctgagtattggctccaggcagtggggaaagtttttttatatttttccaatttttaaacaatttttgttctattgaagcaaagtgaacatacccawgtaattgacatgtagttctagaaataaatattgcgcatgaagatgtaaaagtgagaaaaagaaactataaaaccaataacaacttttctaaaaggttaatggatttgatgaaaagtctgtctttaccctgagactattttttgcctctatttaggtgttcaaatcccctttttattggaaaataatatttgtagattttaggttttattggttgctgtttctattgtcattaacttaacaaaatggatgagttatcgaaacaacatttgtttctgtggacatttcctgaaatgcatgtctttcttcaaccatgaaatcccaaaatgtagaaaactatttataggagataactgaaagggtattgattcactggatagtaaggaatggacaaatttaaagtttgtttcca

SEQ ID NO: 241363 - DNA, 488 bp, Homo sapiens
aattaacataatttatttaaaagttaaaagcactgtgggagtactgacatcagtaaaatgacataataagaagtcctagcccctccacagaaatattgattaagcaataatacatggagcaaaatacctttatgagaattccagaatccaattaaaaagttgcagtatcccaggtgagcacaaagctgggaacacttgcattaaaacaggtaagaagagcaattttactttacctgcatcagcccattcccaacaccaagagagaatgtcctggctccctgcttctyggtcaagggaaaagagaagagtggaacatgcatgtaaagttctagctctttggagggctgtctgggggactggtttctgtcagtacctcattcagagcactgacagaactggcagagtttgcattcctggaggcccactgagaacaagaagaggagggcatggcttggtccagtcagcatgacttggtgtgaatagaaaag

SEQ ID NO: 241364 - DNA, 573 bp, Homo sapiens
aagctttccaattttataaagcagtaaattttctgtggttggcagtgtttagattagatgtatgtttgtctgagtattggctccaggcagtggggaaagtttttttatatttttccaatttttaaacaatttttgttctattgaagcaaagtgaacatacccatgtaattgacatgtagttctagaaataaatattgcgcatgaagatgtaaaagtgagaaaaagaaactataaaaccaataacaacttttctaaaaggttaatggatttgatgaaaagtctgtctttaccctgagactattttttgcctctatttaggtgttcaaatcccctttttattggaaaataatatttgtagattttaggttttattggttgctgtttctattgtcattaacttaacaaaatggatgagttatcgaaacaacatttgtttctgtggacatttcctgaaatgcatgtctttcttcaaccatgaaatcccaaaatgtagaaaactatttataggagataactgaaagggwattgattcactggatagtaaggaatggacaaatttaaagtttgtttcca

SEQ ID NO: 241365 - DNA, 596 bp, Homo sapiens
gcctagtcaatcactctgatgttcaatggggtatcacatgttaaaactagattgttctcacacatttgctggaagactagttttaacattttgttacacgtgcatgaagtgtcttttctaatttatttgtgtaatgtcattagtagtaaatagcttaactttcttttacagagtggacactttttaagttttattttcttatcttacaaatcttaacgtggcaagaagttccttagagccaccctaatacatgctaccagctaaaacctaatgtaagcaaacccagggaatgtgaaaaaaaaatggtatatttagaactacttaaaaataattacagcaaaactcataaaacaataaaaawtgatgccaaaaacaccacattccttcatcaaaactcaatctatcatgtgtgttactctcttggggttctgttctctgctagagctaatccaatagaccaaatcactaaatcaagttaaggtattagtgaattaatgtttttctagtttcatgttttgaatattaacagcagacttctacaattcatctgcctctcaccaatcaagagaactatttggggattttacaagctgtaa

SEQ ID NO: 241366 - DNA, 390 bp, Homo sapiens
atgaattccttgatgacctgaaatagtctgaaacaagtggatatttaaagaacgtaagagcytcaaatgggaacaaagtgaataatgttcagtagaaatatttggaacatgaaatctgtagaatgttggattattgactttgctgatgggatctttgatttaactaattgcatccaatatccttttgtattgagaaacatttttggctggaaacatgttggaatgtgtgatggttaaatttatgggtcaactggctagatcatggtgcctatatatttggtcaaacattattctgtgaagttgttttttggttgagatgaacatttaaatcaatggactttgaataaagcagattacacttcataatgtgggtgggcctcatctgattag

SEQ ID NO: 241367 - DNA, 390 bp, Homo sapiens
atgaattccttgatgacctgaaatagtctgaaacaagtggatatttaaagaacgtaagagcttcaaatgggaacaaagtgaataatgttcagyagaaatatttggaacatgaaatctgtagaatgttggattattgactttgctgatgggatctttgatttaactaattgcatccaatatccttttgtattgagaaacatttttggctggaaacatgttggaatgtgtgatggttaaatttatgggtcaactggctagatcatggtgcctatatatttggtcaaacattattctgtgaagttgttttttggttgagatgaacatttaaatcaatggactttgaataaagcagattacacttcataatgtgggtgggcctcatctgattag

SEQ ID NO: 241368 - DNA, 503 bp, Homo sapiens
actttaccatagactatattcctgaaagtttagtctcagggacataggtaaatgaagcttcattacctgaccctatagcagcagagtaggaaaagcccacacctcattagaaagctggaatttagttacctgtgactaaacccatcttaccagatatgcgttagcagacaggacaacacattcggttttaaatggattcaagtatatattagcaggattttgctcaacaaatcattttatgtcactttaaaaattctgtttggtagatgaaaggagtctcttagaatattctctagcgattattttgaraggtagttgagtctttcttgtttccactctccctattttctattactatgatttaaatgagatcacaaatacttggaaaggtgcaaactgcaaagaaaattatcatattgctgcatggtattgcatgatgctaattctttgaattaatatcctagtactctattttgaagttacacgtaaatggccatcatgtg

SEQ ID NO: 241369 - DNA, 503 bp, Homo sapiens
actttaccatagactatattcctgaaagtttagtctcagggacataggtaaatgaagcttcattacctgaccctatagcagcagagtaggaaaagcccacacctcattagaaagctggaatttagttacctgtgactaaacccatcttaccagatatgcgttagcagacaggacaacacattcggttttaaatggattcaagtatatattagcaggattttgctcaacaaatcattttatgtcactttaaaaattctgtttggtagatgaaaggagtctcttagaatattctctagcgattattttgaaaggtagttgagtctttcttgtttccactctccctattttctattactatgatttaaatgagatcacaaatacttggaaaggtgcaaactgcaaagaaaatkatcatattgctgcatggtattgcatgatgctaattctttgaattaatatcctagtactctattttgaagttacacgtaaatggccatcatgtg

SEQ ID NO: 241370 - DNA, 513 bp, Homo sapiens
acttattggctttgatttttcagttatataaaatcatcagttaaaaatttgaattaatatctgaagttaatcattctctgcgtgcctcaccaacacagtaagtgactgacaccagattgttctcattcaatacactgaaattagctctatgtacaccaaatgcagccaactgacaccagtgaaagaggagaaagaggaacatggctcactttataaccacacactgcacaatgaatctaaagtccacttgtgggtgaacttgtgggaattcatttgatatcatctgccatccattttgcwctcaaaataggtacaaggaaatgtttaaaagtaagttttaattctaaaggagaagacaagtgatttagcttttagctaaatcttgtgacagatttttccaatattcaaatgattgacttccagttcacttgaaagaaaatagtttgtcccacttaaagcttaacatgtatttataaccacaatttagttataaaacaggttctctttctgcga

SEQ ID NO: 241371 - DNA, 513 bp, Homo sapiens
ctgcgacacttccgtggatactattgtttacatcaggtggtttatcatcagaatttagagcatgttattatgtaccagcttgcttatgcctcaactgacctctgtgaagaaataagtattatcagatttacatgcaggaatmtaggcacagggacattacattatggagacagctgttgcacagtcattaacaataaaggctctggagccaaatttccagggttttgttccggtttaatcacttagtatgctgtgtgaccttgatcaagttatctaacctctccggatttttaactttttatccaaaaagggtagtgacactagtattgctgcaaagagcaaaggagataatcttcttaaactggttagaataacgctggtgctcttcttataatggacttgcctgtgaacagaaaacaagaagtcttatgctttaaagcacctgggcagtccttctgcagatgcagactcacaggtatcatcgtcctgtgagtgattaaggataattgcata

SEQ ID NO: 241372 - DNA, 609 bp, Homo sapiens
aaatgagaatcatatgagaatacttatgtattttatagtatatcttacacacccaaatcttttgctgacaccttaaactgtcagtatatttttgaaaatcaatatctcctatttgcttaggaataaatttgaaatatcccttcaaccatttgtgattggttctaaaagcaaaactataaaaacaatwaaaaaaatacaaagcatgtgttacatgtccaaatattgttttgttattactaaatacgtttggattctactgtaggttgttcatgaccttactttatttttcacgaatttgcttatgactttttaatttcttaaattctaataatgagatttcttaataattcaagttttaaaatgttcttttttatgtttcattactcagcctgtcttccatgctatacactacaaattcaaacaaatttaattctctggaactgattctctgaaaaacctatatacagaattaaacaaatattaattagaaacatttgtttagaagtgagatgcatggccaggatcagctatatttgaatttttacaatatatgagaattaaacttgcattgtgtgggtgtgtttaaaatatttatgtaaaaagaaaaaa

SEQ ID NO: 241373 - DNA, 547 bp, Homo sapiens
aatgtactattgtgtttgctattttcctaaatgcgtgacatggcaatgcacaaacaagtttcttgttgctgaaacattgctggtctttgttcttttggtaaatcattgctgcccttacaaatgaggaattttgtttagtttccarctggacagcacttcacaaatctttttgttttgttaagcatttcactctcttttaagcagtttaggtgtggttaacatgtggtttcttttcacactaatcttgccattaaactttagattgtccttattaactatcaactcaacatagttggctgagataattgggtatcgattatttttgcactgtcatttgcagttcaaattggatctttataaacacttgagactatttatcaatggctattgaaaccttgatatgcatgctttcagcatagtcctggtctggggtttggttcactgtgcttcaaactctactttccttggaaaaaaacttagtacctcactgataaggcaaggcatgtgtcactgcttcttcaacaattttctcatttctcttgaattc

SEQ ID NO: 241374 - DNA, 543 bp, Homo sapiens
ttgcagaactgtgaaaaactgagcatgtacctataagaatttaaactaatttaaactaaaaattattaccactaggtagtttgtaaatttaaaatgatctttaaaaataaaaagcaactccctaactacccagaaaagtgagggtgaattagaaatattagatttgaaaatattttaaaagttcgcattttacactttacgtgattgtgctgagtgcatttaaaatggcaccaagaaattccccagatataattacagcaaaactctttctttctttctttgtttttagcacccattagcatgcaatagaagagatattctgaggaacttacttgattactctctgctctacaaatttattttcatgataatttgctttcacagtttctgaattactcaggtttctccagagaartagaaccaataggacagagagagccaaggggtgtgtggagaatagatatatgcctggcaagttcacatctgatccgaaatgtgggccagtaggcttgagacccgggaaacctgatggtgcaggtggaa

SEQ ID NO: 241375 - DNA, 581 bp, Homo sapiens
gtgggccagtaggcttgagacccgggaaacctgatggtgcaggtggaatctgaaagcagtttgctcaagaattttctcttccttgggaaggctgggttttttgtcgtattcaggctttcagttgattggatgagacccacccaccttacagagagcaatctggttaccctaaattcactggtttaagtgttaatatcatccaataacagttttgccctcatctttctgccttttcatytgcaacttcgtccacaggttccttttcccctgctaactctcgtttactgagacatctactcttggtcccctgctcctttctctccacagtcttttcactatttcatctagtctcacaattgtaattgccgtttagacactaacaatgtaaatccatcatacctatgatgtcacctttaagcttcaggtgcatatatttatattctagcagtaccaattcatttggcatgtcataaacacagattcaacagcttccaaattaaactctccaaatttcccttttcccactccactccttattgctacctgctaacattccgtctatgcctaattcatcccctagt

SEQ ID NO: 241376 - DNA, 466 bp, Homo sapiens
ctaaatatacaaaaactagcggggcgtggtggtgcatacctgtagtcccagctactcaggaggctgaggcaggagaattgcttgaacccgggaggaggagattgcagtgagccgagatcgtgccattgcactccagcctgggcaacaagagcaaaactccgtctcaaaaaaaaaaaaaaactaaaacaaaacaaacaaacaaaaaaactcattctttttctattcacatatttatgtaaygactttgtttatacacttcaaccaaaaaatatacagcatggatataacagataaaataacctagctgtcttctattaagttagacattaaagagatttacaataatataaagcagtgcccctctttttaatgaattttaaaatttgaaatatatcattatttttaacaaaaatatactatttatgttaacatgtaacaggcttattaatgttatttgaaatgaatt

SEQ ID NO: 241377 - DNA, 498 bp, Homo sapiens
gatttttgattaacaatcagtaagtaagaaggtgagctctatggggatctggcaaagaagaactccgggcaaaggaaaaagaaaayacaaaattctctaaacaggacttgtgtttggaatattggaggaacagtgagtaggtgtgtggctagagtaaatgagtgaggggtaacaaatagagaacgaggtcaagagatcagatacgtagattatataaggactcagttatcaaatactccaatcaatcggttattagcaattagtttttataattaacaataaatatttccctacttgagcactcaaagtgcactttaatggtacctccttaatggtgcttatcattctctttctggcattcatggctattcttttctatcagatcataagattaaatcttacttatcattttgtacctttcaacattacactgaacaaattgctgcccacaaagttatgagactaaaacccgaatcacttaattgacctttactggtg

SEQ ID NO: 241378 - DNA, 537 bp, Homo sapiens
gcttgaacaacatccaaagtatatttagcatttatctttctccaatttttagacagtcatctgcatttccagagggttgatgacagggcagcttgaagtttaaagacagcacctgcatttgcatttcaatagttccataattctatgaaaccactgaaatctcttcaatgtctcattgtttaaatagtaaaggtggccagattttgttcaagattcataatcttacaaaaatatggagccgttgtattcaaagcttattctaaagagaataccttctctttacaccttataatcctgtttgttaaaacccataacmattaggtggacatctgaacatatttaaagtattttatccattggatttttatggtccaaaatcaagattctaggacaagataaatgggaaaggaggacatgtagtttgaaatgtgttatatcagcaccatcaatttttaattcggggttccaaaattatctttttctccattggaaaggaatacgtttgtttccacgtaggaaactacttccacttaacac

SEQ ID NO: 241379 - DNA, 400 bp, Homo sapiens
aatagcaacaatgctaactaatacttatttacagtttattccatattaggataatctaagagctttacacatgttacttcatttcatcattcagcaacattgttggataggttctataattattaaaatgaagaaatttaggctgatttttgcctgaggttatttaagcaaaaattggcaagtcagcaataaaacctggtactgtctgattctggaacttgagtttcaaccactatacaatactgcattgaaataaataaaaatatttatgtkaataacacatgcatatcctgtgctaagtatatggttagcacatactggtttctttctctccctccctgattttattgataatgttagtagcgaaacaataaaatcgtaataatattgtttctgtttc

SEQ ID NO: 241380 - DNA, 576 bp, Homo sapiens
tgggtaggaattctgagaaggcttccccgagcaaaaactatctaagtctttcaagggaacaaactattattctgatatttaggatataatatgtccatataaattagtattatttacttctttatttctctctgtccttggaaatccaagttcacagctttctataattattgttaagtactaaaatctatgtttacacaaatgcaattctgtaacattaatcattattgttgtcctacaagaaataaagccaatatttaataggaataaatgcatttaacgtatctaattaagatttgctttctatcttagattaaccatcatcatagctggggagaggacagtccatcccgctatcatcaaaacagaamcgtttcatgttgattacagatctagattcagcatatttgtttttggaacctttattaaactcttaaggtttctacagattcttgtctccctccctttctcccacagccctcactgggccattccattctccctggttgataatgataagcgcaaggaaaacaatctaacagcaagcttctacaattacttgaatcccaaagcagc

SEQ ID NO: 241381 - DNA, 330 bp, Homo sapiens
aaggcaccaagaacatacattgggaaaaggataccctcttcaaaaaatatcactgggaaaactgcatattcatatacagaagaataaagcawgacccctatttaacactatatgcaaaaatcaactccgaatagattaaagacttaaacctaagaccaaaaactataaaatgactagaagaaaatacaaggaaacaattctgcacagggtctaggccaagattttatgggtaagactttaaaagtataggtaacaaaaacagataaatgggactatagcaaactaaaaagcttctgcacagcaaaataaataattgagaaataaaaataa

SEQ ID NO: 241382 - DNA, 330 bp, Homo sapiens
aaggcaccaagaacatacattgggaaaaggataccctcttcaaaaaatatcactgggaaaactgcatattcatatacagaagaataaagcatgacccctatttaacactatatgcaaaaatcaactccgaatarattaaagacttaaacctaagaccaaaaactataaaatgactagaagaaaatacaaggaaacaattctgcacagggtctaggccaagattttatgggtaagactttaaaagtataggtaacaaaaacagataaatgggactatagcaaactaaaaagcttctgcacagcaaaataaataattgagaaataaaaataa

SEQ ID NO: 241383 - DNA, 434 bp, Homo sapiens
atcctatactgggaatgcgagctaagactactgccgcacagaggagaaggtgagggaagggcaagtaaaagtgccacagagcttccctaccactttgaagttgcatttttcataattaagcattcacttgattggttgttgtaaacccttaattgttttacagaattctgataaactggttcttctttttttaaaaattagtatttttgggtacatagtagatgtatacatttatggggtacatgagatattttaatataggcatacaatgcgtaataatcattgttataatttggacatttgtccccacccaagcctcatgttgaattataattcccagtgtaggaggtggggcctggtggaaggtgattggatcatgggggcagatccctcayggcttggtgctctcctcgctatagtgagtgagttcttgt

SEQ ID NO: 241384 - DNA, 543 bp, Homo sapiens
caataatacagacatggtctgtctgaatatttgcattcttccagccaatgtccatgaatatagtttgggcatctattctcagtttgacagtcttgtgaaggcaatatagtctatgcacccaaagactggcacagagtgggtcatggttctctggggcttcctttcattttctgtggagatagagaggaatgtatcctctgaagacagctatgggatttcaacaagaaaacayctgaccagagacattgagaagtataacctagattcatatttatttaatacctcttgagtgcctgctgtatggaggtgctagggttatggtagggaagaaaacaggcaaccccctgcccttggggatatccttatttaatattcaacatgtctttaagtattattcttattagaattataatcttccttgaaatatgaccctccaaattgcctcagtttccccacaagtaaaacaaaggtgggattaaactccctaggtaagcggcctctgagccagagcttagtgtgtaggaagtttattgggagtgctat

SEQ ID NO: 241385 - DNA, 380 bp, Homo sapiens
cacagtgcccacccccaagttaggatgaaaaaagttccagaggtttttaagaaattggattaagctgggtccctaacttcaagaaattcccattatgctccttctcacctttcttttttgctaattatggaaaatagggcccatttcatcatagcctccttcccccgtgctccactacaatcgccgcrttctttctagctgcagctggtttcttcaaggctcctgcttaaagtccacacgttattatggccgaaagcaacctggtgcttcggcctggataagagccccttctgcatcttattcacagcttgcagcctcagcccctttgatgaggccctcaggggagaggtcattaccttgatcctgcaaacccagactcg

SEQ ID NO: 241386 - DNA, 612 bp, Homo sapiens
ctgtctcaaaaacaaaacaaaacaaaatcaaaaagaaaaacgttaaactagtattttaaccaggaacaagaaaaataaagagctaaagctgacagtagtagtaaggccaaggaatacaagcatggacacagagcctggagattcccatgactggagtttccttactagttcttcccacaggcctgaccactggcatttcagaaccaacctgtttcccggacttgtgatgctctggcagcagagccaatcaatgtttgcatcattgttgctcctgctgcagtacaggcagctgttgwtctattcctgaaattcagggttgcaacccttggtctcaaagtgaagagtcatgtccacaggtcaaggagctagggcttctaaaagaggacgtccctgctgttttttagaatttaactggactattgtgactactatctctgtaccttgacttctgtgctttgcttccttattaactccttatgacttagaccttagatttgcccatagattctgtttctgcctctgttccacttgagtgtcttctcttgagtttacctactgtcagattctggccaattctatgactcagatttttttctgggactctatttggac

SEQ ID NO: 241387 - DNA, 513 bp, Homo sapiens
ggcattatccagaaataagacagaaaacatctgaatagagctatgagccagcagcattcattttttcctgccctcccttcatctgcatcctcctccgctaccaagcccaatagataacactctctaagctgggtagagagaagagagttgaagaggaaatatgaggatctgatgcagtgtagaagttgtgtatttttccaatctttcctctcatggtcagatgacagatgcagatgtgtctggtgggaatacacaaagaaaccccttttaaattttgggatttgagaatggagaggactgtgtcttgctccctgcatgaaatccagaaagatgcaagcctgacctgttgttatagatcaacagtggggaggaaatggtgycctgacataatgaagccagaggccaccctgtgtttcctatacccttgaaggggtgtgaatggccatatgaaaacacccaagaccttgagtgagacacaaaagctatctggtttggggcaagcctatggggtct

SEQ ID NO: 241388 - DNA, 611 bp, Homo sapiens
atggcagcttccacctgtgcctgacagttccagtctgccctcctgagtgcctgccctacagacttcagacttgcctagccatcccccacaatcacataagccaattctttgtaataaatctcttaatatttatgtcctattcattctacttctctaattggatcctgactgatacactataaattcaaagtgtcttagagaggctgagcttgcagtttcccagtgtactttcagtaaataacagaatgtcaaactttcagagctttaaatcagacatactcttattcctgctgatacattctaccaagcatcttttcctaacatggaccagttaaatgtcttatttttctttttttttytccaagaaatagcgtcacttgccaaagatgttttaagttcattaatttaacccttctccccagccatttctgcaggtgtggtagagaatagacctccttagaagttatggttagtgtcagactgggctgccttgccaccttgaagtagcgtagatttgagagtatagattgtctttcagattacagaactagtccctgacttactccagaagttaagtagcagagcttttaccatgcttagttccaaattct

SEQ ID NO: 241389 - DNA, 601 bp, Homo sapiens
ggtggtggaggcaggtgctgttcctggaggccctaataatctgctaagcagcagctggaagcagactttcagctaatgcatataacattctggttgcatccagtacccttttggttttgagtaatacatctcttatttaagtaatatattatcagagttgttacttttacttttggcaaaccataaagaggaaaagtcaacctacatggtttggagagtagaacatacatcaaacacaaagaccaaacctaagcattagcaaagaattagaagaaagagatgctttggttgaataggcaaagtgccaacccttagtggttaggcactaagccaggtgctggagaacaagacagacctattcactggtctcatagtgtgctatataatttttttaaatgastgccatcaatttttttcctccctatatgtgcataactagtggggtttatttctcctccccttggatttatgactacttaaaccaataaaatgcagtagaagtgaaatcctgggacttttgaccccaggttttacaaagacttgccatttccactttcttcctgttggaatccagcaactatgctgtaagaagccaagtcaa

SEQ ID NO: 241390 - DNA, 575 bp, Homo sapiens
gatttttactttacacatacagaaacagatgctgagacctacttttctatctctctgaccttacactgtagttcttttattttcctctccaagtctccttttgagattgatgaaaactctgtgtgttagaaaaagaagccctttccattttcctacccaaattcctcctctgtcaagtttcttagtttctatgaaggagttactgctgcagaatcttcagacttcattattaggtttggttttggttaatgtcttttaatgatgyggagagaggtgataactgcatattaataagattcacaaaaggagccaaatggaaatctgttgcaaactccagtggtgacagcaataaactagaactctggagagaactgactgacaagcagggagcaacaagatgtgctgaaacctgcacatgtgatactgacactgcaggggaaagaagcagaagtttaaacatttttttttaaagggaagaagcaatgtataaaacagcagtcagagaagtcttaaggatgaaatgaaaaaacaaatgctgaaattgcaaaaacctagtctccacgggaggaagttga

SEQ ID NO: 241391 - DNA, 575 bp, Homo sapiens
gatttttactttacacatacagaaacagatgctgagacctacttttctatctctctgaccttacactgtagttcttttattttcctctccaagtctccttttgagattgatgaaaactctgtgtgttagaaaaagaagccctttccattttcctacccaaattcctcctctgtcaagtttcttagtttctatgaaggagttactgctgcagaatcttcagacttcattattaggtttggttttggttaatgtcttttaatgatgtggagagaggtgataactgcatattaataagattcacaaaaggarccaaatggaaatctgttgcaaactccagtggtgacagcaataaactagaactctggagagaactgactgacaagcagggagcaacaagatgtgctgaaacctgcacatgtgatactgacactgcaggggaaagaagcagaagtttaaacatttttttttaaagggaagaagcaatgtataaaacagcagtcagagaagtcttaaggatgaaatgaaaaaacaaatgctgaaattgcaaaaacctagtctccacgggaggaagttga

SEQ ID NO: 241392 - DNA, 575 bp, Homo sapiens
gatttttactttacacatacagaaacagatgctgagacctacttttctatctctctgaccttacactgtagttcttttattttcctctccaagtctccttttgagattgatgaaaactctgtgtgttagaaaaagaagccctttccattttcctacccaaattcctcctctgtcaagtttcttagtttctatgaaggagttactgctgcagaatcttcagacttcattattaggtttggttttggttaatgtcttttaatgatgtggagagaggtgataactgcatattaataagattcacaaaaggagccaaatggaaatctgttgcaaactccagtggtgacagcaataaactagaactctggagagaactgactgacaagcagggagcaacaagatrtgctgaaacctgcacatgtgatactgacactgcaggggaaagaagcagaagtttaaacatttttttttaaagggaagaagcaatgtataaaacagcagtcagagaagtcttaaggatgaaatgaaaaaacaaatgctgaaattgcaaaaacctagtctccacgggaggaagttga

SEQ ID NO: 241393 - DNA, 556 bp, Homo sapiens
ctatgtgtgctgcacaataagatatgatgtaacaagcttggattccatagtacatagtattcaagaaggactacataaagcaagttgctgagaaggggttaacagcggtgcaggtattactttgaagcatatcattccaataattgatatgagcattagaggattctctctctttctctccctctagcctaactaattttcaaaaggcatcaacccttaagataccatcaattttcttgccctggtatttgaaatggggtacctccacagcttatcagtacaggttttctaaagtttccatggtattcaaccaccaagtaaaaatttaggagaatacagttgtcaaaaccattgtcaccctaataaaaatatatgctaaaaatacatgtgcttttgattcagatcttaaattgtgaagtacactggatctacataggtcaagctgwgccacagcccagtgatttttgacctgtatataatctatatgattcaagttttcacagtcttttgtagataacttaagggctgcactttagcaatggtgaaaattggactt

SEQ ID NO: 241394 - DNA, 559 bp, Homo sapiens
agagagtaagtgagttccagggcaaccactaacaaaagtataaaaaaagaaggatgatataccaagaaaggagagtatgttaggttgttcattgcattgctgtcaagaaatgcctgaggctgtgtaatttataaagaaaagagggttattggctctcagttctacaggctatacaatcatggcaccaacacctgcttgacgtctggtgaggccctcaagaagcttttactcatggcagaaggcaaagtgggagcaggcacatcagatggccaaaaacgggagcaagtggagggygatgccccttttaaacaaccagatctcatgagaaatcattcactatggcgagaacagcaccaaggcgaatggtgctaaaccattcatgagaaatccacccccataatccaatcacctcccgctaggccccaccttcaacattggggattacatttcaaaatgagatttgatggtagcaaatattcaaatgatattggagacacaatagaataatataaagtgctcaattaaaactacaaaagacacaaaaagagtggaagacaaa

SEQ ID NO: 241395 - DNA, 629 bp, Homo sapiens
tggggaaggactctggcacataaatgcctactattctttttgcttctcagaggtccctggagttgagccccatttcctttaggagccaccttgagaatgcaccctttctaggcttttcctccttcccgctgtcattctccttacttcctcgtacctacttcctgggatcacctcccaaataaaccatctccacctgaggttcttgtttcaagctctgcttttggaaaaacctgaagacagagactctgcaacagggaaccatrctgaaaatcaaagtacaggacaaagtggtccaggaagcacacctctgatctaggggagcactgaacatggtgaagtgcatcactgacccctcccacctgggagcctggatgctgcctcagcaccacgaccacccctgctgcaggaacacgaatttcctgtgactgctgcccttgtcatgcaagccttcctcaccatcctcatttcttgtgtcacttgttttctctccagagtgtgggtaagtgtacctgactggctaagcccagctcacatgaccatcctgtagctgcaagggaggctgggaaattgaatacgtctccttggaggttttgaaatcccaagtgatgtctgcctcccattaagactca

SEQ ID NO: 241396 - DNA, 571 bp, Homo sapiens
ttaaatgaatgacttttcttacagtaaaagtgtagccattgctttattcagccagtgtcagcgactccttgagtgtagagagcacaaccaatgatgtgacattccatgcagctctctgtgctcagcagagaaaggacttccttccgcatccctggcctgctaaaagggctgaaaacctcactgcttggtcggttacggtggctcacgcctgaaatctcagcactttgggaggtcaaggtggatggatcacttgaggtcaggagttcgaggccagcctggccaatatgatgaaaccccatctctactaaaacacacacacacacacaaaattagccaggtgtggtggcaggtgtcagtaatcccagctactcgggaggctgaggaggagaatcatttgaatccaggaggtagaggttgcagggagccgagatcaygccactgcaccccagcctggacaacagagtgagactccatttaaaaaaacaaacaaaaaacctcactgctgctcttctcttctacatttcttctatcactaaatattgagctcagtcagatgtttggtactgtctga

SEQ ID NO: 241397 - DNA, 512 bp, Homo sapiens
tcgtaattctttgttaatccctgtgcctggcagayagaaaactttagtaaatgttggctattagtcctaacagtaaagtataggttacttccataagttaagcaagacaaaaacaaaaactaaaaatttggtcaaggcatcaaatgatttatcaagcagtccagccctcttaacagcatataaaaggattcacactccttgtggtcctcccagaacttcatattcaatctctctcaaaattcaggtgggggatacagctggaggccattatcctaagcaaattaactcaggaacagaaaaccaaaaaccaaataccgcatgttctcacttatatgtgggagtaaacaatgggtgctcatggacataaagacaggagtagacactgtgtattactagggtggggagggaagggcaagggtggaaaagctactggttactatgctcattacctggacgatgggctcaactgtatcccaaaccttagcatcacacaatatatgcatgtaacaaac

SEQ ID NO: 241398 - DNA, 512 bp, Homo sapiens
tcgtaattctttgttaatccctgtgcctggcagacagaaaactttagtaaatgttggctattagtcctaacagtaaagtataggttacttccataagttaagcaagacaaaaacaaaaactaaaaatttggtcaagscatcaaatgatttatcaagcagtccagccctcttaacagcatataaaaggattcacactccttgtggtcctcccagaacttcatattcaatctctctcaaaattcaggtgggggatacagctggaggccattatcctaagcaaattaactcaggaacagaaaaccaaaaaccaaataccgcatgttctcacttatatgtgggagtaaacaatgggtgctcatggacataaagacaggagtagacactgtgtattactagggtggggagggaagggcaagggtggaaaagctactggttactatgctcattacctggacgatgggctcaactgtatcccaaaccttagcatcacacaatatatgcatgtaacaaac

SEQ ID NO: 241399 - DNA, 527 bp, Homo sapiens
cctctgaggggtgcaggctgacaaccctcacaggtggcctgagagctgtcacataacaaagcatccggcatcttttccctccgttttacattcttaatctttttcttaacctcagaggctggctgggaagtggttttacttaaaaggaaaatggggtacattgaggcaagaggtcttgcagtcctggaggaactaattatcttagtttccgggttttaactgcagttagggaatgtattcatcctaactactcagtactcacaagcctttttcatactaccagtagctaagtgtctgctyggagaggagagaggcggtagaaagtttgaggagactttccgaggcaggaggatccaggggaagaaagtttactaatccgagtcccagctgtggtctcagtgctgaagtaatttttaggtaataacttcaaaagtaaattctatcctttttctataaataaactaaggcttagaagtgaacaaataacttgatcagggttaatccgcttgaaagggaagttagactgt

SEQ ID NO: 241400 - DNA, 646 bp, Homo sapiens
cccgggcaacataaggagaccctgtctctactaaaaatagaaaagaatagccgggcgtggtggtgcatggttgtartccccactactctattcgagaggctgaggcaggaggctcccttgagcccagaaggtagaggcagcagtgagctgtgattggctgcactctggcctgggcaacagagctagaccgtttcaaaataagtaaataaataaaatgtattaagaactttcagtcacttcccatttcttggagtctaaatccaccttagaagatatccagcctcattccggcacatctacagaaactcttctgtgattatccagactactcgtgtccctggcgcacacccacctgctcctgtgcccactcccctcatcctgggagacgcagctgcagggcctctcgcagttattctcagcctgccttcctctcatcccagcttctctcccaactcttctggcagatccgggcccgcttcctagttctcacagctgtagtcattctgcttctaatgaccagaagcctatgtaagggcagggatgcccctcagctcaccgcacctctgtctcaagagcaatgtgtgctcagaaattgttgaagtggcgttgactaaaacctggaaatctaacttctggagaaggctta

SEQ ID NO: 241401 - DNA, 646 bp, Homo sapiens
cccgggcaacataaggagaccctgtctctactaaaaatagaaaagaatagccgggcgtggtggtgcatggttgtaatccccacyactctattcgagaggctgaggcaggaggctcccttgagcccagaaggtagaggcagcagtgagctgtgattggctgcactctggcctgggcaacagagctagaccgtttcaaaataagtaaataaataaaatgtattaagaactttcagtcacttcccatttcttggagtctaaatccaccttagaagatatccagcctcattccggcacatctacagaaactcttctgtgattatccagactactcgtgtccctggcgcacacccacctgctcctgtgcccactcccctcatcctgggagacgcagctgcagggcctctcgcagttattctcagcctgccttcctctcatcccagcttctctcccaactcttctggcagatccgggcccgcttcctagttctcacagctgtagtcattctgcttctaatgaccagaagcctatgtaagggcagggatgcccctcagctcaccgcacctctgtctcaagagcaatgtgtgctcagaaattgttgaagtggcgttgactaaaacctggaaatctaacttctggagaaggctta

SEQ ID NO: 241402 - DNA, 484 bp, Homo sapiens
cagcctggcattgcagggagcaaatctgcaaaagacccaaaaagaccacagtggcaaatgatcaaaacacatgcactggtctgccccaggctcccctgtccagtgtctgagaaaaccaaaatgaacgccactgctaagccctgggctacccatgttcatactactggtggtgcataaaggtaggggactttgtgcytgtgagaaagagaagacagacctggagaggtgaaatggctttagacccaggacacatggctgcaggtggcaattgccagaattggaagtaagatcttcccgtagtgttctgcgtgctcacctttccccctccacgtctgactcccagacaggaaaccccatctccactaaaaatacaaattctctcccaggcttctgcaggtgtgaagcacactgctaactcttggtaaagtgggacagagaagtgcagcatggcagagaacacacaggagaggacacaggagggttc

SEQ ID NO: 241403 - DNA, 432 bp, Homo sapiens
tctttatctcaggcaaaaacagcattggcatccttgtctttcatccattaactttatattgaatgataattctggttgatctgaaggtaatgaagtactcacgatgttctgagcagttctcgtggattaactcatacatattcacagaaactctacagcwctggtgctgttgccatgcccactttacagatgaggaaactgagttaagattctagagcctgccaagattctacagtgagtaagtggcaaagctgggattcctaccaggctgtctggctccagagctaccttcgtaactgctgtgtactgcccaggccccttcagtcctctcatctccagcctccagcttctccctccaggtggaccctccacctggttctggagtagcctccaatctttccctcctagacactttccacgcagcagctggag

SEQ ID NO: 241404 - DNA, 432 bp, Homo sapiens
tctttatctcaggcaaaaacagcattggcatccttgtctttcatccattaactttatattgaatgataattctggttgatctgaaggtaatgaagtactcacgatgttctgagcagttctcgtggattaactcatacatattcacagaaactctacagcacyggtgctgttgccatgcccactttacagatgaggaaactgagttaagattctagagcctgccaagattctacagtgagtaagtggcaaagctgggattcctaccaggctgtctggctccagagctaccttcgtaactgctgtgtactgcccaggccccttcagtcctctcatctccagcctccagcttctccctccaggtggaccctccacctggttctggagtagcctccaatctttccctcctagacactttccacgcagcagctggag

SEQ ID NO: 241405 - DNA, 418 bp, Homo sapiens
catccttgtctttcatccattaactttatattgaatgataattctggttgatctgaaggtaatgaagtactcacgatgttctgagcagttctcgtggattaactcatacatattcacagaaactctacagcactggtgctgttgccatgcccactttacagatgaggaaactgagttaagattctagagcctgccaagattctacagtgagtaagtggcaaagctgggattcctaccaggctgtctggctccagagctaccttcgtaacygctgtgtactgcccaggccccttcagtcctctcatctccagcctccagcttctccctccaggtggaccctccacctggttctggagtagcctccaatctttccctcctagacactttccacgcagcagctggaggacccttctgaaat

SEQ ID NO: 241406 - DNA, 520 bp, Homo sapiens
gggggtcgctgaggtgcgagtgtgttgtgcttgaggatgacaaagaggccagggtgcatgaagggacgtaagggrgagactggggtgaaaaagcaaagaggtgggcagaggatggataatgccggctctcataggccaagggagagtttgcatttgatctaaatgtgactggaagactaaggaagtttgagtgattgatgaatgaatgaatgaatgaatgaatgaatggtgtcccagtacctcatacagggctagaatgagagcaggagctgcacaccaattagttatgaaaataaacaggcaatattttaaaattaggcaatttttacatttaaaaaaatctcaattttcaatttgtcttgaaaaaacaaaaggcctggggacattgagcctgtattccaatatggcaacagtcacagaggaagagccatactgcccatcgccacccgcggaaccacctggggcttccctcactgccgactgcctgacagacaagtgagtctgcagcccctgaattacc

SEQ ID NO: 241407 - DNA, 588 bp, Homo sapiens
cttctcacaaccctgattgggatttaataggggactagtgggcattggtgcactgggggcaatgtggggagaggagcagatttgtcaggcttggcaaaaatatctggctcctgcctgtgggtgtggaggggaaaataaagtcagaaaagaagcgattgcagagtgaatgtctttcaattatttgaaaagaatgcaaatcaaatgtgtcacgaaggctgtttctgtaatcaaatcctagtcattgaaatctagattgaccaaagtgggtctccagattgaagagcagtaacgggggagcttgggagatttttgtcagggagccctactcagtgtaggagtcacccgggatcatcagaagggagcaggctctgcarttaaccagaccttgattcaatcgtggctctactattgactgtctgcaaggcctggatctagttgcttaatctttctgaaactcagcttcttcatttgtaagatggcagaatactaataatatatctactctttcagctctctattcttgcatattaaaccacattaacacttcgtgggataacaaagcaatcattcgattatgctcacagagtc

SEQ ID NO: 241408 - DNA, 588 bp, Homo sapiens
cttctcacaaccctgattgggatttaataggggactagtgggcattggtgcactgggggcaatgtggggagaggagcagatttgtcaggcttggcaaaaatatctggctcctgcctgtgggtgtggaggggaaaataaagtcagaaaagaagcgattgcagagtgaatgtctttcaattatttgaaaagaatgcaaatcaaatgtgtcacgaaggctgtttctgtaatcaaatcctagtcattgaaatctagattgaccaaagtgggtctccagattgaagagcagtaacgggggagcttgggagatttttgtcagggagccctactcagtgtaggagtcacccgggatcatcagaagggagcaggctctgcagttaaccagaccttgattcaatcgtggctctactattgactgtctgcaaggcctggatctagttgcttaatctttctgaaactcagcttcttcatttgtaagatggsagaatactaataatatatctactctttcagctctctattcttgcatattaaaccacattaacacttcgtgggataacaaagcaatcattcgattatgctcacagagtc

SEQ ID NO: 241409 - DNA, 452 bp, Homo sapiens
agtgtcacttccttcgcactctgttggtcaaaaccatcacaaggccactcagattgagaggaggggacatagaccccatctctaagtggaaggagtgtcaatttacagccaagtttgaaaactaccacacctaccatgcatgggtattattataattaaatgccarcagctactcctgttccctcagaggatcaaacagttcttggtgagagcttttcatcattcttagataaaatctataaattcttaccatggcctataaggcctggcatggtctgggcccgatttcttctctagcttctttctgcccatctcatctctcaaatgctttgccatttgccttccttcagcaactaaaaggcatcatgctccttcccaactgccaagtccctttgctctgctgctacctctgcctggaacactccttgcgcatttcatagcctggcaaaaat

SEQ ID NO: 241410 - DNA, 419 bp, Homo sapiens
gctttatgtttgggctggaatcacatttgctaatagtaattagctcacattratcagatacctggttggctttgatgtcatcatagggcttactggtattccagggagaagtttttggtattgaaatgaggcctcctggggtatccttttgagggctgttcttctggagaggccacaatagctcccatctcagctgttacactcagtactccctgcgacagcagagaatgtagaagatgtctatctgaaccctgtaaggtgcagtaagaattttggtgtactaattcatctgagcccagcttcttttcatccaagtggtgccaacaacaccaaaagcattaaataaataattaaaccatagaattgtacacgctcaacacactctgtgtgctaggcactgtgccaggcagtaaaaatac

SEQ ID NO: 241411 - DNA, 484 bp, Homo sapiens
tctgagcccagcttcttttcatccaagtggtgccaacaacaccaaaagcattaaataaataattaaaccatagaattgtacacgctyaacacactctgtgtgctaggcactgtgccaggcagtaaaaatactgtgagaatgagggcagacatattccctgttctcctgggccttagagtcaaatggggagaaagattcaaagcacataactggagaacagtaaaagttacataatacaggcatcccaaggacctgtgagaagacagggatggcaacaatcctacctatgataggctggggggtagttaaggagggctttattgagaaggtgatatccaaacaaagatcttaagaatgtataggcagtattagagaaggtgacaaaaaggaactccaagaatgggaatagcgaaaagcattgaaggagaaaaatagcatggctttgtcaatgaagtgcagaaagtgagtgagaaagagaggcggc

SEQ ID NO: 241412 - DNA, 419 bp, Homo sapiens
aagaattccatttttaatataaggacataggtagttaaaagtaaaaggatgaaaaataatacaccatggaaatactaataaaaagaaaagtcactggagcggctctgttaatatcagacaaagtagactttagagaaaagaaaattaccaaagatcaagagggttttaaataatgaaaaagcatcaatcacaaagaagtcataacactcttaagaagtatgtatctaacaacagactttcaaaatatgtgatgcaaaaactgctagaactgaaaagagaaatgagcaagcccacaattagagttggaggtgtgaacgctactcactcaggagctgayaggacaagtacagagagaatagcaagaacagagaagaactggacaacaccatcagtgaactcatctaattgacatttgcaga

SEQ ID NO: 241413 - DNA, 590 bp, Homo sapiens
cttatcatttgctagagatgtaccttatccttaacctgaagatgaaatttatgtccaagctttctagcagccaaagcaaagagatgrccaaagagatgttagggctgttcaacagaaatttcttcaatggaggaaatgtcctgcagctgcaatgttctactctagcaaccactacccacatgtggctattgagcacttgaaatgtggctggcatgactgaggactggaattttacatacttacttaattttaattaatgtaaattggagtagccacatgtggttatactggacatgcagtgttagataatttacaatgtttgttccatgtgccaattacaaacgtactgcttctcagctccaaagtctccctttattgcctggtctgcaataatagagttgggccttgtgaagattcttcctttgccaggcagcacaatgttaagctttgacatgaggggacacagaagagacactgaaggagaaaggtgtttctcttccttttcccagtgcacttctctccacaggcttttatggtttatgcatcacctggttctggaagtgcaggctgcttttgcaggttctagctcc

SEQ ID NO: 241414 - DNA, 628 bp, Homo sapiens
acattatgaccttggagaaaatagcttaaacaccaaaagaattgcaaaaatttgctaatgtatatcagcattaacctgggtaacatgtgtgagtatggaattgaaaggtgttagaccaagtagggtagattataacactatagtgagcaaattcactgatgtaagtgaacttactagtgactggatttgggggagagcgtgagaatgtcatacttttaaggaggatagctctaacttgtatggacctcatgttactggaagcgtctctaactgctttcttggttgttgactaaaacttgggctcaatggtgacttacactgaatgatattgagwtgccagaacttccctaaaattacacagaggaggaaattcaaaggcttagggagaccagaagttttgcctggatgtatcacatgcaatctgcccactcacctgccaactgtcttcataagaaagcccagcagacactcacttgactaaggcaatgagaaatactagctttgattatttcccaggtggaaatacttcaatcagagaatgcaaaaatgattccattgaattggaaggtgaggctgtcacttggccattttgggactctttatgccactgaatcaataagcagaaaag

SEQ ID NO: 241415 - DNA, 456 bp, Homo sapiens
atgactgcactctttctgtccttttgaaattataataaggtcaatggttttccattgggtgagtatggaaactgcaggataattttggtccttgtgacaacaaggactaaggagtgctactagcatttagtgtgtggcagttgggtacacaaaacgtctggcaatgcccaggacagttctcagcaacactgttgtcctattaaaatgccaacagtactcccactgagaaactaatgggggcttcaagaagtcccctgaattcaaaaagctatgttataattayattaccatcaaagcaatatttttcaactggcccacaatatagccttccttatttgaaggtatccataaagtataaaataaatcaagtaaacattcctactagtgaatacaaattatattgctctgtaattattaggcagcagggaaagattataatgcttccacccttatatt

SEQ ID NO: 241416 - DNA, 623 bp, Homo sapiens
ctccctgtgtgaggctctttcccataatatgttctattttaaaaagccctaggcaagttatttaccatttgccatctgttctaatattctttcttgaaatttccctttcaaacttaaaattgcttgtattttagttttgtgcaaaattatatctatataacacctcgatctctttccctatgggatcatgtgtagcagatgttaacatattataaactggaatgccattggttgttccaaaactaggatgtttcttaatttagaacatgacagcctggcgcggtggctcacacctgtaatcccagcactttgggaggccgaggtgggmgtatcataatgtcaggagtttgagaccagcctggccaacatagtgaaaccccatctctactaaaaatacaaaaattagcccggcatggtggtgcgtgcctgtaatcccagctactcgggaggctgatgagggagaatcgcttgaacccaggaggcagaggttgcaatgagcggagaccgcgccattggactccagcctgggtgacagagcgagactccttctcaagtacccaacaagcaaaaaccatatgacaaatgcgtaatttatatgcttctgtgaagaacagaattcctat

SEQ ID NO: 241417 - DNA, 605 bp, Homo sapiens
agaatggggccttcctccacttacacgggtgtttattgcttcatctgtgttcccagagcactctgtactatctgtgtcagcattgactgtgtttgaactgagaattctctttgatgcattgtctgtctgctccctctctccagtgagaacgtacgttctcctaagacacggacatgaattattcttaactgggtaggccttgtaggtagtaacacttttttttttttttttttttttttgatggaatctcactttgtcgcccaggctggagtgcagkggcctgatctcggctcactgcaacctccgcctcctgggttcaagagattctcctgcctccggagtagctgtgattacaggcatgcaccaccacacctggctgatttttgtattttcagtagaggcagggttgtgccatgttggccaggctggtctcgaacccctgaactcaggtgatccaccctccttggcctcccaaatgctaggattacatgtgtgagccacagcgcccggctggtgttcacacttcttgaaccccttactgcatgttagctttatcataatccaacaaaaagttcatgaaatttaaatgaggcaacttctgggct

SEQ ID NO: 241418 - DNA, 520 bp, Homo sapiens
tccacgtccatcctgagcgtaacccrctccacttccaaagcccgtatcacccaggggtatcagcatctacccctcctcatcacagaccctgacaaacctccttggtatagccttcacatgtcaaggactttaccacatggtcctctctctgcttctcaaggttgactcttctacattctatgggacattaagtcccagccaacaccctgagcttctcaattctaatcacaacgagcctacctctccaccatggactggtctttggaatgagtagaacacctccacctctgaagtcttaaacaccaatatccttccctctggccacaaccaccaatgaattcattctctctatattctcactacatctaattattctccactgtccttaagaactttaatcttttgattggtcaactttctcttaatttacgagatttatttgctcatgattttaccatacaacctatggtctatgccagcaatatcagttcccttgcccttgaggtatagcctccataaa

SEQ ID NO: 241419 - DNA, 528 bp, Homo sapiens
agggagggaaagaattgatgattttttttcacagtgacagttgtgcagcaggtcacagctgacaaatctctattgcatgcaaaggctcatttgaaattcacaagtgtgggtatcaaatacacataggtgctcttaactcaaggataattraagcatgagctcaggctcagagaggctaagagatttgtccaagatcacatagcagcagaaagaatactggaacctgcaaatttagaccacaatttttttataacataaaacactgcatagtttactcttgggggaccggtaaggatatcataaaggcaaactacaaagctttgccaaagggttcttgttatttaatagctatttagtattcctaaggatgcctgaaacatggcctaaccttaattccatttgatcaggtaagaatatcatatctgtggttgcaaaactagatttaacagataattagagatattacctcacgcctggccacatcctggtagcaagacacagacgagaaacagcaaaagtgaccagcct

SEQ ID NO: 241420 - DNA, 582 bp, Homo sapiens
tattgttaaactattattgtggttgttgcagagattttacaaggaacaaagtcactgcagatccacactatgttatgatccaaatgttttttccaactattcccttcaagtatatatttatctgcctgtaagtgaataccccatcttgacatgcacttcacaacgcaacatttcaagttttgtttttccacaggtcaatgctaaaactttcacaaccaaawgtgaaataagaaatgtagaatatgaacacacttatgtgctaattttgaataataggccaaactgttaaatgtagttatttatgaacagtagaattatagttaaagtttatttttcttatacttttcaaggctttaccaactttcaaaatggctacttactacatttttaaatcaaaaagtataaagattatttataagaggaaatctaattatagacctggtattgctgttctggaactctaaggaaattgctattttcctgagtgaggtagtccattactaatgcaagaatgaattataaagaaatgaatccatgtaaaataacagtttcaagaaaaacaattattttagatttttcatc

SEQ ID NO: 241421 - DNA, 522 bp, Homo sapiens
aaagtgaatatgtttaaaatatccatttattttctggccactgaaaacaatcccataagyggaaaagcaggtacatatgcatccttgctcttgtgtagtcctgtggttcctctggctccaatggaccgaatattccaatcctgtccatcccaccatgagtacagatcatgcattccacatttttctggccacagaacatactatttctgggattttccataccacgcagaggggtaagccctggatttgctctggttggtgtcacctgaggagtgggtgtgtttcctggggttatgaaccagagtcagacactcagtccaacccctagggacacaattagattcagacagacatagactaacctactacagtctgaggaaagcaataaaatgaaaagagcagcttttagtttttactgcaaaaaattctggccccaaactggacttacttggttaaggcttgtttgagtagatgcagaaagagagataatttcttgtgtcctcttattagggtcaaaacaaa

SEQ ID NO: 241422 - DNA, 411 bp, Homo sapiens
gagactatctttgtgaactttgggtagccataatttttgacagaacataaatagtactaaatattagaaatataatttaggcttttctactaaaattaaaatcacctgctcatcaaaaggaactgttaagaaaataaaaagagaggaaaaaatggccaataagaggcaggattaacttgcagctcccacttggacagacagagcagcgtgtggagactcacactgtgaacttttgctccaagaatcactgcaggaacataccaggaaagctgagagggtccacagaccctttgaaggaagcggattgctgctgcaggccgctggagacagccaaaacactgtgagtgaccaawgggtgaaagggtgaaagtgtgaaagggcagtcgtctgccccggaacacacaccctcac

SEQ ID NO: 241423 - DNA, 622 bp, Homo sapiens
agctacattatctttacattagtgcactttcattgcagtttagctcttttaaaatctcagaattgctgtctcagttaatattttttatctaagcagtcacgacagttatcaaatccatctcactagattaaaactttgcaagttttataattgatacattactataaataggaaaatcaaatgctttaggggtagatcctgaaagacaaaaaaattttctagaaagcacaatttctgatcctgaagaaaaatgtatatcttactgtttttctatatttatgtcttctaagccatgtttgttggaatagaaaggaaactactatgagacagaggctttgtataatcatttcttttcattcttccaacagtgttaccaggtaagtattattacccacatttgccaggtagtttgtgggaaatagaggctcagagagaataagtaagttgccaacttagtaaatggtgaatctagatttgaatccagattttctctgacctaaatgctcatttcactctaacrcactacagccaggagagaacccacttcagtatgagtgttacagttcatgtctgttcagagtgcatattagtggctgtagctttcattgaatctgtataaatc

SEQ ID NO: 241424 - DNA, 562 bp, Homo sapiens
ctttgtataatcatttcttttcattcttccaacagtgttaccaggtaagtattattacccacatttgccaggtagtttgtgggaaatagaggctcagagagaataagtaagttgccaacttagtaaatggtgaatctagatttgaatccagattttctctgacctaaatgctcatttcactctaacacactacagccaggagagaacccacttcagtatgagtgttacagttcatgtctgttcagagtgcatattagtggctgtagctttcattgaatctgtataaatcccattccccaatatcagtctccaaagaaatatctgaactccagaaatcctaacaagtggtagaggtggggaggaggtgcaggaggtcatgagtagaatgmcaaaaagcctttaatctaaggcaatttcacatataagcttcagacaaagctaaaagcatctctaatcttaaaggcacttacaaaaggtcattttaaagttgtcagtttcctgtttgtgaggtcctcagaaataagaattcatcagtggtgaccatgacaacaaaccttcttcc

SEQ ID NO: 241425 - DNA, 519 bp, Homo sapiens
atgcacatgcttaaaattagatagcatagaaaaatttttttaaaagaaaaagataagcccaaaatttggagaaaatatttgcaatacattcacctgacaaaataattctatccccaaacaacgtgatgcccaaactgtaacctaaggagacataaaataatttaacatcaaacatgtattacaatgcataaatgaagtagtcagatgtgtataattaaagatagagccattttggatatracaggtgtcattcagaatgataccaggaagagagttgctgtccttgtcatgattttctgaaacagagaattactgcaaggctctgaacaaaaccatttaaagaactctcttccttttcttttcatggtagttgaattccaaaaaatttcaatatatattaaaacgatataaaatatactttgtttttatgcatataatgcaatatgtttcttggcttgggttattattaagcttttcacaaccataagaaatccctatgaaacattaaaaatttgagca

SEQ ID NO: 241426 - DNA, 519 bp, Homo sapiens
atgcacatgcttaaaattagatagcatagaaaaatttttttaaaagaaaaagataagcccaaaatttggagaaaatatttgcaatacattcacctgacaaaataattctatccccaaacaacgtgatgcccaaactgtaacctaaggagacataaaataatttaacatcaaacatgtattacaatgcataaatgaagtagtcagatgtgtataattaaagatagagccattttggatataacaggtgtcattcagaatgataccaggaagagagttgctgtccttgtcatgattttctgaaacagagaattactgcaaggctctgaacaaaaccatttaaagaactctcttccttttmttttcatggtagttgaattccaaaaaatttcaatatatattaaaacgatataaaatatactttgtttttatgcatataatgcaatatgtttcttggcttgggttattattaagcttttcacaaccataagaaatccctatgaaacattaaaaatttgagca

SEQ ID NO: 241427 - DNA, 519 bp, Homo sapiens
atgcacatgcttaaaattagatagcatagaaaaatttttttaaaagaaaaagataagcccaaaatttggagaaaatatttgcaatacattcacctgacaaaataattctatccccaaacaacgtgatgcccaaactgtaacctaaggagacataaaataatttaacatcaaacatgtattacaatgcataaatgaagtagtcagatgtgtataattaaagatagagccattttggatataacaggtgtcattcagaatgataccaggaagagagttgctgtccttgtcatgattttctgaaacagagaattactgcaaggctctgaacaaaaccatttaaagaactctcttccttttcttttcrtggtagttgaattccaaaaaatttcaatatatattaaaacgatataaaatatactttgtttttatgcatataatgcaatatgtttcttggcttgggttattattaagcttttcacaaccataagaaatccctatgaaacattaaaaatttgagca

SEQ ID NO: 241428 - DNA, 570 bp, Homo sapiens
ctttagttttctggttgagaatccttttatctcaaggaccaaggaagaaatgccaacctctcagatcatatcctggaagatgaaagaaccaactttaatgctcattatttttaaatatgctttacaatttccaatatggggtctaattttaatctaattctacattgtttatttttcttgcaaattttaatttttatttgatattaaattcatattgttcatcatatatataacaaaataattgactattggtcaataatttctgaattcattacaatttaaagtgacaccaaaaattactgaggaaragtgatgtttcagttattgaataggttttataacataacagctgttacacatttggagatataaagatgctgaaaacctgaaatgttctgcttaaaaatatgctttctaatgtccttaattaggtctttgacagtttatatgtatagtcatccagtgtttctgagacaaaaaaaagcatttttttttctgctttctttttacttctggatgctgtttcaagtatggtggcataaaaatatagaaaaaacatcaccttctcta

SEQ ID NO: 241429 - DNA, 597 bp, Homo sapiens
gtctcatagcaagttttgtgttcattgaaactactaggtcttttcctcaataattacttttaaagtatggctttcctcactccattccatttgagcaatttaatttttaaaacagagttaaggactttttattgaggtcattgtgaaatcatttgtcatctaatagcaattttcagccttttattttgaaacagttaacaaggaagatacacttttacrtacaagtgcctactctaattttaactcagcctcctgatgttccaatcaaaaaactgaaatgcaaatgaatgagaatattgtttgttaatttaagggagacataaaatttcagactcttttgtttaaataaaaaaacttgatagagccattttatcttcttgcaactgtgggaagaaagatgtgcctaggatcttattctcattcaataataaagattaataaatatttatgctttccagaaaataaaacatcaatgttattattaggataagacaatacatcattggtttatagaaacaggctggatatcttcatttgctccaccaggtctactcttcagcattctctaacccaatatgtgtgccccagggaagctaa

SEQ ID NO: 241430 - DNA, 597 bp, Homo sapiens
gtctcatagcaagttttgtgttcattgaaactactaggtcttttcctcaataattacttttaaagtatggctttcctcactccattccatttgagcaatttaatttttaaaacagagttaaggactttttattgaggtcattgtgaaatcatttgtcatctaatagcaattttcagccttttattttgaaacagttaacaaggaagatacacttttacatacaagtgcctactctaattttaactcagcctcctgatgttccaatcaaaaaactgaaatgcaaatgaatgagaatattrtttgttaatttaagggagacataaaatttcagactcttttgtttaaataaaaaaacttgatagagccattttatcttcttgcaactgtgggaagaaagatgtgcctaggatcttattctcattcaataataaagattaataaatatttatgctttccagaaaataaaacatcaatgttattattaggataagacaatacatcattggtttatagaaacaggctggatatcttcatttgctccaccaggtctactcttcagcattctctaacccaatatgtgtgccccagggaagctaa

SEQ ID NO: 241431 - DNA, 493 bp, Homo sapiens
tctaacatctcaatctttccagctacatcttaaatagactatctcctatcataccatttttggggtactgacaagatgtagcatatcctaagctccagggggctataaaaacagagatagtagtctaaacaacaacaacaaatagagaggcactttgaaatctctggccaaatgaatgggtgaaaattttctcttatacaagtccagtcttggagagatgtaggtgtattatttaaggcacagaaaccaacacagagaatcaaggaatatgaagaaaaaagggaatatgttccaaagaaaagagcaagataaatctctagaaatcaactcaaataaaggagagtatgcagtttacctgacagggaattcaaaataatggtatcaaaagatattcacagaggtcaagacaactaggcaagacgttgatgacttcaaataagasatagaaagcataaagtacataccaaatgaaaatcatatatttgaagaatgc

SEQ ID NO: 241432 - DNA, 597 bp, Homo sapiens
aatcttggtaggttgtatgtgtccaggaatttattcattttttctaagttttctactttgttagtgtatagttgttcataatagccttggatgagcttttgtatgtctgtggtatcggttgtaatgtctcttttttcatttctcatgttacttatttggggcctttctcatttttctttgttagtctagcaagtgactcatcagttttgtttataagttcaaaaggaccaagttttattttcactgatcccttgaattgtcttcttggtctctattttatttctgctctgctctttattatttctttccttctactaatttggggtttggtctgttcttgcttttctagctctgtattctgtagctgttggatgacatgttctctaattttctgttaggcccatttggtctaatgggtagtttaaatccaacatttctttgttaattttttatctatatattctgtttaacrctgagagtggggtgttgaagtccctattattgtattctctttcttcaaatgtaatcatatttgccttatatatttgggtgctccattgttgagtgcagatatgtttagaattattgtatcctttt

SEQ ID NO: 241433 - DNA, 497 bp, Homo sapiens
gaattcttcagcacataggttgcaagaccacagagttgccaaagacaggaagaagatgctttggtartcagtgagaagggaatagatttggggtatgatcagattgtccagacgtgagtcttatgggctgcaaaaggagttatctctaagcatttaaggggcactgggcctagaaagatgggaaacaatgtcctaaatatcgtgcaggtacttctttgtttccagttatataattatattagtcagaacacaataggttctgcttcagcaacaaacttccaaaggctcagtggtttagaaccaatatatcatgtaaagtctattgcaggttagggggcactcttctgcttctatatggaaagtttcctatattttgtaggccattattttataataaaatgtggctactacatttattgctcaaggagatagaaagatcataaaggtggcacacttactttaaaatacttggctcagaagagattcatatcacttct

SEQ ID NO: 241434 - DNA, 497 bp, Homo sapiens
gaattcttcagcacataggttgcaagaccacagagttgccaaagacaggaagaagatgctttggtaatcagtgagaagggaatagatttggggtatgatcagattgtccagacgtgagtcttatgggctgcaaaaggagttatctctaagcatttaaggggcactgggcctagaaagatgggaaacaatgtcctaaatatcgtgcaggtacttctttgtttccarttatataattatattagtcagaacacaataggttctgcttcagcaacaaacttccaaaggctcagtggtttagaaccaatatatcatgtaaagtctattgcaggttagggggcactcttctgcttctatatggaaagtttcctatattttgtaggccattattttataataaaatgtggctactacatttattgctcaaggagatagaaagatcataaaggtggcacacttactttaaaatacttggctcagaagagattcatatcacttct

SEQ ID NO: 241435 - DNA, 613 bp, Homo sapiens
aaagcttcagtagaagcacctgaagaaaactccagcaggaagccctcagataaagaaacttctgaatgaagacacctaggctaggaatgcaaatatgtttaagagcatggrccattaggggaatctgagttccagaatgcaattctctttaaagattgcaatgcactgggtatgccccaagtctggggagggcaactttcctcggaggggtttgccagataaagcctttgtcattgcctgtggttgggcctgaaatatcaaacatagatttttggccaggactcctcagcaggatctagtcagggccttcacaaagtacattcagaatgacaattgacccaccagaaagccatcatgccaccacttgatattttaaatgaaaagacccaccaacatatctgatatccatatctgatacccagtagaattggaatgctgctatcaccactgtcactattgtcactaccacacctgcctctagaaacccagcaatctggaggatggaccctggataatgttgcaggcaaacctcatttctctacaactgtgctttccaccaacagtcgattaaaggaagacgaagatcgagtgtgtgtggatgatacagcaaata

SEQ ID NO: 241436 - DNA, 405 bp, Homo sapiens
cctgcccatgctatcatgggatattttaataataatcaaattgttatgtagatatgccaaataattctgttcaggcagacccatttaattcagcaggaatttgccgatatcctgttctatgcatagttcattagtggattattttaggagtttgaaaaaaaacatgcctcagcacctgtgctttaaaaatttatactattttaatgtcacaaatatatatgcagagttctgcttccactaatgatagagtagcttatattggattcagtttaccgaagactagaattataaatcaggacaaaatattaaaacaaaaaaaccaactatttaaagatacaagacagtggtcaaatgcaagcaaaaaatraaatttccttttgaaataagtagactacagtaggtgtc

SEQ ID NO: 241437 - DNA, 263 bp, Homo sapiens
tgctaaggactgaaattttacaaagcatgttcagtagggaagcatatttaatgcatttctgacttatgatattttactgggtttactggaataaatggctctactattctggggtctggaaggtgatggcactcttcccacagctccactgggcagtgccccagtggagactctttgygggggctccaaccccatatttctccttggcacttctgcagtagaatgtctttgcagtggcaccaaacctacagcaggcttcttcc

SEQ ID NO: 241438 - DNA, 526 bp, Homo sapiens
ttttacaaagcatgttcagtagggaagcatatttaatgcatttctgacttatgatattttactgggtttactggaataaatggctctactattctggggtctggaaggtgatggcactcttcccacagctccactgggcagtgccccagtggagactctttgcgggggctccaaccccatatttctccttggcacttctgcagtagaatgtctttgcagtggcaccaaacctacagcaggcttcttcctgggcacccagcctttcccatacatactctgaattctaggtggaaactgccaagcctcctttaactcttgcattctgaaggccygaagaattaacaccacatgaaaaccaccacagcgtagggcttgtgccctccagagtagcagcctgaactgtatctgggtccctttgagtcatggctggagctcaagcagcaagggatgcagggagcagtgtgcaagcctgcacagagcaacagggtccagagcctggtccctgacaccattctttgctcctaga

SEQ ID NO: 241439 - DNA, 543 bp, Homo sapiens
agcagtgtagtatgtaataacaattttataacttaaaatatttctgtatcaagagccatcaggttaacataacaagaactatatgtcagattctgtggaattgtttgtattctatcctgataaaatgaatctggcatgaagtactattctttctttatctgaataagtgctttatcatcacaggtatgaagtggattagatcctgctcttttaacataatcaaaagaaagcacttcctttgttacagctagtaatgttctaagtgatgtgctgcttcagatttgtggaggcctttcaaycaaatccagggcatgctgttttgtctatgggttctctctctctggtcttgcatagggtggaaagtcattgcaactctttcatcaaattgaattaaattgcttaagtctttgtaacctatatgaactcagatatccttgtgcaattatagtgttcaatattcaggactcacaataaggaaagtacctggtttgaacaggtgctaggtcatgagggagcagtgcaggcgtgaagctgaaacccccc

SEQ ID NO: 241440 - DNA, 496 bp, Homo sapiens
gcttgagtgcaggagttcaagaccagcctgagcaacaaactgagaccctgcttctactaaacaaacaaacaaacaaaaaatagctgggcatggtgatatgtgcctttgctactagctaygtaggaggctgaggaaggaggatcacttgagctcaaaaggttgaagcttcagtgagctgtaattgtgtgtggcactccagtctgggtaacagagtaagaccctgtctcaaaaagaaaaaaaaagatcattcattataaccaagtgggatttatccctggaatgcaatgatgtttcaacatgctcaaatcaatcaatgtgatatatcacatcaacagaatgaaggataaacaccatataatcatttcaattgaggctgaaaaagcatttgataaagttcaatattcctacatgataaaaaccctaaaaaaacttgatataaaaggactgtatctcaactaaataaaaaccatatttggcagacccacagttagtatta

SEQ ID NO: 241441 - DNA, 518 bp, Homo sapiens
gatgcaaaagttctcaagaaaatgttagcaaactgaattcaacaacccattagaaaaatcatttggccaggcatggtggctcatgactgtagtcctagcattttcagagtccaaggttagaagattgcttgagtgcaggagttcaagaccagcctgagcaacaaactgagaccctgcttctactaaacaaacaaacaaacaaaaaatagctgggcatggtgatatgtgcctttgctactagctatgtaggaggctgaggaaggaggatcacttgagctcaaaaggttgaagcttcagtgagctgtaattgtgtgtggcactccagtctgggtaacagagtaagaccctgtctcaaaaagaaaaaaaaagatcattcattataaccaagtgggatttatccctggwatgcaatgatgtttcaacatgctcaaatcaatcaatgtgatatatcacatcaacagaatgaaggataaacaccatataatcatttcaattgaggctgaaaaagcatttgataa

SEQ ID NO: 241442 - DNA, 573 bp, Homo sapiens
tagctgaagatccaatataccgctgaatattatctgtcaacaaaatgctgcatctgttccatttgttgatgactgataaaacaaagcagttgaattctgctttgaactaaatatgggtagaatttccacctcaagcattttaatacaaataatatttataattaatagtaataatatttatgtctgatactaattgacaccaatcataatgcataaaagtaaacatatatatcactataatattgctttattactatatttactatttttacttttgcataagagagactgattgggggaaataggtatctcactcaaatactaggcataaaacagctacatttctgtaacaaaagtctggcataaaaaattatttttttaagaattaaaaaagcaaacacctctatctcatttgaccacattttccttatatttattaccttcagcaaagwaagaaagatagatattagttaatatgagagaagaggtagaagaaatattttagagtagtgactaacattccctctttttaaaaggcatctgaaaaataaatatattgataattttatagaa

SEQ ID NO: 241443 - DNA, 391 bp, Homo sapiens
gcttcttgcttcttaaagattctatccattgcaaattgtcagaaaaaaacagttaatattttgatcagaaaaaaaccctatattttgcaaataactgaaagaattttttttgttctctgcagcatctcttctcttttacccttcctagcacccctttcattccttaaaagaaagccagtatcaatttcagagcaatagggggtaaaacakgtttattttgtagacctcaaaagaaactgtttttcagtcttagctcagttcccaggggcccgatttcagtctgttcacaagactccatttctatccctcacaccttggtcttgttcccggtcccttttcagactctccctcatacagtgcctaatcttacccaatccctcaccctttcctc

SEQ ID NO: 241444 - DNA, 519 bp, Homo sapiens
ccaaataatactccattatgtgtatatacaacattttctttatccattcagacagatttgttttcatgtcttggctgttgtaaatagtgtgtcaattaacatggaagtactaatatatctttgagatcctgatttcagttatttgggacaaatgttccaatgtggaattgctggatgatatgataaatatatttttaattttttgagggacatccatagtgytttccattgcagctgtagcattctgcagtcccaacaatagtatgcaagggtttcaacttccccacatccttaccaactcttctacaattttccaatttatatggaactacaaaagactatagctaactaaatcaatcttgagaaagaggaaccaaggtggagtcttcacactttctgattttaaatatattacaaagctaaagtaatcaaaacagtatagtactcaagtaaaagcagacatataaaccaatggaacaaaatagagactccagaaataaatccatacatatatggtca

SEQ ID NO: 241445 - DNA, 554 bp, Homo sapiens
ctgcacaagctctctttttgcctgctgccattcacataagatgtggcttgtccctctttgccatctgccatgattgtgaggcctccccagccatgtggaactgttaagtccaataaatgtctttcttttgtaaattgcccggtctcaggtatgtctttatcagcagcatgaaaaaggactattagagacagggtttcaccatgttggccaggctggtcttgaactcctgacctcaagtgatctacctgtcccggcctcccagagtcctgggattacagatgtgagccacagtgtccagcctcaacaaataattcttaaacascatattgtggcaggcactttcttagtatagtcagatatagtcttatagaaaaaaaacccattaattacatattcaaacatactgcatctataaagaatactagagaggagaagagacatcattccaaatgcatgtactaagggggaattagccttttcatggtggtcagagaatagcagaattactaaaggggagttcgtgttttcatggtggtcagagaatgctatcctga

SEQ ID NO: 241446 - DNA, 524 bp, Homo sapiens
cattagggaaatgtaaattaaaccataattaactcaaatactacctcacatgtatgaggatggttataaccaaaaaggacagacaaatatcgacaaggatatggagaaattggagctgtcatacattgctggtagtaatgtaaaaaatgaaactgttttggaaaacagtttagcaatttctcatgaagttaacccagaaagagttatagttactgagttatagctaasccagaaatagttatagtcacctgagttactataacccagaaattccactcctggttatatatccaaaataatttgagacatgtccatacaaaaactgtacacaaatgttcacagcagataatagccaaaagtggaagcatctcaaatgtccatcaactgatgaatcaatgaaccaaatgtatctccatacaatgcagtattatttggccatggaaattaatgaagtattaactcatgctacaacacggatgaacttaaaatatattagacccagtgaaagaaggcagtcataaaag

SEQ ID NO: 241447 - DNA, 563 bp, Homo sapiens
ccagctttgagcttattgattttctctcctgggtttatgaatgtcaatgatttctactttgatctttattatgccttttcttttgcatactttactttgccccttttttctagtttcttaaggtggaagctgaggtcattgatataaaatccttcttttctaatataggcatttagtgctataaatttcctcttaagtcctgctttagtgatatcctgcaaattctttaattttcatgtagttaaaaatcactttctaaaattctttaaaatttttttctttgatccatgggttaactaaaaatgtgttattgaatttcaggtatccaaggaattttcagagatctttctgactactaacttaattccattgttatctgagaacactcactttatgattgaattttttaaatttattgagagttgttttacagccctgaaaatgacctgtcttgattttcatgckggttccccataacctccaagtcccattgaggtgacagcaaagggctcataatgaaagcctgcacacacagtgagtctcgttatagaagaggaacactg

SEQ ID NO: 241448 - DNA, 570 bp, Homo sapiens
attcttctgtctcagctttcctagtagctgggattacaggcgcccgccaccactttcggstaattcttttatttttagtagagacggggtttcgctatgttggccaggctggtcccgaactcctgacctcaggtgatcagctcgcctgagcttcccaaagtgctcggattacaggccgcgcctgactatgattcgttttgaaagaaaaaaatatatgccatttacccctcgggaatggaaacatagaggagtgacaagatctcccccaagctctggggcggtggagtccagcatttatagatcggtttgcactaggagcagaagctcctttcacgacaatctcggcctcttcccactttgtagagtgagtaacaagctcggagagatgaaataatttggtggcgttaacccggccgacaggcgccagcgccaggatttgaacccaaaccacgtgacttcacaacccatagctttcaacactacgcggtgctgctggcacctagtaaaggctggatcactactgaatgaatgattctggctacggatccttaaagcccacagaaggcccat

SEQ ID NO: 241449 - DNA, 608 bp, Homo sapiens
tacaggcacacatcaccaagcccagctaatttttgttttttagtttttattttggtagagatggggttttgctatgttgcccaggctggtctcaactcctrggttcaagtgatctgcccacttcagcctttcaaaatgccgggtttacaggtatgagtcaccattgcctggcttgatgtcctgttttcataattctctatcagtactgcttagggttatcttgagcactgtgtctacttaacagtacatatggttagtcatatccatcaacattcctcagaagattagattaagttctgtttcccatgagaggcaagttatctggtccccactccccacacccaacatagaatggtggtatagatctattataacagctataaacattcccattcaaaaggagccaaaataaaagatataaataagtgacttgtgagtagaaattctgaaatccaatcaagcaaatattgggagtttcttttttagatttcaaggcttgagaataattctttgtagcacttggctccacccatcggattcttggttctaccctctgagtcatccttttttcatgaaaggtaacgtgtgtttgcaactgaatagtttta

SEQ ID NO: 241450 - DNA, 608 bp, Homo sapiens
tacaggcacacatcaccaagcccagctaatttttgttttttagtttttattttggtagagatggggttttgctatgttgcccaggctggtctcaactcctgggttcaagtgatctgcccacttcagcctttcaaaatgccgggtttacaggtatgagtcaccattgcctggcttgatgtcctgttttcataattctctatcagtactgcttagggttatcttgagcactgtgtctacttaacagtacatatggttagtcatatccatcaacattcctcagaagattagattaagttctgtttcccatgagaggcaagttatctggtccccactccccacacccaacatagaatggtggtatagatctattataacagctataaacattcccattcaaaaggagccaaaataraagatataaataagtgacttgtgagtagaaattctgaaatccaatcaagcaaatattgggagtttcttttttagatttcaaggcttgagaataattctttgtagcacttggctccacccatcggattcttggttctaccctctgagtcatccttttttcatgaaaggtaacgtgtgtttgcaactgaatagtttta

SEQ ID NO: 241451 - DNA, 614 bp, Homo sapiens
gacatcctcctctcatttcgtactctttgtcccttcaaagctggcagtgtcttgctgaaatactctttcctcaaatacttagtgggtttcctgtgaattttcctggttttcactctatcaggcaaagatcacatccacagaccttgtcgagacctcaattgtaggtccctgatgagagggctgaaagacaacactcttaagctgcctggaggctctcagttttgatggaaaggttccatgaggcacatgcttaatytcttgaaagtcctttgtgtgactgaatgcttctctgatcctctgatctttctgaggtcttaacaaaagatgatacagtagcatcctcagctttatcttcataccttacagtcctaactgttctcagaagccatttctttatcttaacatctttgccatctggaaacgctgagagtctccaaaatcatgaagtcctggttccattctgtttaccaaaatcatgaagtcctggttccattctgtttaatcattcttccctcagtttgtctctctcctctcacattttgctataagcagcaagaataaggcaggagacaccttcaacattttgcttggaaatctcatcagctaaataacca

SEQ ID NO: 241452 - DNA, 614 bp, Homo sapiens
gacatcctcctctcatttcgtactctttgtcccttcaaagctggcagtgtcttgctgaaatactctttcctcaaatacttagtgggtttcctgtgaattttcctggttttcactctatcaggcaaagatcacatccacagaccttgtcgagacctcaattgtaggtccctgatgagagggctgaaagacaacactcttaagctgcctggaggctctcagttttgatggaaaggttccatgaggcacatgcttaatttcttgaaagtcctttgtgtgactgaatgcttctctgatcctctgatctttctgaggtcttaacaaaagatgatacagtagcatcctcagctttatcttcataccttacagtcctaactgttctcagaagccatttctttatcttaacatctttgccatctggaaacgctgagagtctccaaaatcatgaagtcctggttccattctgtttaccaaaatcatgaagtcctggttccattctgtttaatcrttcttccctcagtttgtctctctcctctcacattttgctataagcagcaagaataaggcaggagacaccttcaacattttgcttggaaatctcatcagctaaataacca

SEQ ID NO: 241453 - DNA, 570 bp, Homo sapiens
acagaaagaggctaaagaaattttacaggatgatttgtaaagtcagtgacccatcaaataatatatatcaacatttctgattgatctccctctgtaaatttagccaggactcttctacttcctactcaccagtatcttgatccctaagaaaataaaattacaaataactaaattagagcattgtagggttttcttttttctatgaatctaattttttttttttgagacagggtctcactctgttgcccgggctagagcgcggtggcayggttacagctcactgcagcctcaacctgctaggctcaagtgatcctcccatctcagcctcctgagtagatgggactacaggtgtacgccaccacacccagtgaattttgttattttttatagaaacagggttttgccatgttgtccgggctggtctcgaactcctgggctcaagcaatccaccctcttcggcctcccaaagttctgggattacaggcataaaccaatgtgcctggccctgtttctttacttcctgcaggttttttaactcatgtgattctaatattttatgatgattagatc

SEQ ID NO: 241454 - DNA, 570 bp, Homo sapiens
acagaaagaggctaaagaaattttacaggatgatttgtaaagtcagtgacccatcaaataatatatatcaacatttctgattgatctccctctgtaaatttagccaggactcttctacttcctactcaccagtatcttgatccctaagaaaataaaattacaaataactaaattagagcattgtagggttttcttttttctatgaatctaattttttttttttgagacagggtctcactctgttgcccgggctagagcgcggtggcatggttacagctcactgcagcctcaacctgctaggctcaagtgatcctcccatctcagcctcctgagtagatgggactacaggtgtacgccaccacacccagtgaawtttgttattttttatagaaacagggttttgccatgttgtccgggctggtctcgaactcctgggctcaagcaatccaccctcttcggcctcccaaagttctgggattacaggcataaaccaatgtgcctggccctgtttctttacttcctgcaggttttttaactcatgtgattctaatattttatgatgattagatc

SEQ ID NO: 241455 - DNA, 570 bp, Homo sapiens
acagaaagaggctaaagaaattttacaggatgatttgtaaagtcagtgacccatcaaataatatatatcaacatttctgattgatctccctctgtaaatttagccaggactcttctacttcctactcaccagtatcttgatccctaagaaaataaaattacaaataactaaattagagcattgtagggttttcttttttctatgaatctaattttttttttttgagacagggtctcactctgttgcccgggctagagcgcggtggcatggttacagctcactgcagcctcaacctgctaggctcaagtgatcctcccatctcagcctcctgagtagatgggactacaggtgtacgccaccacacccagtgaattttgttattttttatagaaacagggttttgccatgttgtccgggctggtctcgaactcctgggctcaagcaatccaccctcttcggcctcccaaagtkctgggattacaggcataaaccaatgtgcctggccctgtttctttacttcctgcaggttttttaactcatgtgattctaatattttatgatgattagatc

SEQ ID NO: 241456 - DNA, 365 bp, Homo sapiens
caatcttttgggttccttggagagggatgttgtatgaacactagacatttaccgatagtgacatttatttcacactctatttatarttcattgaggtaagcacacagggacgaaggagtcagccagcttctaaaagctccctccccattttgattggcgttctctgggggcccagtggaacattccactttttcaaggtttcctcttgatcctcttggctggaataaatagggaatgctcaccaggaggcttaatcccgcctcttacttgactaggcagggagcctggttgggtcagacatgacaacagagacctgccaacccaaccttaagataacggggttatggcaaaagccaaacgctctg

SEQ ID NO: 241457 - DNA, 365 bp, Homo sapiens
caatcttttgggttccttggagagggatgttgtatgaacactagacatttaccgatagtgacatttatttcacactctatttataattcattgaggtaagcacacagggacgaaggagtcagccagcttctaaaagctccctccccattttgattggcgttctctgggggcccagtggaacattccactwtttcaaggtttcctcttgatcctcttggctggaataaatagggaatgctcaccaggaggcttaatcccgcctcttacttgactaggcagggagcctggttgggtcagacatgacaacagagacctgccaacccaaccttaagataacggggttatggcaaaagccaaacgctctg

SEQ ID NO: 241458 - DNA, 506 bp, Homo sapiens
ggcacatcaaactggggagtaggggacacacaaacagggtttgtgttcaagatgaaaacttcaacctatcaaaaacaggctgcttctaagtcagactacagaaagacaaagtgtccataaaaatgattttcctgggtrataaagaggattttcaaatctgactaatagtttctcctttcaagaaggaggtgacagcatttaattcaaggaccaaaaaaaaaaaaaaaaagaagaagaagggattttttggatttacagtaataaattttaccctgagagcctaaactaacaattatgtctaagctttagtcaggtctaaacagaaaagatactctaagccatccactttatttatttttattttttatttttattttttgagacggagtcttgcttccaggctggagtgcagtggcatgatctcagctcaccgcaatctccgcctcccgagttcaagtgattctcccgcctcaaccaccctagtagctaggaatacaggtgcctgc

SEQ ID NO: 241459 - DNA, 506 bp, Homo sapiens
ggcacatcaaactggggagtaggggacacacaaacagggtttgtgttcaagatgaaaacttcaacctatcaaaaacaggctgcttctaagtcagactacagaaagacaaagtgtccataaaaatgattttcctgggtgataaagaggattttcaaatctgactaatagtttctcctttcaagaaggaggtgacagcatttaattcaaggaccaaaaaaaaaaaaaaaaagaagaagaagggattttttggatttacagtaataaattttaccctgagagcctaaactaacaattatktctaagctttagtcaggtctaaacagaaaagatactctaagccatccactttatttatttttattttttatttttattttttgagacggagtcttgcttccaggctggagtgcagtggcatgatctcagctcaccgcaatctccgcctcccgagttcaagtgattctcccgcctcaaccaccctagtagctaggaatacaggtgcctgc

SEQ ID NO: 241460 - DNA, 346 bp, Homo sapiens
attgcttgaacctgggaggtggaggttgcagtgagccaagattgtgccactgaactccagcctgggcaacagagtgagactctgttgcaaaaaaaaaaaaaaattaatcaaccttactgagacaacactgcatttaggaatgargatctccatgcagggatatagaaagatatccaagatgcagtgttacattaaaaaaggaagctgtaccacagtttgtatagtttaatcctatttaagtttttaaaaaataatagttatgagttaatatgcatagaaaaattctgaaaggatcacaagactctgttaacattggttgtttgtatggttaggaaaaagcattaca

SEQ ID NO: 241461 - DNA, 604 bp, Homo sapiens
aaagcttaacaatacttaatttcaagacaccataaagccacaataatcaagacagtggggtactggcataagaagagacacatagataaatgacataaatagatcatccagattcacagataaacagtaaattttgacaagggcacacaggtaattaaatgagtaggcaaggtaattaagtgagtagtcaaaattaaatgattttgacaagggcacacaggtaattaaatgagtaggcaaagatttcttggaacacacaaaaagcaccaaccataaaaaaaattgataaactaggcttcgtcaaaatgaaaaacttgttctttgaaagacataattaagaaaatgaaaaggccgctaaagactaasaatagtcacaacacacatatctgaaaaagagtgtatccagaatatataaacaattcttactattcaataataaaacaaaacaatctaattttttaataaacaaaaatatttgtacagatagttcacgaaatatgtgaatggccaataagcacatgaaaagaagttcaacatctttaatcagaaaaatgcaaatcaaaaccacgagatatcaaaatatacccaatagaatggctaaaat

SEQ ID NO: 241462 - DNA, 525 bp, Homo sapiens
tctgcctctctcttccacatttaagaaaccttctgattatattgggtccatccacataatccaggataatctcgccattttaagaccaactgattagcaatcttaccttcatctgttaccctgttaccctgatccctaattcccctttgccatataacgtaacagattcacaggtttggggtttagaatttggacatcttttggaggccattattctgactaccacactccccttgtatggttgttataaaaattaaaaatgagataatgcatatataaaactggctacagcaagtattcagtaagtgttarttaatattattgttgctttgtaaagccagagtttcaggtgtgttacagcagattgaatgctcaccaatcacaaatactacaacccttcacacttagataaatattcaaggagactggattttgaaaactccaaaatcttactaagactctgctgctaggcatttggaaatctcaatatatgcctagtgcataaaggatgggatcaggtaattg

SEQ ID NO: 241463 - DNA, 611 bp, Homo sapiens
ttgcctaaacaacacttttaataataaggttgtctaaagttaatatacaaacagggctctctgagggtgttaactatctagtaattcargctctgctggatacagtgacagagctctatgaacctcaactagaactcaggtcggcctcaggtgaatataaacactgtatgtgagtcaccttgcaattacagctgccacctggaagcaaatttaagcagtaagaactacaaaaccaaatccctgtaagatcctgcattgaccttcctcttacttcttcctgtctgaggatccataaacctcaggattctttactaatttctcatcagcatcattttttattgtatttccaaatttaaaaacaactgtctccaaaggcctcaaaattactttcagttattactataataaatatcagcgatgtatgatgtattaattagaaactaaggtgttttttttcccctccccacaggaaaactacttcagagaaagactttaaatttctgagaaaatctttatacatattgagtatagatgctatcaaccacatacatgaaaataattgtttggggataatgcacaccatttgccaatgattaagattcagcccagtc

SEQ ID NO: 241464 - DNA, 395 bp, Homo sapiens
tctctgggattggttcctggtaccttatttagttcgtttgctgaggtcctggatagtcttgatgtttgtggatgttcatcagtgtattactctgttttcatgctgctgataaagacatacctaagactgggcaatttacaaaagaaagagttttattggacttaaagttccacatggctggggagggttcacaatcatggcagaaggcaaggagcagcagcaagtcacatcttatgtggatggyggcaggcaaaaaagagcttgtgcagaaaaactcccccttataataaccatcagatctggtgagacttactgtcacaagaacggcatgggaaagacctgcccgcatgattcaattacctcccactggatccctcctacaacatgtgggaatt

SEQ ID NO: 241465 - DNA, 508 bp, Homo sapiens
acacatggtggggactcaaatgtgtgttgaaccaatgaacggcttcaaacagctctgcctttctgcccatccttcacccttgtctcttctctcatcttaattcagtccctttctattataacrttcagattctacaatgaactgtgagacttggagtgagaaatgagcttttagatgagttctcatcatctttaaaaatacgtatttcacaacagtatcagttaggctacccaaattcccaggcattctagtcctttcagaattcctgcccctcagcatgaacatgcaagtctgtgtgtccctcctcttttcaggtcacattaagcttaggtgtcgggttggaagactaggtgccataggaaggatataaaggcagtggctgtaagaacaaacatcattaagttcttggcggaggaagaaggggcacagaggaggggatttatgtgaataaagagtctgggtcagggccttgtggccttgaacaaagtgtgatgaagagggtaatttc

SEQ ID NO: 241466 - DNA, 615 bp, Homo sapiens
aagcttaggtgtcgggttggaagactaggtgccataggaaggatataaaggcagtggctgtaagaacaaacatcattaagttcttggcggaggaagaaggggcacagaggaggggatttatgtgaataaagagtctgggtcagggmcttgtggccttgaacaaagtgtgatgaagagggtaatttcccctgaatcagcttgaacatcaggcttctagtcactatttggcttttgcaacattaaaaattactatgtggcttagtgtgctagggctgctgtaacacaataccacggactgggtggcttcactatagaaacggattttctcctgttctggaggctgggaagtccaacatcaaggtgttggcagctttggtttctcccgaggcccctctccttggtttgcaggtggcttcccagggtttctctgtgtgtttgtgtcctaagctcctcttcttataaggacaccagtcatactgggttagagcccaccctaatgacctcattttaacttaattacctctttaaataccttatctccaaatgcagatacattctgagttacttgggattaggacttccaacacatgaattttaagggaacacaattcagtc

SEQ ID NO: 241467 - DNA, 273 bp, Homo sapiens
ggccagtctcctgactagacttactaatattgctttatgctgagaccagctcagtcggggagaccctaacccrgggatgctagaggaataaagacacacacacacacaaatatagaggtgtagagtgggaaatcaggggtctcacagccttcagagctgagagccttgaacagagatttacccacatatttactgacagcaagccagtgataagcattgtttctatagattatagattaactaaaagtcttccttatgggaaacaaagggatg

SEQ ID NO: 241468 - DNA, 273 bp, Homo sapiens
ggccagtctcctgactagacttactaatattgctttatgctgagaccagctcagtcggggagaccctaacccggggatgctagaggaataaagacacacacacacacaaatatagaggtgtagagtgggaaatcaggggtctcacagccttcagagctgagagcctygaacagagatttacccacatatttactgacagcaagccagtgataagcattgtttctatagattatagattaactaaaagtcttccttatgggaaacaaagggatg

SEQ ID NO: 241469 - DNA, 593 bp, Homo sapiens
tgaatcagaaaaagcgtacagtttgctctcaggatctggtctgaagacctggcactaacctttaataattaagtcacaatgggcccattaatttagtcttgttgaacttcaatttcctcatcggtaaaattagggttaacaaaaagtacctgccttacatatgaacattaaatcagatattgtctatgatagtgatttttcaactctaaagggctgagcaaatgtttatttttattattaatatgaaacgattttagtttctggctctttggctcattttctttatctaaaacatgttgcttctttgattgaggggaaaaatgtcaacttttgttgaaatattttatgtgtgtcagtctaattgctctgtaaatagggttatgcatgtttgtgtaatcattttttaaactatagtttataaataattatctttttatagagtgagagataaacagggacatatccttgattcagatgttattaaagatctacattgttatcttctgtatgatcactgattttgttagtttattttaaacaaatgcaactgcyttaccaccaggtaatgttgttaatggaacgattggcaaaca

SEQ ID NO: 241470 - DNA, 615 bp, Homo sapiens
ctgtcctttcgggcttttatggaggcttcattatataggcatgattgactaaatcattggccactggcgatcaacttaacttttagccttcttccccactccctggaggttggccagtgaggctaaaagtcccaccttctactcatgccttggtctttccagtgaccagtcccacttggagctacctatgggctgcagccaacagtcaatcattagcatatgaaaagtcatgactttgatgattctaaggattttatgagttgtgtatcaggaaacaggaaatggggttgaagaccatatgtacattttataatatcacacatgtcacaaaaggttaacaaaatccaatactctttgataataaaaactcaacaaagaagaaacagagaactacttcaatctgataacggcatctacaaatatcccccaactaacttcacacttaatggtgaaagaygaatgctttccccctaactctaagaacaaaacaaaaatgtctgctctagctacttctattcaaatttatactagatctcctagccaggaaaattaggcaagaaaaaaaatagaagacatccggatggagaagaaggaagcaaaacaatgttcattcat

SEQ ID NO: 241471 - DNA, 615 bp, Homo sapiens
ctgtcctttcgggcttttatggaggcttcattatataggcatgattgactaaatcattggccactggcgatcaacttaacttttagccttcttccccactccctggaggttggccagtgaggctaaaagtcccaccttctactcatgccttggtctttccagtgaccagtcccacttggagctacctatgggctgcagccaacagtcaatcattagcatatgaaaagtcatgactttgatgattctaaggattttatgagttgtgtatcaggaaacaggaaatggggttgaagaccatatgtacattttataatatcacacatgtcacaaaaggttaacaaaatccaatactctttgataataaaaactcaacaaagaagaaacagagaactacttcaatctgataacggcatctacaaatatcccccaactaacttcacacttaatggtgaaagatgaatgctttccccctaactctaagaacaaaacaaaaatgtctgctctagctacttctattcaaatttatactagatctcctagccaggaaaattaggcaagaaaaaaaatagaagrcatccggatggagaagaaggaagcaaaacaatgttcattcat

SEQ ID NO: 241472 - DNA, 450 bp, Homo sapiens
tttccaattaatgtttaacattcaaaatttgttataagtatattcaagagattgaataggaaarcaaaaccttgaatatgatattcagtagtaggttaagtttcatctgattgccaagtaagttacatgtatacttgagttgtttaacctagacaccaaaacactaccccactgcagtcagagactattcttctctaaatgtctgacttcattacaggtcaacagacagacctttgcatgtagcatagccattatctccccaagccattatcttttcataagcctgagacaaccctttgtcaagctgcacctgtgcctaccgctggcaactagtctttctgaggaactgagtttcagtaccatggggagttaagggtgcaagttagtgttaaaacttgaactggaatctatcttttgttgctcaagtgaccctgggcaagttatttgatt

SEQ ID NO: 241473 - DNA, 448 bp, Homo sapiens
tccaattaatgtttaacattcaaaatttgttataagtatattcaagagattgaataggaaagcaaaaccttgaatatgatattcagtagtaggttaagtttcatctgattgccaagtaagttacatgtatacttgagttgyttaacctagacaccaaaacactaccccactgcagtcagagactattcttctctaaatgtctgacttcattacaggtcaacagacagacctttgcatgtagcatagccattatctccccaagccattatcttttcataagcctgagacaaccctttgtcaagctgcacctgtgcctaccgctggcaactagtctttctgaggaactgagtttcagtaccatggggagttaagggtgcaagttagtgttaaaacttgaactggaatctatcttttgttgctcaagtgaccctgggcaagttatttgatt

SEQ ID NO: 241474 - DNA, 336 bp, Homo sapiens
tttcgttggtgtgtgcatgtggagagagagagggagagcaagagagatctctgtgtctcctcctcttagaaggacacagacccaattggatcagggcttccttgtgacttcatttaaccttaattacctccttaaagtcaccctctccaaatacagtcacattggtggttagggcttcaacatatgaattttggggtgrtacacagttcagtccataccagggctgaatggggaatgatctgcatgtataacagggaaattttgaggtatttaagtgacatacactttgtgaatgtgctttgaaatatccaaagtgtcacataattataatataag

SEQ ID NO: 241475 - DNA, 544 bp, Homo sapiens
gttcatctgcatggcagcaggaagaatattttccaggcaaatgaacgttgttgtgggtaaatcctttcaatgccaaaaacattaaattctgtggttactcctccagagaaagcttagatggtatcagaaaacctgggagagtgatcttagctatgtccagcccagttaaataatgatggagccattgtttttccttccagggtgtattgaatttaacttgtatgatttcacttgtgaagagcctttccagatactttcagttaagaattcttgtgaaaggaaagatccgcaaacatctccatgtctgtcatcygatttcagcctttagctaatctcatactcattcaaacaaacttggccaggaggaggaagcgaccctgcactaaattcatcctaattgtaatggagacgtgggatttgtgggtgagggcaaaagagaaggtcaatgtttgggacatcttaatgatcatgaagtcatcaattttgccctttttgtcttttggtgttgggttgtgtattcggtaggagtgcagatgactgtaaa

SEQ ID NO: 241476 - DNA, 580 bp, Homo sapiens
aatacttaatacatataaaggaatttagaaaagtggcacatagtaagtgtgtgatatgcttgctatcaatggtttattattactggtattatattttcaaaaagttgctttaaaaaagcctgtggtgataggatgggaaacatcaaaatcctcagatctccacaaagcatagttgaaatactgtagtaatttctaaagaataaagtggctattctctttattttttgaaagcagagttactgtgaaaattactttattctattgacattacccttcctgaatatgtgaacaacaaaaggaattatccaagtattctcaagcccatatagaaataactttttaaaattcattcagtagtaaatyagcaccatctagtggctccttgtaaattcgtctgtccatttaccactaaatagtcctactttatgatgtatgaaaaatgcaataatgcaaaagcataatattttcttctcctcgatggtattttgttccatgttattttcataggtgaagtacaagaaagacattcaaaatatgcatgatccagtttcagatctcccaaatttgttgtttttagacc

SEQ ID NO: 241477 - DNA, 603 bp, Homo sapiens
ccattcccatgatattggcatcaatccattcatgaggcagagcgctatggcctgatcacctcttagagttcccaccccccaacagtgttgcgttggggatgaagttttcaacacacgaactttgaagggacacattcaaagcataggcggcgtatttgattgattttttttcaataaacaattaagagtgttttctacttacctactttattctcaacctaagattatgctaagtaacatctcgatattccccacactttttttttctctgttccagcgagacttatttgtgtgtgtatgtgtgtgtgttttccttcttaccttttcaggatcagacacacaaggttttgtctgcagcctatatcaaagttttgtgggtgcagctgggttcttaatgcaaagggatagaaatagtggatgctggtctcagtccaatacaaccttgatgcttcatgctaggcatgctcaatgaataagatcctttctgttgcccaataacaacatcaaaacaggcagaaatgataacttgtagacaaaaaaactctcrggaattttgtaagcattaactatgctatttgttgaaatgttataattcatattctt

SEQ ID NO: 241478 - DNA, 543 bp, Homo sapiens
aagagttgtgattggaaatgaatctggaaataaactggcatgctgtgcaatagtgaagcaaagtgccacacgattttatttattcgttaaaacacttactgaaggccaatacatgccaggtaccatgtctggtgctagggttaaaaatatgactggccacattccctgagctcaaagaaccacagtctacctggctagaaagagaggaaattcaatcagtccttcaacacagtgtggtaagcattataaaagtcacccygaggaagcatccaccatctcctctcagatggagattttgtataatacacaacatgggtatcaataacaaagatcacaacatagattcatttctggataaaaaataacagaaattttgaatcttctcaagactgtgcttaacacgacaactggcaactgtgagcctacaagtgacgctaatatcaagtaaggcagcagacgattatcagcatctcttcatcgaattcactaagcaccacatggaagaatgcagataacagaactgagaacacccccaagaacatg

SEQ ID NO: 241479 - DNA, 414 bp, Homo sapiens
agcaaatattgtacaatttatattatttcaaatgtgataaggtatgatttatggcccagaatttgatctttattggtgaatattccacgtgagcttgaaaagaaggaatattcttctggcttcagaagaaacagtccatagatgtccatcatgtaacagctgattgatattatagagttcaactgtgtccatattggttttctatgtgaagtatgtgtccatttctgacaaaagcctgttgaagtctccaactataacggtggattgattcattcatttctccttccacttttgtcagttttgcctcacatattttgacactatrttgttagatggattaaagattattgtgtctatttggggaattgattcttttatcattagacaatgcttctcttttttcttgatgaattc

SEQ ID NO: 241480 - DNA, 533 bp, Homo sapiens
tttaatatataggtctttatatttgtagtggatttatcatagacaacatatagttaagccttattttttggagtatttagacaattgacatttaaagtgattattaatattgttggattaatatctatcacatytgttactctttacatttattcctcatttttccctagttgtgtcttctactcttgttctgccttatgtaaggattttctataatattattttctttattttctttttatatcagtttgttattgactgagtgtttgtgtgccctcaaaatttatatgttgaaattcagtctccaatgtgtttgtatttggagcttgagcttttgggtggtaactggatgatgaaggtggtgccttcataaatgagattactgcctttgttagaagaagtcagagaggttactctctgctctctgccttgtgaagatataacaagaaggtgtacatctgcaaagataccaggaagtagatcctcaccagatattaaaaaattttggtacctcaaacttggatgccagactc

SEQ ID NO: 241481 - DNA, 419 bp, Homo sapiens
atcaaggtggagatgatacttagtagtaccattaaagctgatctgctcagttcctgctagagatgctgtacttagggaaaatttattaacatataaataaatcattacactgtgatctggagtttgttaaaaawtttttttctataatccaaatctgtctttcattctgcaaatgcatagacataaacactaatgtaagtctttgggaaattaaagtagctacaaatataaatacctaatatcttttgggaaaaaatattaaaaatactcattttaaatttgtgctttcatccagaagccaaaaaaagctgtccagcttttaaagaaagtgtagaatagtcttttacacagataatttttctcacattatgcttgggaggcaggaaatgttaaaagcagataataaagttgtatgataa

SEQ ID NO: 241482 - DNA, 573 bp, Homo sapiens
cctgtgcctggctctccaaggccccacccatctgcaaggctcaactctcattttccttagatagttgtcaaatatcatcttctacgaaagttcttcctctacccaatgtacttacaattgcaatctctataggactttctattctctttgactcatttacttttcttcataaaacttagcaccttctaatatctaatatcttacatataatgtattagtcagggtgctctggagagacagaattaacaggatatgtgagtatatgaaggggagtttattaagaagtattgactcacatgatctcaagtggaagtctcataataagctgtctgcaagctgaggagaaagaaagccagtccaagccccaaaacctcaaaagcaggkaagcaaacagtgcagtcttccatctgtggccaggcagaggcctgagagcccctggcaaaccattggtgaaagtccaagagtccaaaagctgaagaacttggagcaaaatgtgcaagagcaggaagcatccagcacaggggaaagatgaaggccagaagactcagcaaatctgctctttccagcttcttc

SEQ ID NO: 241483 - DNA, 651 bp, Homo sapiens
tgactcacatgatctcaagtggaagtctcataataagctgtctgcaagctgaggagaaagaaagccagtccaagccccaaaacctcaaaagcaggtaagcaaacagtgcagtcttccatctgtggccaggcagaggcctgagagcccctggcaaaccattggtgaaagtccaagagtccaaaagctgaagaacttggagcaaaatgtgcaagagcaggaagcatccagcacaggrgaaagatgaaggccagaagactcagcaaatctgctctttccagcttcttctacctgctttactctagccacactgacagctgatcagatgatgcccattcagattgagggtgggtctgcctttcccagtgtgctgactcaaatgttaatctcctttggcaacaccctcacagacacgtccaggaacaatactttgcatctttctatccaattaagatgacactcaatattaactatcacaaatgtacaaaatttattttttgccttctttccaaagagtgtgaaaacttccagaggcaaaggttttgttttggttgctgttataatttcaatattaggtatagcaaaggttttgttttctttgctgttgtaatttcaacattaggtatattccgctacataattatgtgctcaatg

SEQ ID NO: 241484 - DNA, 573 bp, Homo sapiens
gttctaatttctatgaacctgttgctcctctattcacttatttttttccctttctttggctatctgaagttccaaatatttataaaagtatactcaataaatgatttcacagtgtctttttattargctatttttccctcagactactttttatttgatattaaatggaaatggctcctataattatatgtattgttttatttgctgtttgcaattgtgataattttcattacctcctgcagtacttttaattaatagtgtttcatttcatttcttaacatcatttaaaaatcaaaaaaagcaaccacttctattttcagctgatattcagtgattttcctgaaaacacacataagaactgactgaaatgaaaattaaaaaactgttttcaaagccattactaagagcttcatttggtgtctgtagcttttttttttttttttgtcgtcacagggtttgtagtatttggtgttatttcatctttatgaagcatttatagaacatatgagatttttaaatatacgaaatacgtacacaagtgcttttgaactagatattcgtttttcatcagag

SEQ ID NO: 241485 - DNA, 564 bp, Homo sapiens
agtttatgtttctactcacctcctgaaaacaccttggttgctttcaggtttcggcaattataaataaagcgactataaacatctgcgtttgggtttgtgtgcacatacattttcaacatttttggagaaacactaaggatcatgtttgttgggtagcacggcatgagttgtttaattttgtaagaaactgcaaactgtcttgtagagtacctataccattctacgttcccaccagaaaatgaatgagagttgctgttgctctactttctcacgagtacttgttaatgtcattgttatagattgtgaccattctcaccggtgtctrggagtatttaattgtcattttaatttgcatttccctgataacatgtaaagtgacgcatcttttcatgtgcttatttgctatctatatatctttggtgaggtgctttttaaggtctttggccaatgttttaaaaagtggattgtttgctgtttattgttgagttttaataattctttctatattttggataatatacctttatcagatatgctttctgcaaatatttcctcccatactgt

SEQ ID NO: 241486 - DNA, 607 bp, Homo sapiens
tcaattataacattgaatacaatggactaaatttccctatcaaaagacacagactagctgaatggataaaaaacaagacccattgaactgtttcctgcaagaaacacacttcaccaatagagacacacatagactaaaaataaaggaatagaaatagatactccamgacaatgaaaaccaaaaaatagcaggagttacaatacttatatcagacaaaatagatttcaagacaaagaccctaagaagagacaaataatatcactgtataattttatatcattcaattcagcaagagggtataacaatttgaaataaatatgcacccaacactgagcacccagattcataaagcaaatattattagtgctaaagagagaaataggccgcaatataataatatctggatatgtcaacaccccactttcagcattggacagatcttccagacagaaaatcaacaaagaaacatcacacttaatttgcactatagtcctaggggttctaataattttttacagaatactttatccaagagctgcagagtacacctttatttactcagcacatgtatcgttatcatgaagagtttatatgttaggtcacaaaa

SEQ ID NO: 241487 - DNA, 607 bp, Homo sapiens
tcaattataacattgaatacaatggactaaatttccctatcaaaagacacagactagctgaatggataaaaaacaagacccattgaactgtttcctgcaagaaacacacttcaccaatagagacacacatagactaaaaataaaggaatagaaatagatactccacgacaatgaaaaccaaaaaatagcaggagttacaatacttatatcagacaaaatagatttcaagacaaagaccctaagaagagacaaataatatcactgtataattttatatcattcaattcagcaagagggtataacaatttgaaataaatatgcacccaacactgagcacccagattcataaagcaaatattattagtgctaaagagagaaataggccscaatataataatatctggatatgtcaacaccccactttcagcattggacagatcttccagacagaaaatcaacaaagaaacatcacacttaatttgcactatagtcctaggggttctaataattttttacagaatactttatccaagagctgcagagtacacctttatttactcagcacatgtatcgttatcatgaagagtttatatgttaggtcacaaaa

SEQ ID NO: 241488 - DNA, 607 bp, Homo sapiens
tcaattataacattgaatacaatggactaaatttccctatcaaaagacacagactagctgaatggataaaaaacaagacccattgaactgtttcctgcaagaaacacacttcaccaatagagacacacatagactaaaaataaaggaatagaaatagatactccacgacaatgaaaaccaaaaaatagcaggagttacaatacttatatcagacaaaatagatttcaagacaaagaccctaagaagagacaaataatatcactgtataattttatatcattcaattcagcaagagggtataacaatttgaaataaatatgcacccaacactgagcacccagattcataaagcaaatattattagtgctaaagagagaaataggccgcaatataataatatctggatatgtcaacaccccactttcagcattggacagatcttccagacagaaaatcaacaaagaaacatcacacttaatttgcactatagtcctaggggttctaataattttttacagaatactttatccaagagctgcagagtacacctttatttactcagcacatgtatygttatcatgaagagtttatatgttaggtcacaaaa

SEQ ID NO: 241489 - DNA, 647 bp, Homo sapiens
atctaccaaacatttgagaactaattccaatcctactcaaactattaaaaaaaaaaaaaaggtgtagggggaaatacttttaaaatcatcctatgaggccagtattaccctgataccaaaatcagacaaagacaaatcagaaaaaaaaaaaaaactacaggccaatataaataatgaatattgatgcaaaaatcctcaacaaaatattagcaaaccaaatttaacaatatattggaaagatcattcatcatgaccaagtggaatttatcccaggaatgcaaggatggttcaacatacacaatcaatcaatgccatacatcatatcaacagaataaagaataaaaaccatatagttattttacttaatgttgaaaaagcatttgataaaatttaacatctcttcatgagaraaatcctaaagaaaaaccgggtatagaaggaacatacttcagcataataaaattcatatatgacagacccacagctagtatcatactgaataaggaaaaactgaaagccttttctctaagatatggaacataaaatggatgccacagtgaccactgttattcaacacagtactggaagttctagctagagcaatgacaaagagaaagatataaaggacatctagattgtaaaggaag

SEQ ID NO: 241490 - DNA, 647 bp, Homo sapiens
atctaccaaacatttgagaactaattccaatcctactcaaactattaaaaaaaaaaaaaaggtgtagggggaaatacttttaaaatcatcctatgaggccagtattaccctgataccaaaatcagacaaagacaaatcagaaaaaaaaaaaaaactacaggccaatataaataatgaatattgatgcaaaaatcctcaacaaaatattagcaaaccaaatttaacaatatattggaaagatcattcatcatgaccaagtggaatttatcccaggaatgcaaggatggttcaacatacacaatcaatcaatgccatacatcatatcaacagaataaagaataaaaaccatatagttattttacttaatgttgaaaaagcatttgataaaatttaacatctcttcatgagagaaatcctaaagaaaaacygggtatagaaggaacatacttcagcataataaaattcatatatgacagacccacagctagtatcatactgaataaggaaaaactgaaagccttttctctaagatatggaacataaaatggatgccacagtgaccactgttattcaacacagtactggaagttctagctagagcaatgacaaagagaaagatataaaggacatctagattgtaaaggaag

SEQ ID NO: 241491 - DNA, 566 bp, Homo sapiens
gttcaacatacacaatcaatcaatgccatacatcatatcaacagaataaagaataaaaaccatatagttattttacttaatgttgaaaaagcatttgataaaatttaacatctcttcatgagagaaatcctaaagaaaaaccgggtatagaaggaacatacttcagcataataaaattcatatatgacagacccacagctagtatcatactgaataaggaaaaactgaaagccttttctctaagatatggaacataaaatggatgccacagtgaccactgttattcaacacagtactggaagttctagctagagcaatgacaaagagaaagatataaaggacatctagattgtaaaggaagaagtcaaattttccttgtttgcaaattwtatatttagaaaaacctaaagaattaataagaaaatgattagaactgataaacaaattcagaaaagttgtaagatgcaaactcaacattcaaaaatcagtagcattctatatgccaacattgaacaatatgaaaaagaaattcaaaaagtaatcctagtcgttctattgtaaatagt

SEQ ID NO: 241492 - DNA, 566 bp, Homo sapiens
gttcaacatacacaatcaatcaatgccatacatcatatcaacagaataaagaataaaaaccatatagttattttacttaatgttgaaaaagcatttgataaaatttaacatctcttcatgagagaaatcctaaagaaaaaccgggtatagaaggaacatacttcagcataataaaattcatatatgacagacccacagctagtatcatactgaataaggaaaaactgaaagccttttctctaagatatggaacataaaatggatgccacagtgaccactgttattcaacacagtactggaagttctagctagagcaatgacaaagagaaagatataaaggacatctagattgtaaaggaagaagtcaaattttccttgtttgcaaattttatatttagaaaaacctaaagaattaatragaaaatgattagaactgataaacaaattcagaaaagttgtaagatgcaaactcaacattcaaaaatcagtagcattctatatgccaacattgaacaatatgaaaaagaaattcaaaaagtaatcctagtcgttctattgtaaatagt

SEQ ID NO: 241493 - DNA, 480 bp, Homo sapiens
atttaatttttgcagcccctaattgttcagaataaatgtagcattcacataatattatagtccatgaaaagagtatattcttttactggttttggttcatacatgttaagtttcaactttcaataataaaattcwataaatttgatttcttaatcataaaaaatcaacaacaaaagaaagtaatcctatttacaatagtcacatgtaaaattaaatatctaggaattgacaaaagaagtgaaagatctacataatgaaaatgataaaacactgagaaaaaaattaaagaggagaccaaaatatgaaaaaatatttcatacatattcatggattgaaagaatctatgtatctatctatatctatttatctatctatcatctatctgtttatctgtcaatctatctatctattatctatatatttaacttttctttaagttcaggggtacaagtgcaggtttgttatataaataaacttgtg

SEQ ID NO: 241494 - DNA, 553 bp, Homo sapiens
atagtccatgaaaagagtatattcttttactggttttggttcatacatgttaagtttcaactttcaataataaaattctataaatttgatttcttaatcataaaaaatcaacaacaaaagaaagtaatcctatttacaatagtcacatgtaaaattaaatatctaggaattgacaaaagaagtgaaagatctacataatgaaaatgataaaacactgagaaaaaaattaaagaggagaccaaaatatgaaaaaatatttcatacatattcatggattgaaagaatctatstatctatctatatctatttatctatctatcatctatctgtttatctgtcaatctatctatctattatctatatatttaacttttctttaagttcaggggtacaagtgcaggtttgttatataaataaacttgtgtcatgtgggtttcttgtacaaattatttcatcatcaatattttaagtctagaacccattagttgtttgtcaatatcctatctctcccccaaccatccaccctccaaaagaccccaatgtgtgttgttcc

SEQ ID NO: 241495 - DNA, 596 bp, Homo sapiens
agtttttggtcttttcagagatgtaactttttcctggttcagtcttgggagagtgtaaatgtccagaaacttatcaatttcttcttgattttctgatttatgtgcatagaggtgttctaatattctgattgttgctggtatttctgtgaggtcagtrgtaatgtctcccttagttttttctgattgtgtttatttgaatcttctctttttttattagtctagctagtggtctatctattttattaatttttccaaaaagccagctcctggattcattgatcttttgaatggtttttcacatttcagtcttcttcagttcaactctgatttagattatttcttgtcttctgctagctttgtgatttgtttgctcctgtttctctagttctttagttgtgaagttagattgttaacttgagatatttctaactttttgatgtaggtatttggtgctataagcttccttgttaacactgccttagctatgccccaaggattctggcatgttgtgtcttggttcttattattctcaaatattggtttctgcattaatttcattatttagccaaacattcaggagcaggttaaatattcat

SEQ ID NO: 241496 - DNA, 586 bp, Homo sapiens
aagcttccttgttaacactgccttagctatgccccaaggattctggcatgttgtgtcttggttcttattattctcaaatattggtttctgcattaatttcattatttagccaaacattcaggagcaggttaaatattcatgtaattgtacgtttttgagtaaatattttagtytttattttgaacttaattgtgctatggtctgagagactgttggttatgattcacttattttgcatttgctgaggagtgcttacttccaattacataatctattttagaataaatgctatgcgataatgagaagaatgtatattcgattatcttttgatagagagtgatatggcttgactttttgtctccactcgaatctcatgtctaattgtaaaccccagtgttagaagagggacctggtgagaagtgattgaatcatgggagtagactttccccttagtgttctcatgatagagttttcatgagatctggttgtttgaaactgtgtagcacctccacctttactctgtctgtctcctgatgaccatatgaagatgtgcttgcttctgctttgccttttcaatgattgtaag

SEQ ID NO: 241497 - DNA, 567 bp, Homo sapiens
ctatgccccaaggattctggcatgttgtgtcttggttcttattattctcaaatattggtttctgcattaatttcattatttagccaaacattcaggagcaggttaaatattcatgtaattgtacgtttttgagtaaatattttagtttttattttgaacttaattgtgctatggtctgagagactgttggttatgattcacttattttgcatttgctgaggagtgcttacttccaattacataatctattttagaataaatgctatgcgataatgagaagaatgtatattcgattatcttttgatrgagagtgatatggcttgactttttgtctccactcgaatctcatgtctaattgtaaaccccagtgttagaagagggacctggtgagaagtgattgaatcatgggagtagactttccccttagtgttctcatgatagagttttcatgagatctggttgtttgaaactgtgtagcacctccacctttactctgtctgtctcctgatgaccatatgaagatgtgcttgcttctgctttgccttttcaatgattgtaagtttccta

SEQ ID NO: 241498 - DNA, 565 bp, Homo sapiens
cacatccagttaaaaagcctctgcacagcaaagaatacaattagtaaagygaagtgacaacccacataatgggaaaaaaatatctgcaaactacccatctgacaaaggattgataaccagaacatataaggagctcaaacaactctaaagaaataaatctaataatctcatcaaagaatgggcaaaagatttgagtagacatttttcaaaagaagacatacacatggcaaacatgtatatgaaaaggtgctcgatatcattgaccataagaaaactggaaatccagacttcaatgaggtattatgcaaccccagttaacatgactcacattcaagagacaggcaataacaaatcctggcaaagatgtggcgaaaagagaaagcttttacactgttgttgagaatgtaaattattatagccactatggagaacagatcagaggttcctcacaaatgcaaaaattgagctaccatatgatccagcaatttgactcctgggtacgtatccaagataaaggaatttagtatatggaagacatatctgcacttctatgtgtgttgcagca

SEQ ID NO: 241499 - DNA, 565 bp, Homo sapiens
cacatccagttaaaaagcctctgcacagcaaagaatacaattagtaaagtgaagtgacaacccacataatgggaaaaaaatatctgcaaactacccatctgacaaaggattrataaccagaacatataaggagctcaaacaactctaaagaaataaatctaataatctcatcaaagaatgggcaaaagatttgagtagacatttttcaaaagaagacatacacatggcaaacatgtatatgaaaaggtgctcgatatcattgaccataagaaaactggaaatccagacttcaatgaggtattatgcaaccccagttaacatgactcacattcaagagacaggcaataacaaatcctggcaaagatgtggcgaaaagagaaagcttttacactgttgttgagaatgtaaattattatagccactatggagaacagatcagaggttcctcacaaatgcaaaaattgagctaccatatgatccagcaatttgactcctgggtacgtatccaagataaaggaatttagtatatggaagacatatctgcacttctatgtgtgttgcagca

SEQ ID NO: 241500 - DNA, 565 bp, Homo sapiens
cacatccagttaaaaagcctctgcacagcaaagaatacaattagtaaagtgaagtgacaacccacataatgggaaaaaaatatctgcaaactacccatctgacaaaggattgataaccagaacatataaggagctcaaacaactctaaagaaataaatctaataatctcatcaaagaatgggcaaaagatttgagtagacatttttcaaaagaagacatacacatggcaaacatgtatatgaaaaggtgctcratatcattgaccataagaaaactggaaatccagacttcaatgaggtattatgcaaccccagttaacatgactcacattcaagagacaggcaataacaaatcctggcaaagatgtggcgaaaagagaaagcttttacactgttgttgagaatgtaaattattatagccactatggagaacagatcagaggttcctcacaaatgcaaaaattgagctaccatatgatccagcaatttgactcctgggtacgtatccaagataaaggaatttagtatatggaagacatatctgcacttctatgtgtgttgcagca

SEQ ID NO: 241501 - DNA, 565 bp, Homo sapiens
cacatccagttaaaaagcctctgcacagcaaagaatacaattagtaaagtgaagtgacaacccacataatgggaaaaaaatatctgcaaactacccatctgacaaaggattgataaccagaacatataaggagctcaaacaactctaaagaaataaatctaataatctcatcaaagaatgggcaaaagatttgagtagacatttttcaaaagaagacatacacatggcaaacatgtatatgaaaaggtgctcgatatcattgaccataagaaaaytggaaatccagacttcaatgaggtattatgcaaccccagttaacatgactcacattcaagagacaggcaataacaaatcctggcaaagatgtggcgaaaagagaaagcttttacactgttgttgagaatgtaaattattatagccactatggagaacagatcagaggttcctcacaaatgcaaaaattgagctaccatatgatccagcaatttgactcctgggtacgtatccaagataaaggaatttagtatatggaagacatatctgcacttctatgtgtgttgcagca

SEQ ID NO: 241502 - DNA, 557 bp, Homo sapiens
agatcaagcagactaatacaaccagcaatgaaaaaggagaatattaaattaaaaatgatattatttacattaacacgccaaataaaatatttaggtagaaatttgacaaaaaatttacaagaacaatgtgaggaaaacaagcaaaacaaaaatactcttgtgaaagcagtcagttcttcccattttatctatatttcaacataatcacaaaaatttcagcaagttgttttgtgatatcaataaactaatcctaaggtttatgtggagaagcaaaaacccagaacagctaacaatacaaaaaaagaggagcaaagttagaggactgacccacccaactttaagrctgactataaagttgcagattatcaagatagtggataaaagaatagacagactaatgagttttgattcattaatagcgagtcccataaaggaaccacaaaaatatagtcaactaatttaaaaaaggggcaaaattcatttcgtcttccatcactgataccctttcttccagttgatagcatcggctcctgaggcttctgcattcttcacgtggt

SEQ ID NO: 241503 - DNA, 576 bp, Homo sapiens
aatatgcctgttttcagcatattgggaaacaaaagtcaatgtagtttaagagaactatactctcatctactgataggacaaagtcagtgataatatttaacattgaacaatgaaggtgtagataataagcatgtgatagggaaatatagtaagtgttaataatatttaattctgcattgtagactgattgataaaaagtgatgtgttagaagaattggtttttatcacgagcatttatatatgtgtttagatgttccatgtttatataatgaatttatactttatatgcacatatacaattataaaaataaaatatgccttccatcagtataggtttagatgataggacattataaggctagatgtatgcagtaatattaatgagaaatttaaatgggctaaattttaaaatatttttctaattctttttcaattcacctcctttccatcaccrtaatggaagttacaaataatacccacaaaaatatttagagtaatttgctgtactcagagaagggaaaagcttttgaggtttcttgatggacaagccccatctggcacttttatcatttgtgt

SEQ ID NO: 241504 - DNA, 391 bp, Homo sapiens
ttagaatccaaagtgccttataattatatttttggaaaatggtttagtaggaaaaaaaaagtcttgagaatctctaatgtttaatagtcaaaatcaagatccaatataacaggttaaattattccaaggacagtagagcacatgcttacacattaacaagtaaaatgagctgctctcaagcttttaaagcagggatagaagttagggaggcaaaaaagaaaggtaattaaaaatmgcagcagttaatcatttggagcaaattactcatggaacattctgggaactattacgaatttagtattcatattcaactagactgaaaaaggatggaggaaaacaatgaataatagtattattcttaagatatacaagcttcttcacagctgtagag

SEQ ID NO: 241505 - DNA, 391 bp, Homo sapiens
ttagaatccaaagtgccttataattatatttttggaaaatggtttagtaggaaaaaaaaagtcttgagaatctctaatgtttaatagtcaaaatcaagatccaatataacaggttaaattattccaaggacagtagagcacatgcttacacattaacaagtaaaatgagctgctctcaagcttttaaagcagggatagaagttagggaggcaaaaaagaaaggtaattaaaaatcgcagcagttaatcatttggagcaaattactcatggaacattctgggaactattaygaatttagtattcatattcaactagactgaaaaaggatggaggaaaacaatgaataatagtattattcttaagatatacaagcttcttcacagctgtagag

SEQ ID NO: 241506 - DNA, 539 bp, Homo sapiens
aactattctctgtccctaataaagatgaatcttcagacaaaaagagttatcttttgaaatacatgaaattagagaaggygaaaactgttagttataaaatcgtatatggaaaaatgaatacaatcaaatgatgaatcttgaatataaatttattaggaattcattaatagagaaagtgaggtgcaatctgaaagtaaaaaaattacattatgtatctctaatgaggaaagcatgttctttgttttctcaatgttatttttggaaatgtactacaaactgcagaaaataatataaggttaaagctataatactattattgcttaaactgaagaccttggaaaagtataaatgttataaaattaacaagtaataattaataatatgactttttttctgtaccagaagaaaaaaataagatattgccaaattaagttggttccaagttataaagagaggggaatggaaatggtcatttgaagatttaaaacacatgtaatagtaatattaatgctaaaagtcatgttaacaaaaataaaaca

SEQ ID NO: 241507 - DNA, 539 bp, Homo sapiens
aactattctctgtccctaataaagatgaatcttcagacaaaaagagttatcttttgaaatacatgaaattagagaaggtgaaaactgttagttataaaatcgtatatggaaaaatgaatamaatcaaatgatgaatcttgaatataaatttattaggaattcattaatagagaaagtgaggtgcaatctgaaagtaaaaaaattacattatgtatctctaatgaggaaagcatgttctttgttttctcaatgttatttttggaaatgtactacaaactgcagaaaataatataaggttaaagctataatactattattgcttaaactgaagaccttggaaaagtataaatgttataaaattaacaagtaataattaataatatgactttttttctgtaccagaagaaaaaaataagatattgccaaattaagttggttccaagttataaagagaggggaatggaaatggtcatttgaagatttaaaacacatgtaatagtaatattaatgctaaaagtcatgttaacaaaaataaaaca

SEQ ID NO: 241508 - DNA, 539 bp, Homo sapiens
aactattctctgtccctaataaagatgaatcttcagacaaaaagagttatcttttgaaatacatgaaattagagaaggtgaaaactgttagttataaaatcgtatatggaaaaatgaatacartcaaatgatgaatcttgaatataaatttattaggaattcattaatagagaaagtgaggtgcaatctgaaagtaaaaaaattacattatgtatctctaatgaggaaagcatgttctttgttttctcaatgttatttttggaaatgtactacaaactgcagaaaataatataaggttaaagctataatactattattgcttaaactgaagaccttggaaaagtataaatgttataaaattaacaagtaataattaataatatgactttttttctgtaccagaagaaaaaaataagatattgccaaattaagttggttccaagttataaagagaggggaatggaaatggtcatttgaagatttaaaacacatgtaatagtaatattaatgctaaaagtcatgttaacaaaaataaaaca

SEQ ID NO: 241509 - DNA, 432 bp, Homo sapiens
ttttttctaggttcaaataaaatttgtataagctcaggtccttatgagagagacatttgctactgcacactattttttycaatcttcactcaatgagctgaattgctttatctattagtaccttgagtacctggggtatccttcagttcatctgcagataggtgttcacatacagataactcacagtatcttctctcacatgatcattttctacccatagaccccattctgactctgtatcacctcaagttttcaaaggcagtgttgatgatctgaaagaagtcacctcctctatgtgaaccaaattattgcttctcaagtaatagacaaggaaacagcagtattagaccctagataattaaacagagaacattggaattacatgactgtaaattaattatacttaatacacatagagaaataaaatcagta

SEQ ID NO: 241510 - DNA, 432 bp, Homo sapiens
ttttttctaggttcaaataaaatttgtataagctcaggtccttatgagagagacatttgctactgcacactattttttccaatcttcactcaatgagctgaattgctttatctattagtaccttgagtacctggggtatccttcagttcatctgcagataggtgttcacatacagataactcacagtatcttctctcacatgatcattttctacccatagaccccattctgactctgtatcwcctcaagttttcaaaggcagtgttgatgatctgaaagaagtcacctcctctatgtgaaccaaattattgcttctcaagtaatagacaaggaaacagcagtattagaccctagataattaaacagagaacattggaattacatgactgtaaattaattatacttaatacacatagagaaataaaatcagta

SEQ ID NO: 241511 - DNA, 651 bp, Homo sapiens
tgtctgtgtctggtgaaaataataagcctggcaactctgttagtcacagacatgtctgcaatgaagggtgcaacgagcttcaggtttaaaatagacctttctatttgaagcaaatagggtttcaaacactcatactggattttcttttctttttatttttgcatcaggtggcattttaaaattataaagatataccacaaatctagaattgtctttttaatattatttttatctcattcagaaaaacaaaacaaaacmagcaatacatattaccccgtgaaatgttagcctcaggaggcttcaaaaaagtcacacattgtttaaatgtaatctgtaatctgtcgagaattttcctagttgaggtcagaggttagaaatccaaatagttaagcagtaagcagtagtgaattttctaagatcttgtttaaatatattgtaatatatggtagtttaaaaatgtatttgaaagcaataaaaataacattctaatattattatactgaacagattattattctattttgtgtgtgtatatgtgtgggtattttactgtcctgaaaaagcccttagcttgtttagacccaaattaatccttttagatttgaattatgttgttaggaaaatatgtcttctgaatttagtctgtaatat

SEQ ID NO: 241512 - DNA, 572 bp, Homo sapiens
tactacaattattattagtgtctaatttggtaaaatgtaaatactgtataatttggtaattattaaacataaaaaacaaagtagtatctgaagtgatttgcttaatgagatgactaaggttgttttgttttgctttgttttgcttcttaatcagtgcatgcatttgtaaaataaattatggctagaaaaagacaatatttgatatcaattcattttctaatgttttcaacaattgaagatgttaattataaaamattcgcaaaaataagtcaattggaattgtagaaaatttttataacaatgtatctatttttaaaactcattctaagtttgtattgaatataatataaaaggagttttatttttagttacagagagtagaaggaagataatttgaaactactttacttttggaaagtacgtaaccctgtcattagaatcgttgactgtaacacattctgagaaaaagatattccaaaatatcaccaatataatcaaattattattaattatactttttaaacttacaggtaccttttcccctatttttcttttctttttcttcttttttt

SEQ ID NO: 241513 - DNA, 601 bp, Homo sapiens
ttgctacatctctaatcagtcaaaattgatgtatatacagacatcaactggaaactaaatttatgttcatatacttactaattactgttggatattcatgccttcatgccatgcaaataargcttaaaatgcaaatttttaaacataaattatgctaaaacattcacaatggattgtataatttgagaattgaatctacaaatgtgttaagtaatttcaagaaacaaaaaataaagttgaaaagtttcatggacttaggaaatagcaacatttttaaacaagtaagtaaacatttctaaatatacatatgtgtatgtgcatgtgtgactataacctaagagagccactgccacattgtttacaaaattgaaaagaaagaataaacttattacattaaaaatagtctgaggaagacttctgcttccatcttaaaggaactactttccttctgtaaataactagaaaactagacaaaatatgagaaacagtggtttccaggctacagataacaggtattataaaactgtgattcctaaaataagtgaaacaacaggtcagccttacagttgtcccagttttgtggcttggaggtggttatcat

SEQ ID NO: 241514 - DNA, 601 bp, Homo sapiens
ttgctacatctctaatcagtcaaaattgatgtatatacagacatcaactggaaactaaatttatgttcatatacttactaattactgttggatattcatgccttcatgccatgcaaataaggcttaaaatgcaaatttttaaacataaattatgctaaaacattcacaatggattgtataatttgagaattgaatctacaaatgtgttaagtaatttcaagaaacaaaaaataaagttgaaaagtttcatggacttaggaaatagcaacatttttaaacaagtaagtaaacatttctaaatatacatatgtgtatgtgcatgtgtgactataacctaagagagccactgccacattgtttacaaaattgaaaagaaagaataaacttattacattaaaaatagtcygaggaagacttctgcttccatcttaaaggaactactttccttctgtaaataactagaaaactagacaaaatatgagaaacagtggtttccaggctacagataacaggtattataaaactgtgattcctaaaataagtgaaacaacaggtcagccttacagttgtcccagttttgtggcttggaggtggttatcat

SEQ ID NO: 241515 - DNA, 571 bp, Homo sapiens
ccatagggaagataagggtaaaatggaaaaatatagggtgtgtcagccagtggttgtaacaatttatatttatattcaggctctattatttttaatcaacaattttcttaatgtccactttgaagagcatagtatttgcttgataagwttaactgaatgaatagattaagtttactcaggtaggccccaagctttgattataattacttgagcaaacttgtacaagttacaaaccatagctcagtttcctcatctgtaaaaaatattagtattaaaataaataataaaacctaaattgactgggcatgatggtgcacacctgtagtcccagctatttgggaggctgaggtaggattgcttgatcccagggattcaagtctgttctgtgccatgatcacacctgtgaatagctactgtacttcagcctgagcaacatagtaagactctgtctctaaaaaaataagtaaatgactcagctacagctagcatataagccctcagtctatgttagctattatcatatttaatactattattaaaaatattattgaggaacatgaagtttatcagc

SEQ ID NO: 241516 - DNA, 537 bp, Homo sapiens
tttaatgtgtggcataatactgggaaaatagccagaagacaatgcatcctgctacataaaaacatctctgaaacatgtgtcacccctttagtaggataatgtgaaaaaagtgaactcttatatgcattgtagaagaagagcggatatcaagaaatcaattaattacttaaaagtagtaataaggaaactcgcctagatttaatcagtcaactctakatttaatcagtctggaaataatggcagccaaaagaatatgctatacttgggttttcttgtgcctatccagtttggtttcagcaaataaagtaaaattatcaaggcgaaaagacattttagcagagttaagaacataactattgggattcactactccttttcaaggtgcatgattcacttcctgaagattggttttcttatgagtaaatacataatgataaaggaaatggattgcttctgttcattttcttttttgaacttactttgcaccatccttggtaaaatcttggctagagtctgtcacaacttatataaatgtca

SEQ ID NO: 241517 - DNA, 537 bp, Homo sapiens
tttaatgtgtggcataatactgggaaaatagccagaagacaatgcatcctgctacataaaaacatctctgaaacatgtgtcacccctttagtaggataatgtgaaaaaagtgaactcttatatgcattgtagaagaagagcggatatcaagaaatcaattaattacttaaaagtagtaataaggaaactcgcctagatttaatcagtcaactctagatttaatcagtctggaaataatggcagccaaaagaatatgctatacttgggttttcttgtgcctatccagtttggtttcagcaaakaaagtaaaattatcaaggcgaaaagacattttagcagagttaagaacataactattgggattcactactccttttcaaggtgcatgattcacttcctgaagattggttttcttatgagtaaatacataatgataaaggaaatggattgcttctgttcattttcttttttgaacttactttgcaccatccttggtaaaatcttggctagagtctgtcacaacttatataaatgtca

SEQ ID NO: 241518 - DNA, 537 bp, Homo sapiens
tttaatgtgtggcataatactgggaaaatagccagaagacaatgcatcctgctacataaaaacatctctgaaacatgtgtcacccctttagtaggataatgtgaaaaaagtgaactcttatatgcattgtagaagaagagcggatatcaagaaatcaattaattacttaaaagtagtaataaggaaactcgcctagatttaatcagtcaactctagatttaatcagtctggaaataatggcagccaaaagaatatgctatacttgggttttcttgtgcctatccagtttggtttcagcaaatraagtaaaattatcaaggcgaaaagacattttagcagagttaagaacataactattgggattcactactccttttcaaggtgcatgattcacttcctgaagattggttttcttatgagtaaatacataatgataaaggaaatggattgcttctgttcattttcttttttgaacttactttgcaccatccttggtaaaatcttggctagagtctgtcacaacttatataaatgtca

SEQ ID NO: 241519 - DNA, 538 bp, Homo sapiens
tttcacactgcaagtccctgacatgagcacaatctatgttctccatctgtcctcctgaaattctttttcagcctgactcctctcatctctctagggctcaagcctggctaatgtctgctgtattcayccggtcatgctaaaaaggaacagtgcatgctttctccattgtcctttcttctcaaccagacattggtagcagttctgtattgtttccaaactttagaaccctccaggtgaaaagcgcacaccagtttttatgtttatatatagagtcatgccccgttaatgattacaatacattctgagaaatgcatagttaaacaattcccttgtgtgaacattatagagtgtacataaatatacgtagatgatatatgtgttcatatatacactttttcatatggaaaatcaaatgtactagcaccattactagcaataatttccactgcttaatcttcaatgccaatatcaagtgctatatatcagttttttatatatgctccattagaatgttatatgaccattaccataatatgcc

SEQ ID NO: 241520 - DNA, 538 bp, Homo sapiens
tttcacactgcaagtccctgacatgagcacaatctatgttctccatctgtcctcctgaaattctttttcagcctgactcctctcatctctctagggctcaagcctggctaatgtctgctgtattcacccggtcatgctaaaaaggaacartgcatgctttctccattgtcctttcttctcaaccagacattggtagcagttctgtattgtttccaaactttagaaccctccaggtgaaaagcgcacaccagtttttatgtttatatatagagtcatgccccgttaatgattacaatacattctgagaaatgcatagttaaacaattcccttgtgtgaacattatagagtgtacataaatatacgtagatgatatatgtgttcatatatacactttttcatatggaaaatcaaatgtactagcaccattactagcaataatttccactgcttaatcttcaatgccaatatcaagtgctatatatcagttttttatatatgctccattagaatgttatatgaccattaccataatatgcc

SEQ ID NO: 241521 - DNA, 545 bp, Homo sapiens
cagaaaacaagagttgagccttgggagcctctgcctggatttcagactatgtatagaaacacctggatgtccaggcagaagtctacttcaggcataaaaccctcatggagaatctctgctaaggcagtacaaaagggaaatgtggggctggagcttctacaagagtccccactcaggcaccccactcgggcactktctagtggagttttgataagagggccaccatcctccagacctcagaaatatagatccactgacagctggcaccacgtgcctggaaaaaccacaggcactcaatgccagcccatgaaagcagccacagtggctgtaccctgcagagccatgggagtgggtgcccatgggtgcccaccccttatatcagtatgccctggatgtgagacatggagtcaaaggatattttggagctttaaggtttaatgactgcccagctgggttttggacttgcatggggcctgaggctgttttgttttggccaatttctcccatttggaatgagaatatttactcaatgcctgtactcccat

SEQ ID NO: 241522 - DNA, 545 bp, Homo sapiens
cagaaaacaagagttgagccttgggagcctctgcctggatttcagactatgtatagaaacacctggatgtccaggcagaagtctacttcaggcataaaaccctcatggagaatctctgctaaggcagtacaaaagggaaatgtggggctggagcttctacaagagtccccactcaggcaccccactcgggcactgtctagtggagttttgataagagggccaccatcctccagacctcagaaatatagatccaytgacagctggcaccacgtgcctggaaaaaccacaggcactcaatgccagcccatgaaagcagccacagtggctgtaccctgcagagccatgggagtgggtgcccatgggtgcccaccccttatatcagtatgccctggatgtgagacatggagtcaaaggatattttggagctttaaggtttaatgactgcccagctgggttttggacttgcatggggcctgaggctgttttgttttggccaatttctcccatttggaatgagaatatttactcaatgcctgtactcccat

SEQ ID NO: 241523 - DNA, 560 bp, Homo sapiens
  misc_feature (1)...(560): n = A,T,C or G
cattgcagtttacttctaaaagtgccatgctgcattatggaggagtaaaggtgttgggcaaatgtaacaaacttttctatccattcagtatggcttgtggcattttgctcacctggtacactgaacacwcttaactcatttctagattttccataaagacattttggtcagtacagttttgttataagtctataaaagaattaagacctgtggtatttttgttatgccatgttgctaatgtactttgtataattttatgtattagatttgtaaacaatattaggttanttttacatgggcctattgtgataatgtgttatttttatttctttcagctgtgttctcatttcacccaagacctttggctagatcagaacataaaaaattcatttcaaaaagtgatgctgagaagatatgggaaatgcagacatgagaatttacaaataagaaaaggctgtaaaagtttgaatgcatctaaggtgcaggaaggaggttataatgaacttaaccaatgtttgtcgattactcagagcaaaatacttcaatgtaatacatgtgtg

SEQ ID NO: 241524 - DNA, 457 bp, Homo sapiens
  misc_feature (1)...(457): n = A,T,C or G
tgttgggcaaatgtaacaaacttttctatccattcagtatggcttgtggcattttgctcacctggtacactgaacacacttaactcatttctagattttccataaagacattttggtcagtacagttttgttataartctataaaagaattaagacctgtggtatttttgttatgccatgttgctaatgtactttgtataattttatgtattagatttgtaaacaatattaggttanttttacatgggcctattgtgataatgtgttatttttatttctttcagctgtgttctcatttcacccaagacctttggctagatcagaacataaaaaattcatttcaaaaagtgatgctgagaagatatgggaaatgcagacatgagaatttacaaataagaaaaggctgtaaaagtttgaatgcatctaaggtgcaggaaggaggttataatgaacttaa

SEQ ID NO: 241525 - DNA, 560 bp, Homo sapiens
  misc_feature (1)...(560): n = A,T,C or G
cattgcagtttacttctaaaagtgccatgctgcattatggaggagtaaaggtgttgggcaaatgtaacaaacttttctatccattcagtatggcttgtggcattttgctcacctggtacactgaacacacttaactcatttctagattttccataaagacattttggtcagtacagttttgttataagtctataaaagaattaagacctgtggtatttttgttatgccatgttgctaatgtactttgtataattttatgtattagatttgtaaacaatattaggttanttttacatgggcctattgtgataatgtgttatttttatttctttcagctgtgttctcatttcacccaagacctttggctagatcagaacataaaaaattcatttcaaaaagtgatgctgagaagatatgggaaatrcagacatgagaatttacaaataagaaaaggctgtaaaagtttgaatgcatctaaggtgcaggaaggaggttataatgaacttaaccaatgtttgtcgattactcagagcaaaatacttcaatgtaatacatgtgtg

SEQ ID NO: 241526 - DNA, 560 bp, Homo sapiens
  misc_feature (1)...(560): n = A,T,C or G
cattgcagtttacttctaaaagtgccatgctgcattatggaggagtaaaggtgttgggcaaatgtaacaaacttttctatccattcagtatggcttgtggcattttgctcacctggtacactgaacacacttaactcatttctagattttccataaagacattttggtcagtacagttttgttataagtctataaaagaattaagacctgtggtatttttgttatgccatgttgctaatgtactttgtataattttatgtattagatttgtaaacaatattaggttanttttacatgggcctattgtgataatgtgttatttttatttctttcagctgtgttctcatttcacccaagacctttggctagatcagaacataaaaaattcatttcaaaaagtgatgctgagaagatatgggaaatgcagacatgagaatttacaaataagaaaaggctgtaaaagtttgaatgcatctaaggtgcaggaaggaggttataatgracttaaccaatgtttgtcgattactcagagcaaaatacttcaatgtaatacatgtgtg

SEQ ID NO: 241527 - DNA, 584 bp, Homo sapiens
tcccacattcctagcagcatggccccttcctccatcactcagttttcactgtcagttgtcccaggtcctctctggctgttaccttcctccctccctattataaggacccttgtgattatgatggtctcacccagatcattcaggatactctcctgaccccmaaattctcaaccatgtctgccaagttatttttgacatattcataagtaatgatcatagattccagatattaggacaatgatgtctttagtgggtgtattattcattccacaaacaaccctcatcatccacacaatggtcttcccctaaggtagaataaaaatatcacaaggcagatttacgaggcgatcgacctagaaaaaacctgagaatctaggactgtctgatgtgtggatgtcaaatcctgggagattctgagtctctgctctatgtggactctatgttgtgtagccatttgtggaaggcttctgtgattttgtgacctagagaaaatgaatctctgctaaaatcaaatctaagaaagattggcaaagggaatttaaagatttcctaaatttttggaatttccctatgcattaaagcat

SEQ ID NO: 241528 - DNA, 584 bp, Homo sapiens
tcccacattcctagcagcatggccccttcctccatcactcagttttcactgtcagttgtcccaggtcctctctggctgttaccttcctccctccctattataaggacccttgtgattatgatggtctcacccagatcattcaggatactctcctgacccccaaattctcaaccatgtctgccaagttatttttgacatattcataagtaatgatcatagattccagatattaggacaatgatgtctttagtgggtgtattattyattccacaaacaaccctcatcatccacacaatggtcttcccctaaggtagaataaaaatatcacaaggcagatttacgaggcgatcgacctagaaaaaacctgagaatctaggactgtctgatgtgtggatgtcaaatcctgggagattctgagtctctgctctatgtggactctatgttgtgtagccatttgtggaaggcttctgtgattttgtgacctagagaaaatgaatctctgctaaaatcaaatctaagaaagattggcaaagggaatttaaagatttcctaaatttttggaatttccctatgcattaaagcat

SEQ ID NO: 241529 - DNA, 584 bp, Homo sapiens
tcccacattcctagcagcatggccccttcctccatcactcagttttcactgtcagttgtcccaggtcctctctggctgttaccttcctccctccctattataaggacccttgtgattatgatggtctcacccagatcattcaggatactctcctgacccccaaattctcaaccatgtctgccaagttatttttgacatattcataagtaatgatcatagattccagatattaggacaatgatgtctttagtgggtgtattattcattccacaaacaacyctcatcatccacacaatggtcttcccctaaggtagaataaaaatatcacaaggcagatttacgaggcgatcgacctagaaaaaacctgagaatctaggactgtctgatgtgtggatgtcaaatcctgggagattctgagtctctgctctatgtggactctatgttgtgtagccatttgtggaaggcttctgtgattttgtgacctagagaaaatgaatctctgctaaaatcaaatctaagaaagattggcaaagggaatttaaagatttcctaaatttttggaatttccctatgcattaaagcat

SEQ ID NO: 241530 - DNA, 584 bp, Homo sapiens
tcccacattcctagcagcatggccccttcctccatcactcagttttcactgtcagttgtcccaggtcctctctggctgttaccttcctccctccctattataaggacccttgtgattatgatggtctcacccagatcattcaggatactctcctgacccccaaattctcaaccatgtctgccaagttatttttgacatattcataagtaatgatcatagattccagatattaggacaatgatgtctttagtgggtgtattattcattccacaaacaaccctcatcatccacacaatggtcttcccctaaggtagaataaaaatatcacaaggcagatttaygaggcgatcgacctagaaaaaacctgagaatctaggactgtctgatgtgtggatgtcaaatcctgggagattctgagtctctgctctatgtggactctatgttgtgtagccatttgtggaaggcttctgtgattttgtgacctagagaaaatgaatctctgctaaaatcaaatctaagaaagattggcaaagggaatttaaagatttcctaaatttttggaatttccctatgcattaaagcat

SEQ ID NO: 241531 - DNA, 252 bp, Homo sapiens
cacaagggagtatctcaggaaaagactgtctatatcaacgcagatattctctacaaatgcaaatctccccaacaaacacagcttttcagctattcttgtagaagaagctatctccagtcttccgagtagccatcttgaaatatgtcaaaaagctgcccaggygcacgcctgtaatcccagcactttgggaggctgaagtgggtagatcacctgaagtcaggagttggagaccagcctgaccaacgtggtgaa

SEQ ID NO: 241532 - DNA, 299 bp, Homo sapiens
tttgacaagtgcaccacaatacacaatgaacaaagtatagtctttttaatatttggttctgaaaaaactggatacctccaggcaaaagaataaaaytagcttatttttcttacaccatgctaaaagttaaattacagacttatttattaatccttaaaaaatctgaaaaaaaaatacatggaaaaccctcatgatatggtcttaacaataatttgttagacataataccaaaagtacagcaacaaaagcaaatataaacaagctggactgcatcaaactaaaaaccttctgcacagaaa

SEQ ID NO: 241533 - DNA, 564 bp, Homo sapiens
gatatggtcttaacaataatttgttagacataataccaaaagtacagcaacaaaagcaaatataaacaagctggmctgcatcaaactaaaaaccttctgcacagaaaagggaacaataaaataaaaaaatttgtagaatgggaaaaaatatttgcaaaccatacatctgataaaagattgatatacaaaatatataagaaatgcaagcagattaaaagcaaaaacaacagtaacccagttcaaaataggcaaaaaactaaactgatatttgtccaatgaagacatacaaatggccaagagataagccataaagtactcaatatcaccaaatatctggcaattgcaaatcaaaaccatgatgagtatcatttcaaacatgttagaatgtataatgtaaaaagaagaaacataacaagtgttgacaacactttgaagaaaaaaattctgtacattcttggagagttataaattgatggagtcattacaaaaaccaatagaggttatttgaaatacagaactactgcacaatctagcaatagtagtattgtgtatataatactgttt

SEQ ID NO: 241534 - DNA, 564 bp, Homo sapiens
gatatggtcttaacaataatttgttagacataataccaaaagtacagcaacaaaagcaaatataaacaagctggactgcatcaaactaaaaaccttctgcacagaaaagggaacaataaaataaaaaaatttgtagaatgggaaaaaatatttgcaaaccatacatctgataaaagattgatatacaaaatatataagaaatgcaagcagattraaagcaaaaacaacagtaacccagttcaaaataggcaaaaaactaaactgatatttgtccaatgaagacatacaaatggccaagagataagccataaagtactcaatatcaccaaatatctggcaattgcaaatcaaaaccatgatgagtatcatttcaaacatgttagaatgtataatgtaaaaagaagaaacataacaagtgttgacaacactttgaagaaaaaaattctgtacattcttggagagttataaattgatggagtcattacaaaaaccaatagaggttatttgaaatacagaactactgcacaatctagcaatagtagtattgtgtatataatactgttt

SEQ ID NO: 241535 - DNA, 564 bp, Homo sapiens
gatatggtcttaacaataatttgttagacataataccaaaagtacagcaacaaaagcaaatataaacaagctggactgcatcaaactaaaaaccttctgcacagaaaagggaacaataaaataaaaaaatttgtagaatgggaaaaaatatttgcaaaccatacatctgataaaagattgatatacaaaatatataagaaatgcaagcagattaaaagcaaraacaacagtaacccagttcaaaataggcaaaaaactaaactgatatttgtccaatgaagacatacaaatggccaagagataagccataaagtactcaatatcaccaaatatctggcaattgcaaatcaaaaccatgatgagtatcatttcaaacatgttagaatgtataatgtaaaaagaagaaacataacaagtgttgacaacactttgaagaaaaaaattctgtacattcttggagagttataaattgatggagtcattacaaaaaccaatagaggttatttgaaatacagaactactgcacaatctagcaatagtagtattgtgtatataatactgttt

SEQ ID NO: 241536 - DNA, 564 bp, Homo sapiens
gatatggtcttaacaataatttgttagacataataccaaaagtacagcaacaaaagcaaatataaacaagctggactgcatcaaactaaaaaccttctgcacagaaaagggaacaataaaataaaaaaatttgtagaatgggaaaaaatatttgcaaaccatacatctgataaaagattgatatacaaaatatataagaaatgcaagcagattaaaagcaaaaacaacagtaacccagttcaaaataggcaaaaawctaaactgatatttgtccaatgaagacatacaaatggccaagagataagccataaagtactcaatatcaccaaatatctggcaattgcaaatcaaaaccatgatgagtatcatttcaaacatgttagaatgtataatgtaaaaagaagaaacataacaagtgttgacaacactttgaagaaaaaaattctgtacattcttggagagttataaattgatggagtcattacaaaaaccaatagaggttatttgaaatacagaactactgcacaatctagcaatagtagtattgtgtatataatactgttt

SEQ ID NO: 241537 - DNA, 606 bp, Homo sapiens
cacaccaataaacagagcctgcggaatggcacaagtgaaaagatttctgcaacctggccatggaatcttaattagaagcctgggccaagaaccacttagctaaacattgcctctcaaacttcagtgtgcatataaatcatttggtaaccctggccctacactatgtaatgtgattctgcaggttttaaaagcatccatgaaagtgcattttaaacacatctcctgtcaatgytgatgtagcttccccagacccatcattagtagcatttagctagagaaagcaggcatggaacaaactcttacactcatcactcatcacaacacaaatacttctgatcaaataaaaaatcaatctctatcctgaaaaaccacattctttgctagctctttaacttcagagacaggagaaggcaacaacgtctgagtaagtctgcactgaaaaacaacatgtacacatatacttatgcaatgcttattaagcaggtactatgtgctccggagtatgttacagagcactgtgccgggaacatcacattatgtgatttaatcttcataacaacttgagagttgggtactaagtgttaaataattctcagaatttagatg

SEQ ID NO: 241538 - DNA, 606 bp, Homo sapiens
cacaccaataaacagagcctgcggaatggcacaagtgaaaagatttctgcaacctggccatggaatcttaattagaagcctgggccaagaaccacttagctaaacattgcctctcaaacttcagtgtgcatataaatcatttggtaaccctggccctacactatgtaatgtgattctgcaggttttaaaagcatccatgaaagtgcattttaaacacatctcctgtcaatgttgatgtagcttccccagacccatcattagtagcatttagctagagaaagcaggcatggaacaaactcttacactcatcactcatcacaacacaaatacttctgatcaaataaaaaatcratctctatcctgaaaaaccacattctttgctagctctttaacttcagagacaggagaaggcaacaacgtctgagtaagtctgcactgaaaaacaacatgtacacatatacttatgcaatgcttattaagcaggtactatgtgctccggagtatgttacagagcactgtgccgggaacatcacattatgtgatttaatcttcataacaacttgagagttgggtactaagtgttaaataattctcagaatttagatg

SEQ ID NO: 241539 - DNA, 560 bp, Homo sapiens
  misc_feature (1)...(560): n = A,T,C or G
cattgcagtttacttctaaaagtgccatgctgcattatggaggartaaaggtgttgggcaaatgtaacaaacttttctatccattcagtatggcttgtggcattttgctcacctggtacactgaacacacttaactcatttctagattttccataaagacattttggtcagtacagttttgttataagtctataaaagaattaagacctgtggtatttttgttatgccatgttgctaatgtactttgtataattttatgtattagatttgtaaacaatattaggttanttttacatgggcctattgtgataatgtgttatttttatttctttcagctgtgttctcatttcacccaagacctttggctagatcagaacataaaaaattcatttcaaaaagtgatgctgagaagatatgggaaatgcagacatgagaatttacaaataagaaaaggctgtaaaagtttgaatgcatctaaggtgcaggaaggaggttataatgaacttaaccaatgtttgtcgattactcagagcaaaatacttcaatgtaatacatgtgtg

SEQ ID NO: 241540 - DNA, 524 bp, Homo sapiens
ttttcttactcatcttgttgtaattgatcatattttctaataaaaaggggaaatttggaacataaggcaggagaggtgtcagtcttatccactatgacatttcccttcatgtttaactttatcatatagcccccattatcaaccccatgatataacatttggaaarttataggcactcagtatatatttgttgaataattgagtagctgactgaataaataaatgaataagtgatttacaggtaagccgtgatgagaataggagctgactggagcataagcagtgactagtagtggcatggttgtgctcagaggaagggcatcaaatcaatgggtcctgaaaatgaagagggaggagtagaacctatgaaagatgactgccttgtgcctcaccttttttgtcctgtgattgactaagctgctaagtaggagcttgaagtaaccacttggctccccaggtggagcccagctaatcaagctgactggctcaggtctacatttctaaaaaaaaattcagcattatag

SEQ ID NO: 241541 - DNA, 524 bp, Homo sapiens
ttttcttactcatcttgttgtaattgatcatattttctaataaaaaggggaaatttggaacataaggcaggagaggtgtcagtcttatccactatgacatttcccttcatgtttaactttatcatatagcccccattatcaaccccatgatataacatttggaaaattataggcactcagtatatatttgttgaataattgagtagctgactgaataaataaatgartaagtgatttacaggtaagccgtgatgagaataggagctgactggagcataagcagtgactagtagtggcatggttgtgctcagaggaagggcatcaaatcaatgggtcctgaaaatgaagagggaggagtagaacctatgaaagatgactgccttgtgcctcaccttttttgtcctgtgattgactaagctgctaagtaggagcttgaagtaaccacttggctccccaggtggagcccagctaatcaagctgactggctcaggtctacatttctaaaaaaaaattcagcattatag

SEQ ID NO: 241542 - DNA, 474 bp, Homo sapiens
atctaagtgaactaatgtgaataataattctatttttccttatgagctaagtgaaaatgaaataaaagttttgtaatttacaagtgtagaaaacaaaagtatggaaatttttcatgtcaaagctttcagtgaggcaagttagtttacttttgagttccttattttgttttacgaaatgtaaaaagttgatgaaaaagcagaaaaaaaggagagatgatgtaacgggcaaagcaaagtctgcaaagacagtggtggtttggtccttgggagggaggastgaaaggaatgaagtgatgggtctaatcaaatcacttaaaaaagcagcagcttctcagagttaaccttgccaatcagagtaagcaggagcaggagcaggagcaggagcaggagcgggagcatgcttgtgcacattaaacttcacatgtgtccttgaacctatggtgcacttcctcctcccacagcagccagggaagg

SEQ ID NO: 241543 - DNA, 474 bp, Homo sapiens
atctaagtgaactaatgtgaataataattctatttttccttatgagctaagtgaaaatgaaataaaagttttgtaatttacaagtgtagaaaacaaaagtatggaaatttttcatgtcaaagctttcagtgaggcaagttagtttacttttgagttccttattttgttttacgaaatgtaaaaagttgatgaaaaagcagaaaaaaaggagagatgatgtaacgggcaaagcaaagtctgcaaagacagtggtggtttggtccttgggagggaggactgaaaggaatgaagtgatgggtctaatcaaatcacttaaaaaagcagcagcttctcagagttaaccttgccaatcagagtragcaggagcaggagcaggagcaggagcaggagcgggagcatgcttgtgcacattaaacttcacatgtgtccttgaacctatggtgcacttcctcctcccacagcagccagggaagg

SEQ ID NO: 241544 - DNA, 437 bp, Homo sapiens
atctaaatgattctgtgatcaaaaacctctagtggttttcttctctatgaatcatttctcaatttttatgattaactctcaaggccctacctcttatgaccaaacatttttatccagtgttcctcactttggtgaaattggtgagcttactttgtatatctcagaagttctgaaacctggatcaccaagagtcractatagatcttttaaaaaagtaggccccaactccagaaattaggactcagagggtaggttaggagagagctgtcgggaagatgagaatttcaaaattataaaatatccacatctaattttgtggtatcaggtttgtaattctaaactctgtatctacctgccagaccttcagtgcttcctatctcaagtaggagttaggagaaaaacaatcaggttaaactgattcattcgtgtgatgaatc

SEQ ID NO: 241545 - DNA, 565 bp, Homo sapiens
tgtatacctgagtttgagaaagcatagtagaaaatgtataactaagtaatttaaaatttagacaagcaacctctgctctcagaaacacacacacacgatagttccataatacagaactgttggagaatgatatatgtgaatacactttatatgtatataatacttgtgtaaatgtatatttgtacaaaaatataaaatctatatttaactaatgttactgtattatatttacttcattgtccactttgtgttgtctttccagtggattgtaagttctttgaatgcagggaccatgttttctgtttcttcaatattcctagtggtctcttgtgtaatgtttgacatacagtattataaaatatgcaaaatgattgttcctttatagatagatactccctcagcctaaaacacatgtacatgtgcatatgcacacacacaaacacacagttcttttccccataccctctttactaaagttatcacctttctgaggaagaccctgacctaacctcactccytttcctctaactacaacctccctttaaacccccctcttttgtgcttc

SEQ ID NO: 241546 - DNA, 621 bp, Homo sapiens
gattgtaaaatgtcttgaggtagtcttagttgggttaaatcttcttggtttgctataaccctcttgtacttgattaccaatatctttatctaggctttggaagttctctsttattatccctttgaataaactttctaccctatctctttttctacctcctctttaaggccaatatctcttagatttgtccttttgagactatttgagcaatggtggtgactgttgtaggagacaaagggctcatcaacagcctctggggactgggctctcagagaaatgctgagctgcagtggtagtccacaggcggggaagggtggctgcactgggggcatgacactaaggcaggggtgcctttttctgcagggagcagtggaagtgggaagttgcacagtgcatagtttgccctcttctccatactgtggatgtggtatctgtctttggggcatgtgaaagtgctcggccttcctccttggttgggtgcagcagttgtcaccgggatgctcagggatcacaagcctgtgggattccacctgggcttgagcagtgcctgtacacaatctccaggtggctcgctgtgttagtctggaggtgttggagcaggggtgcagggtcaacagggct

SEQ ID NO: 241547 - DNA, 621 bp, Homo sapiens
gattgtaaaatgtcttgaggtagtcttagttgggttaaatcttcttggtttgctataaccctcttgtacttgattaccaatatctttatctaggctttggaagttctctgttattatccctttgaataaactttctaccctatctctttttctacctcctctttaaggccaatatctcttagatttgtccttttgagactatttgagcaatggtggtgactgttgtaggagacaaagggctcatcaacagcctctggggactgggctctcagagaaatgctgagctgcagtggtagtccacaggcggggaagggtggctgcactgggrgcatgacactaaggcaggggtgcctttttctgcagggagcagtggaagtgggaagttgcacagtgcatagtttgccctcttctccatactgtggatgtggtatctgtctttggggcatgtgaaagtgctcggccttcctccttggttgggtgcagcagttgtcaccgggatgctcagggatcacaagcctgtgggattccacctgggcttgagcagtgcctgtacacaatctccaggtggctcgctgtgttagtctggaggtgttggagcaggggtgcagggtcaacagggct

SEQ ID NO: 241548 - DNA, 460 bp, Homo sapiens
aattacagtgttaacttaaattcaagtggacattcttgctaccaattattaacacacacaaaatatatagccaacaggtatactcgttaatgttcatggtctgktaactactactgaggactctgagtgatttaaaaaaaagggcttaaggcccaaactctcatgaaaatgtctgaaatgattcctgttgaaaaggaattgaagtggatagggttattttcagtggcaactgaccaatgaaattcaatttatttcaatttaacaatcctattatgtttcaaaaaagacagtgtaaaaatatactctccagctgtattggaagagaattttaaaggactgcttttggcacacagttggtattcttaagaaatcatgccagaggaacaacaacagaggtagcacctcaactcttgttgggctatgcagctgattccaggagatttcagacccttggcaggtg

SEQ ID NO: 241549 - DNA, 393 bp, Homo sapiens
gaattccttctgtcatgttaaattttgttgaatttccacaaactaactattttaaattttctgtctgaaaagtcacatgtatctrtctctctaggattagtccctaatgacttatttaggtttttttgtgtgtgtgtgtgagtttctgtttttctggatggtgttgatgcttatgaatgtttgtcagtgtctgggtattgaaatgttaggtatctattataatccttgcagtcttaggttgtttgtacccattctttttgggaagcctttccagctattcaaaggaacttgggtgttgtcaactaagcttttggtcactgaacctctgtctgcattaaggagtaccccaaaccctgtaacactggctcttgcaaattcatcgaggtacaagct

SEQ ID NO: 241550 - DNA, 393 bp, Homo sapiens
gaattccttctgtcatgttaaattttgttgaatttccacaaactaactattttaaattttctgtctgaaaagtcacatgtatctatctctctaggattagtccctaatgacttatttaggtttttttgtgtgtgtgtgtgastttctgtttttctggatggtgttgatgcttatgaatgtttgtcagtgtctgggtattgaaatgttaggtatctattataatccttgcagtcttaggttgtttgtacccattctttttgggaagcctttccagctattcaaaggaacttgggtgttgtcaactaagcttttggtcactgaacctctgtctgcattaaggagtaccccaaaccctgtaacactggctcttgcaaattcatcgaggtacaagct

SEQ ID NO: 241551 - DNA, 504 bp, Homo sapiens
gaattcccttccagctttgccactaacctgcaggtgtccttggtgaagttgcttcattcctctgatctcagtttatccacctgtgaattgggcccaaaagtagccccctgtttgtctcctggcactcataagaatctaactccatcagacacaggaagtcactttaaaagtagaaattagagttcaaatgagaagaatccttattagttggatgtgagtaagtcccgcagatgcccagctccgaaacaggatttgctggagaaggaggttgactgcaggggaaagggcaccagcgtgtattttcagcctcagggtatggcaggaccaggttgattaaggcctgatccctgttagcagaagttcatagtctggctcagagacagacagacaaacaacgcaattcaagtaaatctcacccagagaaaccagattctgtaaggataggtgcrtctcccccagggtgcactctggggctccagaatcttcctgttagtggtcagtacc

SEQ ID NO: 241552 - DNA, 439 bp, Homo sapiens
taacatcggactctttcagaaaagattaaacaaatcctctatttgttgrcagaggttttgctgaactggccctggggatccgaattgatcatggccatcaacacaggcagcaaagacccttcagaagtgttttattcactagccacctccatcccccaaccctccatcgtctaaagtgtctcctgactcagttctgtccccctgcttgtcctcttctcctattagctctgggtacccagtccagatcatagccccaagctctgtcatcattttgcagcctccagcctcccccacccaactcagcagagccctgagaagaaagtcctgggtcccggaggctgcacctgcagacacaacagattctgcaatggtgagagcatatagggtattttgggtctccagtggggtttttgctgattctgtgcctgaccagggcaca

SEQ ID NO: 241553 - DNA, 439 bp, Homo sapiens
taacatcggactctttcagaaaagattaaacaaatcctctatttgttgacagaggttttgctgaactggccctggggrtccgaattgatcatggccatcaacacaggcagcaaagacccttcagaagtgttttattcactagccacctccatcccccaaccctccatcgtctaaagtgtctcctgactcagttctgtccccctgcttgtcctcttctcctattagctctgggtacccagtccagatcatagccccaagctctgtcatcattttgcagcctccagcctcccccacccaactcagcagagccctgagaagaaagtcctgggtcccggaggctgcacctgcagacacaacagattctgcaatggtgagagcatatagggtattttgggtctccagtggggtttttgctgattctgtgcctgaccagggcaca

SEQ ID NO: 241554 - DNA, 452 bp, Homo sapiens
gtcctcacttagataacatcggactctttcagaaaagattaaacaaatcctctatttgttgacagaggttttgctgaactggccctggggatccgaattgatcatggccatcaacacaggcagcaaagacccttcagaagtgttttattcactagccacctccatcccccaaccctccatcgtctaaagtgtctcctgactcagttctgtccccctgcttgtcctcttctcctattagctctgggtacccagtccagatcatagccccaagctctgycatcattttgcagcctccagcctcccccacccaactcagcagagccctgagaagaaagtcctgggtcccggaggctgcacctgcagacacaacagattctgcaatggtgagagcatatagggtattttgggtctccagtggggtttttgctgattctgtgcctgaccagggcaca

SEQ ID NO: 241555 - DNA, 322 bp, Homo sapiens
gaattcccctgtcccaggtattcccaggacggcaaatttcttgattcctctatgatgtgacttagtgaagcccacattgtatttatgcgcgtgcacacacacacacacacacacacacacacacgtatatgccccctgtccacaggcagataaaaagcaaatgctggcttgtgtcacgtgagctctcagggaggaaagatgaaraaaaatcgccagtgggcacagctcatcgatttaaagatttattagatattaggactgcatcacagtctcctacactaatcttcccagatctgagtgtgtgctcctgtaattaattctg

SEQ ID NO: 241556 - DNA, 570 bp, Homo sapiens
tacccaacacagtaatagtactaaacacgtgaattcaattgcttggaagtgttattaggtgcatggacacttgtattgaagggtatttattagatgtgtttttctaggctgaataaatagaatagacaattggttcccaaacyttgctatacatgaaaatcacctgaagtggatttttatttgtctctttctctctctctttttacttgtccaggctgtactcaaactcctgagctcaagcaatccttctatcttagcctcccaagtagctgggactacgggcgcacaccattacactaagtacatttctctttcttttaaaacaatgttccctgattcaactatagatccaccaaattaaaatatgtgagtgtggagcccatgaatgtacttataagttttagttgatcttgatgcagccctctctgcacctccatttgagaagagttgcaacaggtcatttcaaaatgctaactacttaggaagggtttatatctgcatccatactgctttcactccagcccaagaagtcttccaagatggaaagctaagaataagagatacctaaac

SEQ ID NO: 241557 - DNA, 583 bp, Homo sapiens
ctggtatttctagatgaggttaggttcctgggacaggagtgtgtattgaggtggagggaaggagctgaaagaaggaggggatccttggaaagggctctgagaggggtgtattcgtttcattctgagacgaataccatctatccccctagactctcacagtggctccacyttaaatgtccacagcatttcactttctaaaatgtacttttatttgactctcataactattttgtgaagtagggaagattgtcagcctcattaggtgaaaatatgttggttcaagatcacacagttagtatgctgcaaagtcaggactcaaacccaggtctctggaatcctggttttctgaatgtcggagggcacctctaacaaaggctctggagcactctaaactctcattctgggctcattcctcactcctggaggctgatttctgggggaaggaggaagtgcatgaggtacctttctgtcacatgactggtggcagaccctactttaacccagcccaacaaggtcatgctacagagctgctcatggcattttcctggactctcctcccttggtcctgactggattcttctac

SEQ ID NO: 241558 - DNA, 468 bp, Homo sapiens
tttgttttgttttgttttttggaggtagagtcttgctctgtcgcccaggctggagtgcatgatcctggctcactgcaacctctgcctcctggattcaagtgattctcttgcctcagcctcccaagcagctgggactacaggcttgtgctaccacgcccggctaattttttgtatttttagtagagacgggttctcaccaygttgcccaggctggtcttgaactcctgagctcaggaaatctgcccacctcggcctcccaaagtgctggcatcacagacatgagccactgcacacagccagctgagctattttgaagtcactccaccagcattttctctggtgtccctgctcccagtatcttggaacctccaattcaatccctattgtgcaggctataagatctttttaaaacacaacttttgccaagtcttcccctcggataaaggcctgtaacagccctgcactgcc

SEQ ID NO: 241559 - DNA, 487 bp, Homo sapiens
acagcttcctcctgttgcacacctgtgtgttcatctaacaatgatttgtgtttagagatgagatcaaaggggcttgatctcgtgtggtctgtgggccatggcgggcacttaggatttaattctgagtgataytgggaagccactggagaggaggaaagatagactgaacggactggaagaagtcacattggggctgggtatagacaggtagctgtctgaagcctgaaccttggggccctttgatgctcagggttgggagataatagggatgtgcaaaggggactgaggaacaatcagaggatgaaaccaagtggagcaggagcttcaaggaggaaggcacagccacctgccacctgctgctactgagggtggaggactgaccattggatttgacattgtgggggcagaggagtcatgctggcagagtcagggtttgaagcctgatggcagtgtgctcaagagagagtgggaggagaggtcatggaga

SEQ ID NO: 241560 - DNA, 548 bp, Homo sapiens
cacccacactttacaaaggatggccctgaggctcagagaagttacttgctcaaggccacccatctgggaaatggcagagagaggacttgaatctargtccttctactgagacatctgccattctgctctttgctgaggccatttctttatttataaacctcccacatctgcccaggaccccaaatagcccagagagtgctccactagcagcctggggcctctacagttcttctcagcacttctcctgatagggttttccagaaatgaatcactaagggccttaagtgcccaaccctgtccagctctctccccagccaatccattcagggtcagactgtctgggtttaatcctgtctcagtcatttactacataagtgaccttggacatggcacacaatgcttcctaagtctctatctctccatctgtaaaatggggctgtgatagtgtttctctcccaggatcgatgcaatagcctttgccatgctgagcctcatcctcctcttctcaacatgccccagaatatggcatcaaaaccccaggtgagggc

SEQ ID NO: 241561 - DNA, 582 bp, Homo sapiens
tgagatctgggcccagcaggctgggttgctccacagagaggctgaggcagccaagcagagcctttgcctatrggacaggaggtgcctgaccagaggaggtcaactggaggcctctccttcttgtctctggattgttcaatgagaaggacatttggggttgaagattcagagcagagagctccttggggaagttctggagatggaagattggagatggagctacaacctccctttacagctatccttccccagaggccatcagccccagggcttcagtgaaagcagacagcgctgctgcggggagaccccgggtttcactgactgtacttctttcccatccatctacttatataactaacatttattgaggatccttcatttccaagctattttaacattttcttaggcccatgtatttaccttccagttcaaggataccttgcatacactgggctgatggaccaggcaaggttcctgtcctcaaggagcttatgatctaaagagaaccagacataggacaaactaggtagtggaggtgctctgatgcagattcagccaaaatgctgtgggagtgaatgtgtt

SEQ ID NO: 241562 - DNA, 597 bp, Homo sapiens
cagcatggactgatcacctgatacctgccaggctcctgtcatttcatcttcataaaaagcacgtgtgtgcagggggtgtgggtcttctgatctgcattttgcagggaaggagctgcagctccaggcagcagaatgccccgggcagcctccctgatgtggttccacctcccttagattggatgctggctgggcagagggttgggggtctgcagtcatttcagccagaaggatttcgctggtattcaggctgggctattaacagttctttaaaccaggttagctgttttcccccaagtatgtcttattagcagactttatttagtccttatattgcctttgaccgtgtttgcttttagagcattctatttctgcagcctgttgttctattagccactccttttcctagttttgttttatttttacactctctgcacttttgtaggtaaagagacttacaggggcctcgtgtttgtgagggtgagatgacacatgggagaggggatggcaaagctctcagsgagttttaaggcagtaggcaaatggagttgttctttctctgttcatatgggggagagattgggcagtcattcatttatt

SEQ ID NO: 241563 - DNA, 563 bp, Homo sapiens
gaaccagaacacaaatggaggcaccccaaatgctggggctacaggagcactacctgtccccatttttttttctttcacgggttgggatgctgaagacagaaaagagaaaatgacttgtgtcatgtcccttggtgagccatgggaaaaaaacagacaactgtatgggtcctctgaccctcatcctattaagaaaacctgatctacgctcctattctctctctctctctctctctctctcacagacacacacacacacacacacacacacacacttgcaaatttgaagttttacatttgcagtcttaagagarcaaaagagcctagacttttccaatgtggaaaaaccaacctgtgaaacactcttccacactgcgagagaaatacaaattggattcatatgtgtttagaagaagtcataaataacagatgcaccgtgtggttcagcaagagccagggagattgagagacaccccaacctctgtgttcagcaccacggagagcagccagggccgggggtagccggtggcgccatctgcatgctggcttttctagtatgggtggtg

SEQ ID NO: 241564 - DNA, 563 bp, Homo sapiens
gaaccagaacacaaatggaggcaccccaaatgctggggctacaggagcactacctgtccccatttttttttctttcacgggttgggatgctgaagacagaaaagagaaaatgacttgtgtcatgtcccttggtgagccatgggaaaaaaacagacaactgtatgggtcctctgaccctcatcctattaagaaaacctgatctacgctcctattctctctctctctctctctctctctcacagacacacacacacacacacacacacacacacttgcaaatttgaagttttacatttgcagtcttaagagagcaaaagagcctagacttttccaatgtggaaaaaccaacctgtgaaacactcttccacactgcgagagaaatacaaattgkattcatatgtgtttagaagaagtcataaataacagatgcaccgtgtggttcagcaagagccagggagattgagagacaccccaacctctgtgttcagcaccacggagagcagccagggccgggggtagccggtggcgccatctgcatgctggcttttctagtatgggtggtg

SEQ ID NO: 241565 - DNA, 563 bp, Homo sapiens
tgcttatcatattgtaacagctgaccttggtcccctttttggctctgtctctaacccacaggtcagcctaggatgtcactgattcaatttatttcaatgtcaggttgtcagatataatttacatacagtaacrttccgttcccccttttcagtatgcagctctatacgttgtgacaaatgtatgccattctataaccaccatgatgaagacacggaacatttccatcacctcagaagttcccttgtgccccttgtagtcagctcctcttctcagacccaccccaagctggcaaccacgggtctgctttctatacctatagttttcctttttcaaaatatcatataaatagtccataggcattttaacagccaaggtgcctaataaatagtgcactgtgactatcattgtttttcttgaattaaaaagcccaccgtggaggtgggtacgtggagcctctcctaactccagcttccataagcagacatgtttcaacagatatccttttcttctttaacagattcattgggttcaaattctagtactgtcactcagtagctaaata

SEQ ID NO: 241566 - DNA, 556 bp, Homo sapiens
atttgtatttatgtagcccaaatgcagcatacatttaagaatgctttataatcttgctgctgaattgtccatcaactgatatatttttcttkcaattatttattctaactcatgtgtcctaaaattcatcttttcaaagtacacatttcagtggtttttagtatgttcaagatgttgtaatccgtccccattatctaattcttgaacattttcatcacaaaagcaaccctgtgcccattaacagttactccccattccactctcacatcagcctgtggaagtcactcattagttttctgtttctgtagatttgcccattcttggtatttcatataaaaggaatcacatggtatgtggctttttgtgtctgccttatgtcactaagcataatgttttcaaggttcatctacattgtagcatgtatctatacttttttcctttctatggttgaataatagtctatggtatagataatattacattttgtttatctgttcaccaattgatccaactgatgggcattttggtcatttccaatttggggctattatgaata

SEQ ID NO: 241567 - DNA, 555 bp, Homo sapiens
tttcatcacaaaagcaaccctgtgcccattaacagttactccccattccactctcacatcagcctgtggaagtcactcattagttttctgtttctgtagatttgcccattcttggtatttcatataaaaggaatcacayggtatgtggctttttgtgtctgccttatgtcactaagcataatgttttcaaggttcatctacattgtagcatgtatctatacttttttcctttctatggttgaataatagtctatggtatagataatattacattttgtttatctgttcaccaattgatccaactgatgggcattttggtcatttccaatttggggctattatgaataaagtacctatgaacatttgtgtatacatttttctgggggtatgtttcacctctctcttgggtagataactaggagtggaattgccaggtcatttggtagctctatgtttaactttttgagaaactgacaaactgttttccaatgcagctgtaccattttccagtgcacccaccagcaatgcaggaaggtagcaacttcttcacatcta

SEQ ID NO: 241568 - DNA, 555 bp, Homo sapiens
tttcatcacaaaagcaaccctgtgcccattaacagttactccccattccactctcacatcagcctgtggaagtcactcattagttttctgtttctgtagatttgcccattcttggtatttcatataaaaggaatcacatggtatgtggctttttgtgtctgccttatgtcactaagcataatgttttcaaggttcatctacattgtagcatgtatcyatacttttttcctttctatggttgaataatagtctatggtatagataatattacattttgtttatctgttcaccaattgatccaactgatgggcattttggtcatttccaatttggggctattatgaataaagtacctatgaacatttgtgtatacatttttctgggggtatgtttcacctctctcttgggtagataactaggagtggaattgccaggtcatttggtagctctatgtttaactttttgagaaactgacaaactgttttccaatgcagctgtaccattttccagtgcacccaccagcaatgcaggaaggtagcaacttcttcacatcta

SEQ ID NO: 241569 - DNA, 606 bp, Homo sapiens
tgttcctttttctttattattttttctttctattccttggtctgtataatctgaatttttctatcttcaaggtcactaattatttttctgccatctycaatttgcctttgaaactctttagggaatttttcatttcagttagtgtgattttcacctccagaatttctattaggttcttaaaaaaaatcacttgtatctctttatcgatattcttttctgggaagatacggttcttatcctttacttctttagacaaagcttccttaagttctttgaacatatttaaaataggttacataaggcctttttttaaatagcaaatctgatgtctgaggtttttggggaacagtttccattgactgatttttttattcttgtatatgggccgtattttcttgttctttgcatgtctaattttttgttattgaaaattagacattttaaataatataatccaataacttggaaatcatatccttcttctcctaggtttgtagttatttttaattgttgttgtttctgtttgcctagtgactttcctgaagtaattctgtaaagtctgtattccttgtcttctgtggcctctgaagcctctgttcagttagt

SEQ ID NO: 241570 - DNA, 520 bp, Homo sapiens
ttttaattgttgttgtttctgtttgcctagtgactttcctgaagtaattctgtaaagtctgtattccttgtcttctgtggcctctgaagcctctgttcagttagtttagtggtcaactaatgatgagacagaagtttctttaaatgtcttgtcaataagttccacaggctttgctgagtgagtaaatgtgttcattggggcatggtttcagcactctggcaggcagtttacaacactgccttagtctttacctcctggtcacctatctttgaagtcagccagagataagagcttggagtctagggatttgtcctgggtacktacctagtcccacacatgcatatggcctcctacattaccatggatgttttgaagtttttcaaagtctcctatagatatctccttcctcagcgattccttttaagttttttgatcagctttttgtttcctccatgtcaccacctcaggcagctaagatagtaaataattgctaccaattattttcaacaaatgtcgtgag

SEQ ID NO: 241571 - DNA, 564 bp, Homo sapiens
atcaggacgtttcttagagtactcgtggtactattttccagtttaaaagaacaaaataacaacagcaaaaaaagcagaggatgtgaataggaaaytcacaaaagcaaaatgagacgaattaatttatagaagttacgaaaaatacataaacttattataaatttaaatgcctttaaaacaaatgcccagttcttttactgggactattgaaaattacaaaatcagactgaccctcatactgaaaacaatgtaaaatgctagctaaaatatgaataacatatttttagatgcatgctgacttaataagtaagtgcggacttttcaggggccaaacaccaattgaaaatagtacatcggacaggccagcagacagtcaaggccaacttcaggctaaggacatttgacaagtccaaggaaatttgagatttggtggttctcaaaatctagttgggggatggagctgactgggatcaggagacaaagccagagcttacacacatacaatgcgatccacacagggctatgcccagagcaaagataaatggtggggaggtgggaagctgc

SEQ ID NO: 241572 - DNA, 576 bp, Homo sapiens
tatagcaaaggggaatgcacaatagctattttgcacttagccaggccgttttaccgctatgcgtaaataaatcccccatcattcaggtgtgggtgaggaggactgcggaaaagtaaggtgactttactgctcctttggcactgttcacttttgcttagtcactggagtgaccttcagatggcttagaaaccagcagcatcaatagtaataaaagttacagagccagactatggagccatttttatcttttttagttcctggtgaaactcttgccttttctgttaggagcaaatgatcccttccattgtggcctttgttctgcatcaccactagcagatgtygctgggaggttgcagagagatttggtcacttgttctacttactttcttaaccagtgcaagtcagaactgcttaaaaggcttcatacttttaagtcatatacacattgaacaacaggcacacatggaatgaatttacctcatcctgccttctaagaaatatacttttatggccagtgaattcgttattgaaaaatttgagcagatttatttatttatttattttggccaacacaaa

SEQ ID NO: 241573 - DNA, 576 bp, Homo sapiens
tatagcaaaggggaatgcacaatagctattttgcacttagccaggccgttttaccgctatgcgtaaataaatcccccatcattcaggtgtgggtgaggaggactgcggaaaagtaaggtgactttactgctcctttggcactgttcacttttgcttagtcactggagtgaccttcagatggcttagaaaccagcagcatcaatagtaataaaagttacagagccagactatggagccatttttatcttttttagttcctggtgaaactcttgccttttctgttaggagcaaatgatcccttccattgtggcctttgttctgcatcaccactagcagatgtcgctgggaggttgcagagagatttggtcacttgttctacttactttcttaaccagtgcaagtcagaactgcttaaaaggcttcatacttttaagtcatatacacattgaacaacaggcacacatggaatgaatttacctcaycctgccttctaagaaatatacttttatggccagtgaattcgttattgaaaaatttgagcagatttatttatttatttattttggccaacacaaa

SEQ ID NO: 241574 - DNA, 640 bp, Homo sapiens
tatatcttctttagtgaattgtttaaatattttgcacattttacttttggcttgttttcttattaatgaatttttgagtgtttttcatatgttatgaataaatctttttttccactccttttcctgagctgtaataaatgttctttatgagatattctrtttgctattattttcttctagtctgtggcttttcttttcattctctaataggttctttcagggagctaatgttttaattttgatgaggttgtatttatcttttttaaaacagattgtgcttctgatggtgtattggagaactctttacttagtcaaagatcacaaagattttgtttgcttgctttttttatagtgaattaaattgacttacttttgagtgttgtattcctggaatgtgctctacatagttatgaagtattatctttatcaaaattgttgaattttatttagaatttttacatgtatattcttgaggaatatatgtctatagttttattttcttgtgatggctttgattttgatatcaaggttgtagtggtctcagagaatggattgggatgtattgcctcttcttcaatttttagaagagtttacctgaattgttttgatttcttacttaaatgcttgactggatttacca

SEQ ID NO: 241575 - DNA, 642 bp, Homo sapiens
taccttccctgttcctctgctcaacrctgtttcttttatctggaatgtcctcccactttatttaagcaggaaaaccctgcctgtcaatcaagtctctgttcaagtgtcttttctatcatgactactttattgattctcccttttattagtgtcttattgctgccataacaaattactagaaacgtagtgacttaaaacaacacacaattatctcacaattttgtagttagaaattcaggcaggcttggcttgatactctgcttgggatctcacagaagacaaatggaaaagttgttgcccagactagctcttgtctcttggggataaatcgactttaaagcccttttgattagttggtagaatttatttccttccagttgtagtactgaggtccctgaaccctctatcatcaaatccagttgttctgaagcctcaattctctttgacttcctctctgtttcatcttatctgcctccagctgagaatgttctctgttagattaagcccacccagataattcagcataagctccccatctcaaggcctatagccttaatcacgtctgcaaaatctcttttgccatgtcacataacatattcatgggctacatgatttaggatgtggacatctttgaggggccat

SEQ ID NO: 241576 - DNA, 642 bp, Homo sapiens
taccttccctgttcctctgctcaacactgtttcttttatctggaatgtcctcccactttatttaagcaggaaaaccctgcctgtcaatcaagtctctsttcaagtgtcttttctatcatgactactttattgattctcccttttattagtgtcttattgctgccataacaaattactagaaacgtagtgacttaaaacaacacacaattatctcacaattttgtagttagaaattcaggcaggcttggcttgatactctgcttgggatctcacagaagacaaatggaaaagttgttgcccagactagctcttgtctcttggggataaatcgactttaaagcccttttgattagttggtagaatttatttccttccagttgtagtactgaggtccctgaaccctctatcatcaaatccagttgttctgaagcctcaattctctttgacttcctctctgtttcatcttatctgcctccagctgagaatgttctctgttagattaagcccacccagataattcagcataagctccccatctcaaggcctatagccttaatcacgtctgcaaaatctcttttgccatgtcacataacatattcatgggctacatgatttaggatgtggacatctttgaggggccat

SEQ ID NO: 241577 - DNA, 642 bp, Homo sapiens
taccttccctgttcctctgctcaacactgtttcttttatctggaatgtcctcccactttatttaagcaggaaaaccctgcctgtcaatcaagtctctgttcaagtgtcttttctatcatgactactttattgattctcccttttattagtgtcttattgctgccataacaaattactagaaacgtagtgacttaaaacaacacacaattatctcacaattttgtagttagaaattcaggcaggcttggcttgatmctctgcttgggatctcacagaagacaaatggaaaagttgttgcccagactagctcttgtctcttggggataaatcgactttaaagcccttttgattagttggtagaatttatttccttccagttgtagtactgaggtccctgaaccctctatcatcaaatccagttgttctgaagcctcaattctctttgacttcctctctgtttcatcttatctgcctccagctgagaatgttctctgttagattaagcccacccagataattcagcataagctccccatctcaaggcctatagccttaatcacgtctgcaaaatctcttttgccatgtcacataacatattcatgggctacatgatttaggatgtggacatctttgaggggccat

SEQ ID NO: 241578 - DNA, 642 bp, Homo sapiens
taccttccctgttcctctgctcaacactgtttcttttatctggaatgtcctcccactttatttaagcaggaaaaccctgcctgtcaatcaagtctctgttcaagtgtcttttctatcatgactactttattgattctcccttttattagtgtcttattgctgccataacaaattactagaaacgtagtgacttaaaacaacacacaattatctcacaattttgtagttagaaattcaggcaggcttggcttgatactctgcttgggatctcacagaagacaaatggaaaagttgttgcccagactagctcttgtctcttggggataaatcgastttaaagcccttttgattagttggtagaatttatttccttccagttgtagtactgaggtccctgaaccctctatcatcaaatccagttgttctgaagcctcaattctctttgacttcctctctgtttcatcttatctgcctccagctgagaatgttctctgttagattaagcccacccagataattcagcataagctccccatctcaaggcctatagccttaatcacgtctgcaaaatctcttttgccatgtcacataacatattcatgggctacatgatttaggatgtggacatctttgaggggccat

SEQ ID NO: 241579 - DNA, 561 bp, Homo sapiens
ctttgtttgtttattttcattcttttttctctaatcttgtcttcacactttatttcattaagttgatcttcaatatctgatatccttccttccacttgatcgatttggctattgatacttatgtatgcttcacgaagttcttgtgctgttttttggctccatcaggtcatttatgttcttctctaaagtagttattctagttagcaattcctctaacctttgttcaaggttcttagcttctttgcattgggttagaacatgctcctttagctcagaagagtttgttattgtccaccttctgaagcctacttcggacaatttgtcatactcattctccgtccagttttgtttccttgctggcgaggagttgtgatcctttggaggagaagaggcgttctgtttcttggaatgttcagcctttttgkgctggtttctccccatctttgtggatttatctacctttggtctttgatgttggtgccctttggatagggtttctgagtggacatcctttttgttgatgttgatgttattcctttctgttagttgttttcctaacag

SEQ ID NO: 241580 - DNA, 589 bp, Homo sapiens
tactgcagccttcgctttcctgggttcgagggattctcctgcctcagcctcactaacagatgagattgcaggcgcctgccaccaggcccggcgaatttttgtatttttagtagagacggtggttcaccatcttggccaggctgatctcaaactcctgactttaaatgatccacctatctcggcctcccaaagtcctgggattacaggtgtgagccactgtgcccaatcaacaattactaaattaattatatagaaaagactttctgaaaaaacaaactcagagctccttagaaattcctatttttttcttatcctctgtgtttttttatataattttagcttttattttggattaagagaagcccaaatatagcagaaggaaggaaataacaaagatcaggtcagtaataaatgaaatgaagactaggaccgtcatagaaaagatcaacaaaattgtgagttgtttgttaatataagccaaatggatgaatttttatataaactaaccaagaaaaatagagaaractcaaataaatgaaatagaaaaaagaagagacattagaagtgatacctcctgagtacaaaaggt

SEQ ID NO: 241581 - DNA, 496 bp, Homo sapiens
acacggattgccttttaactggatatctttatccaaaagaatgtaaatcagagtcttgaagagatcttaacactcctatgctcattgcagcactgtgcacaatagccagaaagtggaaacaacctaaatgtccattgccagatggatggataaagaaaatgtgttacatatgtacaatatgtactgttcagtttttcaaaaaaagaaagtctgcaatatgtggcaataaattatcttggtaacatggccaatttaggaattatcagacactatactctttttttaattcaataaaaataaatgagatacagcctctcctctgatgtttcccacaaaatataagtgtttctgttgttatttaacaataggaggaattacacaaaggaattttctctactcttatagtcccttatactgtaatagtcccttaatagttttattaacattggggataacactggggacacwacacccaatagttttactaagagactat

SEQ ID NO: 241582 - DNA, 520 bp, Homo sapiens
tcataagcatgaggcaaatttcagaatattctgggacttagattaattcaaatgagacgctcaaaggaacttctattcaaagttatactgcatgtacaaatcttaactgagatttttaaagacaagtttagaaaatatgagccctacagcatctaaatttaacactttgtttatgtcagcttaaaatgaagatacctaaaatcacctcttcagtrgcaaagacaagcattttttttaaagagaaaatgcagtacatttgtttcagatcctgttaggctccaggaactcaggttttagtaacgtagataatccagtttcatcaaacttaccaaaggtttgttagacttgttgtaatagaaatgtctgtatatatctatatatagataaatatatacaccccactttaaggaaacgtagagtacacaactccagttttaaaacaggtaaattaggaaaagttgcttatttgtaaaaagatctatagtgttgcaaaagatttgcaacatctttaaagtaatcc

SEQ ID NO: 241583 - DNA, 520 bp, Homo sapiens
tcataagcatgaggcaaatttcagaatattctgggacttagattaattcaaatgagacgctcaaaggaacttctattcaaagttatactgcatgtacaaatcttaactgagatttttaaagacaagtttagaaaatatgagccctacagcatctaaatttaacactttgtttatgtcagcttaaaatgaagatacctaaaatcacctcttcagtagcaaagacaagcattttttttaaagagaaaatgcagtacatttgtttcagatcctgttaggctccaggaactcaggttttagtaacgtagataatccagtttcatcaaacttaccaaaggtttgttagacttgttgtratagaaatgtctgtatatatctatatatagataaatatatacaccccactttaaggaaacgtagagtacacaactccagttttaaaacaggtaaattaggaaaagttgcttatttgtaaaaagatctatagtgttgcaaaagatttgcaacatctttaaagtaatcc

SEQ ID NO: 241584 - DNA, 520 bp, Homo sapiens
tcataagcatgaggcaaatttcagaatattctgggacttagattaattcaaatgagacgctcaaaggaacttctattcaaagttatactgcatgtacaaatcttaactgagatttttaaagacaagtttagaaaatatgagccctacagcatctaaatttaacactttgtttatgtcagcttaaaatgaagatacctaaaatcacctcttcagtagcaaagacaagcattttttttaaagagaaaatgcagtacatttgtttcagatcctgttaggctccaggaactcaggttttagtaacgtagataatccagtttcatcaaacttaccaaaggtttgttagacttgttgtaatagaaatgtctgtatatatctatatatagataaatatatacaccccactttaaggaaacgtagagtacacaactccagttttaaaacaggtaaattaggaaaagttgcttatttgtraaaagatctatagtgttgcaaaagatttgcaacatctttaaagtaatcc

SEQ ID NO: 241585 - DNA, 337 bp, Homo sapiens
cactttaaatatgtcatccactctctcttgccctgtaaggtttccactgaaaagtctgctgccagatgtatttgagctccattgtgtattatttgttccttttctcatgtttttttagaaattctttatccttgacttttgggagtttaatttttaaatgtcgcaaggtactctttcttgawtttaatatacttggtgttctataactttgttgtacttgaatattgatatatttccctaagatggggaatttctctgctattatccattcaaataaactttttaactgcatctctccctctctctcctcttaaaggccaataactcttagattttc

SEQ ID NO: 241586 - DNA, 548 bp, Homo sapiens
tagtcatttgtaaacattataaaatatatctttacacaaatatatttgtagttaattcataaggatgggtttggatagggctagcagagcaccttcagagtgaaatgggaatacttcaaaagttaggtgataacatttcatttgtttgaatactctgccagtagaaccagttctgcatagaaatgtatatgttgtgtagaataatgatgtagagtttactcatcaatgaagatgtcttatttttatcttctgcaaattctacatcattttaaaatgcattttaacaatacataataaaagataattttgactctgaaaatttaaatgattgactagmtcattcttggctgtattaataattcttgatctcatggaataattatttgggtaagtggccttgcatggcaagcacctggccatggatgatcactcatgctactgaaaaggattgatctgaatacctgcaaacagactctaactcacagtttgttgtttttatttctcacttccctggtgagaggtgaaggtctcaataaataagtaagttg

SEQ ID NO: 241587 - DNA, 548 bp, Homo sapiens
tagtcatttgtaaacattataaaatatatctttacacaaatatatttgtagttaattcataaggatgggtttggatagggctagcagagcaccttcagagtgaaatgggaatacttcaaaagttaggtgataacatttcatttgtttgaatactctgccagtagaaccagttctgcatagaaatgtatatgttgtgtagaataatgatgtagagtttactcatcaatgaagatgtcttatttttatcttctgcaaattctacatcattttaaaatgcattttaacaatacataataaaagataattttgactctgaaaatttaaatgattgactagatcattcttggctgtattaataattcttgatctcatggaataattatttgggtaagtggccttgcatggcaagcacctggccatggatgatcactcatgctactgaaaaggattgatctgwatacctgcaaacagactctaactcacagtttgttgtttttatttctcacttccctggtgagaggtgaaggtctcaataaataagtaagttg

SEQ ID NO: 241588 - DNA, 596 bp, Homo sapiens
ccaaatgtctttacaaaaggattaccagctcgctatatataagaatgtttaaaggccccatattcttttctctttttaggtgttcgatgtctctagtcataatattgtggattttgcatttgctcattggtgcctctcaaagtattcagtttctgttttgtggcagaaaattattgttgtgaactctaactttcaccttgtttttcatatctgtttcagatcctaggctagtagccttacccttgttattcttttatgtaagtattcagtctgaatggtaccaaacttccgacttattctgccttagaagctcagctggtagctttaaatttctttcccaamaatatgaagatgaatccttgagttctatcagttgagataggttgcataggcttaattataatttgctgctctttataatgacaagacacataactgggctcagtagtacattaaaaaatgattttcccaagataaatagggccatgtgagaattacacctgccaccttgacctcacctacaatttattctaaccaaaattaactaaggttagcaaattgtggtacaaaaccttccacaaaagtttgcagaaaca

SEQ ID NO: 241589 - DNA, 642 bp, Homo sapiens
taattattgttttactgggacaaactgttggtagctgatagtattaatcttcaaaatctcttggatatttttagtcttttctttattacatttaggaaaacttgtctcaaacttagtgtgaaatcctattgggattttttcttttttgaggcagggtcttgctctgttgcccaggctggagtacagtggtacagtctcagctcactgcaacctccacctcctgggttcaagagatcctcccaccccagcctcctgagtagctaggactacaggtgcacatcgccaagcctggctcatttttgtatttttttgtagagacagggtttcaccatgttgcccaggctggtctcgaactcctgggctcaagcattctaccctcctagacctcccaaattgctgggattacaggcatgagccactgggcccagtccctattgggattttgattgagattgcatttaatagtgcaggaacaactgtctattcatatggaaaaatacaatattagataatgccctaacaccatttgcagtaaattccagatggaaatgagsctattagattgatttgatgattatgaagtcgttgagaacttttgtctgagcagtttctgagcagtgtcttctcagaggtacataagtt

SEQ ID NO: 241590 - DNA, 509 bp, Homo sapiens
tcagagacaccacatctgagtaaggttgaaagctattctcaaaaatattaattctctggcacttgaagtttccatgatccaggcaacagsggcagccctcaggcaattggaaatccagcctgtttattacaatcactgaaaaatctgacagtatatgtatggggcattggcatatatccaaagagcattccctgcaaacatatacagaagagagtttgtgcaactatattaatatcaaacaaagtagatcttaaggcaaaaaccattaccagagtttaaaagggacatctgaagaaatgaaaatgccaatccagcaggaaggtgtcacaacccaaattgttctgtatctaaatatgtgactttgaaatatataaggtgataaatgaagaggtcaaagagacaaacaaaaaccccaccttactgagataaattaaagaaaatatgaatggaaggatattctcatgtttatgggttgaaagactattatcaagatgtccatttgtcagaat

SEQ ID NO: 241591 - DNA, 510 bp, Homo sapiens
aataattttattaacaattacataaatggaaaagaatagactatatccagtttgaaagactgcatgtagttagcttatgttaagaagatctgtgataaaatatttaaaaatcaatcaaatttagtaaaatttgtcaaggcacaattatataaaatgtggttagttaaaatcaattttaggtttttaggagaattctcagcaataaaaaagctattttcataaaaatgaagagataaggtcatggcagagactcccaaagtaaaatgtatgtaagttagagaattacaaactgatggattaaaccacatagatttgatcactacatggtctggaactttggtattaaccatttattagctgtgagatcttgggcaagttgttcaacctttgagcctcagtttcttcatttataagatgggmgtcataatgcccaggtgtatattgttgcagagattggcaataatgctgcctggcacagagcaggggctcagtcaacagtagttcttcatg

SEQ ID NO: 241592 - DNA, 594 bp, Homo sapiens
gggatccttgatcagttatcctccctgcagttggaggtctgcaagggacattctcttggcctcagtaaagaaaaatgggaacataatagagaacaactgaagtattcaaaaatcttttaataaaacgttccctacaccartaaaaaatgaaattttataatactgaagacaatgaaaagggcctaatgccagagatcaagaaggaggaaaaaaaatgtgtttgtatccaatgtacaggtttgtatccaatgtacattacaagaacaggcagtaggaaaaaattggaacaattattttaaaattctgaataaaactgtctcagaaactagatattaaaattcagacaaataatcaaatttgacaatatcaagaaagcttcaggaaaaaaaatgaaactttcaccatacctttcaccatatatcaaattaactcaagatatattaaagatgtaaatgtaagacattgaactgtaagtatcctagaacacctaggaaacaccattctgcctataatccttggaaaatgatttattactaaattctcaaaagcaattgcaacaaaaacaaaaaatgacaagtgggacctaattaagct

SEQ ID NO: 241593 - DNA, 476 bp, Homo sapiens
gcattaacatcagccaagaacagtgtatcaggaccamattatgacacccccacagaattgatttgcctgtgctgtatttaagtattcaaacatcagcacacatttggggaaattaacagaaatagagccatgaaaataattattgtattccatgtaagaatgctcatcattcactacattttacactattgtctacataaagatccacaggagaaatttcttccaagacttggtgccaggaatatttgaatttcatctcagtgactgggtggtttttatcttatggctactatgacttattttttttttcctcccatttgcactgctactagaaaactccaggaaagcccttcctgctggcactgggtgagaacagtatccttgccctcatggaatccatttgatatcttaacctcacccttgatttcaactaatttttctatacttattttcacttagccttaatttattaactt

SEQ ID NO: 241594 - DNA, 463 bp, Homo sapiens
acctgcattaacatcagccaagaacagtgtatcaggaccacattatgacacccccacagaattgatttgcctgtgctgtatttaagtattcaaacatcagcacacatttggggaaattaacagaaatagagccatgaaaataattattgtattccatgtaagaatgctcatcattcactacattttacactattgtctacataaagatccacaggagaaatttcttccaagacttggtgccaggaatatttgaatttcatctcagtgactgggtggtttttatcttatggctactatgacttattttttttttcctcccatttgcactgctactagaaaactccaggaaagcccttcctgctggcactgggtgagaacagtatccytgccctcatggaatccatttgatatcttaacctcacccttgatttcaactaatttttctatacttattttcacttag

SEQ ID NO: 241595 - DNA, 596 bp, Homo sapiens
tgattaatgtcgtaagcagttcaggggaatatggaatccacaaataggaatcatattatactagctaatgtgagatgaatttttaatatcctatgtgtatttgaagacagattgaagggatttccggaccatttcaagagttaccaaaggagaatgtatcactgctttcagttccgtacctttgtccttatgggggtaagaagacaagtaataattaataattaaaatttatgtcatttacaatgaaatatttgattatgtaacgcgacgcttgattttatttgcataacagtttattttcatgcagtaaattcagatgtatatatgaagaaacctgaagtgctaggcttgaagtttagagcagtataatcatgctttttgaattaatttccaaattatcttcttcggagcctgtgaaatatgcgtagggccatctttagcattacagttgggtataagcagaaaaatcagcatggccaayggaactgttctgtttagggatagcccacctgaagaattatattaacattcagggtttctacagaggatgaaatactatatctatccaagatatattgaatttactgggagttatc

SEQ ID NO: 241596 - DNA, 554 bp, Homo sapiens
acattttcatcttgcagatttgaaactctatacccattcaacaacaactctctttttcccctttctccttgccrctggtaataaccattctactactttctgtttccattaatttatctactttaggtaccacaaataaatagaatcatatggtatttggctttttgtgagtgtcttatttcacatagcataatgtcctcaatgttcaactatgttgtggcatatgatgggatttccttcttttttaagtctgaataatattttattgtttctatataccacattttgcttattgtttcatttgttgatgggtgtttgggttacttaacaccccttggtattgtatatagtgccactatgaacatgggtttgcaaatatctctcagagatcctgctttcaattattttggatacatactcagaagtagaattgcaggatcatatggtaattatatttttgagtttttgaggaaccttcttactgtttcccatagtgccggcaccatttaaaattcctaccaacaatgcacaagggtaccaatttttccacattc

SEQ ID NO: 241597 - DNA, 609 bp, Homo sapiens
ctatatccctttacccatagacacttcagctagcatgtcctatgaaaagggcatccttgcacaaaaccacattacagttatcaaagttrgaaatttaatactgatacaatattatcatctaatacatagcccatattcaaatttcatcaattgccagaataatgtcctttgcggctacttttctccatctagggtgaaatctaggatcatgcattgaatttacttgccatgtttcttagcctctgatttgaaacagtttctcagcatttctttgttcttttcgactttgagatttttggaaagcacagacctgttattttgtagaatgtccctcagttttgatgtgcctgatatttcctcatgattagattcagattattaacttttggcaggaacacgataaaaataatgctgtgtcctcagtgtaacataccaggaggcacaaagagtcagtttgtcccaataattgatgatgctactttgattaattacttgggaaggtggtgtgccaccagtctgttcactgcaggttacttttttctttgtaaatagtaatttgtggagagatacttagaggcaatgtaaacaccttgtatcttatcaaagttt

SEQ ID NO: 241598 - DNA, 561 bp, Homo sapiens
acccaagtgagacctttatttgcttttatttttattttttgaaactataaatttctacatgtaatattttattattaactttatgaagacatggctctggtcatgattgtttatagaggtcagataatgcaaataacagcaagtagacttgtatttttttgaagatgatctctgcattgtattattattattattgagacaaggtctcactatgttgtccaggckggttttgaactcctgagctcaagcgatcctcccacctcagccacccaaattgctaggattacaagcgtgagccactatacccagccaacatcttgattttagagtgatgaaaccttgagtttaggacccagctaacccagacctaggaacctaaccaatgggaaccgaatgataacgaatctgtgctgctttaagctgctcactttatggtaactttttatgcagcattaaaaacatataaacaccttgataaataaaataaactgacaaaattagttttaggaactttctgtagcagcatctttcaataactaaatccccattggtcttaccaga

SEQ ID NO: 241599 - DNA, 590 bp, Homo sapiens
ttcaaaatatttcactatcataaacaatagacatctccccaaaatttaatcttgacttctttcaagggtcaaggatataacctagcaagcaaaagatataattttaaccaagtaaaatttagcttaacctacttcattkttgctacatttaattacatagcaaggaataacttctactaaactacaaaaactacatcagtaaaactggagcatttaaataatctaaccaacactgaaatttcgttcaggatattgctctaccatgattccaacacattgcctttttaccactataatctattaaaggaacttagaatctagtgaatttaagaattataagatgtccctcttttcagaggcccttgagataaaattttaaataatttaaataattccataatctaagcttaaatgattagcattaggatcaatattacatatcacaaaaactccagcaattagataagtatttgtatgtaagataaaaaagctaatacttattctaaagtcagagatgcagcaagaaatctctgaaaaagagctctctaaaggaccttcttgaatattttaatttcattaataccctcttc

SEQ ID NO: 241600 - DNA, 590 bp, Homo sapiens
ttcaaaatatttcactatcataaacaatagacatctccccaaaatttaatcttgacttctttcaagggtcaaggatataacctagcaagcaaaagatataattttaaccaagtaaaatttagcttaacctacttcattgttgctacatttaattacatagcaaggaataacttctactaaactacaaaaactacatcagtaaaactggagcatttaaataatctaaccaacactgaaatttcgttcaggatattgytctaccatgattccaacacattgcctttttaccactataatctattaaaggaacttagaatctagtgaatttaagaattataagatgtccctcttttcagaggcccttgagataaaattttaaataatttaaataattccataatctaagcttaaatgattagcattaggatcaatattacatatcacaaaaactccagcaattagataagtatttgtatgtaagataaaaaagctaatacttattctaaagtcagagatgcagcaagaaatctctgaaaaagagctctctaaaggaccttcttgaatattttaatttcattaataccctcttc

SEQ ID NO: 241601 - DNA, 577 bp, Homo sapiens
aagcacaattaatagatgctcttagaaatcagaatagttgttacctttctaaagggataagttggtgattgaaagagcaaaattgaatttygctcgtatcattctctgttcccatctgaatgctggttagacaagttaagtttgtgcactattctgcatttattttggacatcaataagagttttaaaaaaataaccaggaaccactatgagatactacttcacacctactaggatggttaaacaataaaaggcaaacaagtgttggcaaggatacagagaaactggaatgcttatacattgtggtgggattgaaaatggtgcagttattttggaacagtttagtagtcactgtaaatgttaaacacagagttactatgtgatccagattcccctcctacatatatacccaagacaattgaaaacatatgtctacataaaaatatgcacaaaaattttcatagtagcattattcataatagccccaaatgaaagtaagccatatgtccatcagctgacgaatggataaataaaatgttgtttatccatataatggaatattattcagcaataaaaag

SEQ ID NO: 241602 - DNA, 503 bp, Homo sapiens
tttaaaaacaacttatgaataacgtgaagaagaaacagcaatcagatgataccaacgtaggttctgagcaaatcacatgatttactgtgatttatttctttgactcaattcttcgtctggtagrtgaatagaatgcagtaatcataatacgtggcattaggcaaagactctcatggtgccccatgtcaagatggagaaattagatatgaagacagttaaggattcttacttggtaaatgctgatagtaatttaggtcaaagctggctactgtgaatattaactcttggcgtgttaattgctctgctagttaataagtaactgctagccacgtgtagctatataaatttacattttaattaattaaaattaagtttacaattctgttctttagctgcactagccacatttcaaatgctcaatagctgcagtggcttttggctactgtattggacagcccaggtttaggacatttccattagaaagctctattggacgtcactgc

SEQ ID NO: 241603 - DNA, 649 bp, Homo sapiens
ggatggggaccttacataggccaacagataattacaatagttataagatggtgcaataattctatattatatgtgagtccaggatcctatggggatggatacaaagatttcatcccagtttggaagtgtcagcaaatgtgtctcagtgaaggagatgcctgtgttgtgctaaggatgattcggaggtaaaaaaagaaggagagagaggggtcctctggcagtcgaggactgtgtgcctctgcaagcttcccttaaccatggtttttaactttcccttggctgagtgtttttccacgagattaagaggcagaaaaaacagcaacaataggtgccctatgacatcatgggattaaatcataaatatggcttggggtggctcagatctcctcacatgttaatgtgctagaggtagaagtagaggcaaattaaccatgaagtagaagagrtattttaggaattgtatccttatttttggtttaagtttgtggctcagtctccaaaaagtgaatctaagttattacaagcaattaaaaacatggcgttaatgattcatgtattttcatttttttatttgaaatgcctcttaggatttttcctccctctctactcccgttattatcacactaaattaggctcttatcacttgaca

SEQ ID NO: 241604 - DNA, 623 bp, Homo sapiens
gtttgtgcatatctcattatcccaatacaatttactgaagagactgttcattttctattttgtgttcttggcatctttatcaaaaatcaattgaccataaacatatagatttatttctgggctctcaattctgttccataggtttgcgtgtctggtttttatgccagtgccatgctgttttgattactatagctttgtagtatattttgaagtcaagtattgtgatgcctccaactttgttcttttgacttgtaattgctttagctgttttggggtcttttgtggtttacatgcatttttggattttgtttctatttctgtgaacaatgtcattggaattttgatagagattgcattgaatctgtagattactttgggtagtatggatattttaacagtattaaatttttcaattcattaayatgggatatcacattaatttgtgttttaatttctttcatcaatatcttatagtttttaatatacagctctttcacctccttggttaaatttatttccatattttctttttaggctattgaaaatgagattgttttattaatttcttttttagatagtttgttgttgatgtatagaggcacaactgatttttgtatgttgat

SEQ ID NO: 241605 - DNA, 558 bp, Homo sapiens
tatacataagtttttccaccttgcttttagaaggatatgaagacatatttcacagtaaaatgttgaacggaaagctaactacttttgtcttgctcctaatcttaaagggaatgttttcaacattttgccattagatatgacgtttgttatttattaggttgtgayagttcccttctctttatagtgtgctaagagattttatcatgattagacatggaacttcctcaagtgcttttctgtatctgttaatatgatttttaaacttttgatctgttactgtgaatttcataaatcacttttctaatattaaactaaccttttattctgagaattaaccattaattggtcatgacggtcatgatgtattcatctttttatatattgctaaatttcatttgttttgttgaggatttttgcatctatgctcacaggtgagattgacctacaattttactttctcatattgttctttattggatttttggtatcaaagtcaggcccacctcgcaaagtgaatggagatttttttcccttttttaatgatttggcagagttgta

SEQ ID NO: 241606 - DNA, 452 bp, Homo sapiens
ccttgaatgcacatggcttgcttctttaatccattgaaggttctgcccaaatgtcaccttatcagagcaacttctcccaaccaatttatacaagcttgtgcacacacacacacacacactccaccacaatcacaaccaccatcagtctctgtccctctactttttatctcttatcaacaacaggtatatacatatttactgggttgtttattttttgtctcttctctccccaccccccgccaccatttcaatgtaagtgctataaaaacagggtcttcgttctttttctctgatttatttccagtgcctagaagagagcctggcacataataggactcaatacatatttgttgaattagtgagtgaatgaatgaatsaatcaatcaatgaaaaagtcagatcatctcaatctgaacacaagggaattttctcgagagttttccagaggattg

SEQ ID NO: 241607 - DNA, 646 bp, Homo sapiens
ttttcctgggtgtggcacctgatggtgagcactgggaggaacacggggagagtgggcagaggtgggagcggagtctarcatctatagttctgacacctgtcactcacttgctgtgggggtgagagggttgggagagtgggttttaccaccagagaagcttttttttaaagtgtatcagccattgacttttagtatattcacagagttgaacaattatcaccaaaaccaattttagaacattttcatcatcttccagagaaacccaatgttctagagcaacagttccccattttccctcaacactgccttctccaccctagcctagccctaggcaaccactgattgactttttttgtctctatagacttctggacattttgtataaatggaatcataaaataagtgcccttttgtgtgactggcttcttttacttagcataacatttccaagcttcctataatatatttttgcttagatgcattcaggagggatggtcagggcagacctgagagacctgaacacagagggcctttgagggaagccgagctgagcctggcagttgaacacagagcctcagagagacccaatactgatggaattgagagagggtgacatgggagtgggtgtaaggaaagcctctgtaga

SEQ ID NO: 241608 - DNA, 646 bp, Homo sapiens
ttttcctgggtgtggcacctgatggtgagcactgggaggaacacggggagagtgggcagaggtgggagcggagtctagcatctatagttctgacacctgtcactcacttgctgtgggggtgagagggttgggagagtgggttttaccaccagagaagcttttttttaaagtgtatcagccattgacttttagtatattcacagagttgaacaattatcaccaaaaccaattttagaacattttcatcatcttccagagaaacccaatgttctagagcaacagttccccattttccctcaacactgccttctccaccctagcctagccctaggcaaccactgattgactttttttgtctctatagacttctggacattttgtataaatggaatcataaaataagtgcccttttgtgtgactggcttcttttacttagcataacrtttccaagcttcctataatatatttttgcttagatgcattcaggagggatggtcagggcagacctgagagacctgaacacagagggcctttgagggaagccgagctgagcctggcagttgaacacagagcctcagagagacccaatactgatggaattgagagagggtgacatgggagtgggtgtaaggaaagcctctgtaga

SEQ ID NO: 241609 - DNA, 646 bp, Homo sapiens
ttttcctgggtgtggcacctgatggtgagcactgggaggaacacggggagagtgggcagaggtgggagcggagtctagcatctatagttctgacacctgtcactcacttgctgtgggggtgagagggttgggagagtgggttttaccaccagagaagcttttttttaaagtgtatcagccattgacttttagtatattcacagagttgaacaattatcaccaaaaccaattttagaacattttcatcatcttccagagaaacccaatgttctagagcaacagttccccattttccctcaacactgccttctccaccctagcctagccctaggcaaccactgattgactttttttgtctctatagacttctggacattttgtataaatggaatcataaaataagtgcccttttgtgtgactggcttcttttacttagcataacatttccaagcttcctmtaatatatttttgcttagatgcattcaggagggatggtcagggcagacctgagagacctgaacacagagggcctttgagggaagccgagctgagcctggcagttgaacacagagcctcagagagacccaatactgatggaattgagagagggtgacatgggagtgggtgtaaggaaagcctctgtaga

SEQ ID NO: 241610 - DNA, 614 bp, Homo sapiens
gactccaaagctctacactcacctatgatcgtttacagcccattttttgcgtcagctgccaagaatgactcgaaaccaattaagaggtcgtgtgattcactaaaactctaaaactcttcttgctgaggtcaccatttccccattgtgaaatccaatgatctgacttcagggtaacaaaagaagcaagatccagtttcttcttcttcttctttttttttttttttwaaaaaaagataatagctaatgttaatcatgcaaaaagcacatgccagatgcttcttcccctccttggacttcatttttctccttagcacttatcaccacttgacattctgtatttaacttgcttatttgtttattgaatcttccccaagtagctgtcccctacagcagagatttttgttctgtttttcttactgcttacacttgtagcagtgtctgggaaatgatagctgcctgataaatatttgttgaatgagccttaatatttaacaaaaacagtacaataatctggagatgtgttaggagttctttaagaagttaaaccagcatctgtcctatgacccagcaattccactcctaagtatttacctaaaagaaatgaaaatgtgtcg

SEQ ID NO: 241611 - DNA, 389 bp, Homo sapiens
taccaaggtgatgcctctaggaatcagcaagasagtgtttctatgcttagggcacttcctaatgtttatatggctgcattgaccacaggcttagatcataacacccaattcctttgaatatgatgaaagccttctcaagaaggatgggttcaaacaaacccatactgtgaacattgaaacaaatacctaactctttactgcccagacattaacaaaaatccataagcatcaagaatttccaagaaaacacaacctcgccaaacaagttaaataaggccccagttaccaatcttgcagtggcagatgtatgtgaacttacagagtaagaatttaaaatagctgtcttgaggaagctctatgaacttcaagataacagagagaaggaattc

SEQ ID NO: 241612 - DNA, 583 bp, Homo sapiens
tatgtgatgatacgtccctctttggtttgtagtatatatgtaattgcctcagttgttccctcacttcatttgttcaccaaaaaaaaatatactttgctcagattggtgatataaatccaagttaaatatcaaatgctccacaaaataaaccagtgtgctataggtaggtaatataaacccaaaatcatcacaagattttctacacttagctaataatctatccttactctcatctttgcctgcaagaaatactactctgttttcaaatgttgtaacctctgtacaatctccaagacattttaattttaccctgtcttttatctgacagagttacctgcatattttcttatatatcgtcaccttatattttcagaaaaatawttgtacttcaatagaaatctctatgcatgctctgtagcatgctccaggttacctgaatctgattttatggaaactattttataagtccgtaagtcatagacccccactgcatacctgaaaccacagatagcactaaaccctatacaggtctttctcaatttgctatggggttacaccctgataagtgcatcataaattgaaa

SEQ ID NO: 241613 - DNA, 568 bp, Homo sapiens
cagcctgagcctgtttctgtatggccagaggagctaagagtggttttacacttgtaaagggttgtttctttaaaaaaaaaaaaaaaaaaaaaaaagaagaggaagaagaagaagaagagaaggggaaggagaaggaaraaaaaagaagaggaaggagaagaagaaagagagggaggaaaagatgggggaaggaaagagaaaagagaaagaaaacaattaatgtgtgacaaagactatatggtccacaaagtctaaaatagttaaaatctggccatttatacaaaaattttgccgacccctgccagcctgtgctccatcctgcccacagttacttgagtcataaaccctctgttggttccttgtgtctttagaaaataaacaccaaactccccagcatggcatatagttcccttcaggatgtgtctgcaaacttcctttctagccttgtcttgtgggctctctcattctttacacattgtggccataacgacttctcactattcccaggacactcaacttcctcccacggctgctcatctgtgtgcctgctgtccctctgcctagatag

SEQ ID NO: 241614 - DNA, 346 bp, Homo sapiens
gcctgagcctgtttctgtatggccagaggagctaagagtggttttacacttgtaaagggttgtttctttaaaaaaaaaaaaaaaaaaaaaaaagaagaggaagaagaagaagaagagaaggggaaggagaaggaagaaaaaagaagaggarggagaagaagaaagagagggaggaaaagatgggggaaggaaagagaaaagagaaagaaaacaattaatgtgtgacaaagactatatggtccacaaagtctaaaatagttaaaatctggccatttatacaaaaattttgccgacccctgccagcctgtgctccatcctgcccacagttacttgagtcataaaccct

SEQ ID NO: 241615 - DNA, 568 bp, Homo sapiens
cagcctgagcctgtttctgtatggccagaggagctaagagtggttttacacttgtaaagggttgtttctttaaaaaaaaaaaaaaaaaaaaaaaagaagaggaagaagaagaagaagagaaggggaaggagaaggaagaaaaaagaagaggaaggagaagaaraaagagagggaggaaaagatgggggaaggaaagagaaaagagaaagaaaacaattaatgtgtgacaaagactatatggtccacaaagtctaaaatagttaaaatctggccatttatacaaaaattttgccgacccctgccagcctgtgctccatcctgcccacagttacttgagtcataaaccctctgttggttccttgtgtctttagaaaataaacaccaaactccccagcatggcatatagttcccttcaggatgtgtctgcaaacttcctttctagccttgtcttgtgggctctctcattctttacacattgtggccataacgacttctcactattcccaggacactcaacttcctcccacggctgctcatctgtgtgcctgctgtccctctgcctagatag

SEQ ID NO: 241616 - DNA, 346 bp, Homo sapiens
gcctgagcctgtttctgtatggccagaggagctaagagtggttttacacttgtaaagggttgtttctttaaaaaaaaaaaaaaaaaaaaaaaagaagaggaagaagaagaagaagagaaggggaaggagaaggaagaaaaaagaagaggaaggagaagaagaaagagagggaggaaaagatgggggarggaaagagaaaagagaaagaaaacaattaatgtgtgacaaagactatatggtccacaaagtctaaaatagttaaaatctggccatttatacaaaaattttgccgacccctgccagcctgtgctccatcctgcccacagttacttgagtcataaaccct

SEQ ID NO: 241617 - DNA, 568 bp, Homo sapiens
cagcctgagcctgtttctgtatggccagaggagctaagagtggttttacacttgtaaagggttgtttctttaaaaaaaaaaaaaaaaaaaaaaaagaagaggaagaagaagaagaagagaaggggaaggagaaggaagaaaaaagaagaggaaggagaagaagaaagagagggaggaaaagatgggggaaggaaagagaaaagagaaagaaamcaattaatgtgtgacaaagactatatggtccacaaagtctaaaatagttaaaatctggccatttatacaaaaattttgccgacccctgccagcctgtgctccatcctgcccacagttacttgagtcataaaccctctgttggttccttgtgtctttagaaaataaacaccaaactccccagcatggcatatagttcccttcaggatgtgtctgcaaacttcctttctagccttgtcttgtgggctctctcattctttacacattgtggccataacgacttctcactattcccaggacactcaacttcctcccacggctgctcatctgtgtgcctgctgtccctctgcctagatag

SEQ ID NO: 241618 - DNA, 568 bp, Homo sapiens
cagcctgagcctgtttctgtatggccagaggagctaagagtggttttacacttgtaaagggttgtttctttaaaaaaaaaaaaaaaaaaaaaaaagaagaggaagaagaagaagaagagaaggggaaggagaaggaagaaaaaagaagaggaaggagaagaagaaagagagggaggaaaagatgggggaaggaaagagaaaagagaaagaaaacaattaatgtgtgacaaagactatatggtccacaaagtctaaaatagttaaaatctggccatttatacaaaaattttgccgacccctgccagcctgtgctccatcctgcccacagttacttgagtcataaaccctctgttggttccttgtgtctttaraaaataaacaccaaactccccagcatggcatatagttcccttcaggatgtgtctgcaaacttcctttctagccttgtcttgtgggctctctcattctttacacattgtggccataacgacttctcactattcccaggacactcaacttcctcccacggctgctcatctgtgtgcctgctgtccctctgcctagatag

SEQ ID NO: 241619 - DNA, 562 bp, Homo sapiens
gtgaatggtgacggtgcaattggtagttgtgatttttccagccatgtggcttttgttttgctgactgggggatacaacatgaggtggcagttgaattgccccaaagcatagaaagaattggggatgcaaaaaaggagagtaatattactatagctaataccccttatgtgccagacactgctctaagcattgtttaagtactaacaattctgcaaggtaggtgccattattatccccacttgacaaatgaggaaacagagacacagagaagttaagtcgcycatccaaagtttgacagctagtaagtagcagaacttggtgatcaaaccaagaaattccggaacatgaatctgtgctcacagccatcactatactccccactccacctcactgcccaggaaggagagctaggggtaaaagagtgaggagaatgtggaaaagtttctgatggataggatgtgatgtggattctctttcatgtcttgcaataagatcttttataaaatattcagatgtccttcatgtgttgtaaagttgaatttgttttgtgggttacagtgaa

SEQ ID NO: 241620 - DNA, 562 bp, Homo sapiens
gtgaatggtgacggtgcaattggtagttgtgatttttccagccatgtggcttttgttttgctgactgggggatacaacatgaggtggcagttgaattgccccaaagcatagaaagaattggggatgcaaaaaaggagagtaatattactatagctaataccccttatgtgccagacactgctctaagcattgtttaagtactaacaattctgcaaggtaggtgccattattatccccacttgacaaatgaggaaacagagacacagagaagttaagtcgctcatccaaagtttgacagctagtaagtagcagaacttggtgatcaaaccaagaaattccggaacatgaawctgtgctcacagccatcactatactccccactccacctcactgcccaggaaggagagctaggggtaaaagagtgaggagaatgtggaaaagtttctgatggataggatgtgatgtggattctctttcatgtcttgcaataagatcttttataaaatattcagatgtccttcatgtgttgtaaagttgaatttgttttgtgggttacagtgaa

SEQ ID NO: 241621 - DNA, 396 bp, Homo sapiens
cttcatgtgttgtaaagttgaatttgttttgtgggttacagtgaaatgccaagtatggggcgtgtgtgtgtgtacrtgtgtgtgtgtgtgtgtgtacaaacagaatgtaagaatgcagttgaatctgtgtaatttttttctcctttgcattttcattttctgtaatattctatggctgaatgtatacttttacaatcagaaaaaaattatttcttaaaaataaatgtattgaattttatatttgccatatgatgagtgcatttaaaatgttcatagcaaatagcctggaacaaaactcataaaaatgtaagcaatggttataactagatggaaaaactaggggcgatttctttctttcctttctttactaaattttctaatctttttgcaatgacc

SEQ ID NO: 241622 - DNA, 460 bp, Homo sapiens
atcctctttagcctcatcttccaccagctcccaccttgagcccacaaatctaccttctgagccactgcagccccaggtagctccccaggcctaggctctctcttctcctttgtccatgctgtttggcagccttggccaggaatgcctactgctctccctagctaattcctgatcattaatactccagatctgaatcccctatgtgcagaggcccctcaggctgggttttcaaattctcctctgtgctccatagcaccctgcacakcctctaacagcatttatcacaccctcttatggctgctggttacttggccatctccctgctgggatggctccctgaaggcagtgattgagttaatccttgatgtatcccccatcagctaacattgttcctaggagatggtgtccaataagcattggatggtaggctgaaccagagtgataaaaatatcaaacgaag

SEQ ID NO: 241623 - DNA, 460 bp, Homo sapiens
atcctctttagcctcatcttccaccagctcccaccttgagcccacaaatctaccttctgagccactgcagccccaggtagctccccaggcctaggctctctcttctcctttgtccatgctgtttggcagccttggccaggaatgcctactgctctccctagctaattcctgatcattaatactccagatctgaatcccctatgtgcagaggcccctcaggctgggttttcaaattctcctctgtgctccatagcaccctgcacagcctctaayagcatttatcacaccctcttatggctgctggttacttggccatctccctgctgggatggctccctgaaggcagtgattgagttaatccttgatgtatcccccatcagctaacattgttcctaggagatggtgtccaataagcattggatggtaggctgaaccagagtgataaaaatatcaaacgaag

SEQ ID NO: 241624 - DNA, 605 bp, Homo sapiens
ttcctctgggacctaaaaatctctttcatgacatttctggggtcatttggtttccaaagactcaagcacaaggatgaggacaattccactgtccctattgtccagtgagcagagaacytccagacaaaatggtcttgcggctctctagggacagatagaactaaggtcactatgagagtgagacatttctaagcggtacatctaggtaaattatggctgtgttagaagacagtgcacagttattggatttcgggtttcgggtgaacaatgtcctgaaagttgaagagttggcttatagtgcttttcattatttgatagatgattaactcagagaggttaagcacttgtctaagatctcacatttattacactgtggagctcggatttgaatcccgctgcaaacttagttgtcactgtgacctttgaacaaaacaaaattgaatatgctgcaaaacatccacagagcctcaaagcgagctcggaacctgaaacggcccgcctgagacctccttgaaacggtgattctgattcatcagggctgtggctgaaggacctgagagtctgcatttctaacgggctcccacgtgatgctgctgctggtccac

SEQ ID NO: 241625 - DNA, 605 bp, Homo sapiens
ttcctctgggacctaaaaatctctttcatgacatttctggggtcatttggtttccaaagactcaagcacaaggatgaggacaattccactgtccctattgtccagtgagcagagaacttccagacaaaatggtcttgcggctctctagggacagatagaactaaggtcacyatgagagtgagacatttctaagcggtacatctaggtaaattatggctgtgttagaagacagtgcacagttattggatttcgggtttcgggtgaacaatgtcctgaaagttgaagagttggcttatagtgcttttcattatttgatagatgattaactcagagaggttaagcacttgtctaagatctcacatttattacactgtggagctcggatttgaatcccgctgcaaacttagttgtcactgtgacctttgaacaaaacaaaattgaatatgctgcaaaacatccacagagcctcaaagcgagctcggaacctgaaacggcccgcctgagacctccttgaaacggtgattctgattcatcagggctgtggctgaaggacctgagagtctgcatttctaacgggctcccacgtgatgctgctgctggtccac

SEQ ID NO: 241626 - DNA, 605 bp, Homo sapiens
ttcctctgggacctaaaaatctctttcatgacatttctggggtcatttggtttccaaagactcaagcacaaggatgaggacaattccactgtccctattgtccagtgagcagagaacttccagacaaaatggtcttgcggctctctagggacagatagaactaaggtcactatgagagtgagacatttctaagcrgtacatctaggtaaattatggctgtgttagaagacagtgcacagttattggatttcgggtttcgggtgaacaatgtcctgaaagttgaagagttggcttatagtgcttttcattatttgatagatgattaactcagagaggttaagcacttgtctaagatctcacatttattacactgtggagctcggatttgaatcccgctgcaaacttagttgtcactgtgacctttgaacaaaacaaaattgaatatgctgcaaaacatccacagagcctcaaagcgagctcggaacctgaaacggcccgcctgagacctccttgaaacggtgattctgattcatcagggctgtggctgaaggacctgagagtctgcatttctaacgggctcccacgtgatgctgctgctggtccac

SEQ ID NO: 241627 - DNA, 425 bp, Homo sapiens
gaattctctgccaccaggagtgttctactggctgcacaggcttcagggcaaacaggctgcttagtgtttcacagaaggagtgtgggatccaggtcccacttccacactattgcacacagcatgctgtgctcgatgcacagactcaggacatcagtggttctgagtgtggtcccgagcctggcagtggcagcagcagcagcagcagtgcctggatgttggcagtgcagttgtcaggctccctctgccccagacctgctgaaacagaagctctgcaggtgggcccagcagcctgtgtctaacaagccctycggatcattctcgagtttgagaaccactacactgtgggattcctcatctgttttacataaaacacaactgggttttcagaaatttaaggccaccatctcaggcagatttctgtcccc

SEQ ID NO: 241628 - DNA, 596 bp, Homo sapiens
caggctgtccaccgcagaccctgtttcccagacccccttgtcacctggctccccactggctttgtccagagggagcctggagggtgggcaggtggagaaccaggctacttctccctcactgttcctgccctggggacatctccagcggggtctgagtttccccrggctccagttcccgcgggatagacctccatggttccaccttccactagggaccccagcaacgagaccccttcatcccaccagcccaggagcggtagtggcttcctgctctcactaatcttggggtgttcctgctggcttctccactttgccatcacctcgttaaattccatctctttagatactcaagtcctggttttccctgaataatcacagtttgtcagctctgaactaagccctcaccagcatttctcgagatagccctcagagactcttgttgtacagctgaggaccctgaagctcaaagatgcacagggattggtttagggtgactcggctggtgagtagttcagccggaattcagacctaggcctgtctagagcatacctgggcttctactcactcctctagttgcttctgtgagtttccgtttc

SEQ ID NO: 241629 - DNA, 560 bp, Homo sapiens
tactaattgcctttgtcaaccacaaatamataaaatattccaatctatgcaccagacaaagacactaagtacaagaagcatgcttattataataacttttctttgaccaactgtttttcacggggctttttctcagtgagtttaagccagggcctaactaccttcagctgcaagccaaaaggtcttaagtgtctggttctagttcttcttcaggtttcaaagagtcagtgtcctttaaatatgaaagaaacaacctggaccagccctgctcacaaagcaaaactatcccacatggtggtgcctcctgttctatgaagcatcctctctctccagtcatctctgaagagcattgatttttgcccctcgttttctctgcctttcgttaattgctggtggtcaaatcattcgtctcagttggtttcattcagcttcttcagcccgatcctgagtaaattgtggtggttgggacagtgtgctctgagctgtgctggaatgacagttctttagaacagcagaagggtggaatggcactgatatggaacagtgctcctgagggatgt

SEQ ID NO: 241630 - DNA, 560 bp, Homo sapiens
tactaattgcctttgtcaaccacaaataaataaaatattccaatctatgcaccagacaaagacactaagtacaagaagcatgcttattataataacttttctttgaccaactgtttttcacggggctttttctcagtgagtttaagccagggcctaactaccttcagctgcaagccaaaaggtcttaagtgtctggttctagttcttcttcaggtttcaaagagtcagtgtcctttaaatatgaaagaaacaacctggaccagccckgctcacaaagcaaaactatcccacatggtggtgcctcctgttctatgaagcatcctctctctccagtcatctctgaagagcattgatttttgcccctcgttttctctgcctttcgttaattgctggtggtcaaatcattcgtctcagttggtttcattcagcttcttcagcccgatcctgagtaaattgtggtggttgggacagtgtgctctgagctgtgctggaatgacagttctttagaacagcagaagggtggaatggcactgatatggaacagtgctcctgagggatgt

SEQ ID NO: 241631 - DNA, 545 bp, Homo sapiens
agtggacaggggagattttatcgaactataagttgtggatgctgcctgagaactttggactctttgtgagtagggaccaccctcaggtgagaagagttaccatattgaccaagacagttgatcttgatcaacaycagagatattctttgttttataccttgaggcagagaagactatgtatggaacacgtgatcaacttggttgttttttagtattcccttgtacaatttcgactgtaaattatgtgaaattctactagcctgagatgtgtatgattactagccacttagatcccttaaaaatgaggggttaggtgacagctggtaagctactaagacctacaggggtaaaggaatttagaatggataacaaaggacagagatggaaatttggaatggttaggagaagggagagatggttacccgttgcagccccaaagcaaagtgtagtaatggggtatgttgttcatcctactgacctctctttaaagtttccttttatgaagagagcgttaaggggaaaatggaggaactactttaaaaact

SEQ ID NO: 241632 - DNA, 374 bp, Homo sapiens
tgagaactagagaggagggttgaccagcaggagtcccggtgggagagtaaaactgggtctgtcatatatggaaggctactcaagctaaaacatctggagtggaaggctcattgcaggtggtgagcaataagaataaaatgtttgctgaattcttgtgtaagacatctctacatgatttgggatcttgatacttctgggagcctcagatatttacctcctgatatcaggamatatttaaactgcttgatgtcttcattgagtggctttggctaagaggccaaaactcaaatgttcttcattaatgccagagccagatgtcatccattatgatgaccttgccagtcttctggaccctgggaccatactagctggca

SEQ ID NO: 241633 - DNA, 515 bp, Homo sapiens
acactcataaaatctctgcctattacaaaccattctctccatcaatggaaataagtaatcatttcaaatttctcctttgagggtattgtgaaaatgtacatctgcttgcctgctactttgcccagctgaccattaatagacttgagttttcttccaatctatcatgatatgaaaggtcatcaaccctgaaactttcaaaagcagggacttcctggcaagagatttgttggtgggaaaattgaaaaaaccaacatgtactctgacattctacagtggcatggacataatacaaatttactcttacttttcataattttattccataaaattaccgttgttttgtaatrgtgacccagatggtaggcattttgcatagaaagaggatggaaacatcttctgataagatgtgaagcaagccaagacctcattttctttccttttatggaattgtggctatagacatattttccctctctctttcaaggtgcggaaggctccttgaaggctgagtgaag

SEQ ID NO: 241634 - DNA, 597 bp, Homo sapiens
gattctgctctttgatgaaatgcagcttctttcaattcactcattcatttgaccaacacaggcacctaccacatgccaggcattgactggggttgtgatgatgaataaatcagtcaggatgtcatagactgytgaggaaaattgaggccaactttgtctgaatttgataagtgctaggatggcagcaggaacagagtgttgtagcagaaattcttcctgggggcgaaggaagggggctcagagaaagcctccctgagggagtagtgttaggttagaacttgctgagaaaatctatcacgtgtcctcagcacttgccatcctcactaaactcccattctggaaactgcccagaccactggcccaaagatcttttctttttttctggaaacttccttccctgcaagtcctctcctggattgcagattggatgagagggcagtttttgctgaatgaaggctcgttttttatttttattttttccctttgatgtaggtgtctcaggtccatccagtctgcaggaccagctgtggagaagccccatccttaaaattccccagtgccttctccacccaagcaacagtgctctcgggataacac

SEQ ID NO: 241635 - DNA, 507 bp, Homo sapiens
taaacatggttggaggccgggcgcggtggctcatgcctgtaatctcagcactttgggaggctgaggtgggcggatcacttgaggtcaggagtttgagaccagcctggccaacatggtgaaaccccatctctactaaaaatacaaaaattagttggccatggcggygtgtgcctgtaatcccagctactagggaggctgaggcaggagaatcacttgaacccaggaggtggaggttgcagtgagctgagatcttgccactgcattccagcctgggcaacagagtcataaaaaaaaaaagtgggggttggggggttggcagtggccttcacacacagcagtctctgcctttaataatggtttaaatcatgtgttagatctaggccctttggtgagagccaggttgaacacccctgaagcatttgctctttgatctatggcctcctattcctttgaactttcccagaaagcagggtgggggtggggatggggaacactaacccagaattc

SEQ ID NO: 241636 - DNA, 506 bp, Homo sapiens
taaacatggttggaggccgggcgcggtggctcatgcctgtaatctcagcactttgggaggctgaggtgggcggatcacttgaggtcaggagtttgagaccagcctggccaacatggtgaaaccccatctctactaaaaatacaaaaattagttggccatggcggtgtgtgcctgtaatcccagctactagggaggctgaggcaggagaatcacttgaacccaggaggtggaggttgcagtgagctgagatcttgccactgcattccagcctgggcaacagagtcataaaaaaaaaaagtgggggttggggggttggcagtggccttcacacacagcagtctctgcctttaataatggtttaaatcatgtgttagatctaggccctttggtgagagccaggttgaacacccctgaagcatttgctctttgayctatggcctcctattcctttgaactttcccagaaagcagggtgggggtggggatggggaacactaacccagaatt

SEQ ID NO: 241637 - DNA, 346 bp, Homo sapiens
caccctttctgtggaaatacagcagatggtgttgcttgaaaataccacgggtatctggttaatcttgcggctcttttcccatttcctcagcacccgctgcctcctgcaaggtacggaggaggggcgggtgtaggtcgccacgctgcygcttagcccagaccccttctgtgtgctccttcaagggcttctgcttctaacagtcagcctctttctcaaaggcctgccctcaggccactggagcctgcttgaacctgcaggcctggagggccgctgaaaaggcctgggattcaccacccgcctcctccccacggcaaccatcctaggtgaacagtgagggagatgacct

SEQ ID NO: 241638 - DNA, 367 bp, Homo sapiens
ctcttcattttgatagacgggaataggttaagggaagatcatacccagtgctgagtggctgaatgtcctccactgggcagccatgtcctgagggagaygcagagaagaccagcaaggcctctctggcctcaggggtgctggcagaacagaacttcccaaccaagagtctagcattgctcagggcaagggtcagcctctctcacttcttcacactctctggcttcttgaatattcatccatctgtatctaataaggctcttctcaatgacgggagaagaaggcagctaaagagagcttttatttctcttggcatcgtcaccttaagcatttgcttatactgaaactgtaggtagaaactaatgcagta

SEQ ID NO: 241639 - DNA, 398 bp, Homo sapiens
gacgggaataggttaagggaagatcatacccagtgctgagtggctgaatgtcctccactgggcagccatgtcctgagggagacgcagagaagaccagcaaggcctctctggcctcaggggtgctggcagaacagaacttcccaaccaagagtctagcattgctcagggcaagggtcagcctctctcacttcttcacactctctggcttcttgaatattcatccatctgtatctaataaggctcttctcaatgacgggagaagaaggcagctaaagagagmttttatttctcttggcatcgtcaccttaagcatttgcttatactgaaactgtaggtagaaactaatgcagtatgtttttttgtgtgttgttttttgtttgtttgttttgtttttttca

SEQ ID NO: 241640 - DNA, 614 bp, Homo sapiens
ggtttagcttcttctgaccctctatttaacacacaccccctacctcctcccttctcccttttctacccccttatctccaggctgtctcagtgtcacctcctcyggccagttccttctggacaccttgtctgtccttgagctatcatgtaatccttccgggtattgcctcagctagcgagagcccagtcctggcagaagccaccctgcaaataattcactgtgaaagctgggcttgttctcttcaaagggtaaagtgggctaacgagaagggacgagagcgtcccctgccccacctccactccctcacaagttctctttggaaactacccttccccttcctgggatgacctctgtccttaatgaaatgggagaaacagaatgtcaagacttgtttcctttccaaataaaagaggaacgcgctgaagtgcattttaaatgctgtctggcaagagtggcgggttgggggaagggaggaggctgacttgcctttctttgctagatatctgggcacttggcccacacgctctttctccgtgagatttgaagggcaatgtgtcattctgggagaggtctgcagtttctccaaatataaactttgctgttcttagggtcat

SEQ ID NO: 241641 - DNA, 614 bp, Homo sapiens
ggtttagcttcttctgaccctctatttaacacacaccccctacctcctcccttctcccttttctacccccttatctccaggctgtctcagtgtcacctcctccgrccagttccttctggacaccttgtctgtccttgagctatcatgtaatccttccgggtattgcctcagctagcgagagcccagtcctggcagaagccaccctgcaaataattcactgtgaaagctgggcttgttctcttcaaagggtaaagtgggctaacgagaagggacgagagcgtcccctgccccacctccactccctcacaagttctctttggaaactacccttccccttcctgggatgacctctgtccttaatgaaatgggagaaacagaatgtcaagacttgtttcctttccaaataaaagaggaacgcgctgaagtgcattttaaatgctgtctggcaagagtggcgggttgggggaagggaggaggctgacttgcctttctttgctagatatctgggcacttggcccacacgctctttctccgtgagatttgaagggcaatgtgtcattctgggagaggtctgcagtttctccaaatataaactttgctgttcttagggtcat

SEQ ID NO: 241642 - DNA, 614 bp, Homo sapiens
ggtttagcttcttctgaccctctatttaacacacaccccctacctcctcccttctcccttttctacccccttatctccaggctgtctcagtgtcacctcctccggccagttccttctggacaccttgtctgtccttgagctatcatgtaatccttccgggtattgcctcagctagcgagagcccagtcctggcagaagccaccctgcaaataattcactgtgaaagctgggcttgttctcttcaaagggtaaagtgggctaacgagaagggacgagagcgtcccctgccccacctccactccctcacaagttctctttggaaactacccttccccttcctgggatgacctctgtccttaatgaaatgggagaaacagaatgtcaagacttgtttcctttccaaataaaagaggaacgcgctgaagtgcattttaaatgctgtctggcaagagtggcgkgttgggggaagggaggaggctgacttgcctttctttgctagatatctgggcacttggcccacacgctctttctccgtgagatttgaagggcaatgtgtcattctgggagaggtctgcagtttctccaaatataaactttgctgttcttagggtcat

SEQ ID NO: 241643 - DNA, 481 bp, Homo sapiens
caggctgcagccctcccctgctggctgggagcccaccaaggtgggcagtataatttagcttcccctcccaactggctccttataagagaccttgtgttccctctgctagacacaggattctgatgttagctctgggtcagttctttgatgataacattacccaggacaccctcaaatgggaggctacctctttcaccattggtcagtcccacttccagtcactaaaggaaagtacgccttttccttctttagtctgcgacctaagagctaagacatggctcctcttgttcctccmtcccccttaaactagttttgcagtgactcttctaaagcatatgacccagagctaaattttacaaccctgtgaggaatttcagggtatatgtgatgtgcagaaaggcaatttgcaggcatgtgccaaagtctagcttggcccagctgtatgcattctactcatttcccagtgtggccagcgagtttg

SEQ ID NO: 241644 - DNA, 565 bp, Homo sapiens
ctagtcatctctgaagaatcttgactaaagtcctcaaacactagaccaccaatggcagctgatgacattcacctcacactgactgaacagcttctgcaggtgaaaagcagaccacgccgtgcagtgcctgggtgcaggtgttatagactgagtcccctcctcctcccatgggctcctgtctttcctccagagacaggttctcactttgaagcttagtgattatactatgcagaaatgaccccgrgaattattccaatttttggacactcggtgtgtgccccacagaccagctgcatgagcatcgcctgggagcttattggaaatacaggtcaggccccatctcagaccagctgaatcagaatctgcatcttaacaagattcctaggttattcaggcacacataaagtttgagaggcactgtgattgaaagcagccccatattccaggatgtacactagacaagatgttaatagatatgggtggagttcctcattaaactcttgccagatctgagcacttggcaaaactaataaggaaatagatatttctcagaactaaataacaa

SEQ ID NO: 241645 - DNA, 585 bp, Homo sapiens
aatatcatcttgtactttgccctcatagaatttgccttggttcatactatataccagkggtccctaaccccctgttagcaatggagcagcacagcaggaggtgagtggcaggtgagccagcattaacacctgagctccacctcctgtcagatcagcagcagcattagattctcgtaggagcaccagtcctattgtaaactgcgcatgcgagctatccaggttgtgcactccttatgagagtctaactaaggcttgattatctgaggcgggacaatttcatcctgaaatcatttcccctacccatggaaaaattgtcttccatgaaaccagtccctggtgcaaaaagtttggggaccactactatgtacctatttatgtgattatttttagtgtattttcccactagggttacgtcatacaatgcatgagggcaggtgccagggaatatttgtttggctcatcacttttagacccagcactctgccagcacctggcatatgatcttgtgtggagttgtgtgttttcaatgactgcattaatgaacaagattcagctcaagcttcacttctataactcttttctcca

SEQ ID NO: 241646 - DNA, 578 bp, Homo sapiens
cctcatagaatttgccttggttcatactatataccaggggtccctaaccccctgttagcaatggagcagcacagcaggaggtgagtggcaggtgagccagcattaacacctgagctccacctcctgtcagatcagcagcagcattagattctcgtaggagcaccagtcctattgtaaactgcgcatgcgagstatccaggttgtgcactccttatgagagtctaactaaggcttgattatctgaggcgggacaatttcatcctgaaatcatttcccctacccatggaaaaattgtcttccatgaaaccagtccctggtgcaaaaagtttggggaccactactatgtacctatttatgtgattatttttagtgtattttcccactagggttacgtcatacaatgcatgagggcaggtgccagggaatatttgtttggctcatcacttttagacccagcactctgccagcacctggcatatgatcttgtgtggagttgtgtgttttcaatgactgcattaatgaacaagattcagctcaagcttcacttctataactcttttctccaccacccttgctgc

SEQ ID NO: 241647 - DNA, 305 bp, Homo sapiens
gtaattgtccatttggttaactacattcccytctagactgtgacctcaggacctgtgtatttcttgactaccactgtatcttcagaacctagcatagaatttgtcacatagtaggtggtcaaaaaaatagttgttgactcagtgaattgatacatgcttaacagttgtatgttgttgaaagaggaaacttactagactatgtagcattccagtcctaaatgctttcctcatttagccaaatgttccaactcacatggccagggtcaattaaaattagagaattaattaagaacccacttgaatag

SEQ ID NO: 241648 - DNA, 590 bp, Homo sapiens
aattgaagagtataactaggctggtagcctggctggaaaactatttcacctgtgctctctaaaagtactctagggattattctagtacctaaagaggtgtttgatagcatcctcaaagttataccctgtacaacatgaccaagatgactttggcctttaaaatttaaaattaaagtttagattgccttctcccaaatcctccagtacaaaacatctaaaaaggctagataaaatgygttctaattatatctttagaaaaattgaccgagctgggaagagtaaggatggccttaaaggccttctctgccctcctaaattaaaagaaaaagcaggtctttagagaggtaaacgtgtatcgaagctggcacctgtcctgaagttgtttgctaatccccaggttaccaacatttgttttaacagctatgactgctaaggggacagaagacaaaggattagggcccattaaggtgtgtgggtgggttgggagcgtcacagttaatatctagtatagctaagacctagaaaggatacactctcagtaagaaaataacataacttttacagagaaattcaactaggaaagatgcctg

SEQ ID NO: 241649 - DNA, 543 bp, Homo sapiens
atagagcatgcagccttgggtttaaagaaagggggtggttgggcaggtacaactcaggagacccaagttgaattcctgcatctgccactactagttttatgacattgggcaacttatttaataaattaattaattttgaacttctattttttaaatcatgagaaaactcatgtctaccttgcctgcttctcaagatttttgtatcaaatgagaaattgtctatgaaagaactctgcaagctacaaaacctgggcacaagtaagaygctgtgaatgagaagggtccattctgcaaaggggcaggcactggggccgtggccttcctcggcctgcaggggcaggcagagaaggggttgctcttggccagagggaatacgtgggcagatcctggcaatgggcactggcaacaaaactagggttgctggcatttatgagcatccatctcaggaatgacataattgggctgggaaaagtccaggactaagtgctgaagggaaaggagcacgttctgggagagaatacattgatgggataagaactcccc

SEQ ID NO: 241650 - DNA, 543 bp, Homo sapiens
atagagcatgcagccttgggtttaaagaaagggggtggttgggcaggtacaactcaggagacccaagttgaattcctgcatctgccactactagttttatgacattgggcaacttatttaataaattaattaattttgaacttctattttttaaatcatgagaaaactcatgtctaccttgcctgcttctcaagatttttgtatcaaatgagaaattgtctatgaaagaactctgcaagctacaaaacctgggcacaagtaagatgctgtgartgagaagggtccattctgcaaaggggcaggcactggggccgtggccttcctcggcctgcaggggcaggcagagaaggggttgctcttggccagagggaatacgtgggcagatcctggcaatgggcactggcaacaaaactagggttgctggcatttatgagcatccatctcaggaatgacataattgggctgggaaaagtccaggactaagtgctgaagggaaaggagcacgttctgggagagaatacattgatgggataagaactcccc

SEQ ID NO: 241651 - DNA, 582 bp, Homo sapiens
cagttgtatacctttttcattaacattttatcttaagaatttttctagaaatatatataaaatttttctctaaaatgacttacaattatttaatttctttgttttcagggagttttagtttatgtccagatttcttattagaaataattttataagaaaatattctgatacataaatcacgtctttgatttttccctaaaatgcagaagtatgataaaggtgaggcacacatttttaaattgccttggcaacagggcccatgtctccccattcccctctctagccccctgagttgtagtgccttgaacagactgaccactccaactgaatgaaagaaagagggataaatacatgtttatctaaaaatattgttttttcctttaaataaactagtgaatatttccacagtgtcctaacagwctggtatataaaatttaaaccctcctcctagttttcctattaatccactattatctgtgttctttctagttcagcctcttcaatagtactttttcttgggaagaaacacattgcaggtgcatgttggttgctctagtccctgggaagcagcacaacataatg

SEQ ID NO: 241652 - DNA, 549 bp, Homo sapiens
gtccagacagcttttatggaagcataagagttggcctgaggctgggagcatgggcttatgcctgtaatcccagagctttggaaggctgaggcaggaagatcgcctgagaccaggagttctagaccagcctgggcaacatggcaagacccctgtctctacaaaagtaaaaattagctgggcatgatggcacacacctgtcgtccctgctactttgagcccaggtggttgaggctgcaatgagccatgtttgtgccattgcactgcagcctgggtgacaaagcaagaccctgcstcaaaaaaaaaaaaaaaaaaaaaaaagttggcctgagagttaagaacaatttatcattcctgcctgaagaccatttgtttgctagagagtacccaacaggcaaaacagaccaaagagaagtctaggttagggaatcttgtgggtgtggctttcatctgctttgttggctaagtaacaaagtcgaggtcatgagttagacccaggaacaaaccaggtaatcttttaatccattccttccagttttgctgtttcccatt

SEQ ID NO: 241653 - DNA, 570 bp, Homo sapiens
gtggatattttagaaataaattcctattcccagtcccctagatttatagggataaaaacgcctaacrtgctaagaaatttaaagtgaaagaaagaatctttgtcctcatagccaacatactttccccatcatgtcacattgcgctattctggctttatctgccaaccattcagtagtctatcacagacaagattgctgctcactgcgttccattcagtcgagcatttgaactgcttattatcttggctaccaatgtgtagggtgcctgtttttgtcttgaaccagatataccctatcctgcacacttgattgctgaaaacttccagagacctctatttgcaacagactcacatttgcatgtgtaattccttactggtttgtcaaacaaggaacaggataaatatactgattgataaaaattattctaaaacagaaagcaaagactcctgagtgaggaaagtttattaagtgaaaattgcaactgacattcaatgattttaataaaatgactctcttcattccaagtcttcacattttgtggtattctctaatcttccaaaaattttttta

SEQ ID NO: 241654 - DNA, 412 bp, Homo sapiens
taaagttagtcattctatttctgtacataatattagtaataataggtactatgtttcccaatcaatggagataataaaaataagttcctaacatcaatgarttattgtaaagataaatgagaaaacattagatatttgttctgaagtctcctggggaaaatgattctacataaatagaaagtattatcccattattcaaataatataaatgatttaatacttcataccaaataaaaatcaagtgtctccatagtattactgtgaaactgcattggtaggaaaagcaagctttgaacttgaatatcctgaattttctacttgtaatatttagatgactttaaggaatgtgacttaggatatttattatttttactgtgaatcttaatgagataaatattctaggcatggttgc

SEQ ID NO: 241655 - DNA, 437 bp, Homo sapiens
gaattctaaaaataaaccctagtattgttgcccaatgctacaaatccatataaaatacttttsagattgtctgtagagttaatacatttacttttctaaattttgaaagaattgtagttcctctgagaaaatataaataatgccaacaaaaattgttcaaaaatcagctttcagaaagttctggttttagatatacctcaaaaaataaactaatcaaaaggcatgtgaatttttttctttcaaaaattgctattatttcaaacttgcttcctttcttccatgttgcagtctaccagagctcagctggagactaagttagagtattcagagattttgtctcttctggcagtgtcccaagcagttatttacagagagcatgccttgggcagtagtagatggagactctttcacaaactctcattccagattacagtact

SEQ ID NO: 241656 - DNA, 613 bp, Homo sapiens
cttggggaccccaatcttggatctacaagatctctcagaccagaagccctgggaggtaaatccctccatccagaatcttgtctttcatcgattcagtgtgaactacttctcaaatttctacatttctrgtcccccttaaacactgacattccagtcagtctgatgttaaattctgctttcccctttccaccttgtgttacctaccaccacagcctggcccacatttttctacccctccctccttctgtcattaacaaaactccccagacccttgcaaagcccctacagcagaattatcccaagagagaaacagtggatttaataagcttccccttagatggccccaaatcccttccagttgattaggggaaaaaacaactacacacaggacagtttcctgatgcgggaggtgagagagagaaagaataaagaaagttcctgaagtcctgggcctcagggaccaaattaagaaagcagcaccacttattcaaaatcagatgaatgtcagtgggatgtttgtcaaacaaacttgtcattatttgtcacaatttgaggaagtatcagtcaatagtcacactcgagcgcataacagagttatttatagctgccagtc

SEQ ID NO: 241657 - DNA, 600 bp, Homo sapiens
actcgcttaatcttcccactgttttctgatttctcctttagtgaggtcataggaataattttcttcatgtgactcctcttcccagcctcaacatgtagtctctgggtatccagtaggtgtttgacttctgtaaagacttccagagtgagttactctggctggttcaatgcactgctctttctctgggtctttccctacactcactaaggtccccaaaggcagkaaccattccctgttcttctgtctcctctcttgttgatgggtttatggccaaaagcctgagcttattgtctacacaagcaatgtagaaatggtttatggcttgacttgggtctttatccctgaaagtaattctctgatggtaaatttgtacttttatacttgtcatgaatcgaagggccttcaggggaatgtaatttttatttaaaaccatctagtagatgttggcaaatacaaaaataggagagtgggttgagccagtctgcttgggtgaatgtctgcttggaaatcgcatactaggatatgctgtattgagtaataaagtaaaggctgtctggagtcagatagatgtggaggtgcaagaagagggtgtacaaatgt

SEQ ID NO: 241658 - DNA, 605 bp, Homo sapiens
gcccacttctgaaggttgaactcgcttaatcttcccactgttttctgatttctcctttagtgaggtcataggaataattttcttcatgtgactcctcttcccagcctcaacatgtagtctctgggtatccagtaggtgtttgacttctgtaaagacttccagagtgagttactctggctggttcaatgcactgctctttctctgggtctttccctacactcactaaggtccccaaaggcaggaaccattccctgttcttctgtctccyctcttgttgatgggtttatggccaaaagcctgagcttattgtctacacaagcaatgtagaaatggtttatggcttgacttgggtctttatccctgaaagtaattctctgatggtaaatttgtacttttatacttgtcatgaatcgaagggccttcaggggaatgtaatttttatttaaaaccatctagtagatgttggcaaatacaaaaataggagagtgggttgagccagtctgcttgggtgaatgtctgcttggaaatcgcatactaggatatgctgtattgagtaataaagtaaaggctgtctggagtcagatagatgtggaggtgcaagaaga

SEQ ID NO: 241659 - DNA, 600 bp, Homo sapiens
actcgcttaatcttcccactgttttctgatttctcctttagtgaggtcataggaataattttcttcatgtgactcctcttcccagcctcaacatgtagtctctgggtatccagtaggtgtttgacttctgtaaagacttccagagtgagttactctggctggttcaatgcactgctctttctctgggtctttccctacactcactaaggtccccaaaggcaggaaccattccctgttcttctgtctcctctcttgttgatgggtttatggccaaaagcctgagcttattgtctacacaagcaatgtagaaatggtttatggcttgacttgggtctttatccctgaaagtaattctctgatggtaaatttgtacttttatacttgtcatgaatygaagggccttcaggggaatgtaatttttatttaaaaccatctagtagatgttggcaaatacaaaaataggagagtgggttgagccagtctgcttgggtgaatgtctgcttggaaatcgcatactaggatatgctgtattgagtaataaagtaaaggctgtctggagtcagatagatgtggaggtgcaagaagagggtgtacaaatgt

SEQ ID NO: 241660 - DNA, 489 bp, Homo sapiens
ccttatttcaagctcctgattagttgtctgtttctgttggtctcatggacctcactacctgttttggatggattatccagctctgaagggctgtcagactctcctcccagaggacatccatctaagaacccctgttcttcatctcagcacactttctcttaatactcttcttactgaatcaaagagctgggagcttccacctcagtgtggaagagccataggcgccagactccaacccatgagcgcagctacaggggrctgcagcctggaatgccctaggggcagagcctacctcttgcaccaggttgcaggacatggagtcaaaagagatggttttggagctttaagatttaatgactgccctgttgggtttcagacttgtgtggggcttattgtccctttcttttggccaattttccccttttggaatgggaatgatacccattccctgcaccatcattatatcttgggagtaaatgacttgttttt

SEQ ID NO: 241661 - DNA, 489 bp, Homo sapiens
ccttatttcaagctcctgattagttgtctgtttctgttggtctcatggacctcactacctgttttggatggattatccagctctgaagggctgtcagactctcctcccagaggacatccatctaagaacccctgttcttcatctcagcacactttctcttaatactcttcttactgaatcaaagagctgggagcttccacctcagtgtggaagagccataggcgccagactccaacccatgagcgcagctacagggggctgcagcctggaatgccctaggggcagagcctacctcttgcaccaggttgcaggacatggagtcaaaagagatggttttggagctttaagatttaatgactgccctsttgggtttcagacttgtgtggggcttattgtccctttcttttggccaattttccccttttggaatgggaatgatacccattccctgcaccatcattatatcttgggagtaaatgacttgttttt

SEQ ID NO: 241662 - DNA, 489 bp, Homo sapiens
ccttatttcaagctcctgattagttgtctgtttctgttggtctcatggacctcactacctgttttggatggattatccagctctgaagggctgtcagactctcctcccagaggacatccatctaagaacccctgttcttcatctcagcacactttctcttaatactcttcttactgaatcaaagagctgggagcttccacctcagtgtggaagagccataggcgccagactccaacccatgagcgcagctacagggggctgcagcctggaatgccctaggggcagagcctacctcttgcaccaggttgcaggacatggagtcaaaagagatggttttggagctttaagatttaatgactgccctgttgggtttcagacttgtgtggggcttattgtccctttcttttggccaattttccccttttggaatgggaatgatacccawtccctgcaccatcattatatcttgggagtaaatgacttgttttt

SEQ ID NO: 241663 - DNA, 489 bp, Homo sapiens
ccttatttcaagctcctgattagttgtctgtttctgttggtctcatggacctcactacctgttttggatggattatccagctctgaagggctgtcagactctcctcccagaggacatccatctaagaacccctgttcttcatctcagcacactttctcttaatactcttcttactgaatcaaagagctgggagcttccacctcagtgtggaagagccataggcgccagactccaacccatgagcgcagctacagggggctgcagcctggaatgccctaggggcagagcctacctcttgcaccaggttgcaggacatggagtcaaaagagatggttttggagctttaagatttaatgactgccctgttgggtttcagacttgtgtggggcttattgtccctttcttttggccaattttccccttttggaatgggaatgatacccattccctrcaccatcattatatcttgggagtaaatgacttgttttt

SEQ ID NO: 241664 - DNA, 579 bp, Homo sapiens
ccaagaggacccctggtgatccccacctcctgattttcatacctgtatggactcytcccacattggacaaggggtggtctgtgtgaccaataaaatatggcaaaaatgattgcatgtcacttccaagatgaggttatgaaagacactgtagcttttgtcttggtcactttccttcattctctttctctcttggatcatttgattctggggaactgagataccgtgtcatgagcagccttgtggtaggccctgtgctaagtgctgggtatacagggagtgcaccataattgtgcctgtgaatagccactgctctccagcctgggcaacatagtgagactctgtctctaaaaatttttttttaaattaaaaaaaatttttaaaaatagagaaaaaggagatgttgacaagataaataatgtgggaaacttaataggcagaagtatctgaaattcaactagaagaaggaacagaacttgtattgatattctggggccatacatagctccaagaagaattgctgagtagaaagatacctgctagaggagtaagttgctttatgatcaactcatgtattcattt

SEQ ID NO: 241665 - DNA, 579 bp, Homo sapiens
ccaagaggacccctggtgatccccacctcctgattttcatacctgtatggactcttcccacattggacaaggggtggtctgtgtgaccaataaaatatggcaaaaatgattgcatgtcacttccaagatgaggttatgaaagacactgtagcttttgtcttggtcactttccttcattctctttctctcttggatcatttgattctggggaactgagatrccgtgtcatgagcagccttgtggtaggccctgtgctaagtgctgggtatacagggagtgcaccataattgtgcctgtgaatagccactgctctccagcctgggcaacatagtgagactctgtctctaaaaatttttttttaaattaaaaaaaatttttaaaaatagagaaaaaggagatgttgacaagataaataatgtgggaaacttaataggcagaagtatctgaaattcaactagaagaaggaacagaacttgtattgatattctggggccatacatagctccaagaagaattgctgagtagaaagatacctgctagaggagtaagttgctttatgatcaactcatgtattcattt

SEQ ID NO: 241666 - DNA, 579 bp, Homo sapiens
ccaagaggacccctggtgatccccacctcctgattttcatacctgtatggactcttcccacattggacaaggggtggtctgtgtgaccaataaaatatggcaaaaatgattgcatgtcacttccaagatgaggttatgaaagacactgtagcttttgtcttggtcactttccttcattctctttctctcttggatcatttgattctggggaactgagataccgtgtcatgagcagccttgtggtaggccctgtgctaagtgctgggtatacagggagtgcaccataattgtgcctgtgaatagccactgctctccagcctgggcaacatagygagactctgtctctaaaaatttttttttaaattaaaaaaaatttttaaaaatagagaaaaaggagatgttgacaagataaataatgtgggaaacttaataggcagaagtatctgaaattcaactagaagaaggaacagaacttgtattgatattctggggccatacatagctccaagaagaattgctgagtagaaagatacctgctagaggagtaagttgctttatgatcaactcatgtattcattt

SEQ ID NO: 241667 - DNA, 579 bp, Homo sapiens
ccaagaggacccctggtgatccccacctcctgattttcatacctgtatggactcttcccacattggacaaggggtggtctgtgtgaccaataaaatatggcaaaaatgattgcatgtcacttccaagatgaggttatgaaagacactgtagcttttgtcttggtcactttccttcattctctttctctcttggatcatttgattctggggaactgagataccgtgtcatgagcagccttgtggtaggccctgtgctaagtgctgggtatacagggagtgcaccataattgtgcctgtgaatagccactgctctccagcctgggcaacatagtgagactctgtctctaaaaatttttttttaaattaaaaaaaatttttaaaaatagagaaaaaggagatgttgacaagataaataaygtgggaaacttaataggcagaagtatctgaaattcaactagaagaaggaacagaacttgtattgatattctggggccatacatagctccaagaagaattgctgagtagaaagatacctgctagaggagtaagttgctttatgatcaactcatgtattcattt

SEQ ID NO: 241668 - DNA, 526 bp, Homo sapiens
tttatagtaatatagtgaagccccatgaactgcctgctcatactcaagcccggagtaatatctgtaacttttgtttgcctgtatgcccctcctctctcccctcctcttgcctcccccatcaagagtagccaggattcaagtcatgcattttatcattctcttacttatttttgttttaaatacatgtatgcatacaatctacttaatcaaggtaaaaaaaaaataaaataaacttttttactatttgcccagttgtgcctgccctggaagtctaagaaaaggataatataaaagattcagtagaagcctataaataattgcattatctagagaaacaccaattgtttttgagggagtaagaggaaaccagtgtttcacagagaaattagaaatagctaacttagtttccttttggtctaaaaaatcaacgatctttcttttccacttatctttaatttwtttttttttttttgtcacaccaagggtttgaacccagttgttgaattgcactgtagaatggaccaag

SEQ ID NO: 241669 - DNA, 460 bp, Homo sapiens
tagctgggactataggcgtgtgccaccacacccagctagtttttgtatttttagtagagayggggtttcaccatgttggccaggatggtctgaatctcttgacctcgtgatccgcccacctctgcctcccaaagtgctgggattacaggtgtgagccaccatgtctgacccttctttgaaccaattattttggttggaggttaaaaaggtccacttgagttgcatgcccaggcttgtttcatagaacctgagcttattccctcaacatcagacctcagctaggctaatttgagtcctgctctaaaatttctcaaaccatagctgatgtttctgcagtcacaaagtgacatgccatggccatctcctatgatgtggaggggacttgcccgcagtgagagagaattaggccaactcagtgagagaagctaggtgaaccctgggacaggagacatattagtcc

SEQ ID NO: 241670 - DNA, 460 bp, Homo sapiens
tagctgggactataggcgtgtgccaccacacccagctagtttttgtatttttagtagagacggggtttcaccatgttggccaggatggtctgaatctcttgacctcgtgatccrcccacctctgcctcccaaagtgctgggattacaggtgtgagccaccatgtctgacccttctttgaaccaattattttggttggaggttaaaaaggtccacttgagttgcatgcccaggcttgtttcatagaacctgagcttattccctcaacatcagacctcagctaggctaatttgagtcctgctctaaaatttctcaaaccatagctgatgtttctgcagtcacaaagtgacatgccatggccatctcctatgatgtggaggggacttgcccgcagtgagagagaattaggccaactcagtgagagaagctaggtgaaccctgggacaggagacatattagtcc

SEQ ID NO: 241671 - DNA, 460 bp, Homo sapiens
tagctgggactataggcgtgtgccaccacacccagctagtttttgtatttttagtagagacggggtttcaccatgttggccaggatggtctgaatctcttgacctcgtgatccgcccacctctgcctcccaaagtgctgggattacaggtgtgagcmaccatgtctgacccttctttgaaccaattattttggttggaggttaaaaaggtccacttgagttgcatgcccaggcttgtttcatagaacctgagcttattccctcaacatcagacctcagctaggctaatttgagtcctgctctaaaatttctcaaaccatagctgatgtttctgcagtcacaaagtgacatgccatggccatctcctatgatgtggaggggacttgcccgcagtgagagagaattaggccaactcagtgagagaagctaggtgaaccctgggacaggagacatattagtcc

SEQ ID NO: 241672 - DNA, 562 bp, Homo sapiens
acgactgaccacctcctccaacttcagataccaatcacaagtcccaggttgttttacctgtgcttatgaccaaccactataaatcagggatcccacaaccccctcctctggttccagtaatttgtgagatcgactcacaaaactcagggaaatacttacatttacttacattcattataaaacrtattacaaaggatacggatgaagagatgcatagggtgaggtatgaaggtaaggacgtggagcattcatgccctactgggagctccaccctccaggaacctccacatgttcagctatcaggaagctctatgaaccccagcctcttggatctattacatggacaaccatgtagagatataactggataaaagagtatgatctcatagtaatagacagagtggggaaacccagccaggcctgtccagattcctcctggcctatctgtacagcattccttcctttaaggtataggacaggaccccttctgaaatggaggtcttatgacctacaatcaggcaaagtaggtcacagaatttctttatggaaaggtgggagaaga

SEQ ID NO: 241673 - DNA, 590 bp, Homo sapiens
ttcttgaccattttggaagagagcattagaaacgtcctgttttggtggctgagctgttttttaagactaccatcttttccagagaaggtgagagactttaatttggataagtcttggtccctttttaatcctttagctctttcctttagatctttattcatatatagctaaatgtaaccatttcataattttaacacttcaaaaaattaccttgcccaagtccataaattcattaagtaccctgtgtatcttccaagttatcataggttttaccaattttttttttaccatcgcatacaataggtcagcattgtttcagccctttataatactttgataaccatcttccagatgcctataataacttcttcaccttttgccacccagtcctaaagccaatactacatatgtcaagttttacttayggaaggactccactcccagactaaatttctgctttggttagctattgctgcaaaaatgtcactccaaaactcagggacttaaaacaacacgcttttatccccatggatctgagagttgtctggcaaagggttgatcaggcagtgctgggctggacacagtgaggc

SEQ ID NO: 241674 - DNA, 492 bp, Homo sapiens
tggtgtgatcttggctcactgcaacctctgcctcctaggttcattcaatyggttctcctcctcagccacccgagtagctgggattacaggtgcacgccaccatgcccggctaatctttgtatttttagtaaagatgggattttgccatgttggccaggctggtcttgaactcctgacctcaagtgatctgcccacctgggtctcccaaagtgctgggattacaggcgtgagccactgcacccagccatactatatatttctatatcctgtttatcttttataaatcccaacaatgaaaaagatattctaagctgtagccagtgagatgcttattggaagtaataatacaaaacttataatatgccaaagtgactacagaataattagtatggccccttggtgatggtggaaatgagttttgacaggtgagtatgaaagtagacgtggccagcatatgttaaggatagaattggagctgccaaagatctcctg

SEQ ID NO: 241675 - DNA, 446 bp, Homo sapiens
taagtatttcattttctttgaagtaattgcaagcagtattgcaattatttcagtttgaacttgtttgttgttagtatacagaaataaaattgatttttatgtattgatcttgtatcctgtggcctcaataactgacttatttgtcctagaaaaccttttatagattccttrgggtactgcatgtggataataatttcatctacaaatggaggcagttttatttcttccattccagcctgtatgctctttaattcttttcttgccctattaccactggctagaacttccaataacagtggtgagagcagacatccttaccttgttcctgatcttagagggaaagtgttcaatctttgaacattaggcatggtgctagcttaatggtcatatacgactgggagtagaaatatagaatttgtatagatgctctttatgtggttgaggaa

SEQ ID NO: 241676 - DNA, 446 bp, Homo sapiens
taagtatttcattttctttgaagtaattgcaagcagtattgcaattatttcagtttgaacttgtttgttgttagtatacagaaataaaattgatttttatgtattgatcttgtatcctgtggcctcaataactgacttatttgtcctagaaaaccttttatagattccttagggtactgcatgtggataataatttcatctacaaatggaggcagttttatttcttccattccagcctgtatgctctttaattcttttcttgccctattaccactggctagarcttccaataacagtggtgagagcagacatccttaccttgttcctgatcttagagggaaagtgttcaatctttgaacattaggcatggtgctagcttaatggtcatatacgactgggagtagaaatatagaatttgtatagatgctctttatgtggttgaggaa

SEQ ID NO: 241677 - DNA, 455 bp, Homo sapiens
gatgaatatgtttaccaaacattgaccacttaaatacattgtcatctgagatgggggccacaattatcctcacattaaaaatgagaaacttgcatcatagaaatggtaaagtattttacatgggtcacacaagagacaaaggtagttgttttctaaataacttgcatcacaatatgcacagtaaatatacccagatrcagctgcagaacagagttagctcctttccaaacttcacttcgtaagcctgttttcacatctgttgaacatggcaatctctcatagtgagccagtggcttcttcggttcttaactcagaaaatttctaatatgacttcatactgcaataagttattgtaaaggtaagctgttcaaatacagttactgaccatgatgtctatagcagagcacagtgtagtgtgaaaatctggacttctgtgtggaatatatcaactctat

SEQ ID NO: 241678 - DNA, 574 bp, Homo sapiens
aatggcaaaaccacaattacttttgcaccaacttaatataagacagtttacattttaaaattaccttcagtgtgctttgctagtttttcttcttctatactactaagtcataatatgcctcacacattctcttgagtatctttattttctggtcagaatcattctatagagagaagaaaggcttagagcatccttgcaaccatattatctaaccataaatctctgccccttataactgagggacattatgtaggatgaaacctcaacaagccccgtatactagaaaaagacagtaaytgtcaaggacacctgtttttttgctcgttttatctgcgaacaataacagtgtggtaaccctggatctcatgggtgctaagacacttttcagcctgatgttaattaacaatctcctcaaactaaatgataacaatggagtcctatggacagttcttgactctaataaataaaagctcacaaatctgccttggaaataataccttatggattcgaaaatctaatctgagtagcttaaaaacagagctgcaacactaaggtaaccttaaacacaacacca

SEQ ID NO: 241679 - DNA, 418 bp, Homo sapiens
aacaaaaatggatgaaacctgagtacagtcaaatgcctccgagtcagcagatatgcaaatccaaattgccaaacaaacagtaaaagttgttcaaatttacactggtgagggaaatactgtttaaagaaatgacagtatatggatatatacccatcagggtggtgatgacctcaaattttctgtaacacctttaccagcaataaatggtattagaaaaggatacactcayatattgctggtgcttgtttgcttgttggtttgaaagtcatttggcagcaactattaaaataaaaaacacacagaataagataattaagaggggcagaaagcaagccaagataatgtaatcctgatgacgcaactgcaggtgaaagtgtcaggaagaaagctgtgaaaaacattgcaaaaggatacaaaa

SEQ ID NO: 241680 - DNA, 418 bp, Homo sapiens
aacaaaaatggatgaaacctgagtacagtcaaatgcctccgagtcagcagatatgcaaatccaaattgccaaacaaacagtaaaagttgttcaaatttacactggtgagggaaatactgtttaaagaaatgacagtatatggatatatacccatcagggtggtgatgacctcaaattttctgtaacacctttaccagcaataaatggtattagaaaaggatacactcatatattgctggtgcttgtttgcttgttggtttgaaagtcatttkgcagcaactattaaaataaaaaacacacagaataagataattaagaggggcagaaagcaagccaagataatgtaatcctgatgacgcaactgcaggtgaaagtgtcaggaagaaagctgtgaaaaacattgcaaaaggatacaaaa

SEQ ID NO: 241681 - DNA, 418 bp, Homo sapiens
aacaaaaatggatgaaacctgagtacagtcaaatgcctccgagtcagcagatatgcaaatccaaattgccaaacaaacagtaaaagttgttcaaatttacactggtgagggaaatactgtttaaagaaatgacagtatatggatatatacccatcagggtggtgatgacctcaaattttctgtaacacctttaccagcaataaatggtattagaaaaggatacactcatatattgctggtgcttgtttgcttgttggtttgaaagtcatttggcagcaactattaaawtaaaaaacacacagaataagataattaagaggggcagaaagcaagccaagataatgtaatcctgatgacgcaactgcaggtgaaagtgtcaggaagaaagctgtgaaaaacattgcaaaaggatacaaaa

SEQ ID NO: 241682 - DNA, 571 bp, Homo sapiens
agaacaagtaatttaccaatgaatatctgacatgcacaacagataacatatatttttgttactcagyttgcccatagtgttgagtgaaggtaggtatttaacacttgccaaataggaaatgttcttaatgaaaactaggaattccaatactgtatatatatataccattctagagctagcaggactattagaaaaaatctggaccaacgtcttctagtttacaaataaggacagtaagtcccagaaggtcaaatgactaagttagttcaagggctcattctgttccaatggtctttctattaagttccactgtctctcttgtgatattaattatagaaaccggcctgtagtttcaacatacagctaaaatagttatttccaaaggtctgccaatattatgctaaggatttttataaaaatgttgttttgggttctgaatactacaaaacatcttgtgctcacacagtgctaaatattaccttgcaattgttacagttaaccaagcagttctgtatgtgccaatttggaggcttaggtggggtgaaaaaaaacaagttaaataaaatagtag

SEQ ID NO: 241683 - DNA, 457 bp, Homo sapiens
tgaattctctttaaagaacatgagaatgttttatatctgtgataccaacatatttcaaaatcttaataaaaagagaggttgatacacacatagacaacaagatttccctcaatttcagaattagaagggatgcttctatctaactccttcagatacacagtggaacaaascaagacttcaactatggctccatagcctattttagggtgggtattaaaaaatagcctgtgatggccgggcatgttggctcacagctgtaatcccaacactgggaagccaaggtgggtggatcacctgaggtcaggagttcgaggccgggctggccaacatggtgaaacctcatctctactaaaaatacaaaaaattagatgggcgtggtggcaggtgcctgtaatcccagctacttgggaggctgaggcaggagaatcgcttgaacccaggaagtggaggttgcagt

SEQ ID NO: 241684 - DNA, 550 bp, Homo sapiens
ccttgaaaaaaacacaaattattaaaaatgcctcaagaagaaatttttaaatcctcacagtcctctatccatttaataaattgaatttataatttaatgtatttccacaaagaaaatgctgagcccagatggtttcattggtaaattctaacatataagaaaaaaaattatgtcaatcataaacactctttcagaaaaagatgagtagaaaatacctcctgattctttatatgaagtcaatattaccctcattcttaaaacagagacattaygaaaagaaaagaaaatgcagcatataaatacacctcatgaatatagactcaaaaatcttccaaaaaattctagcaaattaaatccaatagtaaataaaaaagacagcacattatgactacatgtgatttatcccaggaaaagaaaataatgctgcagaaaatacatctatcgacacagaaatacacttacaaggccaggcgtggtggctcacacctgtaatcccagtactttgggaggccgaggcaggtgggtcacgatgtcaggagttcgagaccag

SEQ ID NO: 241685 - DNA, 550 bp, Homo sapiens
ccttgaaaaaaacacaaattattaaaaatgcctcaagaagaaatttttaaatcctcacagtcctctatccatttaataaattgaatttataatttaatgtatttccacaaagaaaatgctgagcccagatggtttcattggtaaattctaacatataagaaaaaaaattatgtcaatcataaacactctttcagaaaaagatgagtagaaaatacctcctgattctttatatgaagtcaatattaccctcattcttaaaacagagacattacgaaaagaaaagaaaatgcagcatataaatacayctcatgaatatagactcaaaaatcttccaaaaaattctagcaaattaaatccaatagtaaataaaaaagacagcacattatgactacatgtgatttatcccaggaaaagaaaataatgctgcagaaaatacatctatcgacacagaaatacacttacaaggccaggcgtggtggctcacacctgtaatcccagtactttgggaggccgaggcaggtgggtcacgatgtcaggagttcgagaccag

SEQ ID NO: 241686 - DNA, 550 bp, Homo sapiens
ccttgaaaaaaacacaaattattaaaaatgcctcaagaagaaatttttaaatcctcacagtcctctatccatttaataaattgaatttataatttaatgtatttccacaaagaaaatgctgagcccagatggtttcattggtaaattctaacatataagaaaaaaaattatgtcaatcataaacactctttcagaaaaagatgagtagaaaatacctcctgattctttatatgaagtcaatattaccctcattcttaaaacagagacattacgaaaagaaaagaaaatgcagcatataaatacacctcatgaatatagactcaaaaatcttccaaaaaattctagcaaattaaatccaatagtaaataaaaaagacagcacattatgactacatgtgatttatcccaggaaaagaaaataatgctgcagaaaatacatctatygacacagaaatacacttacaaggccaggcgtggtggctcacacctgtaatcccagtactttgggaggccgaggcaggtgggtcacgatgtcaggagttcgagaccag

SEQ ID NO: 241687 - DNA, 550 bp, Homo sapiens
ccttgaaaaaaacacaaattattaaaaatgcctcaagaagaaatttttaaatcctcacagtcctctatccatttaataaattgaatttataatttaatgtatttccacaaagaaaatgctgagcccagatggtttcattggtaaattctaacatataagaaaaaaaattatgtcaatcataaacactctttcagaaaaagatgagtagaaaatacctcctgattctttatatgaagtcaatattaccctcattcttaaaacagagacattacgaaaagaaaagaaaatgcagcatataaatacacctcatgaatatagactcaaaaatcttccaaaaaattctagcaaattaaatccaatagtaaataaaaaagacagcacattatgactacatgtgatttatcccaggaaaagaaaataatgctgcagaaaatacatctatcgacacagaaatacacttacaaggccaggcgtggtggctcacacctgtaatcccagtactttgggaggccgaggcaggtgggtcaygatgtcaggagttcgagaccag

SEQ ID NO: 241688 - DNA, 422 bp, Homo sapiens
ttcgtggcatttcttttatttcaatatattcactatataaataaggtaggagcaagcattaaaacatggtgggtgagaaactctagagatggagggaaaaagaacataggaattatttattttctctgggtactgtgctcttctacagggtgttcataaaggctagaaacatagaaaaatatatataacaaatgttttattgatattacagacaataggcgatgtgttcaaagtgctatctctcattatcaatgtgtggttcaatgtgctgatgaaaattgcaaaaaactaggtactcttaatgcatttccataaatctgtacagatgcatctaggatgcrttgtctcagacaatttatgcctagatttttccattgtgtaaactgtgccattaacatacccccagaggaagaattataatg

SEQ ID NO: 241689 - DNA, 648 bp, Homo sapiens
gatgacaatcaaggttcacggcactaggtgctgccatattgcaccagacagactgaagacaaggttgtgagtggtccaagttcgcacagtaggtcagcatgagagctcatctcacttccagttttactccaccatgctgcctccattgatgctcattcttctctctctctcttttttttttttaaagacaggatctcactttgtcacccaggctggagggcagtggcataatcagggctcactgcactcttgacctcctggattcaagcagctctccagcctcagcttcccgagtggctgggactacaggtacacatcaccacaactggctaattttaaaattcttttttagagacaggggctttctatgttgcccaggctagtctcgaactcctggactcaagcaaccctcccaccttggcctccaaatccatgcctgggattatagscatgagccgctgttcctggctccattctttctttagtaaggaaactggaatacaggctaacagagtaaaaagcacaggcttttgagttggaacaactcttgttttaattcacataccttcacttacaaggtgggtgaccttggacaagtggcttaaactctttaagcctcagcttcctcatgaaaaagcacaggttcta

SEQ ID NO: 241690 - DNA, 635 bp, Homo sapiens
tggccattgagttttaggcacactggtgaccgtcattgctacagctgctcactttctctggtaaaccagaaagacctcagacactgggttcctcactcacatccacggggatgcagccctgccagtgctcaggcagagttctcaggagcggggacaccttactgttaacttgtgtgtcgtcttctaaagtgatctcattaactgctgctgtgaccatgttagtcaaaagtcacagagaagactggagatggtgcacgtgtttgcaagtggatcgggggaaccagccccaatatttcaacgtacgttattttctattttccctaagtgtcagccagtcttacaaataaagggatagagtacaaaagagagaaattttaaagctgggtgtccgggggagacatcacatgtcggcaggttccatgatgccccctgagctgtaaaaccagcacgtttttattagtgattttcaaaggggaggaagtgtacaaatagggtgtgggtcacagagatcacatgcttcaagggcaataaaagatcacaaggcagaaggtcagggmgagatcacaaggtcaggatgaaactagaattactaatgaagttccatgtcccactgtgcacgcattgtcattgataaa

SEQ ID NO: 241691 - DNA, 456 bp, Homo sapiens
tagctaatcaagggtacgaggcgtctaaattgaaggcccagctctgcctacaacaagtcaaatatctaggcctaatcttagccagaggaaccaacaccctcagcaaagaatgaagacagcctatactggcttgtcctcaccctaagacattaaaacagttgcaggggttccttgggatcactggtttttgctgactatggatccccrgatacagcaagatggccaggccactccatactctaatcaaggagacccagagggcaaatactcatctagtagaatgggaaccagaggcagaaacagacttcaaaaccttaaagcaggccctagtacaagatccagacttaagccttcccacaggacaaaacttatatttatacatcacagagagagtgggaatagctcttggagtccttactcagactcgtgggacaaccccacaaccagtggcatacc

SEQ ID NO: 241692 - DNA, 620 bp, Homo sapiens
atatttaaaaattacagctataccatctacaatttccagctayatatataaaacactgatgaattgccattacaactccttaaagaaggggattttactccaaataaaattattgaaatggaagcacaaggccgtaaattttggaatattctgtctccagaccattttattttcctaacccagagcctaaagggaatgaatgtttggtgggtagggtgggggacaaaaggatacaagggagacgtgaacactgaaggaatcgaggtggagtgggggcctatatgtaggcttgggtaggaatggaagggctgaatagccagagacgtagatgagggcaccaagctcctaaaatgtgtggaaaaggatacccagatgtgggagcaaaatacagaaaaggagctgcaagtcaaaagttctgctgaaagctcattctgccttctatgtgtatcccagaaacctacttcacatgtccttgcttcctaactcactgccagaaacgtgtgagtcattcgtgacattttctcaccctcactcaacatactttgttatctgccacatccgtagttcaggaatccatcatccacccagctcatctgccctgcctcacaactgtctccttg

SEQ ID NO: 241693 - DNA, 620 bp, Homo sapiens
atatttaaaaattacagctataccatctacaatttccagctacatatataaaacactgatgaattgccattacaactccttaaagaaggggattttactccaaataaaattattgaaatggaagcacaaggccgtaaattttggaatattctgtctccagaccattttattttcctaacccagagcctaaagggaatgaatgtttggtgggtagggtgggggacaaaaggatacaagggagacgtgaacactgaaggaatcgaggtggagtgggggcctatatgtaggcttgggtaggaatggaagggctgaatagccagagacgtagatgagggcaccaagctcctaaaatgtgtggaaaaggatacccagatgtgggagcaaaatacagaaaaggagctgcaagtcaaaagttctgctgaaagctcattctgccttctatgtgtatcccagaaacctacttcacatgtccttgcttcctaactcactgccagaaacgtgtgagtcattcgtgacatttyctcaccctcactcaacatactttgttatctgccacatccgtagttcaggaatccatcatccacccagctcatctgccctgcctcacaactgtctccttg

SEQ ID NO: 241694 - DNA, 358 bp, Homo sapiens
atcatgcataatcaataaaagcagaaatgactatactactatcagataaagtagacccagacataatgacattattagggacaaaaaggaatatagcaaaatgatattatgcacctaccatatttgaaatcttaagtggtgctgataaagaccacagttgtaaatacataacctcaaaaaatgtgacgaagtcatktttcatgtcctcaatgatgcagttcagatagagtacaacgtttactctcctcattatagtctatttttatcaaaagacattatgtgcacgtgacttactaaggtggaatgaattaatatttacatgtatttataatttataatgcaaaatgtaatttctaaa

SEQ ID NO: 241695 - DNA, 424 bp, Homo sapiens
ctaaaagctgggttgcagaatcaaaatgtatatggatgcataattgcaaaagatattgccagattactttycaagattgtagtaaccacggtaagcagaattctaagatgtccccctcttcccactgtgtacacaccctgcacaatccccaaaactgtggatgtgatagattccctgattctattaccttactatagggacattatccaggtggatcttacctaaccacatgagccctttaaaagcagagcgttttctccagctgatcccagaaaaagaattcagagattcaaatgttacacagcaatagaaaattaatacagtaagaattcactctcttgaaagcattgtatgaggtaactatattcattttctcaccagcaccaaatgttaaatatgtttttaaattcagtcaatttgataa

SEQ ID NO: 241696 - DNA, 595 bp, Homo sapiens
tttctttctagtctttagatagacagagagtcattttggcaagggcttttggagcttwtccataccctcatcttctctcctcttacaggaataggagacagtttcacttccctgtccctttgcaggtagctggggccaggtgactacatctggccaaggggtcattagtagaagtaacgtgtgttattttgaggttgactcattgaattgccagtgtgagaccctccagcattcttttggcctgttgtgtcagcctctgaggctgcatattttagatgttgcatctagaggttggtggaggcaccaagaatctggattgcagagagctgctacatggaagagttgctccaaggtctcctaggcccacagcaaactttgagttagcctttgttctgttaagctcttactattttggtggtgttcctgcgtagcttggctttttttctgattaattcagtcatctaatacagtagcttcttatcatcagaatgaaactggggaatagtttaaacatagagaatgttggacacccacttgccttgttctgatataggcctcaggtagagccaggggacttattgatatgttttatatg

SEQ ID NO: 241697 - DNA, 641 bp, Homo sapiens
ttgtgtctcttttctggatagcatatgtatttctgatgatgttcaagcaactgttttactgaagagcttgcttaagtgtcctaaagcagtgcagagttgagggtggggatgagcgaatcatcagtggtgactttgagctaactccctcacagtggatggggaggggtggatcaggcttcattttaggtcctcaggaaggtgagccacatacataaacttcttctagtcccacccattccctctcatcagccctctcgttaaatcctccctacccaaagtccctggccctgccctcagggtcactcttgcctttccttaggggtaatgaaatgacaggctcaaaccattcctaggacttaccactctgctgcctcaggtaccagtgggattgcaccgagtcttcctccatctggtggcccactgactccctttgtcaggggtgccccrggaatggtagtcactttcacttcagttgggtctctctctgttgatgactgagactctctccttaaccaaacttcagttatgcttctccaagtcctctttttgattaggcctcactcttgggctctgtccttggtccatttagtccatctttcaagaatcctgctgggtttagtgaacattctttacccttgcta

SEQ ID NO: 241698 - DNA, 606 bp, Homo sapiens
aacaaacattttgtgagcacttattaagtacctgtaaaacatgttatcagaatacagtgtgtaagttccttaagaaaagattgtttagaatgccatgagagtatgaaaaagggttactcttatccaatttggggagggatattcagagaaggcttcttggaagaagtataatctgagccagatcttgaasaatcagttgagttaggaaggcaaaggggatagagaagggaaaaataatacccctagtgtctctcccttgctgcatcaccatatcctttcccatttctatttttctccatgttccttgaatgcgcattgggctgtctcctgcctcagagtctttgcacttgttttcccctctgcttataatggtttcgcagatatctgcatggcaaactctttcatttccttcaggacttgcatgtcaccttttgagaaatggcttgtccgactatcctatttgtagttgcaatgactcccttccctgacagaaattcccatctcctgcttttgcctagcaaatatcatcttctatcatactatatatttatttatttcatttactcccctatttttgattactgctgtcttcactacctacatgag

SEQ ID NO: 241699 - DNA, 606 bp, Homo sapiens
aacaaacattttgtgagcacttattaagtacctgtaaaacatgttatcagaatacagtgtgtaagttccttaagaaaagattgtttagaatgccatgagagtatgaaaaagggttactcttatccaatttggggagggatattcagagaaggcttcttggaagaagtataatctgagccagatcttgaacaatcagttgagttaggmaggcaaaggggatagagaagggaaaaataatacccctagtgtctctcccttgctgcatcaccatatcctttcccatttctatttttctccatgttccttgaatgcgcattgggctgtctcctgcctcagagtctttgcacttgttttcccctctgcttataatggtttcgcagatatctgcatggcaaactctttcatttccttcaggacttgcatgtcaccttttgagaaatggcttgtccgactatcctatttgtagttgcaatgactcccttccctgacagaaattcccatctcctgcttttgcctagcaaatatcatcttctatcatactatatatttatttatttcatttactcccctatttttgattactgctgtcttcactacctacatgag

SEQ ID NO: 241700 - DNA, 606 bp, Homo sapiens
aacaaacattttgtgagcacttattaagtacctgtaaaacatgttatcagaatacagtgtgtaagttccttaagaaaagattgtttagaatgccatgagagtatgaaaaagggttactcttatccaatttggggagggatattcagagaaggcttcttggaagaagtataatctgagccagatcttgaacaatcagttgagttaggaaggcaaaggggatagagaagggaaaaataatacccctagtgtctctcccttgctgcatcaccatatcctttcccatttctatttttctccatgttccttgaatgcrcattgggctgtctcctgcctcagagtctttgcacttgttttcccctctgcttataatggtttcgcagatatctgcatggcaaactctttcatttccttcaggacttgcatgtcaccttttgagaaatggcttgtccgactatcctatttgtagttgcaatgactcccttccctgacagaaattcccatctcctgcttttgcctagcaaatatcatcttctatcatactatatatttatttatttcatttactcccctatttttgattactgctgtcttcactacctacatgag

SEQ ID NO: 241701 - DNA, 532 bp, Homo sapiens
ttcaagaggcatggatttgtaccctgtcccatgttctggattcttctgattatttccttgtggtggcattcactttttttttttttttaatcccctatgtttccctcaaactggataaktccaaaggtctgatttgatgaaggctgaactttttggcaggaatatttcctagttggtgctgagtgtgtcttctgttgtatcacaccgggaggcaaatagtgtctgagcatcctactattactgatgataagtttgatgactgggtgagggtggcgacagccagctctctgtatggttgggctgcgtttttgcctttatgactcaagtgggtaatgttctcgctctgtgcggacatctagttcccatcaacttttcatctaacagttttagcatccactgaggactcttgcctgaaatgatatttcattaggggttgcaaaatgatgatttcctaactgcatcattcctcccacatttatgagtgggcattcttccaagaagaagaacttttatgcatcaaaagtgacggata

SEQ ID NO: 241702 - DNA, 558 bp, Homo sapiens
aagatgccaaaagcaattgcaacaaaaataaaaatggacagatgggacctaattaaactgaagagcttatgcacagcaaaagaagctattaacagagtaaacagacaacttacagaatgtgagaaaatatttgcaaactatgcatctgacaatgtctaatatccagcatctataaggaacttaaacaaacttagaaaaacaaacaatgtcataaaaaaatgagcaaaggacatgaacagacactgttcygaagaagacatacatgcagccaacaagcatattaaaaaaaactcaacatccctgatcattagaaaaatgcaaatgaaaaccacaatgagacactgtctcacagatgtggagaaataggaatgcttttacactgttggtgggagtgtaaactagttcaaccattgtggaagacagtgtggcgattcctcaaggatctagaactagaaataccatttgacccagccatcccgttactggttatacacccagaggattataaatcatgctactataaagacacatgcacacgtatatttattgcagcactat

SEQ ID NO: 241703 - DNA, 567 bp, Homo sapiens
caagtaacttgcccaagttttcaacaactaacaagtggtcgagatggaatgaaaatatcattcaccctgaccctcccaccaaatcaggagccatgatgccttgagcgctcttgctagtaatagagatgaatttgcctgaaccatccatattctcagatctgttcctctagtgtctaacaccaaatgttataagacattcctaaaataragaaaagcggagccatttttgctgggatccagcttatgggcttttataagaactatcctgagcagaggcagaggagagggctgcctgcatataatgagcatctgagggatgcctatcattggaagagttcctcacccccactctggcagacctttctttaatattattcctctggcctaaagtattgtttctccaaagcatgttctgtaaaacatattagccttccacttagcaaagagagctgaaggcaaaggagggaaagcaattagaaggctgttgctgtggtccaggagggatacaccgaggacctaaatggtggcagaggtaacagagaggaggggccagaatcgagatattat

SEQ ID NO: 241704 - DNA, 401 bp, Homo sapiens
acctatcttgaaaaaagaataaaaaattgagaaggagaactgaagatatttttcaggtagcatagaggagtgagtatcaaagaatgagctttaactrtcttatattttagataaacattactttgaaccatgtaattgcaggtagaccatcatcctacctacaaaaacaacaatatcatgagtcaggtgaatactgtaaaatacaaaatacttactaaaaagcccaataaagatttggggtcattacaagttgatcacaatgtatatgctgcatccctaattgacatctgttttgctttaagggatgaacactttgggtatttttacttcttataattctggccaagtatgtttagataagattgaaaacaaccatgaaaaccttccttcttcccagatct

SEQ ID NO: 241705 - DNA, 401 bp, Homo sapiens
acctatcttgaaaaaagaataaaaaattgagaaggagaactgaagatatttttcaggtagcatagaggagtgagtatcaaagaatgagctttaactgtcttatattttagataaacattactttgaaccatgtaattgcaggtagaccatcatcctacctacaaaaacaacaatatcatgagtcaggtgaataytgtaaaatacaaaatacttactaaaaagcccaataaagatttggggtcattacaagttgatcacaatgtatatgctgcatccctaattgacatctgttttgctttaagggatgaacactttgggtatttttacttcttataattctggccaagtatgtttagataagattgaaaacaaccatgaaaaccttccttcttcccagatct

SEQ ID NO: 241706 - DNA, 615 bp, Homo sapiens
gttggtatggttattattggcgtttttacagaaagagaaactaaggcttagaaaggttgtttcattcttcaaaggctgcactaagagtaggtggctgcaagcggtagttgagcctaaatgatctggcttagaatgccaagttctcagttttcatatcagcctgttaattgtctacaaagttttgccattatcaattgtctgtttatattcttcaacctgtattatttgttaaggacacagcagacattgataattaaatgtctaatggaggaattttgccttccactgggttaaatagaacgcaaaagatcttttttatacagctgacccttgaacamcataagagttggggtactgaccctttatgtagtcaaaaatctacgtataacttttgactcccccaaaacttaactattaatatcctgctgttgaccagaagccttaccaataacacaaagtcaattaacacatatttggtgtgttacatgtattatatacagtatttttacaacaaaataagatacagaaaaaatgttattaagaaaatcataaggcagagaacatatatttactattcattaagtgggagtggatcattttcatgtttagtaggct

SEQ ID NO: 241707 - DNA, 646 bp, Homo sapiens
ttctttttaattatattttgaccaagcgtgcataaataaatttcatcattttggcatccacatcactcatctctgtcaataccatattcccaacactggcagagctgcctgtgactaagcttgacrcatatgctccctggaccttacaccactgtggcagccatgacatgaattttattttgtgaaatatttataacatttcccaccaccatcatcattcaatggggggctttggcagcctgccacagagacagaaccaaagggaaagtgacttctgtgtgagaatggtaggtgctttttgtgtgtatgttgggagggggtgcctttcagcttctttctaaagtctgagattatctactatttagaattagttataccatctctcacccactaactgaatatgtaagtggctcagggaattagtaatcatagtcccagattttcatttctcttacccacattgagtttcaattatgtacattgtgtcaatagggacgtcatatttttctgaagagttgtaatgaagtgggctttgtgaatctgcagtcattgaacctagatatttgtagggcttccccgttttatcacaccactcctgccttaagaggtacttcctgaccatccactttaaattacacctttctgc

SEQ ID NO: 241708 - DNA, 646 bp, Homo sapiens
ttctttttaattatattttgaccaagcgtgcataaataaatttcatcattttggcatccacatcactcatctctgtcaataccatattcccaacactggcagagctgcctgtgactaagcttgacgcatatgctcyctggaccttacaccactgtggcagccatgacatgaattttattttgtgaaatatttataacatttcccaccaccatcatcattcaatggggggctttggcagcctgccacagagacagaaccaaagggaaagtgacttctgtgtgagaatggtaggtgctttttgtgtgtatgttgggagggggtgcctttcagcttctttctaaagtctgagattatctactatttagaattagttataccatctctcacccactaactgaatatgtaagtggctcagggaattagtaatcatagtcccagattttcatttctcttacccacattgagtttcaattatgtacattgtgtcaatagggacgtcatatttttctgaagagttgtaatgaagtgggctttgtgaatctgcagtcattgaacctagatatttgtagggcttccccgttttatcacaccactcctgccttaagaggtacttcctgaccatccactttaaattacacctttctgc

SEQ ID NO: 241709 - DNA, 506 bp, Homo sapiens
cttagtgtcctgcctgtgctcttggagaaggtgaatgtcactgagatcttgtttgtaaagattgtgtggaatggcaaggctgctgcmgtactccatggatggcctggaaaagctgtattatgtcccttaggaggtggagacaaaccgcagctgaaaggctgttgaactgaatagaacatgttagccaatctatagagcaaaatatttactggtagttgattgaatagaatcaataattttaataatactggacattgggtatagggccctaatggataggaccacagcattaacgttgtagtaatccatcttaaggcacttattatttttcccagttcgagaacaggcaaaattcaaatggacaagcagtggagataattacctcttaattaattaagttttatatgtatactgttttaatccttggaggtcttgttttaacttacattgggccgtattaactattttaattgggagtgcacagggtcctgttttatgaagccaat

SEQ ID NO: 241710 - DNA, 360 bp, Homo sapiens
tcccacctccaacatgggggattgcatttcgacatgagatttggagtggacacacatcccaaccacatcacaggccttgaaaaaaaaaatcgacatttgctttgctctatttcagaattttataagctagtggttgctttttacctcccattttttcactatttgtgctataattgtctataattatcctgcacaagtcccrtcatattattttcagtgtgttggagccagacgacttgtctctttagttcacaggtcagtggacggattatacccaggggactcattctcagctgggttagatgatttgaatgaatttgtggactttgagataatgctataatgggatgagacccttgg

SEQ ID NO: 241711 - DNA, 458 bp, Homo sapiens
gtggtatttgatttcctgtttctgagttattttacttaggataatggcctctggctccacccttaatgttgcaaaggacatgattttattcttttttatggctgcatagtattccatgctgtaaacacgccacattttctttatccagttgacttatccwatcaactgttgatggacccataggttaattccatgactttgcttttgtgaatagtgctgtgataaacatacaagttcaggtttcttttttatataatgatttaatttcctctgggtagatgaccaaagtggggatttctgggtcaaatgatagtcctatttttagttgagaaatctccatattgtttcccatagaggttatgctaatttgtgttcccaccaacaatgtgtgtttccttttctctgcattcacatcaacatctgttgttttttgactttttagtaattgcctttctgat

SEQ ID NO: 241712 - DNA, 458 bp, Homo sapiens
gtggtatttgatttcctgtttctgagttattttacttaggataatggcctctggctccacccttaatgttgcaaaggacatgattttattcttttttatggctgcatagtattccatgctgtaaacacgccacattttctttatccagttgacttatcctatcaactgttgatggacccataggttaattccatgactttgcttttgtgaatagtgctgtgataaacatacaagttcargtttcttttttatataatgatttaatttcctctgggtagatgaccaaagtggggatttctgggtcaaatgatagtcctatttttagttgagaaatctccatattgtttcccatagaggttatgctaatttgtgttcccaccaacaatgtgtgtttccttttctctgcattcacatcaacatctgttgttttttgactttttagtaattgcctttctgat

SEQ ID NO: 241713 - DNA, 613 bp, Homo sapiens
actggagcaagatggaatactagtctttcataatcagaccaagatgagaaattatcttgggtactttcacaatacccatgatttggtactaaatcattaaatcatgtactaaacgttttctggatgccatcagtttctgaaagaatgatctgtgtcaattaatctwaaaaggattcttaaagtaaaaagattttcaaataaaaagcaaatgtatgcaaatataaatcccacaagtctacaaaaagggttcagagccagctaatcactcatgcccctccacacacatacacacacccttaaccctcacttaacatgactgcatgactctttccacagatgcttctgtgatcacttcagccatgatttatctgtctccacctaataacggagttttgataacagatgatctcagtctcatagaatgagtttgttctcacaccattaatttaaaagaacaatgaacagtcaaggggtacataagaacaaaactctgttctgtacaaggagttggtattcagtgtgacactcatcttgtaccatattcaagaccaaagaaaccaaaaaaaaaaaagccaagagtctgaaaactcacgatcactattgtatattgtaa

SEQ ID NO: 241714 - DNA, 599 bp, Homo sapiens
ccatcactatacttttccaaccacttttccctcctcccagtttccattaattctccccttacttctcacctagaagtctttacaccttcagtttctttcagagattctttcttcaggtttggaaygtgcaacttggggtgctgtaaaccttagatccaattctacctctacatttgctagtttgtgaatttgagcaagtttttaaacctatatttcctcgcccttataaggctctcaggaggacaaaataagataatgcatcatggtgtctagtgcagagcaaggcaaatggttgccattattattattattattctgcttaaatgtcaaaatgtttcatacaatccatgaaagagatcgacattaaaggcaaggtaggcttcagaaaagtgtatttgtggggaaagatcatgcacttgggggtgagcggaattttttagttgtaagaaaacaagtggaagcagacagggtcagggaggaagggagagaaatgttgaagaggtggactcagaattggtattttatttcacaggcattgaagagatgtttcctttatacaacaatgttgtgcatgtgtagtgtaagtgtgtgtgtgtgtg

SEQ ID NO: 241715 - DNA, 555 bp, Homo sapiens
tgccttttccactggacttgtttttctttttgttggtgtatgtggtatgtatgcagagttcccaaggatcactctcaaaatgtatgatgctggttatacctctgcattttcctyattctattgtttttctcaagtacctcttaacttcaataaaggtcactcaagattacaaaaacatgctgtcatttttctatagcaggaatgcctttattccattggatactggaaaattctgatttgtaatgacaataagaaataattcattgcaaagccaggatagaacatgaccagagtttagtgggggggatgggcaagccaaccttgggaatggctaagagttgataagggcataagctcaagagtatgctcccgtttttattaatagataggggcacacaactaataaataataaaagacaatgattaacttttattagttaccaaatgcataaatttattacagcattttatataactaactgtcctcccctttttcagtgtgttttcccttggcttcctggacacttcattaccggttgttccattttccccaca

SEQ ID NO: 241716 - DNA, 489 bp, Homo sapiens
aaaacatatcatttatgctcatattcatgagttctagtaattttgaaaataacaaccaccacctaagacttgtcatgagaggatgtcttcttagagctgtgctgctgactgcacctcttcctacccagtccttttcctccacaggcatcggaactgcactgcagaccgaactctcctcctcttctattctcttcccttaacccttcggaagcatttyccccaatatctctcttgcacttctaatcccattttggcatctgtttctctgaggtctaaaactaacacacccccatcagcacattagtaacaatcagaacatcagatatagtaactgttttcttaggcgatagaaaaagtctggctttgagagataggataagaaaacaaattcctggagaagctaaaggaagtcatcttttaatggattcaggaaagagaccttcaactctggataagaacagtgtttcaggagatgtccagccctgaagg

SEQ ID NO: 241717 - DNA, 489 bp, Homo sapiens
aaaacatatcatttatgctcatattcatgagttctagtaattttgaaaataacaaccaccacctaagacttgtcatgagaggatgtcttcttagagctgtgctgctgactgcacctcttcctacccagtccttttcctccacaggcatcggaactgcactgcagaccgaactctcctcctcttctattctcttcccttaacccttcggaagcatttcccccaatatctctcttgcacttctaatcccattttggcatctgtttctctgaggtctaaaactaacacacccccatcagcacattagtaacaatcagaacatcagatatagtaactgttttcttaggcgatagaaaaagtctggctttgagagataggataagaaaacaaattsctggagaagctaaaggaagtcatcttttaatggattcaggaaagagaccttcaactctggataagaacagtgtttcaggagatgtccagccctgaagg

SEQ ID NO: 241718 - DNA, 509 bp, Homo sapiens
taagggccactcttggaattttttaaaagcaacatgtatttcacagtttgtgggtcaagaacctggatgcccttagctcagtgtctctcaggaggccacaattggagtggtgactaaggctgtggtctgatctgaaggctggacaggggaaagatctacttccaagttcacatatgtatttgttccagtcatagaattttaaagttagaagaaacctgggaacataagagcaaataaatataaataactgccaggcacggtggctcatgcctgtaatcccagcactttgggaagctgaggcgagtcagttggggtcaggagttcgagaccagtttggccaacatggtgagacctcatctctactgaaaaaaaaaaaaaaaattagtcctggtggtacacacctgtaatcccagctaccttttctgaggcaggagaatcacttgaacccgggaggtggagsttgcagtgagctgaggttgcaccactgaactccagcctgggcaaaagag

SEQ ID NO: 241719 - DNA, 568 bp, Homo sapiens
gaatgcagcaatgaaattatttggatctggtgtttttttatttttaaagcttattactttttgattcgatttatttggcaagtatagagctgcttatattaatatttctcctaatatgagttttgattgtttatgtcttttaagaaatgggtccatttaagttatcaaatgtatgggaatgtaattgttcacaatattcctttattagtcctttaaaatccctgaaattattagtagtgatgcctcctctttcataactgatttcaataatttatgtctttctctctcgtcatggttatcctggctagaggtttatttattttattgatcttttcaaaaaacaatgttttaatttccttgattttttacattgtttttgttttaaaatcattgaatattgcttratttttttattttcttctgcttgctttaagctttattaagtcttttccctcactttcctgagaaagaggctaagttgttaattttagatcttaattatttttaatttataagtttagtgctataaatttctatctaggcactgtttttgcaggagctcacaaat

SEQ ID NO: 241720 - DNA, 619 bp, Homo sapiens
tctgggtttccgtctgtcacacatttcactgggttgtctttattctttcctggtaggctgtttaagaagaattatttttttaaaaaaaaaagagtggaccccgcccatgtgyagctactgcaatcataatagggtgacccaagatttcagggatccccattgctgggtgaataaaataggatacatgagaaatattataactttatcagtgagttgatctgtgttgagtattttggaaccttttaaaaagattttttttccactagatagattaagcctgactttcaagtttaatgcattcctttaattctcatatgcctgaaactgtctcagtaaggctccaatgagaaatctctcctttcttacttattttaaaattctgacgataaagtaacacaggcctctaagattatcacaatcaataaatggatcttttatatcactcaacagaattatgtggtgatatggtcttgctaccataaattttcatatcattgttcattttaaaaaaataataataaaccaggaattagaatatcattgatgctattatttataatgtgaagcccaagaggaacatacttaatttaatgttatgttcactacaatgacaaaatgt

SEQ ID NO: 241721 - DNA, 525 bp, Homo sapiens
caaagctgcagtgagctgtgattgtgccactgtatcccaacctcagtgacagagtgacacactctctcttaaaaaaaaaaaaaaaaaaaaagatttccatgaatgtgctggtaaaccaggagatatagaactacttgcctccaattagaactcaaaccctcctatatcccctgcagagtgcttgcttcgtattcagaaggaggacacaytttcaccgtctgtggggtgatcggacagcattcacaaacacaccttaatggaacactgtcggctgtgcaaaaaatctccccaaataaatgataaggccttttgtgaaatccacattactgtgggttttgagctctgagctaccatattcatacaacagaactctagtacttcacacagtattaatcctttgcattttgtaacttagaaatctgctttgagagatcaattcagtagttttgtttttaacttttccattaaatattatttgaaatgctttcaggcagaacttgcttatcctctgatgtgtgatacatt

SEQ ID NO: 241722 - DNA, 328 bp, Homo sapiens
atacttacattcctacccgaacctgcatccaactctttaaaactcccatacttcccactgcccggggagaaggtgcctttggagcataagctccttttcattctttggccactgaataaaatctgatygcctttccaattgaatgttctttgcgatcaatacaaagtaggaaaggaccagagtttactggtgaaaacttttctcctttaagtttttaaaaatactggtttgcaaaagtgaggacactaattcttcaggatttctctctctttctacttttttatctgatgcctataagaattggcatgtgcccatcatcacatgaata

SEQ ID NO: 241723 - DNA, 568 bp, Homo sapiens
tgtatttaaatatattcaactctctgaaacagctccttactttaaatttctaaagaactcattttctcaataatcaataaatgcttaatatatgctatactttattggtatgaataacttaatgaaattactaattttacacatgtagcyttgtactttttaccctgtcaaactcaaaaacattttttgtaatattggggctgaaatgccttttgtagcccattccaatctttaaaagaatcaaagtgagaaaatatagcacagcaatgtaaaattaaatcatataaccacattatcccacaaagcaaatccacatttcacagtttttctattttctttggtccatttccagtggggctaaggaaaaaaaggttatcttcttatgaagatggttggggagaacttgtgccctggattgtttggtaaattaatggaaattactaaaattcccaacctacttcttctatgaaaatctcatttcaccataaaagaaatgctatattttactctcataaaacgtataattccagatttctgagtcttacagttaataattaaagcttattta

SEQ ID NO: 241724 - DNA, 482 bp, Homo sapiens
ttaaaaccttgaatacactgaaaggcaaaataaaaacatttcagggataaaagtcatagttcaatcaacagaatagaaaaaaaattagttaayctggcataaagtagaaggcttgagaaggctgttttattagtctgttttcgcagtgctgataaaacatacctgagactgtgtagtttataaagaaaaagaggtttaatggactcacagttccacgtgactggggaggccttacaatcatggtggaaggtgaaagtcacatcttacatggtggcaggcaagacagaataagagcccagcgtaaagggaaaccccttattaaaccatcagatcctgtgagacttattcactaccagaacagtatggggaaaactgcccctatgattcaattatctcccacagggtccctcccacaacacatggtaattatgggagctacaattcaagatgagatttgggtgggaacacagccaaaccatatc

SEQ ID NO: 241725 - DNA, 560 bp, Homo sapiens
ggcagaatatggcaagaaaaagagccatccacagtattgaattctactttgtattatgcaccaacacaatatggagagcaagatgatttttttgagtgttccctgcactttccagatgtttatttctggcaccaagtgaagctaggaagacaccgtcagtctcttatgttatcttgtacaaatcttgtgttatacaggtaaaacgttatttttctccatggcctctcttccatttcaagcaagcagtgagtttttataatttgttgttcctatgatttagccaaggtataaagaagaatcaacttgaggtcagtggctctgcctgcattttakaagggcctaatgctgtcaaagactttttgttggttattctggaggtagattaggagcgatagtgatgttgtaaagtcagaggcaggaaggtgaccttccctgaatgaaactcgcgtgggaacaagggaaacagatcagcaaatttcccccagcatctggccaccctcttccccatcctaatcccagtagtgaggtggcaacccctcaacaagaatgcctgtgtgaca

SEQ ID NO: 241726 - DNA, 560 bp, Homo sapiens
ggcagaatatggcaagaaaaagagccatccacagtattgaattctactttgtattatgcaccaacacaatatggagagcaagatgatttttttgagtgttccctgcactttccagatgtttatttctggcaccaagtgaagctaggaagacaccgtcagtctcttatgttatcttgtacaaatcttgtgttatacaggtaaaacgttatttttctccatggcctctcttccatttcaagcaagcagtgagtttttataatttgttgttcctatgatttagccaaggtataaagaagaatcaacttgaggtcagtggctctgcctgcattttagaagggcctaatgctgtcaaagactttttgttggttattctggaggtagattaggagcsatagtgatgttgtaaagtcagaggcaggaaggtgaccttccctgaatgaaactcgcgtgggaacaagggaaacagatcagcaaatttcccccagcatctggccaccctcttccccatcctaatcccagtagtgaggtggcaacccctcaacaagaatgcctgtgtgaca

SEQ ID NO: 241727 - DNA, 470 bp, Homo sapiens
gcccatgccagcacctggagctgcctgccccatggcagcagccagcatgtctgactgtgcagtggccagaccccacattcactcacacacccctcaccactccacacctgactcacaatctcccttgaaggtgtgggatccaggctggtagcacaagccaagtgcagcctgccaggccgagtgggcagaacaagaacagcagccccaagcaaaactcaggcaaasgcaccaccagacagaggtttccagccagagaaatgacaacccaaaaatcctataacaaaatgagagattaaaagggaaaggaaatagagggaaaaaaaagtaaaagatacctaactttcaaggtaaattttttaaaataactttttttttaggaaaaaaatcccttttggtcagaactataagccatttatgtatacaagtatttaggaagttagttgaagtagaaaatcaatgacaaaattacc

SEQ ID NO: 241728 - DNA, 610 bp, Homo sapiens
aacatacccagcctactctgtgtcttttcattggagagtttagtccatttacattcattgttgttattaataagtaaggacttacttcagccattttttatttattttctggttgttttgtgttcttctcttccttctttccttcctttctgtcttccttttagtaaaggttattttctctagtggtatggttgaatttgtttctttttattttttgcatatttgtggtatgttttgttttgttttgttttgaagttactatgaggcttgcaaataataatttatagcccagtattttattcatttatttattttattattattattatttttattttttgagatggagtctcgctgtgtcacccaggctggagtgcagtggcatgatcttgactcactgcaagctccgcctcctgggttcatgccattctcctgcctcagcctcccgagcagctgggaccacaggcacccgccaccacacctggctaattttttgtatttttagtagagatggggtttcaccatgttagccaggatggtctcgatctcctgagctcgtgatcygcccgcctcagcctcccaaagtgctgggattaccccagtattttaa

SEQ ID NO: 241729 - DNA, 540 bp, Homo sapiens
ccaaacaatgctcattaatcagatcaagtaatgaacagtcattgttttataaaaataaagtcactaagtgaatgaatccacagtgaaatggaattgaaaccagagctgtcttagctacctgttaggattttagcaaacacgtaaaatgtctgcccttcagccattctacagacagcaacatgtatgacataagacctttaattaaaaattgttacttacgttgctttatttcagctacaaataaactttatttgatgtaatgtaataaaacattttcaagtttaacaatatgtatctgaccataaataatcatttaaattatgaatataatatatacggtcacttyagcaaatttgcggttcaggaatttgtacaagctttgtctgaaaggacagtgccctcctcccctttcaggaaaggtagcttttccccatgtctggtaagaagcaatgtcaatgggagttagaagaagtccataatccatgtcagaattccactttatcctgtgagaggacagcttgctttattgtaggaaaataa

SEQ ID NO: 241730 - DNA, 533 bp, Homo sapiens
agactggtgttctgaagcatttcccaagagtggtccaggtgacctcgcttcacacaatttggtttaacacaatgcagctcaacaagaatgaacatgtttatgccccatctccagaagcatcacatttcatggaaaacccatcattcccacacttcttccacataacatacagttatgggccagcccatgggtgggcccactgcagccttgtagaaaatgagagtcaaaaacatgccaataatcatgttaattacaacgcagttgggtaccacttgagcttcactgcgataaaaatcctcacagaaggcatcccactcccctctcaagacccttcagagcacgagaaaaagctttgctcatgttgtatgcttctctccatcctgagacctgttcctgagttataccataataagtgagttaacacagaaaagtacatagrtggggaaatcacagagaccctgcagaaaagccaaactatttgacagaagcttgaaacaaacactgctctgggaaatcatttgtattagctgatg

SEQ ID NO: 241731 - DNA, 488 bp, Homo sapiens
actggtcattcaggagtgtattatttaatttccgtgtgtttgtgtggtttccaagattttgcttgttattcatttcttgttttattccattgtggtcagagaagakacttattctttcagtttttttgaatgtgttaagacttgttttgtgtcctaatatatggtctatccttgagaatgatccatgtgctgagaagattgtgttctccagccattggatgaaatattctgtaaatatctgttaggtcaatttggtccatggtgcagattaagttctttgttggttttctttctgggtgatctgtccaatgctgaaagtggggtgttgaggtctcctgctatcattgtattggggtttatctctctgtttagcgctaacattttctttatatatctgggtactccggtgttgggtagatatgtatttacaattgttatatcctcttgcagaattgacccttttatcattatacaatgaccttctttgt

SEQ ID NO: 241732 - DNA, 522 bp, Homo sapiens
tccatccctccggggcttttgcagtctttcgctggcttaagtctatttctgagagagaattttggaggatcacggggattgcttcctctatgccctctccaggaatatatggtaaaaacctggaaaattaccacctgggctttaaatgaagaggcttttgaattgagtcactactggaactaagtacactattggaaataaaaaagattttagagatctcttattctaagcaattgatggaaaggttaaatttttaaaagaatmcgtaatagcgttatagctagccttaaaaattctctttaaagagcaaaatctgacctaaaacaaagttaaaatcccttgtacactcaaactgcctgcttttgattccatgtgggattaacaacggaagctgctccactttgtagtctggtagttaaaattcatgatcatggaatcagtccttttggtttgatatttgtatgacttttgccacttattgatccttttcccttccatggacagcttttgatttcctgtctt

SEQ ID NO: 241733 - DNA, 571 bp, Homo sapiens
cactgtttccggttaagccagaatgtctcctaggaacaactacttagctgttatattggtgctctccttcaaaaaatcaaaacagtgcagatgatagaaagtaatttttaaaattttgtaatgtacacttgtgggtgtacatttagatatacgcatgcaggattaacctgagatatgaggacatgatgagcaggctaataatttggtatctccttaagcaatattctttaaatkgttgttccacattgatttagtggtaaagaggaggacctagttttctattcgtaagaattgtatttttctactgtgcagccataaaaaggaaggagataattcctttgcagggacatagatggagctggaggccattatctttagcaaaggaatgcaggaacagaaaaccaaatattgcacattgtgagtgataaatgatgagaacacatggtcacatagaggggaacaacacacaatttggcctttaagagcgtgaagggtgggaggaggggaggatttggaaaaacaactaatgggtactcggcttaacacctgggtgatgaaataatctgtacaa

SEQ ID NO: 241734 - DNA, 595 bp, Homo sapiens
gtgactgcagttatagaaaagtgagaaagaaaagaaagaggctaaatgaaaaggctataacagaaattggacaggatgaatgtggggagagagagtacaaagtagctagaaaaccagtatagtgctgtttcctgsaggccaaaaatggcgcctcaaaaggcaaacatgcaagtgaaaccgtcacttcaaaggagagacttgtgacccagctcagctgctcacaaagcttatttaccaaaaagattttggctgaaaggcccaatggttagagcatggaagatgagtagaaggcaaagattcattcagacaagatggggacattgtttaggtctggctatgggataggagagggagatcttaaaactttacagaaaaaaaattgttagttttttctctgggaagataatcagtggccttggttgcaggtagtatgaaaagtaacggtctaaaatagaaccaaggaaggaaacagaaatgctcccaggtgggttgaaaaactgccttgccaagctccatagagcatcagtatatcaaatgagcattcaaggtccaggtctgtcaatcccactcccttcggaagcaatgggtttttaaa

SEQ ID NO: 241735 - DNA, 595 bp, Homo sapiens
gtgactgcagttatagaaaagtgagaaagaaaagaaagaggctaaatgaaaaggctataacagaaattggacaggatgaatgtggggagagagagtacaaagtagctagaaaaccagtatagtgctgtttcctgcaggccaaaaatggcgcctcaaaaggcaaacatgcaagtgaaaccgtcacttcaaaggagagacttgtgacccagctcagctgctcacaaagcttatttaccaaaaagattttggctraaaggcccaatggttagagcatggaagatgagtagaaggcaaagattcattcagacaagatggggacattgtttaggtctggctatgggataggagagggagatcttaaaactttacagaaaaaaaattgttagttttttctctgggaagataatcagtggccttggttgcaggtagtatgaaaagtaacggtctaaaatagaaccaaggaaggaaacagaaatgctcccaggtgggttgaaaaactgccttgccaagctccatagagcatcagtatatcaaatgagcattcaaggtccaggtctgtcaatcccactcccttcggaagcaatgggtttttaaa

SEQ ID NO: 241736 - DNA, 595 bp, Homo sapiens
gtgactgcagttatagaaaagtgagaaagaaaagaaagaggctaaatgaaaaggctataacagaaattggacaggatgaatgtggggagagagagtacaaagtagctagaaaaccagtatagtgctgtttcctgcaggccaaaaatggcgcctcaaaaggcaaacatgcaagtgaaaccgtcacttcaaaggagagacttgtgacccagctcagctgctcacaaagcttatttaccaaaaagattttggctgaaaggcccaatggttagagcatggaagatgagtagaaggcaaagattcattcagacaagatggggacattgtttaggtctggctatgggataggagagggagatcttaaaactttacagaaaaaaaattgttagttttttctctgggaagataatcagtggccttrgttgcaggtagtatgaaaagtaacggtctaaaatagaaccaaggaaggaaacagaaatgctcccaggtgggttgaaaaactgccttgccaagctccatagagcatcagtatatcaaatgagcattcaaggtccaggtctgtcaatcccactcccttcggaagcaatgggtttttaaa

SEQ ID NO: 241737 - DNA, 599 bp, Homo sapiens
agcaagttggcttctcccgtcttcttctgcctactttattctagccatgctgacagttgattagatgttgcccacccagattgaggggtgggtctgcctctcccagccagtgactcaaatgttaatctcctttggcaacaccctcacagacacacccaggaacaatactttgcatccttcaatccaatcaagttgacgtttaatattacctatcacattgagtgactagtaattgttcattcattcatatgttcaacaacacaggagagtatctattatgtgcaaggctctgtgcaaggtgctgagaattcagaaataagatgaaaaaagtatttgttggctggataagtgaaagaaaaattggattgataagacatagcacatgccctcaaaaaactcacagtctaggaaatgttagttcaaaaatttcttaataccttttacacttatgtattagttcacactgctataaagatatatctgagactgggtaatttacaaagaaatttcacagttccacgggttgtamaggtttctgcttctggggaggcctcaggaaacttacaatcatggtagaagggcaaaggggaagcaagctt

SEQ ID NO: 241738 - DNA, 528 bp, Homo sapiens
gggtctttatttgaagctgacttctcgtctctggtttcagaggggcgtatgttagtgaggtatttttggtgttgaagctttgggtatgatccagcaggtgacacttaggcttattggtcagttggttgactcttctttggttatgtggctcccctatgtttcctcatagatggarctgtgttccctctcagtgctctgaaagtgtggattccttttccactttaatgctggctatagttcacaacttggcattcctggactgtctgctgcagctctggaatgatctcagggtttatgtttcttccccagcttagaggcaacacagaaagggatcttaatagtggttgtagccaagggttcatttgcttgattcccgggagtttcaccccagagaaatgcaggtcagcaattgctcagtacagtgagaccaagaaggaaggtttgtgctgtgggcccaagccaggggttccctgtctggtgacgagctgatggaggggtgtgggacccgtggaaggtggactggactcc

SEQ ID NO: 241739 - DNA, 537 bp, Homo sapiens
tgccaagttggtactggcttgatagctctggtagggggtggctggaggcccaagcccggaggccctgcttggtgaggaaatacgggaatgggcacccatgtaacagtstggccacttttctgtaggactgctgtggtatgcttggggcccgctccaattcccagtcacctcagattttccagaacctggaggtgtcaccagtgacggctgcaaaacagcaaagatggcagcctatccctccctctgggacaaagctccttccttctcagctttgttccagggaggcacagacctgttgctggctctaaggcacatttagggagtgactggagaccccacctgggaggtcccacccagtgaggaggaatgggattgggacccacttaaaaaagcagtctggccacgttttggtagagcagctgtgctgtgctgggggtccacttcaactccctgtcacctcagacactccgaagcccaaaggctggaatggctaagtcacccaaacagcaaagatggcagcccacccctccctctggg

SEQ ID NO: 241740 - DNA, 537 bp, Homo sapiens
tgccaagttggtactggcttgatagctctggtagggggtggctggaggcccaagcccggaggccctgcttggtgaggaaatacgggaatgggcacccatgtaacagtgtggccacttttctgtaggactgctgtggtatgctyggggcccgctccaattcccagtcacctcagattttccagaacctggaggtgtcaccagtgacggctgcaaaacagcaaagatggcagcctatccctccctctgggacaaagctccttccttctcagctttgttccagggaggcacagacctgttgctggctctaaggcacatttagggagtgactggagaccccacctgggaggtcccacccagtgaggaggaatgggattgggacccacttaaaaaagcagtctggccacgttttggtagagcagctgtgctgtgctgggggtccacttcaactccctgtcacctcagacactccgaagcccaaaggctggaatggctaagtcacccaaacagcaaagatggcagcccacccctccctctggg

SEQ ID NO: 241741 - DNA, 474 bp, Homo sapiens
agatctctgtcagctagagagcttgtgtggggatggctggaggctccagttgggaggtccagccaagtgaggaggaacaggatcaggcacccacttaaagcagcagtctgaccatgttctggtagagcagttgtgctgttctgggggatcccttccatcccaggtgggctcagactctccaaagcctgaaggttggaatggctaaggtgcccaaacagcaaagatgtccctccccctgggagctccttaggggtgcaatgccactgctggtagctggttgtgggtcttcccttgttaggtgccatggaaatggggtccgcaggctgttgctactcagcaccctggattcagcttctttcctagaggtatgtataagagtctaacctcccactttgccagagctgtagstacttttgctggaaaggccaggtatctaagcctccagggtctccatgcatgcctgagtggctgctc

SEQ ID NO: 241742 - DNA, 561 bp, Homo sapiens
gagaacttgttatcgacctattcagggattcaacttcttcctagtttagtcttcggaggctgtatgtgttcaagaatttattcatttctttcagattttctagtttaattgtgtagaggtgtgtatagtattctctggtggtagtttgtgtttctgtggggtcagtggtgatatcccctttatcattttttattgtggctgtttgcgtcttctctcttttcttcttcattagtctagctagaagtctatgtatttgcagggcttaaaacctaaatgataggtgcagcaaaccaccatggcacatgtatacctatgtaacaaacctgcacattttgcacatgtatccctgaatttagagtaaaataaaaattaaaattaaaaagggggttacccatacactcatcaacaatgtatattatcttttttaaaaaatatgtctctgcaaagagacactttctcaaaaaagygtatctgaggtttttctattttttcaattttttttgtttgctcatcttggtcccctgcctaagacagtctcccctttacctcgctaatttgtac

SEQ ID NO: 241743 - DNA, 461 bp, Homo sapiens
cactacctctccaaggatccatttcagtgttcctaataattaccctactcttgagacagtgactgtaagacagatttcagagtgactggtctcttattttccaaaatatgatcttctattgctttatctgagtgtcctggaaaatcacctctctcctgtgctgtacaataccatgacccaaattaagaggagtgaragattaggagagagcacaatttttgtacttgggggaatgaagtaaattaaaggagtgtttcatgtttctttcaaatgtgactttaataacaattaatcacagacagagtttcctattgcttctcagtaactagaaactaaagagtaaattctttttgttgacattatgatattcttttttgcattattcctgaatttctacttcttaaattttattttattattttattgtttgtttttaaaaattcaggtggaattcttttact

SEQ ID NO: 241744 - DNA, 412 bp, Homo sapiens
agatctgatggtttttaaaagcaggagcttccctgcacaagctctccctctttgcctgccaccatccrtgtaatatatgacttgttcctccttgccttctgccatgattgtggaactgcgagtccattaaatgtctttttcttcccaatcacaagtatgtctttatcagcagcatgaaaatggactaatacaaccccttatcagatgtaaggtttgtgaatattttctcctattttataggttgactctctgctttgttgattacttcctttgctatgtagaagctttgtagtttgatgcaatcctatttgtctatttttgcttttgttgcctgtgctttgggatcatgtccagaaaatcattgcctagaccaagaccatggagccttttcccctatgttttcttctagtag

SEQ ID NO: 241745 - DNA, 430 bp, Homo sapiens
atggatgtactatagaacatgtaaactttaaactatacaaagttctatagggaatatcaaacaatggcctttggtgataaaaaagagcaagcaaaacgagatatatgaatggataaccaataatatattagtacaattttatttgccaggatgggctaaagtaggttttgagagacacaataagtttgyaaagtctctaaaaagatacataaaaatttaaaaatatgcaaaagagatactgaagttcttaaaaaagaaacaagaagaaacatatagtaccccaagtatagtgatcatcatttgttgaagcatgcatcatttctccttgttgataccatctaaaaacttctaggtataagttgtttagggcttcaaaagactctaatatgttctaattgcttttcgtaaagcacactgattaaatctaaca

SEQ ID NO: 241746 - DNA, 602 bp, Homo sapiens
gatgccaggtttggcttttgtgttgtcaatcttttaatgtaaaaatataacaaaaaaaagatagcgatttaaacttttaaatttcatgtttttctttctcccagtagtaaactgtcaatgttgagaaagtgtccaattttgtttaaagataaactacaacaaacttaccagcacagtcagattctgactctgtcatttgctttgacagcagaggtctaaatccaaaatgataaagtgcttctttttcatcttccggctgtaactgtaagtgataataactgaatgctactcatgttacagtaagtgtctatatgyatattttctttagttctttgggcataaagtatcccttaactccagggattttgcaaatgtctttataaatgtattagattttgttttatatgtagttacagaaatcttgaggtggtgtttatataattaaaaatattttattgtaagggaaatatttaagtgactcagatgtttccacagttattagatatcatggggaagaatccaaatggctgataatatgttttaataaaacatgtagtgtttgttatgaggaacaggacttttcaaatattaaatgtgtatca

SEQ ID NO: 241747 - DNA, 587 bp, Homo sapiens
ggattattactcagaaaatataattaacatctacaaatgaataagcaaacggcaaagaagtgaatgaaaataaaataaacatgggagcaatttacaaaagaagaaatctacatggccaataaatgtgaaaagttgcttaattttgtaagcaatcatagaaattcaatttaaaacaaaaattaggtgcatgagactgatgaaattttttggaaatatcacaaaactgcatgctggcaaagaattgtcatgtttatggtagcagagtaaattgatacaacctctatgggaagcaacttaacaatatctagtaaaattaagatttgtatgtcttaaaatccagaaattctatttctagggatatatgctatagaaacttttaaatgtatgcctgataaaacacacttttttcagcattatttgtaatagcaaatatctgaagcatcttaaatacccatctcagaacaaacaaatgaaattgcagcatatctattgtcacaaaaacaaactagaaaatttatctagaaaatttatctatattttragcacagaactcaaaatataggtccattaaaaaagcaatttataat

SEQ ID NO: 241748 - DNA, 435 bp, Homo sapiens
tctatattttgagcacagaactcaaaatataggtccattaaaaaagcaatttatartcctatataaacattatgatacctattactgtgtatatttatgcatggtaggtttgtggtaaaaatataagacaaacatattattgaaaatgataaacactaaattcactatggtggttacatcttgatatggactgaatatttttgtccatccaacatcaatatactaaaactttaatctccaatgtgatgggatttagagatggggcctctggaagttaattaggtcatgagaatggagtcctatgatggaattagtctccttataagaagagacaagaaagagtttgtttcatctctctccacactttgccatgtgaagatacaataagaagatgtctgtttgcaaaccaaaaacagggccttcaccaagaacccc

SEQ ID NO: 241749 - DNA, 533 bp, Homo sapiens
aaaattatttatcagtagcagattctgttgaggtgcctttarcgatatgaagcacctgtcccagctgctgttctcagctgcacccctcttcgagtgttgtccttacctgactctgggagccacctcatctgtctctgcctgggaggcgcaccccactccactctcaggggtgttcagaactaatgactaagtgaaggggagagagtccttacaacagctctctcacttctgggtgggaaaatctctggagcaattcatattctggagcctcctgtgtgatcaggttgaggccaaacttctcttgagccctcttctttggctgatttcatcctctactctgtcttgcattcttcacaatcctagatgtttctactgagatcactccctcagtaaatcatttgcaaaataatttctgtcttctgctctattttcaggaactcagccttaagcgattttattttggaattaatgagagttaatctgttgattaggagactagacaaggtataggaatcagaaggcctggtttccag

SEQ ID NO: 241750 - DNA, 597 bp, Homo sapiens
tggaggataatctatatcttttaaacaatatagtaccttagtttgaaaataattgatattgaaaactcttttaaaatgtgagatagctgtaacaattatgttcaaattattaagaataacctcagaaatgcacttttaatgcttgtgtcactttaagggcacaatatgaaggttaagtttgagagtgtgcacaaataaatttcttgttcattaaccaaatgcactcttttaatattttgctgaagatattcctatcaatatgccttggcattattaagtgtggacacacttcattgtgctaacaactcactagatgctttgctagcagcagaatcctttcctggtaccaatactgttagatcggttgttaagaaattatggattaatccaattttttaatattatcctttcctaccacatgcatataaacatagtttggagttcattttcaaatataaagtacactgaatacaaaataaactctgtgttgcttcaaaacktcgtaggatgctgactcaatacagaaaagatatttgattgtttcttaaaccagaatttgaacagacaaaaattattgagtgttattttaatataaaa

SEQ ID NO: 241751 - DNA, 590 bp, Homo sapiens
acctggcataatggtttcttcttagaaaggtagtttggggaaaaggaaagagttgtttttgattagtctttttcctcccctctctcttcctttatagtttttcaaaagttgtcaatccttacttactcacatattcccattttaatagcatatatttcatgtacagcttttttgaaatatgtacagaactaaaatatctaaagcaaaatccaaatttcctgtcttctctctgttgtgatacttttgcaaataaacttcacacaaaagtaatatctggtaatgtcacatgactagaaactaaggcattctagttagaagtcaaaggagtttaaataataacttgtataacctataccaatattgtgttttcttctgtttcctattgtagttcttcacagagcaacacagaaggtaaagaaatcaaaatgatgtcccaaagtttacgtccataggagctgatttctcaatggggaatatttaaatatgaatgattcccacaagcatactgagcacatmgaaaaaaactgtaagagctcactgttttgaaaaatctgctgtgcatactaaagtggctgcaacttaaacaaaca

SEQ ID NO: 241752 - DNA, 570 bp, Homo sapiens
cactgactgtcttttaccacaacagatgagaagttatttcctttttgctagacctccagctcccctcctctcataygtgggctatatctttttcttacgttttagtttatttttgaaaatgttgttttgtatctgtaggtaatacattaacttcatattttatgtttcttcaagtacagatggtctctttcatgctccacactatgaaatatgagcaccacctcctcttgaccattcttttcataattgtggacaaatattttttattaaagacccaggagtgactatgatttcatcccttcttctgccatattcttgtccctcaaagtttctcattattcctttaaatatactatttataataaatacatcctctttttttttttaaatcaacctattcatttaatcaagtattttattttttctgagaccttcatctaaggctctatatcctactttgacccaaatcagtaattctatacactacattttctttcctgtttcctggattctatgtcatttccattcttttaccttcctttcctttgtccttttttgctttgtaaactc

SEQ ID NO: 241753 - DNA, 568 bp, Homo sapiens
gcctaaaataaaacctaacatctactgtgtgctcaatgaatattttttaatgccctcttcttcctcattattaaaaaataaaccataccccaagctagctgtctgtattaatttcaaattcatacagattgagagatcagttgtttaattttataaaatttttaattttctatctaaatcacatttgataggatcratcaaaggctcgcaaaatatcacttgcactctttcaagaactcaaatccagaacaagtgtttgcaatatatggcctctttgtaaatagctgtgacttttatagaacctaagttgacctttaagttttaatgaaacctgaaattggataaattcacatggcttcaagcctgagtgctttgcatggtaactgcaagtatcacataaagtggtcaccagcactcgcaggcaacacctgacttccctgggaaggacatttaggtgtgaagagttacagctgagtggttatgggattactgaggtgacatcgtctatgtctttgtgaattaaagctgtgtgaaggagaaatatgttttatcatttaaaaaattaaat

SEQ ID NO: 241754 - DNA, 486 bp, Homo sapiens
tgtagtatgtgacctaaaggtgggtacttattagaagtatagaatgatgggccaggagtggtggcttatgcctgtaatcccagcactttgagaggatgaggtgggaggattgcttgagtccaggagttccagacctgcctaggcaacagggtgagaccccatctctaaaaaaaataagaaagaaaaattagcctggggtgatggcacttgcgtatagtcccagctactccagaggctggggtcagaggatcacttgagccctagagatggaggctgcagtaagctgtgattgcaccactgtactccagcctggttgacagaatgaaaaaaaaaaagaagtatagaatgataaaraaaaatcacaggttcatgaaggtataagaatattggtcacatagcagcatcacagagctagggaaatgtcaaaacacttgcacacagataaactttgaataaggtttcagttaaagcaagaagttggggaaa

SEQ ID NO: 241755 - DNA, 428 bp, Homo sapiens
agtaaagtgtacaaatcttagatgtgcaacttgaatgttggcaaatgtatacacccttgcaaccagtgatgcactaaggctgactcctgacggctcataagtgctgattgtgcacattccttcctggmtttgtttcagtgatgtcaagttggtaatttgagatcaaccacactaacagaatttaaaacacagaaatttgcaaatgctggaaagcaggacattttttttttgtcccccagagagcagttgttaaaacgtttaccaggacacggctggttattaccatcaaccagatcaagatagacattttcattgccagagtgattaattcatgcctctttcaagttaatcccttgactattactctttggatttctatcaccattgaccaatttttgcctgtgcctaaactttgtataaatggaatc

SEQ ID NO: 241756 - DNA, 575 bp, Homo sapiens
ggtggtaagagatggaacatccttaacttactcttgttcttagtgaaaataattctagtttctgactatgaagcatgatgtcagctgtatactttttgtaaatattctttatcaagttgaataaatttccctctattcttattttacagggagttggttatttttttaatgaatgactgttggattttatcaaatgtttttactgcatattttgatatgawcatttaaattgtttagcatattgacatgatagattacattaattaattttaaataatgaatgagctttgcatacctgaataaatcccacttggtcatggtgtataattcttattatatattattgtgatttgatttgctaatatcttgtggagaatttttgcctctatgttcataagatatattgtagttttcttgaaaagtctcttgtaaatttttggtattaaggtaatattggccttatagaatgagttacaagtattgcctctgcttctgtcttctgaaagagattttataaaatggtacaatttttttccttatatatttggtagaattcaccagtgaaccccttctgg

SEQ ID NO: 241757 - DNA, 627 bp, Homo sapiens
tgccctatattttgcaatacagatctagaactaattgaagtccacttttgaataacactatactgcttcatgggtagtaggagaaacttataataacaaaataatgctatttcttccctctcattccttatattattgtggtcattcatttcacttatactaagcatatacatatgcataagcatacataattgagttaattgctgctatattattttgaataaaacatacttattaaatgatattgtgaataagaaaaaaattaaatttttattttatctataccaattctgtctataatgttccttctttatgtagatatgagtttctgactggtataatttttcttctctttaaaaaacttttttaaacatttcttataaggaagctcwactggcaacacattttctcaatttttgtttgtctgagaaagaagtcttaattttttcctttagtttttaaagagaatttcatcagttacagaattctgagctgacgttttcttctctcaacactttaaatatttcactctactctctttgtgctgcatgatgtttgggaagccaaatgtaattcttttctttgctcctctataggtaagatttttttttccctctggtttctatc

SEQ ID NO: 241758 - DNA, 397 bp, Homo sapiens
agagcttggttgtgacaaacagaatgacatctggccgggtgcggtggctcatgcctttaatcccagcactttgggaggccgaggcgggcagatcacgaggtcaggagatggagaccatcctggctaacacggtgaaaccttgtctctactaaaaatataaaaaattagctgggcgtggtggtgggtgcctgtagtccctgctactcgggaggctraggcaggagaatcgcttgaacccaggaggccgtgcttgaacccaggaggcaggagccgagatcgcgccactgcactccagcctgagctatggtgagactcatctaaaaaaaagaaaaaagaaaaaaggaatgacgtactagaggaagtgaggccaacaaaattcttcacattaaaggaattc

SEQ ID NO: 241759 - DNA, 397 bp, Homo sapiens
agagcttggttgtgacaaacagaatgacatctggccgggtgcggtggctcatgcctttaatcccagcactttgggaggccgaggcgggcagatcacgaggtcaggagatggagaccatcctggctaacacggtgaaaccttgtctctactaaaaatataaaaaattagctgggcgtggtggtgggtgcctgtagtccctgctactcgggaggctaaggcaggagaatcrcttgaacccaggaggccgtgcttgaacccaggaggcaggagccgagatcgcgccactgcactccagcctgagctatggtgagactcatctaaaaaaaagaaaaaagaaaaaaggaatgacgtactagaggaagtgaggccaacaaaattcttcacattaaaggaattc

SEQ ID NO: 241760 - DNA, 608 bp, Homo sapiens
acttgccttgtcacctttcctgcaatctaccccaacaaaataactttgccaactctaacagttttgtatggtttccacagcaaattactgcaaacttagtgtcttaaaacaacacaaatttatatcgtagctttgtagggcagaaatctgccacaggtcttagtgggctaaaatcaaggtgtcagcagggctgcaatccttccgtaagctgtttcctcatgtttttggttttctggaagccactcacatttgctcatggcccccttcctccatttcagagtcagaaataatagatcgtgtcctcaccctgcatctctctggccacctctgcttccagcttctacctttaaggacccttgtgatgacattgggaccagcttcatttctccaaatgtcctcctctcatacctctccttgcacatcaagctgctcaccctttgtgcttttgcacatgctgtttgattatgaaactccatgaccctcctcctcatgattcacttgactgacyattcaacgctcagttcaggtggctcttccttcagaaagcctttttccatctactgtcctactgcccctcccaaggtaagtacccaaacaattttctccaa

SEQ ID NO: 241761 - DNA, 279 bp, Homo sapiens
acctataaagagacttaaataaccacacaataatatttggagatttaaacattccactgacagtattagatagatcattgaggcagaaaaattgacaagtggaacctaattacactaatttaactaaagagcttctgcaaagctagaaactatcaacagtgtaracagacaacctagagaatgggaggaaatatttgcaaactatacaccctgcaaaggtctgatatccagaatctataaggaacttaaacaaataaaaaacaaaaaagcgcattaaaa

SEQ ID NO: 241762 - DNA, 615 bp, Homo sapiens
gatggggaatacaatgaattgctctttgcctccctgcaagagtctcagagaacagtgctggggagctcagcccaagacagtatttcttcctcccaatgcccggggggcagagccttcctctctccagaaatgttaagcccctgaatcatgtttcttttttattaggttaataaaacaccaggcccatcaagtctcaggatcgtaaaggtcagtgagtcatgtatgagtgcagcggagaggtagtggggcagcggcctgctccctagagcctgtgggagggaagaagctctccctccaggccagcactgactctgggattaagaccaaagatgcattcagggtggtgaaggcaagatggacaggaatccccatatgcccctctgacctcataggcctcagccacacagggttcccagggaagggtcaggacaggagacagctgggggaagtcagagctggcaggagcataggccctgcatctgaaaggcagcaagcagccaggcagatgagcagcagagttaaactagagcatcagcaatcagacacaatttggtgtyacagagcatggtggataggggcagggtcttgcagtcactgagttttaggttcaaagct

SEQ ID NO: 241763 - DNA, 565 bp, Homo sapiens
caggccttctggcttctgtgtagaactgcctctcaaaccattccatggaacacctggttggtgaggtggctcatgccagtaattctagcacttggggaagctgaggcaagaacagtgcttgagcccaggaatttgagaccagccagagcaatataagtgagaccctgactctaccaaaaaaaaaaaaaaaaacagttagctgagggatggtggtgcatgcctgtaatcccagctacrttggaggctgtggtaggagggtcacttgagcttggaatatgaaggctgcagtgagcggtgatcgagccactgcactccagcctgggtaacagagcgagacactgtctcgtaaataaaatgtttcgcatagattcccatagaatggagttagacatcaggcatagaattattagccactttgatgtctgccttgggagtaaaacatataataaggggcagctttaaaccatttcaatcaatagcctctaacttctccagaggttcttattttatgaattcctaagcaggagactacctggattaagacatttggtggacaccattctga

SEQ ID NO: 241764 - DNA, 565 bp, Homo sapiens
caggccttctggcttctgtgtagaactgcctctcaaaccattccatggaacacctggttggtgaggtggctcatgccagtaattctagcacttggggaagctgaggcaagaacagtgcttgagcccaggaatttgagaccagccagagcaatataagtgagaccctgactctaccaaaaaaaaaaaaaaaaacagttagctgagggatggtggtgcatgcctgtaatcccagctacattggaggctgtggtaggagggtcrcttgagcttggaatatgaaggctgcagtgagcggtgatcgagccactgcactccagcctgggtaacagagcgagacactgtctcgtaaataaaatgtttcgcatagattcccatagaatggagttagacatcaggcatagaattattagccactttgatgtctgccttgggagtaaaacatataataaggggcagctttaaaccatttcaatcaatagcctctaacttctccagaggttcttattttatgaattcctaagcaggagactacctggattaagacatttggtggacaccattctga

SEQ ID NO: 241765 - DNA, 565 bp, Homo sapiens
caggccttctggcttctgtgtagaactgcctctcaaaccattccatggaacacctggttggtgaggtggctcatgccagtaattctagcacttggggaagctgaggcaagaacagtgcttgagcccaggaatttgagaccagccagagcaatataagtgagaccctgactctaccaaaaaaaaaaaaaaaaacagttagctgagggatggtggtgcatgcctgtaatcccagctacattggaggctgtggtaggagggtcacttgagctyggaatatgaaggctgcagtgagcggtgatcgagccactgcactccagcctgggtaacagagcgagacactgtctcgtaaataaaatgtttcgcatagattcccatagaatggagttagacatcaggcatagaattattagccactttgatgtctgccttgggagtaaaacatataataaggggcagctttaaaccatttcaatcaatagcctctaacttctccagaggttcttattttatgaattcctaagcaggagactacctggattaagacatttggtggacaccattctga

SEQ ID NO: 241766 - DNA, 565 bp, Homo sapiens
caggccttctggcttctgtgtagaactgcctctcaaaccattccatggaacacctggttggtgaggtggctcatgccagtaattctagcacttggggaagctgaggcaagaacagtgcttgagcccaggaatttgagaccagccagagcaatataagtgagaccctgactctaccaaaaaaaaaaaaaaaaacagttagctgagggatggtggtgcatgcctgtaatcccagctacattggaggctgtggtaggagggtcacttgagcttggaatatgaaggctgcagtgagcggtgatcragccactgcactccagcctgggtaacagagcgagacactgtctcgtaaataaaatgtttcgcatagattcccatagaatggagttagacatcaggcatagaattattagccactttgatgtctgccttgggagtaaaacatataataaggggcagctttaaaccatttcaatcaatagcctctaacttctccagaggttcttattttatgaattcctaagcaggagactacctggattaagacatttggtggacaccattctga

SEQ ID NO: 241767 - DNA, 549 bp, Homo sapiens
gcagaggggtggtggtggaatggaaaaattccaaatgaataattcatcaaacctgctccctcccaggtctcaagggctctagtgactgccctcttgccagcctaagtgactttctaagtgtgaaaagtgggaagaggactctccactcacctgttattccagcccactaggatctaggattttttatttttakttttattttgaaatagggtctcattctgtcatccgggctggagtacagtggcataatatttgctcactatagccttgatctcctaggctcatgtgatcctctcaactcagcctccccagtagctgagattacaggcatgtaccaccatgcctggccaaattttgtgttttttgtagagatggggtttcaccattttgcccaggctggtctcaaatccctgggctcaagagatccaccctcctgggcctctctcagtgctcggcttatgggggtgagccactgtgcctaatctccaactaagattttttttttttgcgggggggacagagtctcgctctgtcacccaggctggagtg

SEQ ID NO: 241768 - DNA, 478 bp, Homo sapiens
ttccaaatgaataattcatcaaacctgctccctcccaggtctcaagggctctagtgactgccctcttgccagcctaagtgactttctaagtgtgaaaagtgggaagaggactctccactcacctgttattccagcccactaggatctaggattttttatttttagttttatttygaaatagggtctcattctgtcatccgggctggagtacagtggcataatatttgctcactatagccttgatctcctaggctcatgtgatcctctcaactcagcctccccagtagctgagattacaggcatgtaccaccatgcctggccaaattttgtgttttttgtagagatggggtttcaccattttgcccaggctggtctcaaatccctgggctcaagagatccaccctcctgggcctctctcagtgctcggcttatgggggtgagccactgtgcctaatctccaactaagattttttttttt

SEQ ID NO: 241769 - DNA, 478 bp, Homo sapiens
ttccaaatgaataattcatcaaacctgctccctcccaggtctcaagggctctagtgactgccctcttgccagcctaagtgactttctaagtgtgaaaagtgggaagaggactctccactcacctgttattccagcccactaggatctaggattttttatttttagttttattttgaaatagggtctcattctgtcatccgggctggagtacagtggcataatatttgctcactatagccttgatctcctaggctcatgtgatcctctcaactcagcctccccagtagctgagattacaggcatgtaccaccatgcctggccaaattttgtgttttttgtagagayggggtttcaccattttgcccaggctggtctcaaatccctgggctcaagagatccaccctcctgggcctctctcagtgctcggcttatgggggtgagccactgtgcctaatctccaactaagattttttttttt

SEQ ID NO: 241770 - DNA, 593 bp, Homo sapiens
tctgcatagtaactagctaacaacatgatgactgcatcaaacctgcacatatgaatattaactttgaatgtaaatgggctaaatgtcccaatcaaaagtcacagagtggcaagttttataaagaagtaagacccaactgtatgctctctgcaagggacccatctcacttgcagtgacacccatgggctcaaagtacagggattgagaaaaatctaccaagtaaatgaaaaacagaaaaaagtaggggttgctattctaatttaagacaaaacagacttgaaaccaacaatgattgcaaaagacaaagaagggcattacataatgataaatgtttaattcaacaagaagacttaactattctaaacatatatgcacccaacagaggagcatcaagatctataaagcaagtttcttacaaagagacttagataaccatgcagtaattgtgggatatttcaacccactactgacagtactagacagatcatcaaggcagaaaactaacaaggatattcaggacccaaactygacatttgaccaaatgggcctaacagacatctactgaaatcttcactcaaaaccaacagaatata

SEQ ID NO: 241771 - DNA, 405 bp, Homo sapiens
tagcatgaaatgtgtatagatttctagattaycttatagtattagtgatctgcacatcatacacttcactgatagatttgagtacagtaatgacacatgatttgcccaaggtcacacagcccttttgcatttagcaatgaacttacaatttattgactaataatcatacaataattaaggatctcacatcaaaactaaggactttattttgaattgccatcactaaaactcttatatgcaacatttaaatattatgttaggggaatggaggaagatggatttgtgagcacaaaattctctcagatccccattgaaaggactagcaatggaaatagaaaaagacctagttaaccaccgaaattaaggaatattgtcatctaagtgacaccccctttgaatgaattc

SEQ ID NO: 241772 - DNA, 477 bp, Homo sapiens
aacatcttctgaacagtttttgtgggcaagtctatagctacttacaagtgtgcaatgaggattaactccagcaagtctggaattcaccaggactgtttcaacaaagcacctgcaaggcactgatctttggccatgaaacataccaattaacagtattgctttttaaccatgagttgatggagtttcagtgtcattcatactattttgtcagcattgtttattggtaatagtgagactgatgatttaaacctgatcttggtgaaacmcctggggaccagggtggacaggaatggtactttgatgtaagagctgcttaagtaacaagtaaaagctggttaagtacttaaccaagtggccgtaagaaaccctggccgagacactattttgggctccctgatttcaaggtgttctgtgctcaggtctgcttcctgatctgagggaaaatgtgttcctgatacagaacttacagaggaaggg

SEQ ID NO: 241773 - DNA, 477 bp, Homo sapiens
aacatcttctgaacagtttttgtgggcaagtctatagctacttacaagtgtgcaatgaggattaactccagcaagtctggaattcaccaggactgtttcaacaaagcacctgcaaggcactgatctttggccatgaaacataccaattaacagtattgctttttaaccatgagttgatggagtttcagtgtcattcatactattttgtcagcattgtttattggtaatagtgagactgatgatttaaacctgatcttggtgaaacacctggggaccagggtggacaggaatggtactttgatgtaagagctgsttaagtaacaagtaaaagctggttaagtacttaaccaagtggccgtaagaaaccctggccgagacactattttgggctccctgatttcaaggtgttctgtgctcaggtctgcttcctgatctgagggaaaatgtgttcctgatacagaacttacagaggaaggg

SEQ ID NO: 241774 - DNA, 477 bp, Homo sapiens
aacatcttctgaacagtttttgtgggcaagtctatagctacttacaagtgtgcaatgaggattaactccagcaagtctggaattcaccaggactgtttcaacaaagcacctgcaaggcactgatctttggccatgaaacataccaattaacagtattgctttttaaccatgagttgatggagtttcagtgtcattcatactattttgtcagcattgtttattggtaatagtgagactgatgatttaaacctgatcttggtgaaacacctggggaccagggtggacaggaatggtactttgatgtaagagctgcttaagyaacaagtaaaagctggttaagtacttaaccaagtggccgtaagaaaccctggccgagacactattttgggctccctgatttcaaggtgttctgtgctcaggtctgcttcctgatctgagggaaaatgtgttcctgatacagaacttacagaggaaggg

SEQ ID NO: 241775 - DNA, 477 bp, Homo sapiens
aacatcttctgaacagtttttgtgggcaagtctatagctacttacaagtgtgcaatgaggattaactccagcaagtctggaattcaccaggactgtttcaacaaagcacctgcaaggcactgatctttggccatgaaacataccaattaacagtattgctttttaaccatgagttgatggagtttcagtgtcattcatactattttgtcagcattgtttattggtaatagtgagactgatgatttaaacctgatcttggtgaaacacctggggaccagggtggacaggaatggtactttgatgtaagagctgcttaagtaacaagtaaaagctggttaagtacttaaccaagtggccgtaagraaccctggccgagacactattttgggctccctgatttcaaggtgttctgtgctcaggtctgcttcctgatctgagggaaaatgtgttcctgatacagaacttacagaggaaggg

SEQ ID NO: 241776 - DNA, 410 bp, Homo sapiens
gaaaaaaaaagattaagttgctaatgcagatgctctttgacttacaatggggttaggtcctgataaacccatcgtaagctgacaacatcgccaagtccaaaatgcatttgttacatctaacctatttaacatcacaggttgcctcactcaccttataagtgctcagaacacttacattagcctacagttgggcaaaaatatctaacacaaagcctattttataataaagtgtgaggtatctcattcaacagtattatcgaatactgtatggaaagtgaaaagagagtaactggatgggtatctgaaatattttttctacttaatrtgtatcactttgacatcattgtaaggtagaaaaattgtaagtagacacactacccctccccccccacataagttgaggactgtct

SEQ ID NO: 241777 - DNA, 467 bp, Homo sapiens
taatatttccaagccagtaagtttttgtcattttttataatgtaatctaaatgatgaaatgtgttggctctgggctgtgtttttttatttgtctgaaaagccaagtattgagaatagtttgcaacaaataacacaacatttctcatttcaatttttcacatagtttaggatagtaccatcattttaccttcttgttgaatatctgagktgcccactggatttgcatggtttttctgaagcaccatcccctcccaataaaagacgttagctcctcctgcatggaaatatgtctttcattttgcagttgtttcttaaagctctgcttgtgaatgtttaaattataataaagagtaaagtattggacatttttaaatatactgttttttcattactattcaaataatatttattttctttaaaaaacaaatacaaactaagattttgtacaggacttgaatagtaattat

SEQ ID NO: 241778 - DNA, 625 bp, Homo sapiens
ttgtattagactttatggttgaggaaagtgaacctatactgagaaagcttttgagtgaccggtcatccatatgagttcctgcattttttttttttaccactatgaggaaaaggaaaagcaaatgaaaatamtatcacagagaaatttcttggtaggacatttcttaattttagaaagccgggatgttcttgaagccacgattttttaaaagatgtcttttttttctcttctccagaaaacttccttaatcatggtaaaaaaaacaaaacaaaacaaaaacaaaaaaacaccaaaaatttcttactctgggagaaaaaatggttctcctcacattaaaattccaagttgctcaaagggcatgatcctgattagattttaaaaggggtaggactgttttctccctgggtgaattttgtacttctctccacctccatatcataaatataggactgcattttaatcttcaggtcatatcctattttaaaatgtgaaagtaaaaatggtactttaaaattgttaagaaatatgcttgtttagattcgatgtatcttttggggtatgaaaaggagactttaaaacatttctgagaaaaggtggcagtcaaggcttatgaagccatccatag

SEQ ID NO: 241779 - DNA, 526 bp, Homo sapiens
gaaaaaaataggtagataataaaaagtatagataaaagaaaattcctaacctcaagcttctgagatttgacatcctcttcaactgttgcttcaatagctggttacattgttagagccatctctccttgaatatgaaatccactattcaaggacatgttgttctgcctcaagcaaagcaccaaggacagagcagtcactgaacaaattcaaaaatacatttggtgctagtattcatttatgtgtgtatatatatatttttatatatgtgtgtgtgtatatgtacatatattcgttatatttatatatataaatgaatactagcaccaagtgcatatatatgtgtgtgtatatatgtttatatatgakatatatatatatatatatatatatatatatcatatatatatatatacacacacacacatatatttcttaagttttgccttagattataaaatagtgagttaactaatagcttcccaggcagggttgatggctcagtcctgactagccatgtattttcagt

SEQ ID NO: 241780 - DNA, 647 bp, Homo sapiens
caagggaggatttttttttcccccactgtaggacagaatcatgggtctacttaattggatgctgacaataccacctgcaattttaggttcctcattctgctgtaccaatagttaaagaaggagtcagtgttcttgactcctataacaaagtaggaatgtggtttctggtatacaatgagggcaaggaagactatttctaaaacacgggagattcattgagacaccttttagtattctcttgacaaackgttgttgtcaatgaaaaactaaagcaaagtgctgtgggtgattaaagattgcatggattgggtggtagaaatagatagctgtgattaacttaggcttaatgatctgcaacagaagcaggtactgaaacacatttgttttatgtaaattattttttcttaccgccacctacttttctcacattatcctatataaacagcattgctggcacctagtataaaatatttggtttcagatagaaatccaaccaaattgaaatgatctcatgatgatgtgaaagttgaaggaaattttgctgtactttattttgaagatagaaaattttacttgaaaaaaggacaataaattaatcttagaggcaaaaatagtaatgacactctggttgtcatctgaggtgtccc

SEQ ID NO: 241781 - DNA, 460 bp, Homo sapiens
acttagtgatggtagagagcttgctccagcctttggagaagaattaaaataactattaccrgtttgaacaaataaccaaatgaataaaataatttttttcatgctattttagcaactctggaaaatttgctacctaccaatacctccaagacatgttgactttttctcatttacctgttcattttagttaatagccagttactaattagaaagtatattatatattttcctgactcctttctatctttaaatctgaaaggcaagaactgggacaaatagctattaaatttagaaaaataagttatcccttggttacatggtttcaagttgccgtatgtgtcattagcgttttcctatcaggaaattccaagtctctgtaagactctccctcttatccccttctctatttctaatcccactcttcctctctgttcctttgctgcttataaattttaagtat

SEQ ID NO: 241782 - DNA, 593 bp, Homo sapiens
gtttagcaaggttgcaagatacaaaatcaatatactaaaatcaattacatctctatatactcggaacaaacggtcatacattgaaattaatcaagagtaaatactctaaatagtgtaaaaatatgaaatacttggggttaaatatgacaaatatgtaaaactactgtacattaaaaactatgaaacattgctgagaaaaattaaaagatacccaaaaaatagataatttttttcatggctcagaagactcaatattgttaagatgtcaagtctctaaaaattgmatttataaagttagtacaattccaatcaaaattcagccagttattttggggaaactcaaaagctgattctaaaattcacatggaaatgcaaagaaatagaacaatgaaaaaaacacagaaatggtagaaataaagaagcatgacactggctgattctagatcttactataaatcaacagcaatcaaaataatgtagtagtattatcaagataaaaaatgggtcaaactgaataaagtccagaaatatacttacacatacacagcttttatttaacacagacacaagggcaactgagtggagaagtacag

SEQ ID NO: 241783 - DNA, 437 bp, Homo sapiens
cacacacacacacgtacaatacacccttgtgggagtaggtatgtaagagaaagatgttataagtctgatttggaggaaatacctttaaaaggcaataagaagagaaatattaaactccctaagagtaaggagaaaagaacaaatcaggtttccctctccctcagctaaattagtaagagttcagcaatgagaaatcacaggttgagtgaacaggttaagtggctggtgataatcacrtggtctgtggattgttagaaatgtgtaaagacaccagtgtggctgaagtgattctgtttgaaaagattttatacacagccccaaaatgtgcacaacgactagttctggcaaataagcaatcaacataccatattgaagatgtggccagaactggtcttgaaaccttttccagttagtgttttcagtggaatttcaggaaa

SEQ ID NO: 241784 - DNA, 285 bp, Homo sapiens
tgtttctatgattcttcttctactctcytttaaatctaagatttttatagttccattgagcaatactggtcccttcttatttctgatatttacaaacttgtggtcattcctccatattctttaaacacttatatacaatgattcattccatgtatccatcttaattctgccatcaacatgagtgatttcaaagcccataagaacatacactgacttgataattgtttgacctcaactctaatggtctccattcaagcccctcttcagtttggtcatctattcctg

SEQ ID NO: 241785 - DNA, 431 bp, Homo sapiens
attcttcttctactctcctttaaatctaagatttttatagttccattgagcaatactggtcccttcttatttctgatatttacaaacttgtggtcattcctccatattctttaaacacttatatacaatgattcattccatgtatccmtcttaattctgccatcaacatgagtgatttcaaagcccataagaacatacactgacttgataattgtttgacctcaactctaatggtctccattcaagcccctcttcagtttggtcatctattcctggcatcaactaaaatggttctatctttgtaatactgacctttaataattatttgaatttctttgaatcttttggtgctttgtccatcctgtcactttcactcttaaactgtgacttcattgaaatttctacttcattgttcctattatctttcacct

SEQ ID NO: 241786 - DNA, 446 bp, Homo sapiens
tgattcttcttctactctcctttaaatctaagatttttatagttccattgagcaatactggtcccttcttatttctgatatttacaaacttgtggtcattcctccatattctttaaacacttatatacaatgattcattccatgtatccatcttaattctgccatcaacatgagtgatttcaaagcccataagaacatacactgacttgataattgtttgacctcaactctaatggtctccattcaagcccctcttcagtttggtcatctattcctggcatcaactaaaatggttctatctttgtaataytgacctttaataattatttgaatttctttgaatcttttggtgctttgtccatcctgtcactttcactcttaaactgtgacttcattgaaatttctacttcattgttcctattatctttcacctttatattatgtct

SEQ ID NO: 241787 - DNA, 439 bp, Homo sapiens
tctcctttaaatctaagatttttatagttccattgagcaatactggtcccttcttatttctgatatttacaaacttgtggtcattcctccatattctttaaacacttatatacaatgattcattccatgtatccatcttaattctgccatcaacatgagtgatttcaaagcccataagaacatacactgacttgataattgtttgacctcaactctaatggtctccattcaagcccctcttcagtttggtcatctattcctggcatcaactaaaatggttctatctttgtaatactgacctttaataattatttgaatttcwttgaatcttttggtgctttgtccatcctgtcactttcactcttaaactgtgacttcattgaaatttctacttcattgttcctattatctttcacctttatattatgtctatcatggg

SEQ ID NO: 241788 - DNA, 648 bp, Homo sapiens
atatgggtattatgctccaggaacaatgaaaaaaagctgtttctctcattccctattktcctggagcaatgcattcacataatgccattttgacattgtagagacaagtctattaaaatatgaattatggttactttgtctcttatgttggtccatttagcataatagttgcaattgacgtaaatagcagatagtacattttattcttagtgtttgaaattaaaatagattgaatgattttcttgtatatatcattgttgaagtttttgttacactctgaattaatacaaatagcagtaataacacaactgaatgcacctaacatgtattattggatttatcccaagctgctttttcataaatgggcatttctatccatgtaactgaaactcagtaatgtttttaatgttttaaaatgagaatgttttaagaatcaaacttgcagaaatataatcaagatagcaggtgaggtgagaggatgtggtggcctgtaaaataagagtttaccatttgtctgaaggatattttggctacgtatatcaaaagccataaactctacacaccatctgatctagcatttacctttctaggatttattctaaagacaatgttaaggttgtacacaaagatttaactaaattttgttta

SEQ ID NO: 241789 - DNA, 661 bp, Homo sapiens
tcattttgtactcatgcccactccctatctgtggcagtcactgataatctcttttttactataatattgcttttcccaggayattttgtaaatggaatcatatagcatgtaacttttcaagacttgtttatttgatatagcttaaagattttgaaattcatccaagttttatgtgtatcagtatttcattccttttcagtgctgattagcattcaattatgtagacatgccacaatttttttatccattcacctactgaagcacatttgggttatatccagtttttggaaattattaatgaaacttttgtaaacactttatacagattgtgtgtgaaagtaactttttatttctctaaggtaaatatctaggaataagatttctaggatatatggtaattatgtattcaattttatgagaaaatgccaatttttttggctgctgttgtttctatttttatttatttttttaattttatttttgagatcaggactacacatgcaggtttgctttatagataaattgcatgttgcaggagtttggtgtacagattatttcgtcacccaggtaataagcatagtacctgataggtagtttttggatcctcatccttttcccacccgccaccctcaagtagaccccagtgactactgtttatttc

SEQ ID NO: 241790 - DNA, 661 bp, Homo sapiens
tcattttgtactcatgcccactccctatctgtggcagtcactgataatctcttttttactataatattgcttttcccaggatattttgtaaatggaatcatatagcatgtaacttttcaagacttgtttatttgatatagcttaaagattttgaaattcatccaagttttatgtgtatcagtatttcattccttttyagtgctgattagcattcaattatgtagacatgccacaatttttttatccattcacctactgaagcacatttgggttatatccagtttttggaaattattaatgaaacttttgtaaacactttatacagattgtgtgtgaaagtaactttttatttctctaaggtaaatatctaggaataagatttctaggatatatggtaattatgtattcaattttatgagaaaatgccaatttttttggctgctgttgtttctatttttatttatttttttaattttatttttgagatcaggactacacatgcaggtttgctttatagataaattgcatgttgcaggagtttggtgtacagattatttcgtcacccaggtaataagcatagtacctgataggtagtttttggatcctcatccttttcccacccgccaccctcaagtagaccccagtgactactgtttatttc

SEQ ID NO: 241791 - DNA, 580 bp, Homo sapiens
attaggctcttgggaaaaccctaatgatgcatcagaactacactttaatatttcaataattagcagtatttatttctgcatagttttggcctgagaatcctgctcttctggttgtcagaggctgtagcctgagtgttacttacactgttctgtagtrtaagtcacagagaacttctaggtacagaatacatgtttcacctgcagaaggaagtgttactataatcatagtgatgaagcatcactataatggctctcctcaccagagaggctattaggtatcagtcagtctcatcctttcaggttgttgcttcttttctgactctttggaacaatgagcaaatatttgtctctattacttcctttctcataattacatttccttatggtgcatggaactttgaagggggactcatcaattggatcaaaactgtcaaactgatcttattaaaattttatcttctattgctattcaggaaaaagttttcaatctccattagtttgtactaagtaatgttataaccagctctgtttccttttcaaactggattacccagtgataatctggttgcctttattttct

SEQ ID NO: 241792 - DNA, 566 bp, Homo sapiens
agaagctgtttttccgcagaatgctcatttgacttccaatatttgttaaactgcatcttatatgacttctgaatccaaagagtcatggtgaggaatccaccaaccccagatgggtccacgactagcagggattcttcaaactccttaaagwtgtctgaacttttctgtatgtgatttttattctccagaggcgagaatccacagtgctcatggtgtattcaaagaggtctgcaacactgaaaagattgaaaacagatgtttacttggactacttttctcattctggtatcccatgagactctgatgacgtttgcagctttgactccaaacccaaacctaaaaaatatttatctgagagtgtcagagtaaaatttctgggtaaaatctctgcctgctgaagaaggcacttgtacttctaaagagggcatggcacgcccctaccttaatatgattaatgatttccagcaatatttgaggcttcctgggcagtaccacaaatcatttcctacttttcacaataattaccttgataagaggcttccttaagaaagaccaaaaaaatttat

SEQ ID NO: 241793 - DNA, 588 bp, Homo sapiens
ctttattgaaagattttttattactgatttaatctcactacttgttattggtcttttcaggttttctaggttttctatctcttcctggttcaatcttgagaggttatatgtttccaggaatttattcatttcctctagtttgtgagcatatagttgtttgtaatagtctctgatgattttttttttttcaggagaccagagtcttattattactcaaatctcaaattagtctccctgagcattcagggatcagtttttaaggacaacttagtgggtggggaaagccagtgagccagaaatgctgattggtcaggtcagagatgaaatcatagggagttgactcttcttgtgcagagtcagttcctgggtgggggccacaagatcagatgagccagtttattgatctgggtggtgccagttgatccatcatctgcagagtctgcgaaatattttaaacactgatcttaggagcagtctagggagggtcagaatcttgtaacctccagctgcatgactcctaaaccataatttctaatcttgtggctaatttgttagtcctacaaagrcagtctaatccctaggcaaaag

SEQ ID NO: 241794 - DNA, 490 bp, Homo sapiens
ttaattccatgcccttgttttyattgcaaataatgctacaatgaacatatgagtacatgtgtctttttggtagaatggtttattttactttgggtatatacccagtaatgggattgctaagtcagataagagttttatttttagtttttttaaggaatcttcaaactgctttccacagtagctgaactaatttacattttcctcaacagtgtatatgcattcccttttctccatagcctcatcaacataatatcttttgactttttaatagtagccattctgactggtttgagataatatctcactgtggttttgatttgcatttctctgatgattagtgaggttgagcattttttttcttatgtttgttggctgcttgtatgtcttcttttgagaaatgtctgtttcctttgctcactttttaatggggctattgttttttgcttgtttgtgtatattccttatagattcttgatatgagaccgttgtc

SEQ ID NO: 241795 - DNA, 515 bp, Homo sapiens
tttcctttgctcactttttaatggggctattgttttttgcttgtttgtgtatattccttatagattcttgatatgagaccgttgtctgacgcatagtttgtgaatattttctctcatgctgtaggttgtcagtttactaaattgataatttcttttgccatgcagaagctctttagtttaattaggtctcatctgtctatttttgtttttgttgcaaatgcttttgagaacttagtcataaattatgtcccaaggccaatgtctagaagggtatttcctaggttttcttataggattttaatctttttatgtattacatttaggcattttatccatcttgagttaatttttgtatatggtggcatgtagktgttctatttttattcttctgcatgtagtaagccagttattccagcaccatttattaaatagggagtcctttcttcattgcttatttttgtcaactttgtcaaagatcagttggttataagggttcagttttatttctgggttcc

SEQ ID NO: 241796 - DNA, 593 bp, Homo sapiens
tgtgtgatcttggcctattgaccctcagtttctttatctgtaaggtggaaataataaaaccaaaaccatagggttttttaattaagtgaaatgatatatataaagtgtattgaagaaatggataattagatagctcttaaatttcagaaatgtttagaaataataaaacttcagctataaatttgagaaaattatgatgtacatgtgtaatttttcagtttcatgyaggtaagctttagcttttatgttattcctatattctatatgaaaggtcacattttcatacaaatacccttcagtctaccctaataaaagtggtacaagttgtcagctcagtagaaaacataagatatttgctttttttatggtgtataagtgaaattaatattgttctttaatcatactgctttttattaaacagtaaactagtcaaatacacctttttgatgtagtaacatctgaaaaattctgataaatcacatttgaagcatacttagaggaattcactgtttaattctagtagtgaattattttatacatcaagaacccatttttcaattagatatttgtcaactggcttatccagcttacaa

SEQ ID NO: 241797 - DNA, 527 bp, Homo sapiens
ttttctctgtttctcagaaattgggtaatttctcagattgggttatttttattatcctaacttcaacttcactgattgtttactctgttcttcccattttccattgagctcatccattgagtttttcattagtatcttttagttctaaaatgttcacttgattcttctttacgtcttatattactttgctgagattttatgtatttttgttttaagtgcatccatgtttgctcactgaagcatttttatgatagttgctttaaaawcctcaccagataattccaacattgtgtcctctcagtgttggcttctgttgatggtcttttcttattcaagttgagattttcctggttcgtggtttgactagtgattttctagtgtgttctgaacatattgagtattatgttatgagacccagattcttactgaaatcctttgcttcagcaggccccctctggcactgcactagtgggagaaggagtccactctgttggtactaccaagtggggatggaagtacagcttccc

SEQ ID NO: 241798 - DNA, 605 bp, Homo sapiens
ttcaaataaaatacttgaatttcaagaactttccaaaagacaaaaaacgcctaggaagctgctatagctccakctcacaggggaaacaagcaaaatcttagagacataatttagaggagaactgagaaactaataagaagtcagagacaaaaggtgatgagtaaaagactgctagatgaggatgccaagaacccacggttttaatcctgccaaaaagatcacactgttgcaagctctagcaaggtcaaagatatttcaatttggagctatttttggcagtagtgtcactatatgaagtcagaataaaggagtaagttattcaggagtgggaggtggaggtataaacaaacaatttacaatgagaatattaaaaataaaaatacattttgtttttttggttgttcttaagcattattttggggttctctgggttcactcttgccaaatggagacctttatttctgtcacaagttcagggatatctatctatgtctgcctagtaacagactgtctaacattctattttaacttgggtcagaaataaaaatccatccagatgacttacacaacaggtggatattatcagactttaaaagaataaaaaa

SEQ ID NO: 241799 - DNA, 501 bp, Homo sapiens
atacagaaataagtattgtaactaaactatattcagattatccagtgctaacaagtactcacatagcaaaaaaataaaaagaggctaatgataatcctttatgacagtcttcactttcacacaaagatttaaacactctaatagttcactattaagagyacaggacagaagattttcagtttcatttatactcaaagcagagaaatcaccaaaactcttttacatctctccattttccttaaagcatgttaacagcaggtggtctataccatcttggaaataggtaggtggcttaaaatgcctttacatgtcaagagcctgaattaaaaacaaatgtgagctttaacttcattttcattttaaactacattctatatactgatttcatactataaatttgctcattttaatccatgttcttcagagagttaagcattatttaagctgatatagctgaaaaaaataagccagtaagaaattgtaagtgcttctgatattcat

SEQ ID NO: 241800 - DNA, 452 bp, Homo sapiens
tttggcaaactcagtaccagaagttctgtcaaatttttaaaaccacatgtgctgccacaataacctctgtggcaatgtaggaaaccaaaaattacatcttgaatgtaaaatccaagacattataaatgctgtgaattattaaagtaaatccaagaccttatctgtaaaaaaaggaaatagctgctctgaactacaaaagcataacatacttcaagagattgtacccacatatgaaatacctgatttttgaaagtttaatatgattgtgatttttattttagtaagactctcaagaggaatttttttttctgagaggtctgttgcccaggttggagtgtagtagcaagattgtagctcaatgcagcytcgtactcatgggctcaagcaatcctcccacttctcctgagtggctggggctacaggcacgcaccaccccgctggctatttattta

SEQ ID NO: 241801 - DNA, 576 bp, Homo sapiens
  misc_feature (1)...(576): n = A,T,C or G
ccagagatgctgtctgggagccagaagttggagtcaaaaaccttagaaacttatgtgatggtcctattccacgaagctnaagttgagggaaaggaagtaaagtggaggacaaaatagaaaggactttgcatggtactgacccacaatacaaagtccctcctattcttccctcccctttccacaaaatgtaagacaaagtaccctttaactttgatctcctctccttaaacggaaagaaacagtcacttccattgctacaagctgcaatcctgggtttgggggagggatgacttctctttactctcccatagctgtgccagctggtgtctccctaggtcatgttccactcctagttcactggcttgaagcccagcctagcactaggagttgcctaggaattgcagtctttgtgtcctaaactgtctttcaagtttacctaggaccccacagcactttagccctaagtggtgaggtttgcacagaaactcaagtttggaccactgggatgggtgacccccctctggctagggctggtccagatgytcccattgtgcacaggcaatggctgagctcaat

SEQ ID NO: 241802 - DNA, 559 bp, Homo sapiens
ctacagttgacccctgaaaacacgggagttgagggggcaccaactccccrtgcagcaaaaaatttgcacataacttttgacttccccaaaacttatctattaatagcctactgttaaccagaagccttattgataacataaacagccagttaacacatattttatatgttgtatttattatattgtatattcttataataaagtaagctagagagaaaaggttattaagaaaatcataagaaagagaaaacatatttactattcattaagtagaagtgggtcatcacaaaagccttcatgttgagaaggctgaggaggatgtggaagaggagggggtggtcttgctgtctcagggtggcagagggtgaagaagtagatgaggtagaaggtgtggcaggaaaggcaggcacacgtcttgtaactttatagaaataccatcataatttctggttgacttttctgctttttctttactctaaaaatgtttttatacagtaccaatccttcttctaccatttgctttagtttcagtgcccatatcatatagaaggatccatgt

SEQ ID NO: 241803 - DNA, 614 bp, Homo sapiens
tctatgttgggaactaggcacgcacgtaatcttatttaaattcctcayaacaattctgtgaggaagtccaattattatgcccattttatagacaaagaaattaaggcttacaaagttaaagtaacttgtctgagctactgcctcttcatgtatactgttagaatccgagaagatgaaaaggcctgcttacttttcctaaatccagagagaaactgactagttgatatggacaaattatagagtctttttggggcctctgttgctatccgtgtcaaatatagttttaaatggccagcaaggtaagtaatcaatatatgaaatcttaaggaggaagtatgcctccatgtacgttcataggctgggtgcagcagcatgtgcctatagacttagctactgaagaggctgaagcaggaggattgcttgagcctaggagtttgatgccagcctaggcaacatagtgagacctgctctctaattaaaaaaacaaaacaaaacaatacacacagttttctttcttcagcttaacaatagtcactgtaattcttctgacaaggcatggtctaaaatcaggaccttattccacatgaacataccacaagggccataggaaaaca

SEQ ID NO: 241804 - DNA, 564 bp, Homo sapiens
ctgcttaactgaaaggaggtgcaccttctgtggttataagcccacagctggtatcatttccagagtttaacactgggattttccccaccctcaggctgagttcaaggtgatggcaagaaaatggtgaattaagagtttaaatacaggcagtctgacttcaaagccttcatgcttaatttctgtgctattctggcagaaagaaatataatagtgaacttcagtgtggctaccaacatggaaaccaagagctatggaatactgttcyggatgtcatcattgtggcaaaaggagtatgttgataatctctggaaaactctgttttatccttatgtaaaactggtgcccttctatctaggacaccatgtataatttttgggtcactatacttcaaaattatgaaatcagaaaggtcaactaatatagagtgaggaggaagtgtgatggtgttagagatgctgttcaggaaaaaatttatacagattggaagtgatgcatgaagctgaaagggaatgtaaccaatccattaaagtatccagagtatggacaacatgagcatagtcttag

SEQ ID NO: 241805 - DNA, 235 bp, Homo sapiens
tgggacaacccagtggggctagcaaccctctctcttgtctgcagtcatctctagcctgccccatgcctcctatyttcctcctagaagacctactacctgtacctgcacatctcacatacactggcacctattccctacaaggagagggagagctaccatttattaaacacctactgtatgccaggcagtgtggctgggtgctttcacctggtgctctattatgtttgtttaatct

SEQ ID NO: 241806 - DNA, 451 bp, Homo sapiens
attttggttccacccatagtggaaacaatagaagtaaccctgttgtgattggcagtcccaagggggccttgtgtctttggatggaatttatagatggctctttgctgaccagagttcatcataatgggtaggggaagggctgagtgcataagactggcgttggttgagtctttgaaccagtaaaatggctccctttagatgtgggagcctgacaaccaaaattagtgactgaagcataagtttcaaatcatcaaggtttattaagccagcttgagggtgcrcccaggaaaaatgagagtcacagacacatctgcagctctttttttccaaagaggttctcaggaggtttgatatttatacattttccttaaaaaaggaatgggagcagtgagaggaattactacatatttgtcagactttagttagtgcccaggaaatctacattttacat

SEQ ID NO: 241807 - DNA, 514 bp, Homo sapiens
ctcaaagcaattgtttaagtaggggcctcagccatgctaatagctattatcataggaccttatgtctattaatgtctcctcagcagaaggaaatgcaaacttatgacattctgattgtgataagcagcacactttcacctacgaggggctgtaatcgaagcagaagtgcctyacaaattaactagcagtcgcccacacatcaagcacagaagatactttctctatcataggtaagaaagggacttatttctcatcctggagcatcagtggctgtgtcagccccaccacagcttctgatgggactggagctacactgacatgtatgattaaagctccatgttataccgcagtggctgagttttcaaggagatggaggaaacctcacaggacccctggggcaggacacaacactgctcctcagaacattccttttaaaaaagttgtcatgaaatccaattaacgagctggaaggccatcgtgggcaggcctcctcggggttaataaataatagaat

SEQ ID NO: 241808 - DNA, 550 bp, Homo sapiens
acaggagaaatacctgaaattctgtgaaatattgtctcgcatagaaaatggagttgttacaagccaggagagattgggtgcctattttcaaccttcttaaagacaagaaattccaaccaagaatttcatatcctgtcaaattaagattaataaatgaaagagaaataaaatcttttccagacactccagtactaagagaaatccttattattaaaggcagtcttacaagagacccttcagggagttctaaatatggaaacaaaggaacgatatttgcatttacaaaaacatacttaagtacgtggcccacagaccctaataagcaaccacacaatagaaactacaaagcaaccagctaacaactccatgataggatcaaaacctcacatattaacattaaccttgaatatgaacactctaaatgctccacttaagaggcacagagtagcaagttggaaaagaaaagaaaagaaaagaaaasaaaactcatctgtctgcagtcttcaagagaccaatatcacatatatgacacccataggctcaaagtaaa

SEQ ID NO: 241809 - DNA, 560 bp, Homo sapiens
tatactagttctgtttttatttttttgagaagcctccatactgttttacatcattgttgtactaatttacatttccaccaacagtgcgcaaaagttccctttacattctcaccaayacttgtgatctcttgtctttgtgataatagtcatcctaacaagtgtgaagtgatttctcattgtgcttttgatttgcatttccctgatgattagtgatgttgagcacctttccatacacttgttagccacttttatttcttctccagaaatatttctgttcatgtctttgcccaattttcaagtgggctctttgttttttgctactgagttgtgtatgtttcttatatgttttttatattaaccttatgtgatatatggtgggcaagtattttcctcccatcccataaactgccttctcactctgttgactgtttcctttgctgtgcaacaaatgatcttcaatgataatacaagaatatgcaatacagaaatgatagtcacttcaacagatggtgttgggaaaactggatttccacaggcagaacaaatgaaatggatcctta

SEQ ID NO: 241810 - DNA, 560 bp, Homo sapiens
tatactagttctgtttttatttttttgagaagcctccatactgttttacatcattgttgtactaatttacatttccaccaacagtgcgcaaaagttccctttacattctcaccaatacttgtgatctcttgtctttgtgataatagtcatcctaacaagtgtgaagtgatttctcattgtgcttttgatttgcatttccctgatgattagtgatgttgagcacctttccatacacttgttagccacttttatttcttctccagaaatatttctgttcrtgtctttgcccaattttcaagtgggctctttgttttttgctactgagttgtgtatgtttcttatatgttttttatattaaccttatgtgatatatggtgggcaagtattttcctcccatcccataaactgccttctcactctgttgactgtttcctttgctgtgcaacaaatgatcttcaatgataatacaagaatatgcaatacagaaatgatagtcacttcaacagatggtgttgggaaaactggatttccacaggcagaacaaatgaaatggatcctta

SEQ ID NO: 241811 - DNA, 557 bp, Homo sapiens
tctcagaacactgtggtaacttctggacattctctgctgttatcattgcttcttccttctgggtttttttcccccttatatgggcagataattttctccattggaatgaaaaagtcttgcttcatgctctttaactgtgtgaccttgggcgtattactttactttggggcaaaccattttccttcttgaggaccaaatgtgctcttttataaaacgagcagttagaattagattgtctctctggacacggcttatgttgacaacctggatcacattagaggatcacactgagacctttatgtcggcctcagttyctccatctgtaaagtagaggttgggcttagattatagatgataaagacaccaactttcctggaaaggattctggaaaggattctgaacttaggctcagcctcagtaagaaggagttctgtgattaaacagggatgcccacacatcagcaacagaaatgggcaggtcaaccatgtatgctgtgcctcagtgaagattttatgctatgctgtgcatttgatatccattctctatatttgatatcc

SEQ ID NO: 241812 - DNA, 591 bp, Homo sapiens
aagcttgataattttattagcacacagagtatcacacaggtatacaatgtgctgataagatctggtgaagataaagtagtttcttgctacaagccagaagattcagcaaaacccccatgaaacaacaaagacttccatttcagcaaggttgcagtggatccacagtctatggtycaaagagatagaaaatttgcttcttcttgcacaattacaaccttcggccctcttcgaattttggaggcatattgtgtgatcttaggtaacttaatctcttcaagcctcagtttcatcatctgtcaaattgagataattgtccattcataatagggctgtttaaagactagagaaggtgattcatgtaaataatttggcacagggctggcttataggaagtgtcttatagcaattttttctgaagataaacttcctctaagttgctgaaatgaaaacgaaacagctgaatcctattgactcagaagcatagtttgtaaaacactttatcttgaaaatgttttgagatgagtatattcacacagaaatatttgatttctttcccaattaacacaaatgattgattggcttgccaaatca

SEQ ID NO: 241813 - DNA, 361 bp, Homo sapiens
caggtaacaaacttgcacatgtatcccctgaatctaaaatgaaagttgaaaaaagagagaayggcaattaatacatgatgggattaaagcagtagccattacacggtgacttgaattcccctggggtaatggccccaccctgagacaaaaaagattatgaaaggcattaaaacatactaaaaactaaattagatctagtttgactacaattcatctaatctatatatgaagaacccgcattttggggtaaaaaccacatatgctaactgcacttgggccataagtatacaatgccaacaacatgcatggtgaattaaactacatttgtgcataaaacagactttttaggggcattaggtgt

SEQ ID NO: 241814 - DNA, 615 bp, Homo sapiens
tgtacataaatgttcatagaagctttatttgtaatagccataaactgggactaactcaaatgtccatcaacaaaccagtatacaaatgaatactattcatatgacgggagagtatttataaacaaaaaggaatgaactcctgcaatacccaataagatggatgaatttcaaaatgatatcttttgacatacataagaacttaatatttaataccacctaatcaatttattcttacatgagttctgcctctattgttatatttataagaatttccttgctcttaaattgaatatttgaccacacaatcttttaatactttacttttacactgtcattttawaaccatctagaattaattttggtctaagatataagttagggaatgggcattaacatcttttcttatctggtttgctagtttttaggaccgtttttaattatttaggcctgagtgttttggtttgttcttctcagatagaagtcagtacgtgtcaaataaatattatataaaactaatgggcatcgaactgtaagaggaaatttatgcataattctgctttccaaccaaacaaaaaagtcataattttcatgagttttgtatcatataaggagaca

SEQ ID NO: 241815 - DNA, 615 bp, Homo sapiens
tgtacataaatgttcatagaagctttatttgtaatagccataaactgggactaactcaaatgtccatcaacaaaccagtatacaaatgaatactattcatatgacgggagagtatttataaacaaaaaggaatgaactcctgcaatacccaataagatggatgaatttcaaaatgatatcttttgacatacataagaacttaatatttaataccacctaatcaatttattcttacatgagttctgcctctattgttatatttataagaatttccttgctcttaaattgaatatttgaccacacaatcttttaatactttacttttacactgtcattttataaccatctagaattaattttggtctaagayataagttagggaatgggcattaacatcttttcttatctggtttgctagtttttaggaccgtttttaattatttaggcctgagtgttttggtttgttcttctcagatagaagtcagtacgtgtcaaataaatattatataaaactaatgggcatcgaactgtaagaggaaatttatgcataattctgctttccaaccaaacaaaaaagtcataattttcatgagttttgtatcatataaggagaca

SEQ ID NO: 241816 - DNA, 615 bp, Homo sapiens
tgtacataaatgttcatagaagctttatttgtaatagccataaactgggactaactcaaatgtccatcaacaaaccagtatacaaatgaatactattcatatgacgggagagtatttataaacaaaaaggaatgaactcctgcaatacccaataagatggatgaatttcaaaatgatatcttttgacatacataagaacttaatatttaataccacctaatcaatttattcttacatgagttctgcctctattgttatatttataagaatttccttgctcttaaattgaatatttgaccacacaatcttttaatactttacttttacactgtcattttataaccatctagaattaattttggtctaagatataagttagggaatgggcattaacatcttttcttatctggtttgctagtttttaggaccgtttttaattatttaggcctgagtgttttggtttgttcttctcagatagaagtcagtacgtgtcaaataaatrttatataaaactaatgggcatcgaactgtaagaggaaatttatgcataattctgctttccaaccaaacaaaaaagtcataattttcatgagttttgtatcatataaggagaca

SEQ ID NO: 241817 - DNA, 629 bp, Homo sapiens
ctggtagaaatatgaatagtaaagaacattctgataaagtcttagatgaaaatcaggaatgtcttattggaaactggaagaaaaaccatccttgttgtaaggtggcaaggaacttggtggccttgtgtcaatgtcttcatgttttgtggagggcagaatttgcaagcaatgaaggaggattttggtggaagaaatatctacatgaagtattgaaggagcagcatgacttcttttgattgtttgtagcaaaatgtgagaagagagaaacaaattaaagacagaatttataatcaaaaggcaagcataacttaaagatttggaaaattctcagccttcctgtaaaaaataaaaagtcgtgtttgggagaaaatatcaraagtgtggccaagtgaacatttgaaagagattagtatggatagaagaaagttagatgctacttatcaagacaatgaaaaaatgaccctgaagacattttgcagatcttcagggctgccactgaaggcctgagtgtcagggctttggaggcagaatggtttcaagggaggggcccagggtgcccataggaccgtggagctcacttccctgtggcatctcatgtctctgccccctgcagattggcttagatttct

SEQ ID NO: 241818 - DNA, 569 bp, Homo sapiens
actttagccatgagataaacacaaattcaccagcttgcaaacaaaacacctgttggatccaaacagtggtttttatcttaatagaaaaataacagcagatttaaagcaggcagaaaataaaatagagaaaaaaagagaacttatgaactctatactttgcaggttgaccttagggctctttttctcaatgtaaatgtgcacaaagaccatactacttycattttacataaactctggcaagtagagatgccataaaacctacagagtgctcacagaggagtcattctctttgttttctcctcattcttacatcatttgtttcccactttttttttttttcctaaaaggaggaactgagctgtggcttagggtttttgtgtggtggatcaatgtgtgcttgcttgtgggcaggactccacagtgtgtcaccactgagttgtttccaccctcttacatgtctcagtttctctctccagaggtctaggacttcagagagggctcaaaacgctgggcaatcagcccttatatgagtttcctggatgagccttattctttcaaattaattgttg

SEQ ID NO: 241819 - DNA, 574 bp, Homo sapiens
ccagtatcacaacagtatgctgtactgcgtactgtagtcttataagatgttaccactggaagaaacagggtaaaggatacacagaattgcactgtactatttcttataactgcttgtgaatctactatgatgtcaaaataaaacttttaattaaaaagaaaaaagcaaaagtaacgatttgttgtttatctgaaagtcaaattaaactgggcatcctgtattttatcaggcatctctgggagcttgttggagatgcagattccctggccccacttcagacccactacatcagaatctgtgttgtaacactaaagtatgagaagctctgatyagtggctcctgggtgtgttagtccattttgcattgctatataggaatatgtgaggctgggtatttacaaagaaaagacgtttgtttggctcacagttctgcaggaggcaaaagaagcctggcaccagcatctgcttctggtaaggactgcaggggagcttccaatcatgcagacagtgtaggggggatcaggtgtgccgcaggccacggggaggtgtcccagactgttttcaacaatcagatc

SEQ ID NO: 241820 - DNA, 589 bp, Homo sapiens
tttgtgatgatggaatgttctgtatcttgactgtagtgatgccagtatcacaacagtatgctgtactgcgtactgtagtcttataagatgttaccactggaagaaacagggtaaaggatacacagaattgcactgtactatttcttataactgcttgtgaatctactatgatgtcaaaataaaacttttaattaaaaagaaaaaagcaaaagtaacgatttgttgtttatctgaaagtcaaattaaactgggcatcctgtattttatcaggcatctctgggagcttgttggagatgcagattccctggccccacttcagacccactacatcagaatctgtgttgtaacactaaagtatgagaagctctgatcagtggctcctgggtgtgttagtccattttgcattgctatataggaatatgtgaggctgrgtatttacaaagaaaagacgtttgtttggctcacagttctgcaggaggcaaaagaagcctggcaccagcatctgcttctggtaaggactgcaggggagcttccaatcatgcagacagtgtaggggggatcaggtgtgccgcaggccacggggaggtgt

SEQ ID NO: 241821 - DNA, 580 bp, Homo sapiens
gttctgtatcttgactgtagtgatgccagtatcacaacagtatgctgtactgcgtactgtagtcttataagatgttaccactggaagaaacagggtaaaggatacacagaattgcactgtactatttcttataactgcttgtgaatctactatgatgtcaaaataaaacttttaattaaaaagaaaaaagcaaaagtaacgatttgttgtttatctgaaagtcaaattaaactgggcatcctgtattttatcaggcatctctgggagcttgttggagatgcagattccctggccccacttcagacccactacatcagaatctgtgttgtaacactaaagtatgagaagctctgatcagtggctcctgggtgtgttagtccattttgcattgctatataggaatatgtgaggctgggtatttacaaagaaaagacgtttgtttggctcacagttctgcaggaggcaaaagaagcctggcaccagcatctgcttctggtaaggactgcaggggagcttccaatcatgcagacagtgwaggggggatcaggtgtgccgcaggccacggggaggtgtcccagac

SEQ ID NO: 241822 - DNA, 574 bp, Homo sapiens
gtttttgagtgtatttcttcatagagtttttattttggttatttcartagacatatgtgacttatcgcagtctgctggtatcaatgttttgccaccttgaaggacatgtggaaacctttcttccatttaggtcccttatctttctttctttcttcctttttttttttttttttttttgagacagagtctcactctgtcgcccaggctgcagtgcaatgaagcgaacttccgcatcctaggttcaaacaattctcctgcctcagcctcccgagtagctggaattacaggcattcgctactacccccagctaactttttgtatttttagtagagatggtatttcactatgttggccaggctggtcttgaactcctgacctcaggtgatccacctgcctcgccctcccagagtgctgggattacaggcatgagccaccgtgcctggcccctttcacaatgttatcttgagcatcaaataatgctataatttttgttttgatcttcagattcttaaaataaaactcacatgagaaacaatggtctatggtttgtactcatatgcttcgtttttatgtt

SEQ ID NO: 241823 - DNA, 579 bp, Homo sapiens
tatagtgtgaatcaatagctcacttccttttattgccaaatgattttcattgtatggataccacagtgtgttcatccattcatctgcttaaagatatcttagtgacttcactttggggtagttatgaataaagctgctatacatatttttgtatggacaaaagtttcaaatcagttggctaaatagctaggagcacagtttgccacattaaagctcagtaaattgttacaaagtaaacacactcatcagctagcacaagcaacagaacagccctcacccagtcgtacattccctcctccacaaaagtcacaattatcttcacttctgttgccacacgttaattttgcctgggttcaagctttgaatggatcatctggtatgttcttctttgtgtctggcttctttcgctaagtatcctctgtgttggtgcatgtggtrgttattttcattgttctatatccttccattgcaaatatatattacagttttgtctttaggtttttgctggtggatgtctgggtttttcccggtttggataatgctatgaacattccttttttatttttagacggagtcttg

SEQ ID NO: 241824 - DNA, 575 bp, Homo sapiens
gggtatatacctagcagtgggattcctggattgtatggtaactctatttttagttttttgaggaacctccaaactgttctctatagtgattgtactaatttatattcccatcaaaagtagacaagggttctgttttcttcacattcttgccagcatttgttattgcctgtcttttggataaaagccattttaactggggtgagatgatatctcrttgtagctttgatttgaatttctctgagatcaatgatgttgactccttttcatatgctgttttgccatttgtatgtcttcttttgagaaatgcctattcaaatctatgctgagacacctggagctggaggtgggatgacacaagcacccctgtggctgccaccactaggattgtgctgggccaaacctgaaaccagcacagcactgggtctcacccagggcccattgtaaccactacctggctattacctatgtttgcttaaggccctagagctctgcaatcagtaggggtgaagccagccaggcttgtgtccttcccttcaggatggcaagttcccccaagccctggacaggtctagata

SEQ ID NO: 241825 - DNA, 508 bp, Homo sapiens
gcattttacaaaatcactcttggatttaaaaggaagttgcggaatatttaaaactaaatgataataaaaacacagactgccaataaagcaattgttagaaggagaattatagctttaagaccatttttcagaaaatacaatttttaaaaacaaactagcattcaactcaagagttggaataagagcaacaaagtaaaaccaaaaaaaaaaaaaaaacacacacaaaaggagataataaccatcagggcacacatcaatcaaataaaacaatggagaagattaacgaaggcagaaataaagtcattgaaaaaattaacaagacagacacatctcacaagactcaccaaggaaaaaagatgakcataaaagtaaactatgagaggaaatacagaacaaaaagagataataactgcaaacacagtggagatttttaaaaattgtaaaggagaattttattgtaaatgaaaaattgaagccctcaattcaatgaataaaatcttataaaaat

SEQ ID NO: 241826 - DNA, 199 bp, Homo sapiens
ttcttttgagcatttgtcacttccaartgaaaaaaaaaaaaagtatctaattttttccagttctttctggtaataaattcatcttccctttaatagggctctattaaagttttaataacagaattgtcttttgttagtaatgagtagaatggatgatctattcatttgcttatttacccatccacactagaagtagagc

SEQ ID NO: 241827 - DNA, 616 bp, Homo sapiens
gattaccgtgagggttgtatgagaaagtttgtatctgactcatggtagattcaggaactattaattccctcttccgtttatataatctacaaactgaataaatcatctctgcgtgatcttggggcaaataagatccyaataatgccttcgctgctggcctctcccctgggcccccacctttttgagctatacttttaggaagttagaatgatgtacttaaaaaaagaaaaatggcaggaaaggtctaaaattttttaacaaccaaagcaactttatgaaaaggtttgttaaaccttttattgtatttcctttattgtattacaataaaccaaataatcaccatgacatttattgtgctccttcctatcaaatctccttagtataattaaacacaaacaacccagaacactttcgctttattttatttatttattcagttggggtctagttctatcgcccaggctggagtgcagtggcgtgatttcggctctctgcaacctccgcctcccgggttcaggcgattctcctgcctcagcctccagagtagctgggactacaggcacgcgccgccacgcctggctcatttttatatttttagcagagacggggtttcacc

SEQ ID NO: 241828 - DNA, 502 bp, Homo sapiens
  misc_feature (1)...(502): n = A,T,C or G
tcaaactctcaaaaagtttctctgcagcttgcggaaggccgaacaaaatgttggtcagatacaacaaacactgtattgytatcagagaaagttgggtgttgacagactggacagagaagtgaacagcagcaacctgggaggaaaaacaatgatgaaaggagagttctgcactgttcacaattgtgaatacatggaatcaacctagctgcccatcagcggtggcctggataaagaaaatgtagtacatatacagcatggaatactatgcagccataaaaaagaaaatcatttnctttgcagnaatgtggatgcagntggaggccattaatctaagtgaattaacctaggaacatgaaactgaatactgcatattntnaccttgtagtaggagctaagcatttgacatggtttggatctctgtccttgccaaatctcatgtcaaattgtggtctccaatgttggaggtggggcctggtgggatgtggttggctcacagcggtgg

SEQ ID NO: 241829 - DNA, 569 bp, Homo sapiens
attatctctttcccctctcttgtcctctacattcttttctctctctttcctggacactttccttctcccccccctctttttctcttactttcattttctctctcttctgtctctcccttctcccttctctctctcccttcttcrcccttctctctttctcttcatctccccatctgtttttgaacctgcctttctatgtttgtctattgcatagacagggagagggaaagagggacagaacgaaggaaggaagggaggagggatggagggagggaaagagagaaagagagacagagagagagagaataagagagagacaatgagagggagagagagagagagagagagagggagaaaatgagacagagagacagagaaacagctagctacaatagaaagtaaaatgccaacaagattctacaattcagtaacattaaatagatgaggtgtacctagtggtagccaggggctgggggaggggtaaatggggaggggttgcttaataggcatgggattctttttgggaagctaatgtactaaataccacggaattgtacacttgacaatga

SEQ ID NO: 241830 - DNA, 569 bp, Homo sapiens
attatctctttcccctctcttgtcctctacattcttttctctctctttcctggacactttccttctcccccccctctttttctcttactttcattttctctctcttctgtctctcccttctcccttctctctctcccttcttcgcccttctctctttctcttcatctccccatctgtttttgaacctgcctttctatgtttgtctattgcatagacagggagagggaaagagggacagaacgaaggaaggaagggaggagggatggagggagggaaagasagaaagagagacagagagagagagaataagagagagacaatgagagggagagagagagagagagagagagggagaaaatgagacagagagacagagaaacagctagctacaatagaaagtaaaatgccaacaagattctacaattcagtaacattaaatagatgaggtgtacctagtggtagccaggggctgggggaggggtaaatggggaggggttgcttaataggcatgggattctttttgggaagctaatgtactaaataccacggaattgtacacttgacaatga

SEQ ID NO: 241831 - DNA, 637 bp, Homo sapiens
cccacagttctctgtgtggttgtcctgagtttttcattttcattcatttaagaatttcgtttaatatgttcatactgttctgtccattaaaaaaaaaaagaatttcatttaatattctagcctatggaaacaactagtagtagcagcagcagcagtgatgttaataatgacaataataatgataaaatggctctatgagagtagagaccttatgtttttaccyttctattcctagcactggaatggtatctagcacatagtaggtgttcagttgtaattgttgaacagatggatagataaatgaatagtaaacagtaccagcacttatgaactgttttgtaggcactacagttatcattattttccaaaaatgaaataaatactgccatagtttatacccagtctaactcatcattgatcgtaaggcaaaattttatgtacaaaagaaaaaatgaactacaacacaaagctttcttatcagttatatttttaattcatatgtgataaacatttatgagatacagagtaatatttgaatacatgtatataatgtttaatggttacatcaggataatcctctcttctagtactcaaaaatatacaataaattattattaactacagtcaccctacagtg

SEQ ID NO: 241832 - DNA, 637 bp, Homo sapiens
cccacagttctctgtgtggttgtcctgagtttttcattttcattcatttaagaatttcgtttaatatgttcatactgttctgtccattaaaaaaaaaaagaatttcatttaatattctagcctatggaaacaactagtagtagcagcagcagcagtgatgttaataatgacaataataatgataaaatggctctatgagagtagagaccttatgtttttacctttctattcctagcactggaatggtatctagcacatagtaggtgttcagttgtaattgttgaacagatggatagataaatgaatagtaaacagtaccagcacttatgaactgttttgtaggcactacagttatcattattttccaaaaatgaaataaatactgccatagtttatacccagtctaactcatcattgatcgtaaggcaaaattttatgtacaaaagaaaaaatgaactacaacacaaagctttcttatcagttatatttttaattcatatgtgataaacatttatgagatacagagtaatrtttgaatacatgtatataatgtttaatggttacatcaggataatcctctcttctagtactcaaaaatatacaataaattattattaactacagtcaccctacagtg

SEQ ID NO: 241833 - DNA, 477 bp, Homo sapiens
gttgccaaataaaatacagaactgcagttaagtttaaaatttagatcaacagcaaatagtattttagtataggtacgtcctgtgaaatatttgaagcatatatatcctaaaaataaatttgaagtttagagttaggagactttaaccgaaggagaccccaagagtgaagtttttctatccttaccagcattagtatcaagcatcagaagaatatccaatattctgcttcctgattaggagtcacttaaaatactaacttgtctcataaacacaaaatctggactaaaaattctaaacrgttttcattttccaaccataataaatatttacatttaaacaattatgtttgctatttgttttgtcctttaaaagatacaatatgttcaagaatatctcccacgcatagaatatgggtgggagggagatcacctctaaaagacaaatggtaatacaaatcactgtgcttccatagtaact

SEQ ID NO: 241834 - DNA, 617 bp, Homo sapiens
ttcactctttatagtgaccagggagaatgccatgcatacaacaagactatagtttgtgtttccgaattatgtagggagttgtccttagaatatgtgctgtagcattacaaatatgaatatccgtctttgataagtaaatgtttgcccctttccatcatgcttgaagacagatattagaagaaacaatgtattttttttcaggacaatatttttattaaggcacaggttgcccttctgggaagaattagtgcaatagataaaatttatgmcttttatctgttttagtggaacagatgccatctcccttgatagataactgggatataaaatttttgaagtgctgattgcaactatgcatttcctaatggaatagatataaattttcaaaccacaaactcaggtgtacaaaaacgtaactacctttgcctttttccttagtttaactggatctttactttgagttattatatttggtagcagaaaatttaaatgtttttaactttaagtagatgtatacattgtagggtattattaatcatttcaggtttaaatttactcaattccagatttccctgtccctgtgtcttctccccagcttggaacattccaagcaccta

SEQ ID NO: 241835 - DNA, 617 bp, Homo sapiens
ttcactctttatagtgaccagggagaatgccatgcatacaacaagactatagtttgtgtttccgaattatgtagggagttgtccttagaatatgtgctgtagcattacaaatatgaatatccgtctttgataagtaaatgtttgcccctttccatcatgcttgaagacagatattagaagaaacaatgtattttttttcaggacaatatttttattaaggcacaggttgcccttctgggaagaattagtgcaatagataaaatttatgacttttatctgttttagtggaacagatgccatctcccttgatagataactgggatataaaatttttgaagtgctgattgcaactatgcatttcctaatggaatagatataaattttcaaaccacaaactcaggtgtacaaaaacgtaactacctttgcctttttccttagtttaactggatctttactttgagttattatatttggtagcagaaaatttaaatgtttttaactttaagtagatgtatacattgtagggtatyattaatcatttcaggtttaaatttactcaattccagatttccctgtccctgtgtcttctccccagcttggaacattccaagcaccta

SEQ ID NO: 241836 - DNA, 428 bp, Homo sapiens
caatgatttatgatttcaattatatctttgccaatatcctgacctgctatttcccttggccttttcattgctttcatctgaatgaagactggatgagtccaagtactcatttccattatgtctccttgaaccatctaaacaccattttgttaaactaaaaagtcaattcccattccattttctccatcacaaatacaytattgacttttaagatttatattttcaatactcaattaatttcaaaaccacctcatacagtggttgtcaagtttgatctatgaaaaaaatgattagagcttgggattgctatccatagcattagtagcatgctgcttaaccttatcagctgcatgctcaacaattataaaatgagtaccaactgaaataattttatatttaatttattttggataattaggtttgataat

SEQ ID NO: 241837 - DNA, 573 bp, Homo sapiens
taattggagatgtatctcttctatgccaatttgttgagggtttttgtcataaagtgttgctggattttataaaatgcttttgctgcatctatcgagatgatcatatgtttttaattttgtttatgtggtgtaccacatttactgacttgcatatgttaaaccatccctgcacctctggtataaaacccaattgatcatgatgtattatctttttaaaagttgcatatatcttaataagttgttttatttattgtttctaatagctttgtctgttagtcttctaagcaaatatataatttatgctgcataaaatatcgttataacaattatgttaccatcctatttcagtttaaaggactcattttaatatttgtataggactcatacattccttcagaattttttgtyggagggagggtctggaaagtctttatctctcttcatttctgaaggatttgctacagtgacagattgcttttactttttcttcagcatcctgaatatatcatctcactccttttcagtctgtaagatttctactgagaagtctactgccagatgtattggatttcc

SEQ ID NO: 241838 - DNA, 627 bp, Homo sapiens
agtttgttgattttatcttcaaagaatcaacatctacttttgtttattctactgattactcattctatatttgtttatccctattctaaccattattatttctttctttctgtgagatttctatttagcttattcgtctttttctactataggactttatagccataattttttctytgagcactacctcgctaaattccataaattttggtgtgttatgtttctattttcattcattaaaagtattttctattttcttttgtgatttctttgccaacccatatgttagttaagaatgcactgtttggtggtgcagcagcccacctgaaagccacatggggcaggggagcccccaccccccagccaagggaaggagtgagtgagcctgctactcagccagggaaaccatgctttttccacggaattgtgcaacccacggatcagaagatcccactcctgaacccatgccaccagggcctagggtcccgacccaggagccatgcagattctcaacagcctctcagctagaatctgcttaagcctgccaagtgcccagagggaggggcaaccagcatcacagctgcagctgcctgctgtctaagccacttgagctccttcagggagggg

SEQ ID NO: 241839 - DNA, 627 bp, Homo sapiens
agtttgttgattttatcttcaaagaatcaacatctacttttgtttattctactgattactcattctatatttgtttatccctattctaaccattattatttctttctttctgtgagatttctatttagcttattcgtctttttctactataggactttatagccataattttttctctgagcactacctcgctaaattccataaattttggtgtgttatgtttctattttcattcattaaaagtattttctattttcttttgtgatttctttgccaacccatatgttrgttaagaatgcactgtttggtggtgcagcagcccacctgaaagccacatggggcaggggagcccccaccccccagccaagggaaggagtgagtgagcctgctactcagccagggaaaccatgctttttccacggaattgtgcaacccacggatcagaagatcccactcctgaacccatgccaccagggcctagggtcccgacccaggagccatgcagattctcaacagcctctcagctagaatctgcttaagcctgccaagtgcccagagggaggggcaaccagcatcacagctgcagctgcctgctgtctaagccacttgagctccttcagggagggg

SEQ ID NO: 241840 - DNA, 627 bp, Homo sapiens
agtttgttgattttatcttcaaagaatcaacatctacttttgtttattctactgattactcattctatatttgtttatccctattctaaccattattatttctttctttctgtgagatttctatttagcttattcgtctttttctactataggactttatagccataattttttctctgagcactacctcgctaaattccataaattttggtgtgttatgtttctattttcattcattaaaagtattttctattttcttttgtgatttctttgccaacccatatgttagttaagaatgcactgtttggtggtgcagcagcccacctgaaagccacatggggcaggggagcccccaccccccagccaagggaaggagtgagtgagcctgctactyagccagggaaaccatgctttttccacggaattgtgcaacccacggatcagaagatcccactcctgaacccatgccaccagggcctagggtcccgacccaggagccatgcagattctcaacagcctctcagctagaatctgcttaagcctgccaagtgcccagagggaggggcaaccagcatcacagctgcagctgcctgctgtctaagccacttgagctccttcagggagggg

SEQ ID NO: 241841 - DNA, 443 bp, Homo sapiens
tttccttggctaattcaatttttccagagcataatggcaacattatttcaattctaagggaccactctggacagagctgtcatgatcatatcttgcaaatattttgcaaattaatgaggcttgcaaaacctctaatgtaaatgtaaccagcaacatttacyctaatctactctcactttgcaatgcaccctgacttgcccttacttcccaaaatttattttaaaatctgccatacaaaaatggtttaaaagcacttatcttattgtaaatatgtcttgaaatgcacggtctaacaaatgttgagaaaaacaatccaaaaaagtttacacagaagaaaagcttatgaaatctaattattttattcttctgtttatttcaatgactcctggtccaggagctttttttaaggttgtcataagcattcctaatttaacaatgttcta

SEQ ID NO: 241842 - DNA, 527 bp, Homo sapiens
caattatatacacaacctttttccaattgctttatatttggatctcaaagtataaaagataagaataagtttgatggggacatattaagaataagaaagaaaattaaattgaatattatatttaagtcagtggctctctcaactaacccaatccaagcttaattttcaatcgttgcttagctgttaagttttcttttagggttacagaaaaaaaatgttagtttaccctcaaggtgttgtctatccccagttttttattgacttctgttgttgcctgcactgttatggtttcatagtcttaatatcctacttgaatagagctgtacattttatatatatagatatagatatagatatatagatataactttcatacagatatattagtttttagctgctrcttgaaactcccatttctttctgaaatatatatgtttcagtgaaaggattatgaaatctaaaatccaaatggtcctgggcaggcagataacagctgtgtagaagggctaggtgtgcagggactaatg

SEQ ID NO: 241843 - DNA, 505 bp, Homo sapiens
aatagaataagttctagtgttctattgcatagtagtgtgcayacagttaacaataatgcattgtatatttcaaaatagctagaagagagaattttgaatgttctaaccacaaagaaataataaatgtttgatgtgatggatatgctagttatcctgatataatcattgcacaatgtatacatgtatcaagacatcattctgtgtcccataaatatgtacaattattatgtgtcaattaaaaataaaataaaacaaaaaaagaaatataagtctgcctcattatattgcactttgctatatagcacttcgcacctcagcacttttgcacttttttataaattgaaagtctgtggaaatcctgccttgaccaagtctttcagcaccatttttccaacagcgtgtgctcactttgtttcacattttggtgattcttacagcatgtcaaacattttcattattattataatctgtcattgtgatctgtgattggtgatctttgatttta

SEQ ID NO: 241844 - DNA, 656 bp, Homo sapiens
  misc_feature (1)...(656): n = A,T,C or G
aaaaacagcccttgagagactagagaaatctctaggtactctccctcctctgcacaaaatgcctatttgtataaatctttatatactatttcaggaagagttcacatgttgtagtgtggctaccagcttctggatgagaggctattgcttacaaaaattgcaatttttttaggttatgtatctgtacagttttgagttagtatcatctaaccagagttttgaatgttttaatagcttctagtctaamtttgtcaatctctagttggaggacaattcaagggagcccaaagaacatggctggggaaggaacacagagactggagcttcagaagttactattagtgccaacaaaaatagttactgcaaggtgttaacactggataagtaatttccttttctgagacttgacacttgaactcttttcttcccagcttttaggatatacagtggtatacaacattatccataggggatacattctaaggctccaagtggatacctgaaaccatggataatactgaaccctatgcatactatgttttttccgtatacacacacacctatgataaagtttaatgtataaattaggcacagaaagagatcaacaacaataaataatagcaaaatagaacannnnnnnnnnnnnnnnnnnnnnn

SEQ ID NO: 241845 - DNA, 548 bp, Homo sapiens
cggctgatgaatacttagattgtttccaaatcttggctagtgtgaatagtgctgcaataaacatgggaatgcagatatctctttgatacactgatttcctttcttttgggtatatatccagcagtgggattgctggatcaaatggtagctctatttttagttttttgagaaaccccctaactgttctctrtaatggttgtactaatttacattcccaccaacagtgtatgaggattctctttctccacatccttgccagcatttgttactgcctgtcttttggataaaagctattttaactgagatgagatgatatctcactgtagttttgatttgcatttctctaatggtcagtgacattgagcaccttttcatatacttgtttgacatttgtatgccttcttttgagaaatgtctgatcagatcttttgcccattttgaaatcagcttattagattctttcctatagagttgtttgagctccttatataatctggttattaatcccttgtcagatggttagtttgcaaatattttctcccattctg

SEQ ID NO: 241846 - DNA, 572 bp, Homo sapiens
cttctgtaaactttaagtcatctctagattacttatgatagttaatacgatgtaaatactgtgtagttattatactgtgatagttgtattcttaagttgttgtmttgttattttgtttctttttcttgatatttttgatctgcagttggttgaatttgtggatgcagaacctgtgaatgtagagggctgactgtatatgcagaagagtgtaggacttcctggaagtctctttaaaggaagctaactcatctgggaggataattcttcctcttgtcagctgcctagaaagtgtccaagatagccagtactatagcagccatcttggaccatgaggttacttgccttcaggatggaagccattgcaaggatgctggaaaagaaagatacaaggaatccagatccctgattgccaaggagcttccgtgctagccctggactgcctgtctctgggctcctttgaagtgtgagagagataagtttccacttcacctaaaccactgctattttcaattttctggcataggcagcttaacccaatcctaacaaatgcatttagcattgtaagagtgtta

SEQ ID NO: 241847 - DNA, 572 bp, Homo sapiens
cttctgtaaactttaagtcatctctagattacttatgatagttaatacgatgtaaatactgtgtagttattatactgtgatagttgtattcttaagttgttgtattgttattttgtttctttttcttgatatttttgatctgcagttggttgaatttgtggatgcagaacctgtgaatgtagagggctgactgtatatgcagaagagtgtaggacttcctggaagtctctttaaaggaagctaactcatctgggaggataattcttcctcttgtcagctgcctagaaagtgtccaagatagccagyactatagcagccatcttggaccatgaggttacttgccttcaggatggaagccattgcaaggatgctggaaaagaaagatacaaggaatccagatccctgattgccaaggagcttccgtgctagccctggactgcctgtctctgggctcctttgaagtgtgagagagataagtttccacttcacctaaaccactgctattttcaattttctggcataggcagcttaacccaatcctaacaaatgcatttagcattgtaagagtgtta

SEQ ID NO: 241848 - DNA, 572 bp, Homo sapiens
cttctgtaaactttaagtcatctctagattacttatgatagttaatacgatgtaaatactgtgtagttattatactgtgatagttgtattcttaagttgttgtattgttattttgtttctttttcttgatatttttgatctgcagttggttgaatttgtggatgcagaacctgtgaatgtagagggctgactgtatatgcagaagagtgtaggacttcctggaagtctctttaaaggaagctaactcatctgggaggataattcttcctcttgtcagctgcctagaaagtgtccaagatagccagtactatagcagccatcttggaccatgaggttacttgccttcaggatggaagccattgcaargatgctggaaaagaaagatacaaggaatccagatccctgattgccaaggagcttccgtgctagccctggactgcctgtctctgggctcctttgaagtgtgagagagataagtttccacttcacctaaaccactgctattttcaattttctggcataggcagcttaacccaatcctaacaaatgcatttagcattgtaagagtgtta

SEQ ID NO: 241849 - DNA, 572 bp, Homo sapiens
cttctgtaaactttaagtcatctctagattacttatgatagttaatacgatgtaaatactgtgtagttattatactgtgatagttgtattcttaagttgttgtattgttattttgtttctttttcttgatatttttgatctgcagttggttgaatttgtggatgcagaacctgtgaatgtagagggctgactgtatatgcagaagagtgtaggacttcctggaagtctctttaaaggaagctaactcatctgggaggataattcttcctcttgtcagctgcctagaaagtgtccaagatagccagtactatagcagccatcttggaccatgaggttacttgccttcaggatggaagccattgcaaggatgctggaaaagaaagatacaaggaatccrgatccctgattgccaaggagcttccgtgctagccctggactgcctgtctctgggctcctttgaagtgtgagagagataagtttccacttcacctaaaccactgctattttcaattttctggcataggcagcttaacccaatcctaacaaatgcatttagcattgtaagagtgtta

SEQ ID NO: 241850 - DNA, 615 bp, Homo sapiens
aaccctatttccagtatttataagctaattgaaaggttggagggttgatcaagaatagataataggaacacttatcatggctgccttcgggcttggctttcttctgttcacggatggcaacaaggcctaggtggcaatccttaaactaataggaattagtaatttytgggccaggtgcagtggctcatgcctgtaatcccgacactttcggagacagagctgggtggatcacttgaggtcaggagttcaagaccagcatgaccaatatagtgaaaccccgtctttactgaaaatacaaaactcagccaggcacagtggcgcacgcttgtagttccagctacttgggaggctgaggcaggagaatcgcttgaactcaggaagcataggttgcagtgagccgagatcatgccattgcactctagtctgggcatcacagcgagactccatctcaaaaaaaaaaaaaaaaaaaaaaaggaattagtaattttatgctgtcgctgtcgaaggactctaaagtagactacagacagagccctgtattaggaataggaggatagggtcctatggggaagccgaacaaagggatagactctagtcaagacagtaacagaattc

SEQ ID NO: 241851 - DNA, 584 bp, Homo sapiens
ttttcccattgcatctccactggaaccttaatgaggtgagaccctccaacccagaggaaatacactgtgcagcaccaattggccaactttgggtaagtagtggaatatatttttatagtggtaaaggacrgggtacttgtctaaaactggttagaggtccaactaggaagggttggaggccctccacatcctcatagctggatatggattcagtgtgacgagatattaaccattactccctttggattagccctccttgcactcttggctgctcgttaaaggctgctacttgccagtttcctgattgctgtctatgttttactgctgtgttttcctgctgtttttcacaggcctcacttgaccagtcctgatatttttaacttttcactttcctcatttgccttcagattatcggctcttcgcctgtctgctccggcatcctgttaaggtacattggggatgaatggttctgcaagatttactttccctatatgtagcccatttacatgaattatttattgcctccccttctctcaaaattgaaacttggtacttccaatttttatttatttatttatttattt

SEQ ID NO: 241852 - DNA, 436 bp, Homo sapiens
gaattctcaatgaggatggcagccctaacctggacttcaagcctgaagaccagccccattttgacatcaaggaygagttctgatgttccccctgcaggagcaggttcttgggagcgtgaggcaggaagacactaggtgctgaatctcctgcaaaactggctgcctggaggccctgagccacccagatctgaataaaacagatgcttaccctggaagagcaaatgcctcctgttgtccttggtcaggggttctgtctacctggggacccctgtctgcacaccagggatcaataagagccaaagtgggacacctcctagatgtcagtatcagctggctgggcagtggaattttgagcgacctttactttatacttttctgtgcttgacagattttcagccatgaccatgttcactttataatcaaaacaaaaataaag

SEQ ID NO: 241853 - DNA, 510 bp, Homo sapiens
taagcttaacctgacttaagttttgccttgggtttcccaaaccarctttgatttgtggggataattcacgactacatggagacaaactttgctctaaatatgctatccctagctgaatcctcacaaagatcaggctgacgaaaggcccatcagatcacccaggcctcagaggctggtactggggccaggtgagtgcagtggtgtgggccatctgaccctggatgttgctgctgtacatgacatgaagtgagcccaaatgcagcacaaccccccagattcctctgacactagcatccagcccttgcttaccctgtaggtgcatgcagcccttgcttaaccttacacatcagggaagaaggcaatttcagggataaatgagccacaattttcccctttccttctaatgttccatgagacccaaagtttctaactttgtgtctctggaactctattttctgcttctgaaaagtggaagaaaacttttgcttttgagtagcgtttatgaagaga

SEQ ID NO: 241854 - DNA, 481 bp, Homo sapiens
tcatgccaggcacactgctgctccaggacctttggcccttcctctgctgctcctgctttttggcccttcctctgccaaaactgtgcttgcccactacccaccccaccctcccacagctcactccctcatcttcctcaggtccctgcccaaatgtcatcyccaaaccacccttccttattttccttattttacataaggaatattgcctgccattatcataaacattatttatgtatttttctcttccctttgagaatggtagctccataagggtgggggctttgtcttgtttgtttactactgactgtattctcaatgcttagaactgtgcccagcacatagcggccaccccataaatattttctgttgaatggatgaatggaaatgaatgaacatgggccctactgcaagctcttgatggaggtaggacacggaagaggtctggaggacacagaagaggtctggagatgaggaggttgga

SEQ ID NO: 241855 - DNA, 480 bp, Homo sapiens
ggtgcttagtcccaatagaatgttgagggtgtcaggtagcaatttgttattgttagcaggttattgataggaatttgggcaggggaatggatagagcagcccgtgataaggcaacctggcttggccgtgagcgtgactgcgccttgtgtcagtgaataatctctcaaggctcatttttcttccccagggccttcccctgtcaatatttcaggagaaattaaaaacrgtaactatgaggaaggttgttttctaaagagtgtttcccagttggaatcagatcaaacacagctggggctgcttgcctggtgctgcctgacctgccttccagttgcccccagtgaccccaggaatgggcctgcacagagtgctggggccttgcagccggggccccagcaagccatccaaatgagcttaagtaattgaaagaagtggcatctgccatacgggaagaatgtggccgcgctgtttgctttaaagagg

SEQ ID NO: 241856 - DNA, 480 bp, Homo sapiens
ggtgcttagtcccaatagaatgttgagggtgtcaggtagcaatttgttattgttagcaggttattgataggaatttgggcaggggaatggatagagcagcccgtgataaggcaacctggcttggccgtgagcgtgactgcgccttgtgtcagtgaataatctctcaaggctcatttttcttccccagggccttcccctgtcaatatttcaggagaaattaaaaacagtaactatgaggaaggttgttttctaaagagtgtttcccagttggaatcagatcaaacacagctggggctgcttgcctggtgctgcctgacctgccttccagttgcccccagtgaccccaggaatgggcctgcacagagtgctggggccttgcagccggggccccagcaagccatccaaatgagcttaartaattgaaagaagtggcatctgccatacgggaagaatgtggccgcgctgtttgctttaaagagg

SEQ ID NO: 241857 - DNA, 532 bp, Homo sapiens
tttcttactcttgagaatggcattatcctagccagccctgtagaagcaagtctagataccctctagctcactgtccataccaaatcatcaagtctaatggagtaaataaggataattagtaattatagagtatatgcaatgtaccagggatagttctaagtgctttacatggatcatctcatttcattcatagaataactactatcaggtagttgctttyattatctctcattcacagatgaagaaagtcaagtgcagagaggttaagtaacttattcaaggtcacacagctggtaagggatcccagcaggctttgaactctggaagctgacttcagagcttttgcacataaccactaccctgatcctctcccaccatgctgtctcaagcaactcttgctgacattcctatggtatctcctagctggcataagtgccctggtcttactcttctgtaaaccattccctgcacagctaccagagaattcttcctaaaagacaactctgatcaagtcactctctgcttgaagatt

SEQ ID NO: 241858 - DNA, 475 bp, Homo sapiens
actcccagacccttaggggtgctggaaccacaaaatggttaaacctgggcccaataattccttcctggtagagcaccctccaaacaactgattgggcttttcgtgggtgagaaatgaacttgtatttttttaagccactggaatttgggggttattgccygtactgtctaatagctctactgggaagagaatacaggtaagcaagctcaccgtaactgcaaagggcaatcaattagttaaatctctagttacagagttagatggtaaacctcattgcagaacatctcccagccttcatggctcctcttacattttgtgcaatcaatctatcaatcagcctttagtaagtacgtaactcatgttacaatcatgagatttccaaaggatacagaaaacatcaaacacccctccttgcccaccagaggtttttaaggaagacataacatacccatggaaatctgtggcaaatgcatgg

SEQ ID NO: 241859 - DNA, 571 bp, Homo sapiens
ggggacaacaaatctgtgaaatctgagtagttatgagtaatgtggtcccatttgtacctacaggtaggcaaagcctgtggtggtccctgttacactacttcgcaaggttattgcacagacatgtggtgatatgtttaaagagcttggtccattgtagrtctttaaaataagagttataataagaatactattactgtggctactgaggtaattatcatggcacagatttaggcaggtatgttgatggccaccagttctggctggttgagcaaaaagcatgctgagaggaagagagagaaacccaaatcctagttttctaagtttgcatcaatttcacacatttccagcccaatgctctggaaggaggagggtggtctggcctgctgacagctgcccatagctgtagcatgacaggccagggactggcaggaaggcagcaaaggaaatagagggagctgagggataagccacatggacacagagccctggctaggccacatgaagtccttgagggcttctgtgacaagctcatgctgtgttttctgttggaatggggttgtggaagtaacat

SEQ ID NO: 241860 - DNA, 634 bp, Homo sapiens
gtaataagtgtttcaaaccatttaacatctgcctgcttttccaatcaggttacattataatgaactgatagtagaatgtagtgtactgctaatagcatcccgtgtgataagctacatgaagcatgtagtaaatgcacagtaggtcagataatgtgcaagaactcaaaagttatcaggaaaattttgttttctmaattttctttatggtttagtgacagcatcgaaatgatgtaatgagtttgttttactgagttatgtatgcaacctcagaaagggagggaagagttccctccctgctgcactttgtaaaactctttagttgcagcaggttaaggataactggagaaaacttggtgtaagagtattatgtagaataaaataataggaaacgaacatgaagaaactgtaagatgttcctttaacagaaaagtttgtgatttcctttccctcagaggctaaatgaggaggctggatatatttgggaaatgccttcattttatgtgcattataaggctaatgtttgctgtgattcctcacacgacctcagaaagaagtaaaacacttggacagaacccagcaaatgacctggtctcatgtgatcctagaagccgagaaatactaagtcatactcctg

SEQ ID NO: 241861 - DNA, 589 bp, Homo sapiens
tttgtatttatacagtaatttggctttatccatatgaagtatgtgtataggtggaaaaacagaaaagaaatgtgctgccgcataagaaagtcacagaattatgaaccttctaaaagttttatcttaatttttttaattttctcttttctcatgaagatatatacattcaaaatcagaagaaaaaaaacacttttaagaaaaataagccctcaaagcaagaattatggcagayataaaagtcaaactcaggagagtcccatgctgataagaagagattataaatgttgtttctgcttcctgaagtgctgatacgtattcccttctcagctttacattttagccaggagatcccgaggctgggactaggtattctcctggaatcacttctgtcaagttgacaaaaggagttcaggaatagggttgaaagatgccatgagatactcactaatccaaattgatgtctaatatgtgtagcttgcatggctgtcatatgtcattctttgtcttgcagaggaggggaaaagaaaatagagtaccatggggtatcaagttttagtaagacactcccttagtaatatggcagataaat

SEQ ID NO: 241862 - DNA, 509 bp, Homo sapiens
ccttttttctatttttttttttaacataggagtgacatgttcatatacgtaacaggctagctgtggcacatagaaataacaataagagtgaatgagaggctataagaagacactcattagtaatctttttctttttctttctttttttttttcttttgagacagagtcttgcttttttgcctaggctggagtgcaatgtctcactgcaacctccaccccccaggttcaagcgattctcttgccttagcctcctgagtagctgggactacaggcatgtgccaccacactcagataacttttgtatttttattagagatgggggtctcaccatgttggccaggctaatctcaaactcccgacctcgggtgatccacccacctcagcctcccaaagtgctgggatgayaagcgtgagccaccacacccagcccttcaatagactgagaaggatgggagagaaggcagattggaaaggttgaatggtataggactttgttatccatttgactt

SEQ ID NO: 241863 - DNA, 584 bp, Homo sapiens
accagctctactgccgaggcatctgcacttacccatacatttgccaagacccaaagtaagtgtgtttcattttaaaagaaaaggttgacagatgtsttttcattttactccatggcactttgaacaaggtggctcttaccataacgtggagctggggcagcaccccagcccctcttgtcgtatcagcttccatgtcttgaatattgaccaagagccacagggaggacatgatactaccaggattcccagactgcaataaagagaatgatcataggtgcaaagggggaggaaaaaagtcttcctttggcaaattagtttgcttatttaactattaagcaaatttaaagcagttctatcctgtagtatagaaaccatgtgtgactctgcatgggtgaaatttttccaagctactgaacaccactgtagagctcctacactacagaaaagcacctggctgagcaactggccatattagaccaagggactcagaagctaattcatatctcccagaaccaattttccatagggattctcaggaatgttttcagctgggtgcactgggacagaatatctgactcagctct

SEQ ID NO: 241864 - DNA, 577 bp, Homo sapiens
aacaacatggaggtcactaggggccttagcaagagttctgtgcccaagcaaagtgaagtgagaagtcagatgtgaagaagataactctttggagaagcttggctctgaagggagatgggaggaaagcctggagcgcagggcaggctgttcgtgcgctgttattcttatgaggcttgcatgcygagaggaaatggaaggaagaggttggaatttcaggagatgggaagggccatcaatggcatagctccttgagacaacacagtgggatgtggggaggctggcttgtgccaggaagagggactgtcactgcatgccaacggggagaaaggcgagatggcattgcagaaggtaggtttacaatttgattggaagggtgaggagactcctacgcaatcatgtctttttctccttgacaaatgatgtgtggtcatcccttgcaagtgaggggagtggcgaaagtttaaaatcttgaggaaatagagggggtatgaaaaacagtttttgtggaaagtaggagagggagcatgttagagaaacagactgagatttttaggcagaattggggacccacaggtga

SEQ ID NO: 241865 - DNA, 577 bp, Homo sapiens
aacaacatggaggtcactaggggccttagcaagagttctgtgcccaagcaaagtgaagtgagaagtcagatgtgaagaagataactctttggagaagcttggctctgaagggagatgggaggaaagcctggagcgcagggcaggctgttcgtgcgctgttattcttatgaggcttgcatgccgagaggaaatggaaggaagaggttggaatttcaggagatgggaagggccatcaatggcatagctccttgagacaacacagtgggatgtggggaggctggcttgtgccaggaagagggactgtcactgcatgccaacggggagaaaggcgagatggcattgcagaaggtaggtttacaatttgattggaagggtgaggagactcctacgcaatcatgtctttttctccttgacaaatgatgtgtggtcatccmttgcaagtgaggggagtggcgaaagtttaaaatcttgaggaaatagagggggtatgaaaaacagtttttgtggaaagtaggagagggagcatgttagagaaacagactgagatttttaggcagaattggggacccacaggtga

SEQ ID NO: 241866 - DNA, 576 bp, Homo sapiens
ttttatataacctatgcagttacctttactggtgatctatatttcttcatgtggatttgagttatcctttagtgtcctttcatttcagtctgaaggattccctttattacttcttgtaggccagtctgttagtgatgaattctttcaggttttatttatctgagagtgtcctggtytatccttcatttttaaattgttccccaaaatcggcagaataatgggaactatttagaaatagttttactagatataaaattccttgttgataattttttttttcagcacgttgaatatgtcatcacactgtcttcaggcctccgaagtttctaatgagaaaccagccattaatccttctgccttccagatgatctgtctttgtatttcaacagtttggtaatgatgtgtctaggtgtggatttttttgagtttatcctactcagaattcagctttctggatatttaattgttttcattaaatttgggaagttttagggtgttctttcttgaaatattctttctcttattttctctcttctctccttctgagattcccattacatgtattttgctatgctt

SEQ ID NO: 241867 - DNA, 576 bp, Homo sapiens
ttttatataacctatgcagttacctttactggtgatctatatttcttcatgtggatttgagttatcctttagtgtcctttcatttcagtctgaaggattccctttattacttcttgtaggccagtctgttagtgatgaattctttcaggttttatttatctgagagtgtcctggtctatccttcatttttaaattgttccccaaaatcggcagaataatgggaactatttagaaatagttttactagatataaaattccttgttgataattttttttttcagcacgttgaatatgtcatcacactgtcttcaggcctccgaagtttctaatgagaaaccagccattaatccttctgccttccagatgatctgtctttgtatttcaacagtttggtaatgatgtgtctaggtgtggatttttttgagtttatccyactcagaattcagctttctggatatttaattgttttcattaaatttgggaagttttagggtgttctttcttgaaatattctttctcttattttctctcttctctccttctgagattcccattacatgtattttgctatgctt

SEQ ID NO: 241868 - DNA, 576 bp, Homo sapiens
ttttatataacctatgcagttacctttactggtgatctatatttcttcatgtggatttgagttatcctttagtgtcctttcatttcagtctgaaggattccctttattacttcttgtaggccagtctgttagtgatgaattctttcaggttttatttatctgagagtgtcctggtctatccttcatttttaaattgttccccaaaatcggcagaataatgggaactatttagaaatagttttactagatataaaattccttgttgataattttttttttcagcacgttgaatatgtcatcacactgtcttcaggcctccgaagtttctaatgagaaaccagccattaatccttctgccttccagatgatctgtctttgtatttcaacagtttggtaatgatgtgtctaggtgtggatttttttgagtttatcctactcagaattcagctttctggatatttaattgttttcattaaatttgggaagttttagggtgttmtttcttgaaatattctttctcttattttctctcttctctccttctgagattcccattacatgtattttgctatgctt

SEQ ID NO: 241869 - DNA, 556 bp, Homo sapiens
gtcctatagttctttgaacatattttaaatagatggtttcaagtatttgtctattaagtccaacatctgggctccctcagagacaayttctattcattgcttttttccccgtatatgagttatatgttcttgtatcttttcatggctcatatttttttagtcagaaactggagatttaaaataataaatgtggcaactgtgaaaatcagatcctccctcccccagggttggttactgttgttactcttagtttgtttagtaactttttcagtcaagtctatattcttatttatgcatggccaataaagtttctgctcagttagtttaatggtcagcttatgattgaacagagattcccttaaatgcctggaaccaataagtctcccagcttttgctgaggggctgtgtgtgtgtggcaggacatgcctttgacactcaggcaggcagttgccaattctgctttatctttcctgggacccaaaggttagtcagaggtaagagcttagggccttctcaggtctttcctgagcagtaacagcctggaggtatacacatc

SEQ ID NO: 241870 - DNA, 556 bp, Homo sapiens
gtcctatagttctttgaacatattttaaatagatggtttcaagtatttgtctattaagtccaacatctgggctccctcagagacaatttctattcattgcttttttccccrtatatgagttatatgttcttgtatcttttcatggctcatatttttttagtcagaaactggagatttaaaataataaatgtggcaactgtgaaaatcagatcctccctcccccagggttggttactgttgttactcttagtttgtttagtaactttttcagtcaagtctatattcttatttatgcatggccaataaagtttctgctcagttagtttaatggtcagcttatgattgaacagagattcccttaaatgcctggaaccaataagtctcccagcttttgctgaggggctgtgtgtgtgtggcaggacatgcctttgacactcaggcaggcagttgccaattctgctttatctttcctgggacccaaaggttagtcagaggtaagagcttagggccttctcaggtctttcctgagcagtaacagcctggaggtatacacatc

SEQ ID NO: 241871 - DNA, 565 bp, Homo sapiens
gggaagaatctccggtgagttgcttaggtttacattgattgaattcacatcggtcctaaagaactctaaaagaattcagatagatgagctagacctattcctataagcaggctcgatatcctggggtttgacctgagttttagaggtttgactttagagaactgttacgttaagaaagctgaattctgtctccttagttttgccactgaggaaaatatggaagacacaaaagtataatccctgaccacctccttaaccacagaggatcattggcacagttgtgcccttggcagcattgttattccaaagtccagaaccctaccctgactgtggatcgctagaggagatggagttttyatttccacagtaacaaagtgctctgaacagttctgcttcccagatgggggactgggttggggccaggttctaagaaatttctcttaatcctcaatcccctgtcccactctcttctgtcaattctccccaccctggccaggacctttaccatcctaaacccaaccaatagcacctactccttctgctggatctctgaagaaattgaaag

SEQ ID NO: 241872 - DNA, 565 bp, Homo sapiens
gggaagaatctccggtgagttgcttaggtttacattgattgaattcacatcggtcctaaagaactctaaaagaattcagatagatgagctagacctattcctataagcaggctcgatatcctggggtttgacctgagttttagaggtttgactttagagaactgttacgttaagaaagctgaattctgtctccttagttttgccactgaggaaaatatggaagacacaaaagtataatccctgaccacctccttaaccacagaggatcattggcacagttgtgcccttggcagcattgttattccaaagtccagaaccctaccctgactgtggatcgctagaggagatggagttttcatttccacagtaacaaagtgctctgaacagttctgcttcccagatgggggactgggttggggccaggttctaagaaatttctcttaatcctcaatcccctgtcccactctcttctgtcaattctcyccaccctggccaggacctttaccatcctaaacccaaccaatagcacctactccttctgctggatctctgaagaaattgaaag

SEQ ID NO: 241873 - DNA, 590 bp, Homo sapiens
cttctgcagtgtattgtgtccctgggtacttgagattagagaatagtgatgacttttaacaagcatactgccttcaacacttttttaacaaagcacatcctgcatagccctaaatccattaaaccttgagtcaacacagcacatgtctctgygagcacagggttggggccagggttacagattaacagcatctcaaggcagaagaatttttcttagtacagaacaaaatggagtctcttatgtctacttctttctacatagacacagtaacagtctgatctctctttcttttccccacacagtgttcattgtaggcctgagagagggagagagagagagaaaaggataattaaagacagtctcatgagatctgctggaggttcagggaggtcccagaccaccctgggctttccctgtaggccaatccttcatgttccagttattgaatgcccattctactgtaggaacagatcatagttattagagttcagaaaataaattttccctgttatttattctggaatttgtcttatccttttaatattctacaagtctcccaccagtctactaaagaatatcacttccctaag

SEQ ID NO: 241874 - DNA, 425 bp, Homo sapiens
cctggctcccctgtgtgcacacttctagttaggtttagcaatgtgggcacccgatggagcctggaagtgagaggaaggtgaggtccgtatttcttccctctccctccctgctctggcactgagtatctgrcaatagctgcatctgtctattacttcagtggccactcttccacagccccaattctcagtgggtcccatagcattatttacctttgttcctttagctcccaccaaggaagacccagaggcattctcctcaccaaggcattaagaaatgcatgggtgaggggaacagcggcgtgcctgtaaaggtcctgtggcgcctctcctctacaggctggaggtcatggcgggagatgctgcatggatttgccctccctgctgtcagaacaacaggattctggaagagtagaggacaggccgtg

SEQ ID NO: 241875 - DNA, 425 bp, Homo sapiens
cctggctcccctgtgtgcacacttctagttaggtttagcaatgtgggcacccgatggagcctggaagtgagaggaaggtgaggtccgtatttcttccctctccctccctgctctggcactgagtatctggcaatagctgcatctgtctattacttcagtggccactcttccacagccccaattctcagtgggtcccatagcattatttacctttgttcctttagctcccaccaaggaagacccagaggcattctcctcaccaaggcattaagaaatgcatgggtgaggggaacagcggcrtgcctgtaaaggtcctgtggcgcctctcctctacaggctggaggtcatggcgggagatgctgcatggatttgccctccctgctgtcagaacaacaggattctggaagagtagaggacaggccgtg

SEQ ID NO: 241876 - DNA, 425 bp, Homo sapiens
cctggctcccctgtgtgcacacttctagttaggtttagcaatgtgggcacccgatggagcctggaagtgagaggaaggtgaggtccgtatttcttccctctccctccctgctctggcactgagtatctggcaatagctgcatctgtctattacttcagtggccactcttccacagccccaattctcagtgggtcccatagcattatttacctttgttcctttagctcccaccaaggaagacccagaggcattctcctcaccaaggcattaagaaatgcatgggtgaggggaacagcggcgtgcmtgtaaaggtcctgtggcgcctctcctctacaggctggaggtcatggcgggagatgctgcatggatttgccctccctgctgtcagaacaacaggattctggaagagtagaggacaggccgtg

SEQ ID NO: 241877 - DNA, 425 bp, Homo sapiens
cctggctcccctgtgtgcacacttctagttaggtttagcaatgtgggcacccgatggagcctggaagtgagaggaaggtgaggtccgtatttcttccctctccctccctgctctggcactgagtatctggcaatagctgcatctgtctattacttcagtggccactcttccacagccccaattctcagtgggtcccatagcattatttacctttgttcctttagctcccaccaaggaagacccagaggcattctcctcaccaaggcattaagaaatgcatgggtgaggggaacagcggcgtgcctgtaaaggtcctgtggcgcctctcctctacaggctggaggtcatggcgggagatgctgcatggatttgccctccctgctgtcagaacaacaggrttctggaagagtagaggacaggccgtg

SEQ ID NO: 241878 - DNA, 447 bp, Homo sapiens
ttggtgttgccacaagaagtcttatgttaccaygattattagttccttttatttcctctagaatcatttaggactttctctttcatcccggttttctgaaacgttgctctaatgtatttagatgtgagtatttttttcattcaccctgtttggcaacttgatggacccattcgattagaagacttgatcttcttaaaaagccctggaaatatttcttcagttattttgttgaatactttcttccttccagtatcttgtttctctttcaggagctcctattacatatatattagaacttcttgatttatacattgtctcatatttcctttcattctgtttttgaaacagctttattgagatataactcacataccatacaatccctcatttaaagtgttctatttagtggtttgtagtatattcacaaggcagcgtagccatcaccac

SEQ ID NO: 241879 - DNA, 631 bp, Homo sapiens
atacatttgttactggcttcattcacttagcataatgttttatagcaggtatcaatattttatttccatttctttttattgtcaaattccattctatttatacacttaccagttcatcgaaatttgggttgtctctacgttttggctcttataaataatgctgctatgaatatttgtgtatagatttttgtgtgcacatatgttttcatttctctagggtattacctaggagttaaattggtgaatcatatggtaactctacgtttaaccatttgaggaactgccagactgttttccagggcagctgcaccatgttatactcccacctgcagtgtatgagggtcccaatttctccacatccttgctgatgcttgytattatttcatttcattccatttctttgtcctcaagggctaaggtctggtgatattactcagctccatcttgtaacttattagtaatctccattataaagtccatccctcctgcatggttttctaaatattttatttttcatttctagagtctctaattggttctttttcacaatagcttatccttatttcatgagtatgattttctccctttggggatataaataatattcacttaaagttttctgtttgcttta

SEQ ID NO: 241880 - DNA, 490 bp, Homo sapiens
ggatgtcaaagcaggcttccttgagaatgtaatgtttcagatgagagctgaagaatggaaaggaataaaccaaatgaagaggggagaatgaatattccagcagtggaaacggtgtattcacaggcctcgtggagggagggggcaggcctgcatgtttgaaggaggcctggctgagttcacttgctggggtcactcctgccactgggccaccccgggcagcagctactaacctcttttactgcaggtggtcccacgcagactccagacagggttagactcagaggactgcctccctggatgtagcagagaatktttttacaaaggctctcctttcccacctcggtgggatggtaggtcacttcaaaagaaacctccatgcctgaggtaatatagccttcttctgggctaatggagaaatgaggctcaaattttttgatgtcccatttaaaccttttccaagacaaaagaagacaagaaagagagtttatgg

SEQ ID NO: 241881 - DNA, 471 bp, Homo sapiens
tacacttatgagaaaatgagagtgaaaaagtcaaataacatcttcatattactatgaaaatagtcttgacctcatttatcccctgaaaasgtcttggggatcccaaggtcaccagaacacctttggagaactgctagtgtactgtattcctctgtccataatttgtatagatcatattgattaagagtatggcatttggagccagattgcctgggtctgaatccaactcctcaaaaattaatgacctcaaccaagttacaagtttcattgtctgtaaaataagaataatagctgtacccctcatagggttgttgtagggattcgtagaattgtgtaaaggtttagaatagtgcctgaagcaagtacatttgataaatattagttgttcttgttattattattatgtttctacctaagatcctcatgtacatatttaattctgtctacatacacaggcttaacatgcatttt

SEQ ID NO: 241882 - DNA, 471 bp, Homo sapiens
tacacttatgagaaaatgagagtgaaaaagtcaaataacatcttcatattactatgaaaatagtcttgacctcatttatcccctgaaaaggtcttggggatcccaaggtcaccagaacacctttggagaactgctagtgtactgtattcctctgtccataatttgtatagatcatattgattaagagtatggcatttggagccagattgcctgggtctgaatccaactcctcaaaaattaatgacctcaaccaagttacaagtttcattgtctgtaaaataagaataatagctgtacccctcatagggttgttgtagggattcgtagaattgtgtaaaggtttagaatagtgcctgaagcaagtacatttgataaatattagttgttcttgttattattattatgtttctrcctaagatcctcatgtacatatttaattctgtctacatacacaggcttaacatgcatttt

SEQ ID NO: 241883 - DNA, 541 bp, Homo sapiens
atatgtgtaatatcccaactttatgcaagacttttttaaatactgaaagttttagctgatrgtagacatgaaaggcaatgatcctaggatggagggaatccagagggaccagccctgtagagtgcatcaagagcagcatctgttgtttgtttgcccagattcaattataagaggcttttctagccacagtactttcagaaaacaaattctcttaaactgtcaccatgcgttttccatgtgaatttcaacaggcacttcccctgcttcccactctcatgcccattcacccctctctgccctggcccctggtctctgcaggagctgaagggggactggattttgggattgtcagggtcacagaggaggcgaagcagcccctgcaattgaagaaccgtgggaaatatgagatcgcgttcaggtaactggaatcccatcagatgtaaggccatcaagtcggccgtgtggaggaatgtggggaaatatgagatcgtgttcaggtaacctgaatcccatagggtttgtggccgtcaagtccaccgtg

SEQ ID NO: 241884 - DNA, 544 bp, Homo sapiens
agcctgttctgcgctgtcaggtaagagagctccaaagggaggggctgcctcaatggcaggatcgtacgattcctgttgcaaagaaggatacatgacctaatccatgctccagggagaaaaggggagggctggcctgggtggcaaccagataggatacaccggggttctgtcctaactatcaggcaaagtcatcagaattagatccagtgaggaaatgtgcccccaggtctttggggagcatcagaggcagggaagctgagtcccatcatcaagtgcaaaggatgagcagggaactgaaaacatgaggaaaagttggctawgttgacccttggctggtacacagtaagctctgttttagtgttcgcaataatacgaagacagtgaaataaagaacatggcttcatgtcaatgatgaaaatagggaatggggtagataatcatgggaattctgtagctacagcagtggctgacttgctcattcttcttcccgttttagattattgagcccaatatttcagaaaaaggtgagatcatggccagcatc

SEQ ID NO: 241885 - DNA, 551 bp, Homo sapiens
acatattgtctttgtcatcacagccaccctccaaaggcagggttgagtagttttggcagagactgtatagccttcaaagccccaaatatttactatctggccttttatgggaaaagtttgccaaaccttgatttatcaaatgcattggcctagaggaacgtctagaaaaaagcaagctgcaggatcatatgtgtattaattgtagagtagtgtgcagccagatacatatagtcatcccaaatacattcagtgttttaataacaaaactaggatgacactctgaattttgctctgtaacttgcttttcacataatatatcttggacatctttccatttacttaaatacaggtctagctcattctgtttttcttttttttcttgagatgrcatctcgctctgttgccaggctagagtgcaatggcacaatcttggctcactgcaacctccgcctcccgggttcaagtgattctcctgcctcagcctcccaagtagctgggactacaggcatgtgccaccatgcccggctaattttttgtatttttagtacaga

SEQ ID NO: 241886 - DNA, 551 bp, Homo sapiens
acatattgtctttgtcatcacagccaccctccaaaggcagggttgagtagttttggcagagactgtatagccttcaaagccccaaatatttactatctggccttttatgggaaaagtttgccaaaccttgatttatcaaatgcattggcctagaggaacgtctagaaaaaagcaagctgcaggatcatatgtgtattaattgtagagtagtgtgcagccagatacatatagtcatcccaaatacattcagtgttttaataacaaaactaggatgacactctgaattttgctctgtaacttgcttttcacataatatatcttggacatctttccatttacttaaatacaggtctagctcattctgtttttcttttttttcttgagatgacatctcgctctgttgccaggctasagtgcaatggcacaatcttggctcactgcaacctccgcctcccgggttcaagtgattctcctgcctcagcctcccaagtagctgggactacaggcatgtgccaccatgcccggctaattttttgtatttttagtacaga

SEQ ID NO: 241887 - DNA, 556 bp, Homo sapiens
aagcttccagtgtgatctcagatgtacggtgtcctttccatggggagggtaggcaggtcaagggtccttcccataaaacaaaggcagaatcaggagcagagtggccagtacaatgcttgggtttaattgggacaaagccgtacagctttacccacatttcttcccagccaaacaccccagagccaacactcagtgagagcctacacttgtgatgttcctacaccctagatagaggatactaaaggaaaaatattttcttaataattctgtagcaaaarcagagggggcttaaaaattaatacctttaaattctccttctagaatgatggcctaagtaaactattggagatacaaagatgtgcatacaaagatgcttgttacaacattttagaaacagcaaaaaatgaaaaaaaaaaatggaagataaattgctgtatgtccatgatgtgatgcaatcttttaaaatagtgttgagtgggattttcctatggtgtgggtaggagtatgaattggcataacctctataacatacaactttgcaagtagatcaaaattt

SEQ ID NO: 241888 - DNA, 557 bp, Homo sapiens
gaattcctcctagttgagtttcaataaatcagagtcttgatgaatgaccattcaaacatagatggtagtcattttttctttctttccttctcttcctttctcctttccttccacatatccagcttactttgttctttctttttatgcccaagaaagctctgcccaatgtccctmcacctggaaatcccaggcagcagaggggtgaggcatgggggcccctgaactgttttttctctgcctggtttgatgaagggagcaggagaggctggcaaaggaaatgcaagaaaagaagctacagcaggagctggagcgacaaaaggaagaggatgagctgaaacggagggtcaaaaaaggaaagcagggacccattaaggaggagccccccatgaagaaatctcaagcagcaaacaagcaggtaacagcctcacttactccttgccaggagacagaagcagagggcagcctggtgcattccccttccaggaaattagcctgatcatgttgggattttgtggtggggcagaaggcaggaggaaagggaccaacgtttgttgaat

SEQ ID NO: 241889 - DNA, 627 bp, Homo sapiens
ttcttcactcttgattgattgatttattcttcagttactttgtaatatcacttagctagttggttatggcatgccgtggcccagctcacctgcatggtacctttcaccatcagctccactgccagctggcctggccactcatttyctaatttcaaacttctgagggagaaatctggctggcccggctaatcatattgtctttggctgtgtgcccagctattgacaagtatggggattgtctttccttggaatgggtaccaactctttggtccagtcagctatggcacagccatgccatccaaagacatggcacaaaacacgacagcttagccagcagaagctgtggatgggggagactcccttaggaggacatgtgggcaggtcagatagacattgacgtttctggtacagccacacctacatgcccttacatggactatagaaaggtagcaatagcctggtaacatcaactctcatgaccctcgtgctgacaagtctccagggacatgtggagtaagcatacagaagtgtcttttaccactctgttccaaattgtcttcttagatcgtgttccagttcacacctttccatctgggcatcactgagtcatcatggaccttcctaatt

SEQ ID NO: 241890 - DNA, 627 bp, Homo sapiens
ttcttcactcttgattgattgatttattcttcagttactttgtaatatcacttagctagttggttatggcatgccgtggcccagctcacctgcatggtacctttcaccatcagctccactgccagctggcctggccactcattttctaatttcaaacttctgagggagaaatctggctggcccggctaatcatattgtctttggctgtgtgcccagctattgacaagtatggggattgtctttccttggaatgggtaccaactctttggtccagtcagctatggcacagccatgccatccaaagacatggcacaaaacacgacagcttagccagcagaagctgtggatgggggagactcccttaggaggacatgtgggcaggtcagatagacattgacrtttctggtacagccacacctacatgcccttacatggactatagaaaggtagcaatagcctggtaacatcaactctcatgaccctcgtgctgacaagtctccagggacatgtggagtaagcatacagaagtgtcttttaccactctgttccaaattgtcttcttagatcgtgttccagttcacacctttccatctgggcatcactgagtcatcatggaccttcctaatt

SEQ ID NO: 241891 - DNA, 627 bp, Homo sapiens
ttcttcactcttgattgattgatttattcttcagttactttgtaatatcacttagctagttggttatggcatgccgtggcccagctcacctgcatggtacctttcaccatcagctccactgccagctggcctggccactcattttctaatttcaaacttctgagggagaaatctggctggcccggctaatcatattgtctttggctgtgtgcccagctattgacaagtatggggattgtctttccttggaatgggtaccaactctttggtccagtcagctatggcacagccatgccatccaaagacatggcacaaaacacgacagcttagccagcagaagctgtggatgggggagactcccttaggaggacatgtgggcaggtcagatagacattgacgtttctggtacagccacacctacatgcccttacatggactatagaaaggtagcaatagcctggtaacatcaactctcatgaccctcgtgctgacaagtctccagggacatgtggagtaagcatacagaagtgtcttttaccactctgttccaaattgtcttsttagatcgtgttccagttcacacctttccatctgggcatcactgagtcatcatggaccttcctaatt

SEQ ID NO: 241892 - DNA, 550 bp, Homo sapiens
aggcaaaactaccgaacctctcatctctctgaacargtcacacctcaacttcagctctctcctcattggtaaggctgtcctgatggtatgtatttagagttggcatgatctgggcaaggtcatcaagagctctgggagcagccttgcataagaaacctctcctggtcccttccagaagcatatcagagggtcttaatcagtttttaaaaagccacaaaatatttactgctcaatctaatttccaccaagtatcttttaaacctacaattaatagcttaaggaaatttaggagccttgttaaagatcctacttggcagattcctttaaggcatgggctgactgtttatttctagagcctcaagttggcccatccttcctgcatttgcccccagattatggggggtatctgtatgcttcttggtctgtgccacagtggtcagatttctctctcatcctttcgtgcatttatttggttcaacaaatatcactgagtctgtagaatgccctcggtacttttctatgggctgggattacgctaatggataaagcc

SEQ ID NO: 241893 - DNA, 550 bp, Homo sapiens
aggcaaaactaccgaacctctcatctctctgaacaggtcacacctcaacttcagctctctcctcattggtaaggctgtcctgatggtatgtatttagagttggcatgatctgggcaaggtcatcaagagctctgggagcagccttgcataagaaacctctcctggtcccttccagaagcatatcagagggtctyaatcagtttttaaaaagccacaaaatatttactgctcaatctaatttccaccaagtatcttttaaacctacaattaatagcttaaggaaatttaggagccttgttaaagatcctacttggcagattcctttaaggcatgggctgactgtttatttctagagcctcaagttggcccatccttcctgcatttgcccccagattatggggggtatctgtatgcttcttggtctgtgccacagtggtcagatttctctctcatcctttcgtgcatttatttggttcaacaaatatcactgagtctgtagaatgccctcggtacttttctatgggctgggattacgctaatggataaagcc

SEQ ID NO: 241894 - DNA, 589 bp, Homo sapiens
ttattttatgtcattattttaaagactgggtcttggctgggcatggtggctcacgcctgtaatcccagcactttgggaggccaaggtgggtggatcacttgaggttaggagttcgagaccagcctggccaacatggtgaaacaccatctctactaaaaatgcaaaattagctgagtgtggtggcgcatgcctgtaatcccagttactcgggaggctgaggcaggagaatcacttgaacccgggaggtggaggttgcagtgaggcaagcttgtgccactgaactccagcctgggccacagagtaagactccatttcagaaaaaaaaaaaaaaaaaaaaakactgagtctcactatgttgcccaggctgcacttggactgttgaattcaagccatcctcctgcctaggcgtcttgagtagctgggactacaggcacacactatcacgcccaatatttttgtcttaagtttctaaggagtcccaacactgcacagtagctgttcaatatattttgagtgaatgattaaaaacaagcttggtgttgattttattggtacaatttatatttacatatgtaatgtttatattata

SEQ ID NO: 241895 - DNA, 639 bp, Homo sapiens
agcatagagatggcatagagaatctgtgggcaaaggaggcaatatgccaaagactggctgatacagggcacaaaggcctggcaaacaagcagcaactggggcaactccaaagggccaacccagccccagagcttcctgtgcgattagctgaagtctccattgccatctcatcacagttcatctccctctgcccaactctgctgtcctattcttcacagatgttcctgagagtgcccccaagaaacctcccacatgcaaatctcaagtcttagattgtgctttccacagagcctgactcttgatagaaggtgctgtgccaacagaagccactaaggatctcataaattcctaatgaaaagactctccccaaaggggcagattcccattctgagaaaaacttctgggagcagactgcaaactaagcaggctatcaacactggaagtaaagaagacagaagattcaaaggctgagtgggggagggtccagaggaagcagaacycccactcagctaagccaccttcaaatttctgacccacagaaagcacgagatgacaaatgtttattgttttaagttggtaagtttggggctaatttgttatgcagcaaaagataacaaatatagcgttgggcttcatgga

SEQ ID NO: 241896 - DNA, 566 bp, Homo sapiens
gttcctgatattgaaaagtctatagtcataattttctagttgtaaatgttattcaatcaataatgtgatctaaaagctatcctcagtaagagttgattaaaatgaagctctgtgcaaggtagaatttgaagtagactttgccactgctattagtcctgtgattatgttgttttacatgccaaaagggattttgcagatacatagtcagaggaccttaagaaagagggattattgaagtgggcctaatctgatcacatgagccctttaatggcatagtggtggtagcagaagttagagagatccaaagtgtatataggacttgccccattgtggctttgaagataagagcgtaagaaggaattttggtgacctctaaaaagagagascagtcctcagcaagaaaatgggatctcagtcctacagccacaaggaactggatgccaattatctgttcctcatatcatactgattgcaatttctttggatatatatccagtaatgggatggctggataatatgataggtataatttttgaggaaactccatactgtgacaccacacaacg

SEQ ID NO: 241897 - DNA, 487 bp, Homo sapiens
ttttttgattggcagcaaatcaggctatgttatggttaattgtatgggtcaacctgaataggtgaaagggtacacagctggtaaaacattatttctgggtgggtctgtgaggatgtttccagaatagattaggacttgcattggaagactagggaaggaagatcgcccttaccaatttaagtaggtatcatctaatccacggagcacctgaatagaacaaaaaggcataaaaggggcaaatgtactgtcttccttgacctagaacatcatcttcccctgttccaggacatcagtgttcctgattcgcaggcttttgcatttggactcagacttaatcccattagcttccttggttctctggccttcagactgaattacaccattggctttcytgggtctttagtttgcagacagcagatcctgggacttcctagcctccaaaattacatgagccaatccatgatagcaaattctctctctctctctc

SEQ ID NO: 241898 - DNA, 618 bp, Homo sapiens
cttttcattgaagttgtttcaaacatttgtaatagagtcagattgttttatacattatacattctatcctggaattcccttgccttctaaatgatttttttttwaaattgcatgcattgtttcactctttgtgactattgattttagatcttcatcctttttaaatatatgtattcaatgctataaacttccatctaagcattgccttttttgcatcccactaattttgataagttgtgttctcatgttaatttaattcaaaatattttaaatttttctggagatttcttcttttacccttgggttatttgaaagtgtgttgtttaatttcccgatatgtgagaattgcctatttacatatctgttattgatttctagtttaatttcagtgagaatgaacatgctttatataatttctattcctttaaatttgttaaggtgtgttctgtggcccagaatctggtctaccttgatgaaagctccatgtgagcttgagaagatatgtattctacaggtgttgatggagtagtatataaatatcagttaaatcaaactgattggtagtactgttcaggccaactgtacccgtagtgatcttctgcctgctatatatatcaa

SEQ ID NO: 241899 - DNA, 548 bp, Homo sapiens
ttttatcaactaactacagccaacttccttaagaaaagatatagtcttagaacgactataaactaagtttgccacccaggaatgtattttttgtgtgaacacaaagtgaaaagcacactaaaaattaatatgagaagactttagcatatttcttttgatatttaatggataaagaatatagataccaaagaagataacagaggctctgaataawgaaataagggtgacctaatacagcatttctctgaatggtgtgggatgagtagctgctatgaaaaaaaatttcatggtcaaatacatttgagaaatatttcaaaggtaaatgtttttttaattgcaggtattcacaggcctttaatatgctaatacacatttaacagcacccagaacttgactgcataagcagtttcccccaaatattcggaaatcttatttttttatttatttatttttcccccagctttactggggtataattgacaaacaaaaattgtatataggccgggtgcatttgctcacatctgtaatcccagcactttgggagatca

SEQ ID NO: 241900 - DNA, 548 bp, Homo sapiens
ttttatcaactaactacagccaacttccttaagaaaagatatagtcttagaacgactataaactaagtttgccacccaggaatgtattttttgtgtgaacacaaagtgaaaagcacactaaaaattaatatgagaagactttagcatatttcttttgatatttaatggataaagaatatagataccaaagaagataacagaggctctgaataaagaaataagggtgacctaatacagcatttctctgaatggtgtgggatgagtagctgctatgaaaaaaaatttcatggtcaaatacatttgagaaayatttcaaaggtaaatgtttttttaattgcaggtattcacaggcctttaatatgctaatacacatttaacagcacccagaacttgactgcataagcagtttcccccaaatattcggaaatcttatttttttatttatttatttttcccccagctttactggggtataattgacaaacaaaaattgtatataggccgggtgcatttgctcacatctgtaatcccagcactttgggagatca

SEQ ID NO: 241901 - DNA, 630 bp, Homo sapiens
tttaaaatagcctgtgtttgcagttataatttacagtttctatctctgtttcaaacattgattcttgatttgtatcagtgtacatactcatattcaaaactaacaaagttktagttcaatttctttcccttaattcttacagctcagctgcttaccctcagcttccttttttttaataaggaatggaggagagaaacatgattcaaatgaattagggatacttttttacaaagtagtttgcataatttaagtacaaacttccagaaaaagtaatagaaataaatatagttttattttatacaggatatatttgtagtacatttttatttataagtaattcaatgacatgaatgttctctacctgttgccacagtttctaagtagctagccattgtttatatcccattagcagagcagttggtaataaatccctctaccagtcttccatctccaagctcaaagtgaccatcagctagagctagtggtgcaagatgtaagattctctttcacccagcagactgtgatttccttaagggaaatataccattttgttcaccattgtataaccagtacctggaaaaatgcctgatgcataacagttgcacaataaatatttgtaaattggattta

SEQ ID NO: 241902 - DNA, 539 bp, Homo sapiens
aaggaatgtttgtgacttcctagagacagacaggttaaattgctgtgaccaaaatgctgatagggatatgaacaatgaagtccaggctgaggtgmcctcaggtggaaatgagagacttattggaaatggagcaaaggtcacttttgctatacttcagcaaaaaggttggaagcatcatgcccctgccctagaaatctgtggaactttgaacttatgagagatgatttcgggtatctagcaaaagaaattattaagcagcaaagcattcaagacctgacttggctgcttctggcagcctatgctcatatttgtgagaaaaacagatgtaaaactggaagttatatttaaaaagaaagcagagcatgaaagtttgaaaaatgtacagcctggccatgtggtagaaaagaaaatcccatttttataggaaaaattcaagccagctgcatagatttgcataagtaaaaaggaactaaaagttaatggaaaatacaatgaagaaaatgtcttgaaacttctgctgcagcccttcccaccacagg

SEQ ID NO: 241903 - DNA, 587 bp, Homo sapiens
actgaaatatgagttcaggtcatgataggaaaggagggtcagatatgcctcattatattttccttcctatggcgttcagacacaactgaccagcattaacatttaaacagagatcttaagactcacaaaacagactctttgtaccaataagacacaaaaactccaaactgactatagtatagcatcacatgacaaayagcaggccctgaagaaaatcagagtattttatcccaaaatgtatttcattgacatcttttagactggtcctgcatggctatctcttgtgcattctatagagactcccctttccttagtagctctgttccagagagtctgataccttttcagggtctgaagaggaaacatttgccacctattgcctctaagggtagctacctatgagacttcatctatataataaaatccttggtctccacagagccttaccttaacccagacactcctttctcttgatcccaggtcttcagataataagttaactttttcaaccaattgccaatcaaaaaatctttgagtcctcctatggcttttaagctcctacttcaagttgttgtgcctttctggac

SEQ ID NO: 241904 - DNA, 590 bp, Homo sapiens
tatttttttcatctcttcatatagactactggtagcagatgagaatgaaacataaatgaagcaaagaatacatttcaacrtaagttctgtaaaattcattcaccagtcataaaattttatttatcacaaatcttttcataagcttattctcttcaatatgggaaattatcgttcagccagggatatgtaaaattggcatagtagaaagactaatggcttttcaaaggtgtccacatcctaacctctggaatttgtgagcatgttttcttacagagcacaaggcacttggcagatgtgattaaggctacagaatttgagtggggaaattatacaggtaggctcaatctaatcacatgagaccttaaaagtggaggagattgagaaggtcagagagattcaatattagaggggctcaacccaccagtgttggctttgaagatgcaggaatgggacctctaaaggctgggaatagccctcagctgacagccagcaaagaaacaactacctcagcctataacctgtaaccaaaaggaactgaattctgccaacaaccctaatgagtaggaaatagattctcccctagagcctcc

SEQ ID NO: 241905 - DNA, 590 bp, Homo sapiens
tatttttttcatctcttcatatagactactggtagcagatgagaatgaaacataaatgaagcaaagaatacatttcaacataagttctgtaaaattcattcaccagtcataaaattttatttatyacaaatcttttcataagcttattctcttcaatatgggaaattatcgttcagccagggatatgtaaaattggcatagtagaaagactaatggcttttcaaaggtgtccacatcctaacctctggaatttgtgagcatgttttcttacagagcacaaggcacttggcagatgtgattaaggctacagaatttgagtggggaaattatacaggtaggctcaatctaatcacatgagaccttaaaagtggaggagattgagaaggtcagagagattcaatattagaggggctcaacccaccagtgttggctttgaagatgcaggaatgggacctctaaaggctgggaatagccctcagctgacagccagcaaagaaacaactacctcagcctataacctgtaaccaaaaggaactgaattctgccaacaaccctaatgagtaggaaatagattctcccctagagcctcc

SEQ ID NO: 241906 - DNA, 637 bp, Homo sapiens
gattggtagctacacacgctttttctttctttccttttttttacatctaggatccagtccaagaataagtaaatggcatccttccagtggagagctgacagctgggattgaaacaaggtttgtgattctttcactgcccttcaatacaatgtgctcattatgaaacaatctcaaaaacagtgttcttttttttttttctgagaaaaaagtgacattagagactaatggctaggcatgtcgcaaaacacctttctgaggatttttcttctgccacttgaacttgtccaagcttgtctgttaggcaaatgtgcctttttgcttttcaaataatcccccccgtacatgtcactttgggcaaaatatcaccataggctttcccattctgttatcacaaagaggggttattatctgatatttgaaggcagcaagatgtaccccgaacacttgttcygatccagatgaaaacatatcgaagccaacatctaaccattagtggatgagaggataccacttttttttgcgctttcttctctgagagaagaaaacatgatattaataaatctcctttggttgtttattcttttcttttccttcctgctgacaaggattagaaggctataatgtgagggcaaatttg

SEQ ID NO: 241907 - DNA, 576 bp, Homo sapiens
ggacatcccttctaacttcagacctacagttgattagtttctagtcctagtatttgtcctttctcctcttttccagaccttggggactggcttatccatatcatagatttgacaaaagtataataacgattctggccacctctcaggaaaacaggagggaaactcttacttttaactggaaggatacttgttagaactcagatgttacacctgttgggtgaagctcatgtcttctgaacacctcttattctgccaccaccacacagttcctggggatgaggcagctgacttcaagggtcacccagaagggagagttagaggctcatgcttgctgttgtgctggcatccacacccataatctctggtcagtttctctttctggacytgtttaattattgtagaactaaagggctgcccccaaaaaggcagaatcttgaatcatctagtttattgaccatccctcatatgtgataaaattgctcccccaatcatagctgagtgagaaggaagtgacaaaatcagtaattgactggacttcaggtgtcagtaaaagtctgggattggctcctgacactg

SEQ ID NO: 241908 - DNA, 561 bp, Homo sapiens
gttagttacttgctgaaatgactctttggtatttgatcctttttctgcaacatgtatatagttttcttacagataatgggtctataactttataagattataaaaataagatyatatttgtaggataaacatttagaattagaaccagtgtggtgatggaatcctctttatctagttatctaggaaatacaaccttggagagaaactatgaatgggtaagtggagatgtgaacagccctgttttggtctgctaaaactatcataacaaaataccacagcctgggtggcttaaacaacagattttattcctaacgttttgagagtctcaggagcccaggatcaagatgttggcaaagtaggttttatcctgaggcctcttctcttagtggctgctttctggctgtgtactcacagaacctctttgtgagcttgtgaagagggagagagctccttggtgtctcttataaggacactaatcctattggaacagggctccacacttatgacctcatttaacctgaattacttctgtagaggcctcaattgcctgaatagctgttt

SEQ ID NO: 241909 - DNA, 586 bp, Homo sapiens
cctggtagctcaggcaaagctgaaatagtttggatataattttattgttggttaaaataatcacaggaaccaagctctaggaggaatctgtcatgcagtttcttacataggtggtttggaggaacacagcagtcagtgttttaagcacaaaatcacgcaatacccaggtaaaatgttgaacaaagtaccttttatgttgccctctataaagtttgaaggtgtaacattaaattgaaccccagggaagatacttccactggagcatgggagagagtagttgccagatagtgaattgctttttttaaaaaaactgtttayatacttttgtattatgaaagtaattcaagtagataaatctataaagataaaataaaaagaaatgcatttataatttcaacatcactttgtcgaaatattagcaaactaatatttgctttgttgccacaatgaataaatgcatgtgtctaaacatatgaatataaatttacatatggtatacagatgtatattatgaatgagaacatatagtgcatataagcatttggaattgagatatatctatgtctatatatctatatggatatat

SEQ ID NO: 241910 - DNA, 453 bp, Homo sapiens
aattcattgttttatcaccgctaaacaccccgccttccttttaccatgaagtctccacttgatttccattttgatgtgtgctccagagttgtctttgctggttagtttatttcccctctttcatgtaaatgaaatttttggtatcttttatctcctagttatgtggtgggcatgggtccatagagttttacttgctctccttatctgtatagttttgggaagatgtttggtttttggtttaggtagctatcatttttcttaagttgtaatgtttcacaggggtcttttctagaactcccttttcacttttcacaaaygctgagtgacctcaaccacttctattccttaaattaaagcttatagactgatgactaacaaactttattttgttgctgggctccacagcttttgctaataacaaacaaggtatctcaataggacatagcacagttg

SEQ ID NO: 241911 - DNA, 548 bp, Homo sapiens
taaccaaaattctattattatgttgaggggggagatagggctaagrggagtgagaggtgtttcagaaggataagtcttcatttactatggagggaagtcaacagataatgtctaaaattgataagccaaaacagctatatagccatattatgtagaaaaaaaaaacaagcatagttgaaatgcctgtggataacaggacttggaggctagaaaagaggtggagtaaaagactaatatttccattacaaacttttaagaaatatttgagttcataaaaatgaatgtgtatttgattaaaaataattaaaatagattatttacccatctggaatttatattgtgagtggggtgagatagagatccaaacatcacagttttccaactgcctgtccagttattatctaggccaattttaattacagtactttctttcttctcgcatatttgtaatttgaaggaacaccaataaatatgaaaatgtggtgtcatacacacactccgttctttctttttttaaggtcaatgtcatgctcttagataatttatgc

SEQ ID NO: 241912 - DNA, 609 bp, Homo sapiens
ggtgggaagccatggctcaggatgacccatgcagctatggctccaaaagtctgatcgtagaagaggaaaacaaacagcagttctgaatctatgagattttggatgaggcaytaaatatagtatttttaggtttattatgagagtccttctcacaatactcagctttttgaataaacctaaaaaaagtactaagctttccaaatatttgaagaaaaaattgtctagctttcaacttgacagcacttctgaagaaatctcttactgcctgaactcctcacttttctcctctttattcttttgtaaataaaaagatgttgcttggaatgggctaaaagctcagcatggtccatagaatgaaaggtgctagaaatcggtgagattatcccaatctccatctggaagagtccaacattgactgtgaaaaccaacacttagctataattcaaagactttatgaggtctcctaaaaatgcaaatcctattcttctaggtcctatctttctatataggatattacagagaggtgtattctgaatctcttttacatccttctaagactaatattacatttttaaaaatccttaaataaatgaataaaattctttaaaa

SEQ ID NO: 241913 - DNA, 569 bp, Homo sapiens
tcaataaaataaaagaagacatggtctatatgataaagtaacataaagtaataaggagtgaacaaacatatttaaacataacagagtgagatttaaaaaataacaggtttgagcttgaaaactatgatgcagtaaataaaaagtagaggtagaaaaaaaaacagtattcacagtttaaatccagtaattgatgaggaaaacagagttgagaagctatgtcagagtgcagaggataagagtagatattaacagattgagtcactataaaaggaaaaaaatatgtccatcataaaaaatctagacattcacaagaaatatacaagaataggaagaaaaaagaagtttgaaacaaagcagtaaccagaagtacaatgaaaaagtcttcccaaactaagacaaaatattgtgtgaatatgcattcatttattacatacaagtacaaataattacttgggtaccattatacaaaatacactgagrataaattttttaaagggatatctttaccctgcgagtaattaggaaacacagacagataatcacatgactaaacataaaattacaaccag

SEQ ID NO: 241914 - DNA, 461 bp, Homo sapiens
tacccccttggcccagacatacttctccatggctatctacttttccatcaaacctaagtgtaaaaatatgaaagttcacctatttctttgagtctttatttccttatgaagtttcctgtattatctaaaatatattaaatacatgggcatgcttttctcttgttaatctgccttttgttatggggcctcaaccatgaacctattaatggatgaggaaagaatctttccttccctgcagtacacatacataattgaatactatgcagctttaaaaacaaaaagcaaagttctctatcaaatggcatagcgtgatccttccaaaatgttccattttttaaaaagtgcaaaatatatatagtatgctacttgtgattaaaaaaaagaattgaaacacgtattyacttttccaaaaaggggcccaggaaatataaaccagaaactaatgaaattgctgaacagca

SEQ ID NO: 241915 - DNA, 533 bp, Homo sapiens
cagtggccatcatctctcctaggctccagaattcagctccctgctgatctttgcaatcacctatgtccttactcctgaggctgaggagtaaaggatactctaagataaagtgatgtgctctatgaaaatgcaccagaattaaggcagattaggcctgatttctcacccaacttagtttattcatctactattcatttcatgcaccagaagtaaggcataaattccaattgtggacatggtttgagtatttttttcaaggagacttttaacccttagttaggttaaygattgtagaatagatatgaaggagtttgggctaggagtagggtgaggttcacttaggttcacctgccagctgtgtcaaatttcagttttggctagccagaaccctaagtataaattcattctacaaatgtgttaaacgtatttttataaaattatctattttttccagacactgttttaaggcacaattgggtaagttagagtatataaaatatagctacagcactaaacaacttatactcacatta

SEQ ID NO: 241916 - DNA, 577 bp, Homo sapiens
tttttgttccccattctctaatatttctctccctctcttttgtaataatgctccagttctttcaacccatgtgaaaggccctatttttttatgtttaatttttgtttgacttggctcattatttaagccatttkagatcttttatgtcctgtttctgtcacatgggtatttgctatctgtctcagctttggcactttcagagttgagaaaccttgctcaaaccacaggtagaaacattgcataggataggaaagatgctcttggaaatccctttaggttgacactgacttcttcatcaaagttattcaacccattttaaactcaactaactccccttatccaatttataattctctgccctgaatacaaagtgaaatattttaagagactctgtccaacatcttgctgcaatcatgatatgccatatttagatcattatttcctgccaacttagtaactctaccaacaattagtttaatctcagttgatttatttcttattatccctactttcttttcaagtattaaaaggcaaggttttaataatccagtcaagaatcttgcccaaaatgaacatc

SEQ ID NO: 241917 - DNA, 452 bp, Homo sapiens
tattttagagccactcttagaatctctatattgttcttgggttttgggtttatcttatccttattctgatctttccaagctcaagattgttcttcttgacaaagaagatgaaagcatgagtttaaactaagtgttaygcatatagaaacgtgataataattatgtcttaaaagtttttacattgtaaaataataaaagcatttctgacacatactcaattctctagatgggtagctaccattatcacataggttttcttgcttaaagttttacttgacacaagggtcagtcactgaatatttctttaagcatcctttttctcagtgttggctataattatcccttgtccacttgataaaatttcagaatgtcctggtatagcctatcacagtttgactagataattctagaagatggcagaatataagccaataccaatatataagtcatgt

SEQ ID NO: 241918 - DNA, 578 bp, Homo sapiens
taattatgtcttaaaagtttttacattgtaaaataataaaagcatttctgacacatactcaattctctagatgggtagctaccattatcacatasgttttcttgcttaaagttttacttgacacaagggtcagtcactgaatatttctttaagcatcctttttctcagtgttggctataattatcccttgtccacttgataaaatttcagaatgtcctggtatagcctatcacagtttgactagataattctagaagatggcagaatataagccaataccaatatataagtcatgtgcattgtagtatatatttttatgagactgtatcacactagagaaaataagttccatatgtaatatgccaaaacactcagtacttatctgtttaaggtgcatcacataaaatttgagttgtttaaggaaatcaagttcaaaataggttccttgtcaatagtaacacaactgtaaaaggcattgaacccagagtagatgtccttgttgaccacacctgcctactacctaaagtaggacatggcagtggatagatgaagacctgacactaggtcatcctcactgg

SEQ ID NO: 241919 - DNA, 561 bp, Homo sapiens
tcattgtgaaaaatatctttgactgataggaacttcacattgtgtttgttttaggggcatttcataggaatcatttatttccagagataagtatttaaaactgaaattttggctttaaatctgatttggaagccattgatatgggaagaccatggtcttccrgcatccttaaatgtttaattcaatagttggctcctgattttagaagggcgattgacctagggtagagctagaggagaactactaggataatcctagtagccattgaaggacaaaaccttaagccatgttatagtttgaaagatccaggattgtaaacatgagatgatacctaacagatagctgagggtgttaagtagagaaaggactgaatttactctgtggcaccttaaaagagaaccgtgaaagaggggtgacatgctaaagggaggctgattgtgtttcttatgttggactgtcagtttcttgagagtaggatgttttatcatctaactccgtcactgggcaatgcttgacagataaagaaagttttaatatctgtctgttgtactagtaaattga

SEQ ID NO: 241920 - DNA, 561 bp, Homo sapiens
tcattgtgaaaaatatctttgactgataggaacttcacattgtgtttgttttaggggcatttcataggaatcatttatttccagagataagtatttaaaactgaaattttggctttaaatctgatttggaagccattgatatgggaagaccatggtcttccggcatccttaaatgtttaattcaatagttggctcctgattttagaagggcgattgacctagggtagagctagaggagaactactaggataatcctagtagccattgaaggacaaaaccttaagccatgttatagtttgaaagatccaggattgtaaacatgagatgatacctaacagatagctgagggtgttaagtagagaaaggactgaatttactctgtggcaccttaaaagagaaccrtgaaagaggggtgacatgctaaagggaggctgattgtgtttcttatgttggactgtcagtttcttgagagtaggatgttttatcatctaactccgtcactgggcaatgcttgacagataaagaaagttttaatatctgtctgttgtactagtaaattga

SEQ ID NO: 241921 - DNA, 576 bp, Homo sapiens
tgctgtttcacaccaaaatctgtaatggttccattgtttgaattaaaagggggaatctttcctttcttcaaactagaataagactcaatttctgaattaatcaccagtctgttagaatatatagaaactaatatttttaattaaaattgcttttgtacatattctctttctccaattagattataagctcactgaagccaggcatgctaccctttataggcatctagaaaatgtagttgaaaagattcaaactcttagtggttattgactactattagattcatctgggaagactgcaggaaaaagaaaagatcaaaagagaaatggtcactttataagcagaaattaaaaagaatggagaaartctatcactctgaggtcttgaaaaattagacaatcttactacttctagatataagaaataacacaggaaaaatatttgaaactgagccttgtggcaaatgtcgaactgaggttgtggtcttataagtctgtagcttcagagtgtctaccactgactaaagagagaggtgtggtgggattggaggatacaataaaattaagcagatttgagaa

SEQ ID NO: 241922 - DNA, 627 bp, Homo sapiens
ggtgctagttccagagtttgtttacctccattgactcacactttcacctttttttctgccctcaaagatttcctttccttcctgtcagctaagcagagcatttaaagagattttaaaacaaaatcattttggatcaatttcagtttttggaaaactttccagacaaagtttctggaagtccagtctgcctcattaccagaaaaggtatcatgggaagaacttgtgggttctgtttgtgcacaggtttgtttaccctattagactataaactctatccaggttgagactgtgttttagtctcaacacagactttgaaaagagtagttgggggaaccatggttgacgcaatttttgaaaaggagtgagtagccaacattttaaaatctagaggagaaataaggcatccaagaatgaagacaggtcataggacacaaaagttagraggtaattttgaaagaacactttctgaaaggtggtagagagaaaaggtatataaagaggtgagtggaggagtaaaagttaaatggtaaagtaacttttccaaatattatgagaataaggagtaacgatgatgaggatgagagcttgacaaggaaggataagaaaaaaatgtaatatgagagatct

SEQ ID NO: 241923 - DNA, 532 bp, Homo sapiens
aagatgtagtgacaaaaatcttgactaggaatccataaataaggtaagggtataccgtttcagctcagtaaattaaaactatggattcctaaagaaattggccagacaaaacctgagaatggactacctattttaattttcaagaaccagaaaaccaagtcatttgctgccaaaaacataaaggtcaaatatccaatgatgatgtagacttaattctgtttctgatgcagtggtgccatttagatgtaatctttgagtttagtcttctgcatagtgagcacaattactgggtttgtcaaagccatgtgttcttaatttagcaagggcatttagacactttaaaataaagatgaatggatatgaaaggaaaaacaagaaatttgaggtgatgtaaagttaggttgcagagcttcctgaaaaataccaagtactattwaaaaagctactcaggctatcacacaaatttcacattattgtaaccaatcatcatttacaaagccatctaatacctcattaatgctgtaaggaattc

SEQ ID NO: 241924 - DNA, 441 bp, Homo sapiens
tggtccctttccatgttctacctctctctatcatatttaaggaggttgtgattatgttggccccaccaggataatccagaatgayttccccatcttaagatcagagaattagcaatcttaatttcattgcagccttaactcctctttgccatataacctaaaactttcacgagtttcaagcataagaaaatgggcatctttgacagccattattcttcctatggcatgcccttaagaaagtgatgcatcagatgttatcaccacagaagtgtccaggcttctaaaggtttgacactatgctgcttatccatcaaccttgatgcctctgcattcagaggtagaggtgcaggttaaaagatcccaacagccagctttcactcagaatcatcgtggactgagagtaatttagacatttgcaagccttgtacagagacatctaca

SEQ ID NO: 241925 - DNA, 564 bp, Homo sapiens
tgatgagagaaacagagaggacacatgagtatctcctgctgggctctgaaagccaggttaatgcattggagttttagtccaaatgagaagggaaattattagatggttttaagcaggtaagtgacatgatctatattatatatatttttacacatcactcttgctgttgtgtggataattgattttggaagattgaaagcaaggagatgctctaggagcctatttcagtcatccagggaagcaatgaatgtgtcttggtctagaaatgattgggttcactttatgtctctgagtgaaaaagagcagatttgctaatgaattaaatgtaaagaaattttaaaaaaggaacaaagagaactcttagattgagagagcaatgtggacagtatagcaattcatgagatgcagamagatataaaagaacaagatacttgagtttttcagaaacacttatgtttgataatgttttgttctccaattacaatgttaattgatgtcttctttctccaactacaatggaagctacttgaagaaaaagaccacagctcctatcaacaaacattt

SEQ ID NO: 241926 - DNA, 607 bp, Homo sapiens
acgcaatccactctttgatgagaacatacttggatatgacctatrctattttgaatgaaatttagcaaggaagaactgtccatcaatcattttaaccaagttcaccttttgttgccatttaagtttaattttgtcccaggaaattcatagtgagtgattgtgattacattttcctcattttcatgcctctgacattcttgttgaagatgctaatcttgtataaagctgtctttggagttgatgatgctgacacttctcactcctatgggaaatggagagatgtggtgcataaaatagaataaaatgtattagagcaaaataaaactgctaataagagtaatcactgtaatagattttaaaatcattttaaatctagttttaattacctaaatccatctcagaattactactgatgtgatgagaaattcataaattctgtgcaaattgaaaacagaaattacattgtttattaaaatactactttactaccccatctctatattatcatatatgtaaatttacgcatgtatacataaattatacatttatacatataaacttgaatttatcagaactactcaatttcatctcctggttaataatttag

SEQ ID NO: 241927 - DNA, 551 bp, Homo sapiens
ttgcaaaagaaacacatcctttaagaaaaaaacgtcccttttttggtagtgtgagcttctgtaagatttaagtacatgattcctgtccttggttgggttgctcacattctttgtcatgtctcctgggtggtattttccacatttgttctacgtccctgggtgaaagtcagccatcttccatggacattgtacagaatttccaaggatacaccatcagttttaccatatgtcccataccccaccttgtgcaccctgaaggatgaagcactgggctactgtagaataattttctggacgctagaccaatttgtagtatatatgtaggaagccttaagaaagtattrtattccctgaatgctaggggcttgggaggaagggacagagtagtgggtgtcaggtcaatctctacctgcttttttttttttttggacgaagtctcactcttgtcccccaggctggagtgcaatggcacgatctcagctcactgcatcctctgcctcctgggttcaagtaattttcctgcctcagcctccgagtagctgggattacag

SEQ ID NO: 241928 - DNA, 551 bp, Homo sapiens
ttgcaaaagaaacacatcctttaagaaaaaaacgtcccttttttggtagtgtgagcttctgtaagatttaagtacatgattcctgtccttggttgggttgctcacattctttgtcatgtctcctgggtggtattttccacatttgttctacgtccctgggtgaaagtcagccatcttccatggacattgtacagaatttccaaggatacaccatcagttttaccatatgtcccataccccaccttgtgcaccctgaaggatgaagcactgggctactgtagaataattttctggacgctagaccaatttgtagtatatatgtaggaagccttaagaaagtattgtattccctgaatgctaggggcttgggaggaagggacagagtagtgggtgtcaggtcaatctctacctgcttttttttttttttggacgaagtctcactcttgtcccccaggctggagtgcaatggcrcgatctcagctcactgcatcctctgcctcctgggttcaagtaattttcctgcctcagcctccgagtagctgggattacag

SEQ ID NO: 241929 - DNA, 589 bp, Homo sapiens
ttggctcactgcaacctccctcgaactaggctcaagcaatccttccacctcagactcttgaggagctgggactacaggcgcaygccgccatgcccggctaactttttgtactttttgaagagacagggtttcccaatgttgcccaggttagtctcgaaaactcctgggcccaagtgatctgcctgcctcagcctcccaaagtactgggattaaaggcatgagctacagcacccagccaaatgtaaatcttaaataactattttattaaggtatataggataaatttccacagtaaaagcacagtgttccatttcacatatactgttaaggtttttaaccaaactttaaaaatatctttaaaatcataaaacgccatatatgctagacaaatatggcagttttttttaattccactttattatgattcaaaatgcataatggatacaaaaatctaacaacaaaaaagaacaatcaaagcatccgaattcctgaaaggctggtgccaattttatcaataccattaacaaaaatgagtggtgttgggcatttcacttcctttctttctaccttttctcataaagatgagaaa

SEQ ID NO: 241930 - DNA, 589 bp, Homo sapiens
ttggctcactgcaacctccctcgaactaggctcaagcaatccttccacctcagactcttgaggagctgggactacaggcgcatgccgccatgcccggctaactttttgtactttttgaagagacagggtttcccaatgttgcccaggttagtctcgaaaactcctgggcccaagtgatctgcctgcctcagcctcccaaagtactgggattaaaggcatgagctacagcacccagccaaatgtaaatcttaaataactattttattaaggtatataggataaatttccacagtaaaagcacagtgttccatttcacatatactgttaaggtttttaaccaaactttaaaaatatctttaaaatcataaaacgccrtatatgctagacaaatatggcagttttttttaattccactttattatgattcaaaatgcataatggatacaaaaatctaacaacaaaaaagaacaatcaaagcatccgaattcctgaaaggctggtgccaattttatcaataccattaacaaaaatgagtggtgttgggcatttcacttcctttctttctaccttttctcataaagatgagaaa

SEQ ID NO: 241931 - DNA, 499 bp, Homo sapiens
cttacaggatttccccaaacctttaaatattgtctctgattctgcttatgttgtacatgccactaaaaatatagaaaccgctactatcaaacatattggtaattctgaattggcttctttattttcaaggttacaacaggcggttcgccaacgtagacaccctttctatattacacatattagatctcataccactctacygggacccatgtctgctggtaacgataaggtcgactggtctctattgcaatccgagaagctcaggagttccataatctcactcatgtcaatgctgctggattaaaagataaatttgctctcacctggaaggaggctaagcttattgtccaccactgccctcagtgccaagtttttgtacttccaaatcaggaacctggcattaatcccagagacctaactcctaatgatttatggcaaatggatgtgactcatgttagctcctttggcagaatttcacatgtacatgtttctgtagaca

SEQ ID NO: 241932 - DNA, 499 bp, Homo sapiens
cttacaggatttccccaaacctttaaatattgtctctgattctgcttatgttgtacatgccactaaaaatatagaaaccgctactatcaaacatattggtaattctgaattggcttctttattttcaaggttacaacaggcggttcgccaacgtagacaccctttctatattacacatattagatctcataccactctactgggacccatgtctgctggtaacgataaggtcgactggtctctattgcaatccgagaagctcaggagttccataatctcactcatgtcaatgctgctggattaaaagataaatttgctctcacctggaaggaggctaagcttattgtccaccactgccctcagtgccaagtttttgtacttccaaatcaggaacctggcattaatcccagagacctaactcytaatgatttatggcaaatggatgtgactcatgttagctcctttggcagaatttcacatgtacatgtttctgtagaca

SEQ ID NO: 241933 - DNA, 647 bp, Homo sapiens
acccctgcactgaattaagtgttcaataaggtactgagcatggcacattgcctcagtttarggaagtgggaaacaataaacatgaactgaatgagtttctgtgtgtgaaccccaggtcaacaccagccacttggaagcccaaggctgtgggcatttcagccctgtgagcaaaagccacaagggccacaggtccactgccaagttcagagaatcacaaagaggtgtattttcaaggaaagctactccctatttactttatatggctgatttcaatagccgattctgagaatatgaacatgtaattatctgtacagagagaggagggaatggagcttgcagacaaaccgcttgattagtagtttaaaagaaagtggaagttagctacttcttagagtgaatctacacctgatactcagatattaaaatactgtggtaccatattggggctcaccagtatcaaaagtcaggtgccttcattaaaaaggggggcattttatttatcaaagcaacgaagtctgaaagaaataatagcctgtgtcacatgtcacacagggtacacagaaatgagagagtactttggtgatataattcaaaaagacttaaaatgctgcaaaaccttttgattcatcaattccacttctggaagt

SEQ ID NO: 241934 - DNA, 647 bp, Homo sapiens
acccctgcactgaattaagtgttcaataaggtactgagcatggcacattgcctcagtttaaggaagtgggaaacaataaacatgaactgaatgagtttctgtgtgtgaaccccaggtcaacaccagccacttggaagcccaaggctgtgggcatttcagccctgtgagcaaaagccacaagggccacaggtccactgccaagttcagagaatcacaaagaggtgtattttcaaggaaagctactccctatttactttatatggctgatttcaatagccgattctgagaatatgaacatgtaattatctgtacagagagaggagggaatggagcttgcagacaaacygcttgattagtagtttaaaagaaagtggaagttagctacttcttagagtgaatctacacctgatactcagatattaaaatactgtggtaccatattggggctcaccagtatcaaaagtcaggtgccttcattaaaaaggggggcattttatttatcaaagcaacgaagtctgaaagaaataatagcctgtgtcacatgtcacacagggtacacagaaatgagagagtactttggtgatataattcaaaaagacttaaaatgctgcaaaaccttttgattcatcaattccacttctggaagt

SEQ ID NO: 241935 - DNA, 588 bp, Homo sapiens
tcgacagtggccccactgcccttgtggtggtgaagagcctgctgtcagcttcagcccaggcatctgcaggagacactgggcacttttggcccagacattggcagcctcgacagcagatagattcccagggagctgragcagagcaggaggaggaccagggcaatgccacctggtatctggggaaaaagccaaacaaacaggattgtatgtatgtaggcatgtatgtatgtatgtctgtctgtattttagagccagggtctcgctctgttgcccaggctggagtgcagtgatgtgatcatagctccctgtaacctcaaactcctgggctcaagtgatccactcaccctggcctcctgaagcgctgggattacaggcgtgagccactgcacctggccttgttgccttttataactcatttttctcattgtggttttgacttgtatttctctaatgatcagtaatgttgagctttttttcatatgcttgttggctgcatgcatatcttcttttaaaaagtgtctgttcatgtacctgcccactctttaatagggttctttgttttactcttatgaatttgtttaagtttat

SEQ ID NO: 241936 - DNA, 588 bp, Homo sapiens
tcgacagtggccccactgcccttgtggtggtgaagagcctgctgtcagcttcagcccaggcatctgcaggagacactgggcacttttggcccagacattggcagcctcgacagcagatagattcccagggagctgaagcagagcaggaggaggaccagggcaatgccacctggtatctggggaaaaagccaaacaaacaggattgtatgtatgtaggcatgtatgtatgtatgtmtgtctgtattttagagccagggtctcgctctgttgcccaggctggagtgcagtgatgtgatcatagctccctgtaacctcaaactcctgggctcaagtgatccactcaccctggcctcctgaagcgctgggattacaggcgtgagccactgcacctggccttgttgccttttataactcatttttctcattgtggttttgacttgtatttctctaatgatcagtaatgttgagctttttttcatatgcttgttggctgcatgcatatcttcttttaaaaagtgtctgttcatgtacctgcccactctttaatagggttctttgttttactcttatgaatttgtttaagtttat

SEQ ID NO: 241937 - DNA, 405 bp, Homo sapiens
ccaagtatgaaagcaaggctcaggtttgtggggtgaggaggtgtttggggaggggtggggcttgaggactgggcttggttcacaaatccctgggctcccagcctcatagccctctgctagaaccactagatgccactgttgatccaggctctggccagagaaaggcctcctcctgtccatcccttccttccacaaaaatggccagtgaaaagaaagaaatctyatttgaaaattcacttaccttttattcctggtcggccaggggtaccgggaagtcctgatgtgattagaacaagtagtcaggacgatgaaggcccagcaattccagatacccttgggtggtcactagtgctccgtcactcagcacagccacactgctgactgaaaccctgggacgcaccagct

SEQ ID NO: 241938 - DNA, 391 bp, Homo sapiens
atgattgttataaaatgttataaagacttttagaaacctatgttttatgcaaagttaaataccagtgcaccacctcgctggagtacacccttttgtaactttccagtgtagcacctgttggtgcagagttgataggtattgctatcttgatgaggcttgctctccattcctgggtggcccttctcttcctcaccctgtcttcctacacttctacacaggtgttgattgagacactctgtgccctgggggctcagtgccgctggtctgcttgtaacatctactcaactcaraatgaagtagctgcagcactggctgaggctggtaagttcggttttttcccaccaactttgccccaaaatagttatccaaacatataacttttttgtatcaa

SEQ ID NO: 241939 - DNA, 493 bp, Homo sapiens
ttttggcctcccaaagtgctgggattacaggcacaagcctctgtgctcagccctcaacttactcttatttctgactgccatctgtaatgggatacaggctaaggccaaaaagaacggtgaataaatatgaaasttgacttaatagttttgttgacagcagtaatgttagttcattttacaggtcaactttaccaggccatgcgttgcccagacattagtcaaacactttcggtgtgtctgtgggggtgtttctaggtgagagtgacatgtgagttggtagaatgaataaaagcagactgcccgactgtgggtggggctcatccaatcagctgaaggcctaagcagaacaaaaagcctgactctcccatgaataaaagagaactcctcctcctaactgccttcaggttgggacatcatttcttttcctaccttcagacttaaactgaaacattggttctatcagggtctcaagcctgctggccattggcctggc

SEQ ID NO: 241940 - DNA, 523 bp, Homo sapiens
actgattacatatacagtgaaccttttcatttctgtcctccatatttttaatttctttggcagaaataactatttgtttacatttcccagcctctgctgaagctaattctgaattctggtaaacataatgtaagccacccgtgtgcatacaaatttcccatataaaagcctaaacaaatattggctaatgaaattcagtaaaaattaaaaggataatccatcagggctaagtratttttatattagaaacataaggtcagttttacactttaaaatcaaagtcaaggagaaaaaaatgaatgatcatctcagttgctactgaaaaatgagatgaaataaaccaaccacctattcattatggaacccctcaacaaactctgaatagaaggagaatctcataatctaaaaaatgctatacataatcaacttcctataactaacatcatactaaatggagaaatattgagtgttttcccctgaaataagaaagtatttcagtatgaaataagacaaagtctgaaat

SEQ ID NO: 241941 - DNA, 523 bp, Homo sapiens
actgattacatatacagtgaaccttttcatttctgtcctccatatttttaatttctttggcagaaataactatttgtttacatttcccagcctctgctgaagctaattctgaattctggtaaacataatgtaagccacccgtgtgcatacaaatttcccatataaaagcctaaacaaatattggctaatgaaattcagtaaaaattaaaaggataatccatcagggctaagtgatttttatattagaaacataaggtcagttttacactttaaaatcaaagtcaaggagaaaaaaatgaatgatcatctcagttgctactgaaaaatgagatgaaataamccaaccacctattcattatggaacccctcaacaaactctgaatagaaggagaatctcataatctaaaaaatgctatacataatcaacttcctataactaacatcatactaaatggagaaatattgagtgttttcccctgaaataagaaagtatttcagtatgaaataagacaaagtctgaaat

SEQ ID NO: 241942 - DNA, 523 bp, Homo sapiens
actgattacatatacagtgaaccttttcatttctgtcctccatatttttaatttctttggcagaaataactatttgtttacatttcccagcctctgctgaagctaattctgaattctggtaaacataatgtaagccacccgtgtgcatacaaatttcccatataaaagcctaaacaaatattggctaatgaaattcagtaaaaattaaaaggataatccatcagggctaagtgatttttatattagaaacataaggtcagttttacactttaaaatcaaagtcaaggagaaaaaaatgaatgatcatctcagttgctactgaaaaatgagatgaaataaaccaaccacctattcattatggaaccyctcaacaaactctgaatagaaggagaatctcataatctaaaaaatgctatacataatcaacttcctataactaacatcatactaaatggagaaatattgagtgttttcccctgaaataagaaagtatttcagtatgaaataagacaaagtctgaaat

SEQ ID NO: 241943 - DNA, 523 bp, Homo sapiens
actgattacatatacagtgaaccttttcatttctgtcctccatatttttaatttctttggcagaaataactatttgtttacatttcccagcctctgctgaagctaattctgaattctggtaaacataatgtaagccacccgtgtgcatacaaatttcccatataaaagcctaaacaaatattggctaatgaaattcagtaaaaattaaaaggataatccatcagggctaagtgatttttatattagaaacataaggtcagttttacactttaaaatcaaagtcaaggagaaaaaaatgaatgatcatctcagttgctactgaaaaatgagatgaaataaaccaaccacctattcattatggaacccctcaacaaactctgaatagaaggagaatctcataatctaaaaaatgctatacataatcaacttcctataactaacatcatactaaatggagaaatattgartgttttcccctgaaataagaaagtatttcagtatgaaataagacaaagtctgaaat

SEQ ID NO: 241944 - DNA, 532 bp, Homo sapiens
catggtagtaccatgcccattttatagatcagaaaatgagggccggcataattaagtagccggccaaaggcgtggctacagagttcaaacagggcttgagtgggtccatcgaactccagagctcaagttctctgcctggaaactatacgtctattgtgttgggagattttggctgccattgagaaaaggatctaygacaaaattactagtgggagtccaggggagtgagaccaagcagatgaatgtgctgtgaaatttgtttctaattaaatctgacacaaacttttaaaacattattatatacagagttgcaaaccccccccccaaaaaaaaatccaaatgccagccacaaccaccaattaatcagagaattataaaaatacagactgcctttgtagatatctaaatgtagaaacccacctacggagctgaattagccctggaactccccatggctgctgcagtcagtaaccaggagagctcacctactctcttcttgtggaggccccttactgaaaaatatctgttgaca

SEQ ID NO: 241945 - DNA, 532 bp, Homo sapiens
catggtagtaccatgcccattttatagatcagaaaatgagggccggcataattaagtagccggccaaaggcgtggctacagagttcaaacagggcttgagtgggtccatcgaactccagagctcaagttctctgcctggaaactatacgtctattgtgttgggagattttggctgccattgagaaaaggatctacgacaaaattactagtgggagtccasgggagtgagaccaagcagatgaatgtgctgtgaaatttgtttctaattaaatctgacacaaacttttaaaacattattatatacagagttgcaaaccccccccccaaaaaaaaatccaaatgccagccacaaccaccaattaatcagagaattataaaaatacagactgcctttgtagatatctaaatgtagaaacccacctacggagctgaattagccctggaactccccatggctgctgcagtcagtaaccaggagagctcacctactctcttcttgtggaggccccttactgaaaaatatctgttgaca

SEQ ID NO: 241946 - DNA, 587 bp, Homo sapiens
tctttttgttctattgagtccttcaactgattgactgaggcccctacccactttagggagggtgatttgctgtactcaagtctaccaatttaaatgttcagctcattcaaaaaacagcctcacagaaacgcacagaaggtttgaccaaatacctgggccaccccttgatttagtaagctgacacataaaattaatcatcacactatattttatatcaagtcaaatttatctttctcacttcttgaataatagtgaagttttcagattctataaaattgctttgcctatttgcatattttcctttcttcctttcttccttccttccctttctttccttctctccctccctccctcttccttcctccttcctccttctttccttttcttttttcttttctcttcctttttctttctctttctttttctttctctttctccctttctttctctcactctttctttctttctttctttttctttctatttctccctttctctctctctctctttctttctttttytcattcactctgtcacccaggctggagtgcagcaccaagatcatacttcactgcagcctcgaattc

SEQ ID NO: 241947 - DNA, 441 bp, Homo sapiens
tgtaatgcaatgtcactgcttttgaactgaacagcattaggtgtttcaaaatgaaaatttcatagctaatcaaaagacaccacatatatgtgattgctctatctcttgctctctctctctctctctctcctctgtttctagtccctgaaatcctggtttctgttgttcttctatccatttttagtttatctcatatccttctaaactgtatgagctaagcatattctcagttttgatttaacctagtttgaatttgattcttgtcacttgcaatgaaatgggtcctgataagtcacttctgtcatatacaaataaagccagccttctagccaacttacttgttgtgtttttccyttgggactcataattttaaaatctgttgttctctgtggcactcttatcacatgaccaagcccacaaaagcccacattttttttagca

SEQ ID NO: 241948 - DNA, 555 bp, Homo sapiens
tctatatgcaaacacatactactatatatagtccttaagttttggaatgtatatgtgaccattaaaaactgagttataataaatagatcagtgcttacgtatggtttaaatttttggtctctaaataaatgtggctttttgcacttggatttttggggaggagaaatctactcagaatgtctaatacctgacatctgctgataagatttgttttcatgattgaggaaacatgggtagctcacaaaacaaattcccacattatgttttgctttcatcactagtgaatatttcgtcctttagagtactsaagaccttgaatattatttctaatgtttttcaaaagaggcttcaggttacttttttacttttttctcttccccgtggccccccctcacacttggacaaaatttcaaatcgagatgagtttaaaattcttttctgccaacatgtatgcatttagtaagaacttgggaagtattaaagtaaagcaaatagtttttaaggcaaaaattcatctaacagtatttcctgaggttcatcttaaaatattgtcat

SEQ ID NO: 241949 - DNA, 480 bp, Homo sapiens
tttaagcaaggcccctaacccactgctatgaaagagttactttccagagatccttttgaattgagatttctcccgcatgatgtgcactgtgtgtgtatataaaattgcttgtttttctcttgttaatctgtcatttattaataggaaatctgtccaactatgagattatgagggttgcaaaaaaacatactttctccccttcaagatcattttagattatacagataagccctaaatcccatgacaagtatttttgtaagagatagaagaggagaagacagacacagaggagaagaccacgtgaacawaaaggcggaggtttggattatgctgccacaagccaagaatgcttgaatctagaatgccagaatctagaagaggtaaggaaaggttttcccctacagccattagatggagagctatggttgctggcttcttgatttcagacttctggtctccagaattgtgaaataataaatt

SEQ ID NO: 241950 - DNA, 480 bp, Homo sapiens
tttaagcaaggcccctaacccactgctatgaaagagttactttccagagatccttttgaattgagatttctcccgcatgatgtgcactgtgtgtgtatataaaattgcttgtttttctcttgttaatctgtcatttattaataggaaatctgtccaactatgagattatgagggttgcaaaaaaacatactttctccccttcaagatcattttagattatacagataagccctaaatcccatgacaagtatttttgtaagagatagaagaggagaagacagacacagaggagaagaccacgtgaacaaaaaggcrgaggtttggattatgctgccacaagccaagaatgcttgaatctagaatgccagaatctagaagaggtaaggaaaggttttcccctacagccattagatggagagctatggttgctggcttcttgatttcagacttctggtctccagaattgtgaaataataaatt

SEQ ID NO: 241951 - DNA, 532 bp, Homo sapiens
tctcgacttatgtgatgttaaatggagaaggagcattatgaccaataagagagtagtttctaaatggttgctccatttattgaatgtctcaaggagaaacaagctacttggaaagatttcaatacagtgtttttctcagaacttttcctatcaagtggatataaatgttattcatatgacttgtgtaagtcatgttcttttgatgaggaaaaaaatgacagtcatgaaattgtaaaaagaaaaaatagttaatgacatgcatatattaactaatctaaagaaagaccctttttcgtatctttcataacgcattgcttggcatctcctagggcttggggccaggtagaaaccaagactgtgttaagttagtgtcaaccatccgtaattggaagctatcagagagacatttgmagaatttaagggtaatttagcaggtgaacaagacactgagtagctcttgaggcagtccttcaagctataatacagaaacagaatgggagatctgaaactgcaaatgctgtagggtttgaga

SEQ ID NO: 241952 - DNA, 515 bp, Homo sapiens
aatggcctgcaagccccacttccatggtgtctcacaggataagacccactggcttggaattctagcagctactaacaacaatgttgtgcctatctgggacagagttcctgggtgtagggacaggctgacatctttgctatttggacaactcagccattccagcctgcaggctttggagagtccaaaccaaccaggggcagaagtgatcccccagcacagcacagctgctttaccaaaacatggacagacttcctctttaaggagttcctgatcccattcctccrgacttggtgaaagcttccaagcagtgtctccagccacttcctacaggtgcattttggctggcaacaggtccatactttcctggaagggatttctcagaaaaaggtgaaggccaccatctttgctgtttcacagccttcactggtgatgcctccaggtactggaaaatacaaggtgactagggatgggagcagacccccaacaaactgcagcatccctatggaaaggtggca

SEQ ID NO: 241953 - DNA, 494 bp, Homo sapiens
aatatattataaacaagtagggaaaaaattctaatattgcaatggtggtttaactgtaggaaaaatataattgataggttaaagaaaaacttctatgaccatctaaactaatgctgacataacaataaaatggaaaacaaaaacaattttaagagaaaaaagaaaataattaaaaattatatgtagcctagaaatagaaggatatgttttcgatgtaatagataaaaatcaaaaataataaatcaacaaatygaaaataagaaatcaacattttattttctagtgaaacactgaagacaatccaagtaaagtaaggaacaacacaaggatgcctaataacacaagtattattcaacatggatgtagaattcctaacaaatgtaattatacatcacaaataagaaaaagatataaatataggaagaaaaggattattattgtttgtggcttatttgattttctacttataagatgtaatagaataaaaatttaaa

SEQ ID NO: 241954 - DNA, 637 bp, Homo sapiens
ctacagtggatataggcatgaacacaaaacagtttgagaatattcacagctgttcatttgtggctaattatgcaaaacaagtatcactgacttccaatgaattaaaagatttagtgaatttattgttttttttgaaccccaaaaaagagtcatggtggggagaatttctccaaccatttgtcctaagttactctacagttcaaattcatacaaccctctttttttttttcaactaactcattcccattgatatgtaagctttatcaggacaaggataaatattaacaacataatttttggagatttctgttttgtaractgatgcatccttagtggttagtacaatgcctagaatgtaagcactcaataaatcttagctatttttggaaagttccccaaatcctaattgttgtagaactggcatgtctcatatttttcaattactgttttctgtctcagagatttgcaaagtgtgttgtgttagtccatcctcatgcttctaataaagacatacctgagactgggtaatttgtaaaggaaagaggtttatttgacttatagttcagcatggctggggaaggggaagcagtcatgtccttcttcacatggcagcagcaaggagaagtacagagtgaag

SEQ ID NO: 241955 - DNA, 637 bp, Homo sapiens
ctacagtggatataggcatgaacacaaaacagtttgagaatattcacagctgttcatttgtggctaattatgcaaaacaagtatcactgacttccaatgaattaaaagatttagtgaatttattgttttttttgaaccccaaaaaagagtcatggtggggagaatttctccaaccatttgtcctaagttactctacagttcaaattcatacaaccctctttttttttttcaactaactcattcccattgatatgtaagctttatcaggacaaggataaatattaacaacataatttttggagatttctgttttgtagactgatgcatccttagtggttagtacaatgcctaraatgtaagcactcaataaatcttagctatttttggaaagttccccaaatcctaattgttgtagaactggcatgtctcatatttttcaattactgttttctgtctcagagatttgcaaagtgtgttgtgttagtccatcctcatgcttctaataaagacatacctgagactgggtaatttgtaaaggaaagaggtttatttgacttatagttcagcatggctggggaaggggaagcagtcatgtccttcttcacatggcagcagcaaggagaagtacagagtgaag

SEQ ID NO: 241956 - DNA, 605 bp, Homo sapiens
gagacttgtttcatcatttttctcaactgacatatataatgacatgtgtccacaactatagtattatacagaatagttccactgccctaaaaatcccatgtaccacttattcatycctcccttccgcaaacctctggcaaccactgatcttttcactgtctccagagttttgccttttccataatgtcatatagttggaattatacagtatatgtccttatcagattggtcagtgtttttatgtatctatttattagctaaattttattgttttatccatcttatatatccctagtaacttttgtctactttatgtactagtttctgaaagaggtgtgttaaaatcgctcaccataattatagatttggttattctcatataaattttgttaactttcattttatagattttggagctattactttcagatgcatacaaatcaactttttcctagtgggtggctattttttaatcattaagtgatgtgtttcttcgtcttaatgcttttcaccttaaattctatttcgcctgttatatcttttgctctccccctttttcttttaactgttctttgtcatcatgttttaggtacttttcttgtaga

SEQ ID NO: 241957 - DNA, 605 bp, Homo sapiens
gagacttgtttcatcatttttctcaactgacatatataatgacatgtgtccacaactatagtattatacagaatagttccactgccctaaaaatcccatgtaccacttattcatccctcccttccgcaaacctctggcaaccactgatcttttcactgtctccagagttttgccttttccataatgtcatatagttggaattatacagtatatgtccttatcagattggtcagtgtttttatgtatctatttattagctaaattttattgttttatccatcttatatatccctagtaacttttgtctactttatgtactagtttctgaaagaggtgtgttaaaatcgctcaccataattatagatttggttattctcatataaattttgttaactytcattttatagattttggagctattactttcagatgcatacaaatcaactttttcctagtgggtggctattttttaatcattaagtgatgtgtttcttcgtcttaatgcttttcaccttaaattctatttcgcctgttatatcttttgctctccccctttttcttttaactgttctttgtcatcatgttttaggtacttttcttgtaga

SEQ ID NO: 241958 - DNA, 587 bp, Homo sapiens
ccatcctcttttaagcattaaaattacagaccctaagaactatatctggtccacttatctctttgagtcatgaatcataaaaaataaataccatttggggtattttctttatttctggcacttggagatttcttttcttactttcaagtgtgactctatacttatactttaaatattaggcatttctatgtatctggaatgtgtgagtttgtggtgtgtgtgtgtgtgtgtgtgtgtgtgcgcgtgtatgtcaatgggatgtttgattatttcctacatcaacctggactttgatcttgactgaataacaagcctttgctcctaaccactargctctactgcctcccagtgttgtttttcctcttaggtttccaatatcatccttgatgcttctgtgcattttataaataaagagacagactctgtgacatacactttatccatacaataaaaatagacatatctgtcacacttgaagttaactatggaaaacaagttagtaaattaattattttttatttactttccaaatgagccaattatttctttcattagctatcattttgattctccatttgggaccttaa

SEQ ID NO: 241959 - DNA, 373 bp, Homo sapiens
ggcataaagtaaattacaagacacagagggtgaggaagtggaggcatataggaaaattacacagtttctgctttagataactgggtagatagtgggaccagtaagtagtctaacaggtaacttatgtgggctggatcagtgactccaaagctatgaagttacaggatatcttttcccaagaagcatatttggtgcgagttgatagaccttgggcaatttctctggatgaagagacgaaatctgaagcagtgttttccaaacagaaagaatgaagcaaaggacagtggagaagatagcatgaatctaggacaatagaaraaatggccagtgtttatgacagtgtttatggtcagtatatattctatacctatta

SEQ ID NO: 241960 - DNA, 467 bp, Homo sapiens
cctgtggtggcaaggctgagataagtctggctgcaggaggactagttaagaggatattgtaccaaggtgtggtaactgaaatgaagacataagaggcataaagtaaattacaagacacagagggtgaggaagtggaggcatataggaaaattacacagtttctgctttagataactgggtagatagtgggaccagtaagtagtctaacaggtaacttatgtgggctggatcagtgactccaaagctatgaagttacaggatatcttttcccaagaagcatatttggtgcgagttgatagaccttgggcaatttctctggatgaagagacgaaatctgaagcagtgttttccaaacagaaagaatgaagcaaaggacagtggagaagatagcatgaatctaggacaatagaagaaatggccagtgtttatgacagtgtttatggycagtatatattctatacctatta

SEQ ID NO: 241961 - DNA, 554 bp, Homo sapiens
atttcgagagaaaataaacaggactggagcctgtggagaactggcacccacataaccgaggtggctgtttttcaactgtgaccatttcctgccctgtgagcccaatggtgccagattttctgatttttaaagagaagctccaattctacctattgggggaaaaaaagtgaaaactccatatttttcatcatcagctgaaaatctcagctggcagaccatggaggacaaatgaaacatgtytaccagttgaatttgaacctcaagcttcaattttgggttaaatttcatgcacttagatacatctctgtctgtcagtaagttattaggaacccctcatgtgtctagtaggagaggcaaggtgctgcaaagagagagagagcatgagagcacaagcatatatatatatatatatatatatatatatatatatatatatatgtgtatttatttttgagacacaggtttcgctctgtcacccaggcccaagtgcaggggcacgatcacaactcactgcagcctcaacttcaagaaaacaggtgatcctctcacctcag

SEQ ID NO: 241962 - DNA, 523 bp, Homo sapiens
aatcctaccaattttattactgattattgttgggtttgtatattttatttttgtacttataaactttgagttatttcatttatgtggtaattgtttttcttattgactcaattttacatatatatatttttaattatgtttaccttaagatatatattacatatattacataatactttatatatataatcccatatgctacatggattatgttagtggtcttctatttattattttatttttattgtaaatcatttatttttttctgtctttggcaaaaagtctttactttttcattttcctctttaacaattcaaaatacatgcagtcttttgtggttcattttttttaaaaaaarggtaaatactttcaaaacttatacttaatttttttctttaaactaagaaattggaatagtgcctattaatttctcaatataaaagatatatgttagctcactttttagataaatggttatgtttcattttgctttgttttgtttagttatgattctggatgatgc

SEQ ID NO: 241963 - DNA, 576 bp, Homo sapiens
ttgtacgctttggccaacatctccatttcccccacctcccaggccctggtaaccaccattctattctatttctatgagttcaatctttttagatttcttttgtaagtgagatcatgcggtatttgtctttcagtgtctggcttgtttcacttagcataatgtcctccagattcatccaagttgttgcaaatagcaggatttccttctttttaaaggccaaattatactcatatacgtgtggcacattttctttatttatccgttgatggacacttaggttatttccatatcttggctttcgtgaataatgctgcaatgaatatgagagtgaaatgcaattacttttttttaagtacagaatgaggagtacagattgcgtacaagcctgatgaggtaaaaattcaaagccttcattcatataagaaaaatagactactgttgtttaaaagacacatttaataaaattatatacatatttaaaattaaaatagcagaactatcaktaaatgatttttgtctgtaacttgaagtgtacatatactggcaaaggcagcatctgtaaaacaatgtgtttga

SEQ ID NO: 241964 - DNA, 479 bp, Homo sapiens
cttcatttctactgcctgttctttcgacttcctccagtgaagtgctaaagaaagggaagaggaaaggggtgagggtgggacaggtaaagatggaatgtgaaactacaggagcacttagaataattggcttctcatagtcctacagagaatttatacactgtaaacttgtatatcatatttagataaatatacacttatatacatatatgaacacatatatgtattacacacatgcatgtcccttttagttagagaaaatatttcactcaaatattaccattaacacttatggatacatgtacccttgggtgcaaaacaaatgttaccaaggcagttatacatataacacattagaatttctcaagttgattttgtgtgtgtattttcaaaagagtcctaggcaaaaattcaaataagyttcaacttttacagcctgggaaccaatatagagtcagaaagttagctctaaaatgcctgag

SEQ ID NO: 241965 - DNA, 450 bp, Homo sapiens
gaattctggccttgcgtggtggctcatgcctgtaatcccagcactttgggaggacaaggcaggtggatcacctgaggtcaggagtttgagaccagcctgggcaatatggtgaaaccctgtctctactaaaaatacaaaaattaggcaggcatggtgtcgtgcgcctgtaatcccagctactcagcagrctgaagcaggaggtagaggttgcagtgagccgagattgcaccactacactccagcctgggtgatagagtgagactccatctcaaaaaaacaaacaaaaagataactgcttgtttgaacaaaaattatggcaatgcaatctggagtttatgacatatgtaaaaagtaaaatgtatgactataataacagaaagaagagttcataccaataaaactgtcaattcatcgagagaacagaggatacaaaatgtggataggagagta

SEQ ID NO: 241966 - DNA, 566 bp, Homo sapiens
atgaagagctttgaaagtgtaagttaaaattaattcaaattcctgaggcattctaaccttaataaatcaaaatcgagcaacttgaaaacgtctgtctttcaacacagtctttacttgttaagtcaagtgcacgcaaaataatctttacaataatatttctttcataacctataaggatgttcattactaaattgccaacatgcacttgaaaatatctattcacttgaaccaaattgagatcrtttaatatttaaaatctacaatactgtcagtttgctataaaaatactactaatataaaatgaagtgcaaggacttagaaaaaattgagtattaataaaaataataacttatatttatagtacttctaaaagttcactgaatgttttaatatttattgtcacgtaatcctcaacagccctaataaggtagacaataatattgttattattgcttattattcagttttagagaagagtaaacaggtctacaacccctaaatgacatgcctctgctcacacagttattagctggtaccaggtctttcaatgccctgttctttctacc

SEQ ID NO: 241967 - DNA, 319 bp, Homo sapiens
aaacccacagttcagggcctcggattgtctctcacagggttgcaaaaataatctgctatgttttcttcaagaggttttagaattttatcttttacattcaggactatgatctttcttgaattaatttttatgaatggtgcagagtttgaggcgcaacttttttcttataagtagtcattttttacaraaccttttgtcaaaaagacttttcttccccctattaacttatgttgatgactcatttaaaaaatgatcaagtgactgggtaaatgtggttcagtttctggactcactaacgtttttgttaaactattaatct

SEQ ID NO: 241968 - DNA, 586 bp, Homo sapiens
aaaatctcctttttacacatcaaataaaagagtccatagttatctgaaacacagaatatttgagattttgagcactctctaagcaatatttcctcttgctggggcctctgcttaatttcaatatagaaggttgatcaatgatcatcagatggacaactggaaaaatatatctactttttcttattttgatcctagatttgttcttcagtcctgcaattgatcttgtatatcattggcttattgcttaacccttggaagtattttaaaggacttacctgacaagcagatataactggtgttttgttagctcagcttttcacaaataagtcaaatagttctgttacyatgactagaagaagaaaaatagctgaatagaaatgtccctgatagtatataatcggcacatcctggctcaatcctcacagcaaccctggaaagtggatgttggtattctcctcatcctactgcttaggaaacaggatgagagaggctaaataattttgccaaagtcacagcactgagtaagtggtatttagattccaaaccaggcagtctggtttcagtatctgggttcctaaccacaatg

SEQ ID NO: 241969 - DNA, 592 bp, Homo sapiens
aaacccttgggattctgagacaataagtaaaagatgaaatagcattgcaaacttttgacatttttgaactgtgtatcaagatttgtggcatatgtatttgagtctgctacaggaaaattcccagagcacataccasaattattcccaaagtaccttgaactgagatgcctagtcagttcctataactgggtgcaccagagatcgcactgtactccatgccataagccttcacaggtacaggtttttctaaaatggagcttgtgcagaggctatagtcgttttgcacaatgaaagaggctgtcttcaatgtgcatttcgatgtgtgctatgggaatcaggactaaccacgacccatggagacaatgctgcatgacttggagagtgcaacgtaagacgcaatgactctgagcctgcaccacgccatctgacctcaggatctccctgcagggatacgaggagatcttagccatatagcctttctattgccctctactgtctagggataaaatgacagaaaacacagttctgcattttggaagtttgcttaataactaaaaaaataaaaataaaaattactcttgggctgaaagca

SEQ ID NO: 241970 - DNA, 521 bp, Homo sapiens
cagttctgcattttggaagtttgcttaataactaaaaaaataaaaataaaaattactcttgggctgaaagcaggtttccaagttttggttcataataagtagtttttaaacatttaaaaataggggtatgtaataaaatgctgccagactctctggagaccgctgctgctggcactgctctaatagaaagcatacgccattgagctaacattctgttctttgactgaagaagaaaacaaagctgttaaaagctggtaagctcattttccaatagcaatagcattaatatctttcaagtcactcctaaccatacctaattagaggtttataagggatggctcttctggaagggtcacctcaggttacgtagcccacagatttgctgttgattgttggcaacaatggatttgtgtagattttctgctcagctcgaggtgattatcttttttcttttttttcttttgctggygtgtctcttattttgactggctgaggttgggctggacgatgaggccctgatt

SEQ ID NO: 241971 - DNA, 554 bp, Homo sapiens
tgctgcagtgcccagaccaactgactggctgggtgagcagccgccggcctgctaggctgggaggtgctgtcagttgccacaggcaaggaaaagcagagaccaatcggcttcaactctggcagcttactggagtggagccttttctgtttatgtttcctcatttcaagagtgacgtcaaagggtttagtttttcctctgcatgtgctattaattttaaagtactgtactatgggaagaatgtgtgtgtgcctgtggtcagcctgggcaccccactctcaggagagcccaagaaacattttctatattcgggaatacatttaaagaatttaaaataccttgtggtgaggtgtataaaaacaaaagcaaaacaaaacaaaaattaaatataaaaccctgagctaaatcatagcagcaagatgtagattttttccatctgtgagtgtatgtgctccatgctcacttggcagctgttgcttatttttttttacctaattcattttyactcttacctaaaaatgagttgttaattaaacttgatagccatagaggcagaa

SEQ ID NO: 241972 - DNA, 425 bp, Homo sapiens
gagaggctccctcaaacataaagtaaataatgattcgggttagtaagaaatcacagaataatgggttttatagccagaggtatcttagtgatattacattaatagacagatatgaaccctcatcaggctcagcctattaaaaattgatgtcacactcaagcctatccacccctttgtaacccatcttattaaaataattttccagataactaatttttctcattcacattctctcaccccacttcaacatcttttagaatatcttgaaaytgcaacttggagagtttaagatgaaaactttgaagtgagttctgagagcttaaaaacatcatactgagttattaatctatagctttatcatgggtctacatgccacacagataaaaagacaagttttcacagttcactggatccttcataccaga

SEQ ID NO: 241973 - DNA, 579 bp, Homo sapiens
ccttttgaagaggatcagaacaagacaacaattgtctgtggatattaaaaagtcttaggacagccactattcaaggaaattttggttacttctgtggcatacaattgtacataataattgtaactattaataacatacacgaagttatagcaggmttataggagttttacataattttggaacagagatcagtaacatatttatataaatacagcccaaagaaagccaaataccatttcatatttgacagtgcttcctgtatgatttttatactaaatgagccaaatttcaccattgcatttgtgcattattgatgtcaaacccaattcctaacaaaaccttatagacgtatctacccaattttaatgtttgaccataaggtaagattctcataaaccttttataaccctttacaaaaatttttgttaaacagtagataagtgctctaagaaaaacctgttgtacttttattccagtgttcaacttacggaaaaaccgaataataccccctttaactttagccagtatgtcacacacataattttttttacaggattaatttttcacaaaccttccaca

SEQ ID NO: 241974 - DNA, 541 bp, Homo sapiens
ttgaataggagtggttgaaagcaggcatccttgttctattctcrttctcaggagtgttttcaagttttccccattcagtgtggtgttgactctgggtttgccatatgtggctttgattattttgaggtgtattttttctatgtctagtttattgaaggtttatgctggattttattgaatgctttttctgcatctattgagatgatcatatggtttttgtttttaattctgtttatgtagtgaatcacatttattgatttgcatatattcttgcatccctggaataaaacccacttgatcatggtatgttatctttatcttgtgctgttggatttggtttactgatactttgttgaggatttttacatctgtgttcatcagggatattggcctgtagttttttgttttgttttgggttgtttccttgcctggttttggttttagggtaatgctgcccttgtagaatgagttacggaggattccctcttcctgaaatgttttggaacagtttcagtaggattagtgccagttatttatatgt

SEQ ID NO: 241975 - DNA, 545 bp, Homo sapiens
gttgcccgtgcttacagggtattgcttaagaaatttttgcccagatcaatgtgttggagatttttctcaatgttttcttgtagtagttttgtagtttgaagtcttagatttaagtttttaatccattttgatttgatttttgtatatagcaaaagataggggtctagttttatttttctgcatatggatttccagttttcccagcaccatttattgaaaaattgtcttttctccagtgtacatccttggaaaatttgtcaaaaatgagttcactgtaggtgtgtggatttgtttttggagtctctgttccatttgcctatgtctctgtttttatgtcagtaacatgctgttttggttactctagctctgtagtctaatttgaagccaggtattatgattcctccagttttgttctttttgttcaggatagctttggctattttgcgtcttctgtggtccatataaattttaggatttttttttctatttctgtgaataatatyattgtttttctggtagggattgcattgaagctgtagattgct

SEQ ID NO: 241976 - DNA, 553 bp, Homo sapiens
gggactttctacaacctagagaatataagaggaatttttggaacatcagtgaaccaggctgccaaatattaattttgaatcctgcagctatgataatgataaaatagatcgatttaggaacaaattcccacatttaaatgaaatgttgttacaataaattttgtatggaaaagggagtacctgtgttctaggtttgaaaataattaggtgagtgaatttctaattgagcaataaaaaccaaaacaagtaatacaacatgtgtagttgaccttgtacttgagctctttctatcgagttattgcatttactcattcacttgtttattcatttaactgaatatattgagtgcttcctatggagcaggtactctggatttctgggcacttgttatttaataatgaacctataatttagtaggaaaattggacattaataaaataatcacatacataaatgctaagtcttaattttggtgagtattacagaagagaggtgttcagagtaagaacagctcttaaaagcggraatttgatatgatcaagcaggctagaga

SEQ ID NO: 241977 - DNA, 582 bp, Homo sapiens
agttaagtggcttgtccaaggtaacagaagaagtgactgagctaaccaaaatgttgtgttaggttggtaggattagaatcctaamcctgtcccttacgttgtgtgtctaaaagggcaaatttctacatctttctgaatttattttatatatatatatttatttatttattatatctattatatacaattatatataatatatatatatgtaatatgctttcatttccatctattcagcactcactaaatgaaaaccactctgcctataccatactcattctgttccttctgcctcatggttttaccctacagtttctgtctaattgctgctcctttttcagtttttatattttctcctttgcttcctaaatattggtaaagagagtttattcctatcaaaattatgttaataacagtcagttaaggaaatgcttgctgctgaagaaaggctaaaggatttttcaagtgtgctctccctgtcccatgcaaatatatatagataatggaaataatcataataaccttattacaatgttgctttgtaatgaaatatacttagatatacttagtcaagtgtcttcc

SEQ ID NO: 241978 - DNA, 582 bp, Homo sapiens
agttaagtggcttgtccaaggtaacagaagaagtgactgagctaaccaaaatgttgtgttaggttggtaggattagaatcctaaccctgtcccttaygttgtgtgtctaaaagggcaaatttctacatctttctgaatttattttatatatatatatttatttatttattatatctattatatacaattatatataatatatatatatgtaatatgctttcatttccatctattcagcactcactaaatgaaaaccactctgcctataccatactcattctgttccttctgcctcatggttttaccctacagtttctgtctaattgctgctcctttttcagtttttatattttctcctttgcttcctaaatattggtaaagagagtttattcctatcaaaattatgttaataacagtcagttaaggaaatgcttgctgctgaagaaaggctaaaggatttttcaagtgtgctctccctgtcccatgcaaatatatatagataatggaaataatcataataaccttattacaatgttgctttgtaatgaaatatacttagatatacttagtcaagtgtcttcc

SEQ ID NO: 241979 - DNA, 582 bp, Homo sapiens
agttaagtggcttgtccaaggtaacagaagaagtgactgagctaaccaaaatgttgtgttaggttggtaggattagaatcctaaccctgtcccttacgttgtgtgtctaaaagggcaaatttctacatctttctgaatttattttatatatatatatttatttatttattatatctattatatacaattatatataatatatatatatgtaatatgctttcatttccatctattcagcactcactaaatgaaaaccactctgcctataccatactcattctgttccttctgcctcatggttttaccctacagtttctgtctaattgctgctcctttttcagtttttatattttctcctttgcttcctaaatattggtaaagagagtttattcctatcaaaattatgttaataacagtcagttaaggaaatgcttgctgctgaagaaaggctaaaggatttttcaagtgtgctctccctgtcccatgcaaatatatatakataatggaaataatcataataaccttattacaatgttgctttgtaatgaaatatacttagatatacttagtcaagtgtcttcc

SEQ ID NO: 241980 - DNA, 530 bp, Homo sapiens
acaattctttaattcttttaaccatttaaaattttataaacatttttagctcatagactatatggaaaacaggtggcaggttgaatttgtcccgtgactttagtttgccttctcctgctttagactaagggcacctcaaaggcagtgagatgtacctgtttttttcccccattacttaacamataataggtactctgcaaatgtatggcaatacattatctgaacgatgtctttagttacaaatctaatttttattttgttctaatatcaactttatcttagcaaatgaaacatatttccatgttaattaaggaaaagagcatggagatatgtatgggtctgtatgtatatatacatatatttttttcttttctaatagttcactttctaatggaataatagatttatacaacggttgtttaaaatacaagattgtagataaattcagggacacagatattcacaaggatggggttggaggggggttctagccaagctgtgacatgtggggtgtgtgtgtgcccatggga

SEQ ID NO: 241981 - DNA, 530 bp, Homo sapiens
acaattctttaattcttttaaccatttaaaattttataaacatttttagctcatagactatatggaaaacaggtggcaggttgaatttgtcccgtgactttagtttgccttctcctgctttagactaagggcacctcaaaggcagtgagatgtacctgtttttttcccccattacttaacacataayaggtactctgcaaatgtatggcaatacattatctgaacgatgtctttagttacaaatctaatttttattttgttctaatatcaactttatcttagcaaatgaaacatatttccatgttaattaaggaaaagagcatggagatatgtatgggtctgtatgtatatatacatatatttttttcttttctaatagttcactttctaatggaataatagatttatacaacggttgtttaaaatacaagattgtagataaattcagggacacagatattcacaaggatggggttggaggggggttctagccaagctgtgacatgtggggtgtgtgtgtgcccatggga

SEQ ID NO: 241982 - DNA, 531 bp, Homo sapiens
ctattagcatcctttgcctactgatatatctctgtacctctcatagtctccttaatttatttagtgttaataattttatttatttgtttatttctgttttatttgcaagttctgattgcagactggagacctgaattcatttgcaatggttagaggctttgttcatattttcccacaacttttgtcagggagaataaaatgcttaaatgttttgttcagtcatttgctgtctcatgctctttcattytgatgcagaatgcaaagtaaaaacaggattttaaaaatttgaacttcttttgtatcatatcactattatataatattcccccaatcgatagtcttattctaaaactagtttttaaagctccttttttgctctccatagcaaatttgagaaaattcagcttgttctgggctttagtcttcttggtagtatccttaaacatttgtgtcactctattttctcttgccaatgtgacctttgtttcttaaaaatatgctcattagccctagtgggtttttttttttttt

SEQ ID NO: 241983 - DNA, 531 bp, Homo sapiens
ctattagcatcctttgcctactgatatatctctgtacctctcatagtctccttaatttatttagtgttaataattttatttatttgtttatttctgttttatttgcaagttctgattgcagactggagacctgaattcatttgcaatggttagaggctttgttcatattttcccacaacttttgtcagggagaataaaatgcttaaatgttttgttcagtcatttgctgtctcatgctctttcattttgatgcagaatgcaaagtaaaaacaggattttaaaaatttgaacttcttttgtatcatatcactattatataatattcccccaatcgatagtcttattctaaaastagtttttaaagctccttttttgctctccatagcaaatttgagaaaattcagcttgttctgggctttagtcttcttggtagtatccttaaacatttgtgtcactctattttctcttgccaatgtgacctttgtttcttaaaaatatgctcattagccctagtgggtttttttttttttt

SEQ ID NO: 241984 - DNA, 518 bp, Homo sapiens
aatatatatattttttttgtttgcattcaccttgatgactctggtgactctgtgccttgtggatggtcatattgtatagtatcttgcagggattctcagaatttactgaatgtgcatgtcaacctctctagggagagtggaaaaatttttgtgtactacattcttacatatrtgtgccaagttgcttattctccctcctaatctctcaggaatgtcaatgaatcattggattggtctctgtatgaaatcccgtatttctcagaggttttgttcgttaaatcaaaaaaattgactgttgattcaaataactggtcttcgagctctgagattctcttctcagcttggtctgttctggtgttgatattttgaactgtattattaagttcttgccgtgaatttttcagttccagacattcaatttgctttttttcttaaaatggctatttcatctatcagctcttggatcgtttcactgggttacctggattggttttcaactttctcctgaatcacagtga

SEQ ID NO: 241985 - DNA, 518 bp, Homo sapiens
aatatatatattttttttgtttgcattcaccttgatgactctggtgactctgtgccttgtggatggtcatattgtatagtatcttgcagggattctcagaatttactgaatgtgcatgtcaacctctctagggagagtggaaaaatttttgtgtactacattcttacatatatgtgccaagttgcttattctccctcctaatctctcaggaatgtcaatgaatcattggattggtctctgtatgaaatcccgtatttctcagaggttttgttcgktaaatcaaaaaaattgactgttgattcaaataactggtcttcgagctctgagattctcttctcagcttggtctgttctggtgttgatattttgaactgtattattaagttcttgccgtgaatttttcagttccagacattcaatttgctttttttcttaaaatggctatttcatctatcagctcttggatcgtttcactgggttacctggattggttttcaactttctcctgaatcacagtga

SEQ ID NO: 241986 - DNA, 474 bp, Homo sapiens
atagggataatcaggtttattaaataccttattttgtttactggaatctgctgtacattcatttagtttgcagatggttttaatttgtagtggtttcaataaaaagaactgtgagctgttcagttataaaccaagtaatgaacaatatagctataggaaatttatggcttgtcctcagaaataaatgtgatctggaaattttaatattctaaatatcaaatttatcaagctagtttcagaatatgaagggtatgtttatgaggctttggatatatttggaagataattactgattcctatcaagctatactgtgactcaaaagcttggattagaaaaatgtataggcattgtttctggagcatgtgagcataaataggtctgaaattatcaaagctcattgctttttgtgakgcatcttgcatatagattactcacaagtcttggtgaaagtgaaacaaaaggagaatgctttt

SEQ ID NO: 241987 - DNA, 518 bp, Homo sapiens
tcctgacgcatgctatgatatggatgaaccttgacgacattatgctaagggaaataagccagtcacaaaaagacaaacactgtatgagctcacttatgtgatgtgtgtagagtagtcaaattaacagaaacagaaagcagaatggtggttgctaggagctagtgggagggaaaaatggggagttgtttaatgggtatatagaggttcagttctgcaagataattctgaaggytggttgcataactctattgatctgtacatttaaaaatagtcaagatggcaaattttgtgctatgtgcattttattagaattttaaaagaagttaaatgtctaaatgtacacttccattggaatctgtttggaagacaatctctatttttttttttttttttggagatggaatgtcactctgtcacccaggctggagtgcagtggtgcaatcccggctcactgcaagctccatctcctgggttcaagcaattctcctgcctcagcctcccaagtagctgggactgca

SEQ ID NO: 241988 - DNA, 574 bp, Homo sapiens
aagtgaagttacaaagttacaccctatgcaaatgtctgattggttgcaggaagggaccaatcagaggcactttccatttttcatctgctacacagaaaggtgtgagtggatccttttgttacttgggcgtggaaagttggagttttccttttgattcatttctaggaagtcagcacaaatcasccttatgttccctgcctccagaccttattctcctgcctcatttccccccctcgaggaacgtgataccctttgatctttatgggaggcagagggacagatggtctttcttctgtaactgcttcatgctgacttgtggcacactccctacctattggggatcaagggactctcatcatgctctgtctagtggagtcagggtagcttcttgatggccagcagttgtgccttcacctggacctggctggaaaccttgtcacatgatcatctggagcttgatggtctctaggcaagaggaaatgaatacaactacccagaggtatttttgtaccagggaatcaaagggcaactagatgtctcaggattagtacagtcttcccaagggaaaatgtga

SEQ ID NO: 241989 - DNA, 574 bp, Homo sapiens
aagtgaagttacaaagttacaccctatgcaaatgtctgattggttgcaggaagggaccaatcagaggcactttccatttttcatctgctacacagaaaggtgtgagtggatccttttgttacttgggcgtggaaagttggagttttccttttgattcatttctaggaagtcagcacaaatcagccttatgttccctgcctccagaccttattctcctgcctcatttccccccctcgaggaacgtgataccctttgatctttaygggaggcagagggacagatggtctttcttctgtaactgcttcatgctgacttgtggcacactccctacctattggggatcaagggactctcatcatgctctgtctagtggagtcagggtagcttcttgatggccagcagttgtgccttcacctggacctggctggaaaccttgtcacatgatcatctggagcttgatggtctctaggcaagaggaaatgaatacaactacccagaggtatttttgtaccagggaatcaaagggcaactagatgtctcaggattagtacagtcttcccaagggaaaatgtga

SEQ ID NO: 241990 - DNA, 574 bp, Homo sapiens
aagtgaagttacaaagttacaccctatgcaaatgtctgattggttgcaggaagggaccaatcagaggcactttccatttttcatctgctacacagaaaggtgtgagtggatccttttgttacttgggcgtggaaagttggagttttccttttgattcatttctaggaagtcagcacaaatcagccttatgttccctgcctccagaccttattctcctgcctcatttccccccctcgaggaacgtgataccctttgatctttatgggaggcagagggacaratggtctttcttctgtaactgcttcatgctgacttgtggcacactccctacctattggggatcaagggactctcatcatgctctgtctagtggagtcagggtagcttcttgatggccagcagttgtgccttcacctggacctggctggaaaccttgtcacatgatcatctggagcttgatggtctctaggcaagaggaaatgaatacaactacccagaggtatttttgtaccagggaatcaaagggcaactagatgtctcaggattagtacagtcttcccaagggaaaatgtga

SEQ ID NO: 241991 - DNA, 574 bp, Homo sapiens
aagtgaagttacaaagttacaccctatgcaaatgtctgattggttgcaggaagggaccaatcagaggcactttccatttttcatctgctacacagaaaggtgtgagtggatccttttgttacttgggcgtggaaagttggagttttccttttgattcatttctaggaagtcagcacaaatcagccttatgttccctgcctccagaccttattctcctgcctcatttccccccctcgaggaacgtgataccctttgatctttatgggaggcagagggacagatggtctttcttctgtaactgcttcatgctgacttgtggcacactccctacctattggggatcaagggactctcatcatgctctgtctagtggagtcagggtagcttcttgatggccagcagttgtgccttcacctggacctggctggaaaccttgtcacatgatcatctgragcttgatggtctctaggcaagaggaaatgaatacaactacccagaggtatttttgtaccagggaatcaaagggcaactagatgtctcaggattagtacagtcttcccaagggaaaatgtga

SEQ ID NO: 241992 - DNA, 699 bp, Homo sapiens
cactttgtggccttcaggtaatgccagagagtggctccagccggttgccctcaattactaaggatctactaggaaacagctgctgaaagattaaaaaagaaaaaaggaaaaggactcaggtccctcaccygaacctgatgatgatggtcaggtgcttccacatgaaaacctttcagtttcactgcagagtagccctggccaaaagcctgcagtagcctccatgtttaggtgctgtccactgagcgtcccaagttggaaagagaaaaagacagagagagaaaagagttcccctgtatggagcagagagaaaaagggaaaacaaaaagaaaagaaaaataaatcccaaactctgggcttacctcctggctcactcaccaaaatatgtcaccagtggagggtcttgactacaagtcatccaggctcttggtattttgaacaaagaattggaaaaaatgcacaaacaaagcaatgaaaaagtgaagcaatgaaaacacagatttcagagtacatgccacagagtgggaacacgcttgagcaagtggctgaagagcattggttacagaattttctggggcttaaatactctctagaggtttcccgttggttacttggttataccctatgtaaatgaagtagtggcccaagaccaatctgattggtcatggaaggtgaccaatcagaggctgaggtgaagtaaca

SEQ ID NO: 241993 - DNA, 699 bp, Homo sapiens
cactttgtggccttcaggtaatgccagagagtggctccagccggttgccctcaattactaaggatctactaggaaacagctgctgaaagattaaaaaagaaaaaaggaaaaggactcaggtccctcacccgaacctgatgatgatgrtcaggtgcttccacatgaaaacctttcagtttcactgcagagtagccctggccaaaagcctgcagtagcctccatgtttaggtgctgtccactgagcgtcccaagttggaaagagaaaaagacagagagagaaaagagttcccctgtatggagcagagagaaaaagggaaaacaaaaagaaaagaaaaataaatcccaaactctgggcttacctcctggctcactcaccaaaatatgtcaccagtggagggtcttgactacaagtcatccaggctcttggtattttgaacaaagaattggaaaaaatgcacaaacaaagcaatgaaaaagtgaagcaatgaaaacacagatttcagagtacatgccacagagtgggaacacgcttgagcaagtggctgaagagcattggttacagaattttctggggcttaaatactctctagaggtttcccgttggttacttggttataccctatgtaaatgaagtagtggcccaagaccaatctgattggtcatggaaggtgaccaatcagaggctgaggtgaagtaaca

SEQ ID NO: 241994 - DNA, 579 bp, Homo sapiens
tttcttctgggaattttaaaataaatgttatataattttgacagtatacaaacttactgattataaatctttgtatggctcacttcagagcaacacacagtttgacttactgtatattgaacttgcaacatttgagcctcagctcatctgtgtgcatcaagaaatctaattcccaactgcttcaaacatctttatatttccaaaaattttgttgtaagcctctgaatttctggcaacaatgtttaagttattgccaaatctaagtgattaaggatatatattgacctttttttgatgtatatatccaggtctcagttttcaggtgaagattatgacacttctgtatggttttggacataaattttgtagtcaagatttagtyatattgtaagagacaacatttactgaccacttattatacaccatttatggtgctgacagcattagataccttatatagttcttataacaactctatcatgcaagttctactaatgaactttattttatgaatgaggaaatgaaagcttagaacattaaagttgcacacataataagttttaaggtctggttcaagtc

SEQ ID NO: 241995 - DNA, 618 bp, Homo sapiens
gcagatgttattgttctttggccatgtagaaagtcaacaagtaaaataccttgagcatctcaaaaaatgttttatcacctcgctcttgaccagtttacttttgctttgactggaccactaccactgcttgggaactattgctttgattatgctttgccttcaggattctactggtaaagccatgtttaattgtctgttacaagtctttgaagaaatgcttcaagatcttgatcctgtttgtttaaaatttctattgaaacctctgcacttgtctgctgctgaggtgggcaccacgattttggcaaccgtgaaatgaaaagattgctcaatgttacttctttagtcagaattgggtaagckgaaacagttatgatgtctgtggtgttggctattgtttgttctgtgaatcctcagtagtcttcaattagggcacaaacaagatgacttttttcctccaaaattgacatggatggtctgctcctgctggcttcatcttcaacactgtctgttcccttcttaaaatcagttatctatatgtaaacttctgatttcttagggccattgtccctatacactgtttgcaaagcatcgaggtttcaccattcttccactaaagct

SEQ ID NO: 241996 - DNA, 560 bp, Homo sapiens
tagaaagtcaacaagtaaaataccttgagcatctcaaaaaatgttttatcacctcgctcttgaccagtttacttttgctttgactggaccactaccactgcttgggaactattgctttgattatgctttgccttcaggattctactggtaaagccatgtttaattgtctgttacaagtctttgaagaaatgcttcaagatcttgatcctgtttgtttaaaatttctattgaaacctctgcacttgtctgctgctgaggtgggcaccacgattttggcaaccgtgaaatgaaaagattgctcaatgttacttctttagtcagaattgggtaagcggaaacagttatgatgtctgtggtgttggctattgtttgttctgtgaatcctcagtagtcttcaattagggcrcaaacaagatgacttttttcctccaaaattgacatggatggtctgctcctgctggcttcatcttcaacactgtctgttcccttcttaaaatcagttatctatatgtaaacttctgatttcttagggccattgtccctatacactgtttgcaaag

SEQ ID NO: 241997 - DNA, 313 bp, Homo sapiens
cggcgcccccgcccgcgcagtgacgtctccagccccgcagcccggcccggggtaggtgcgcgccgcggggctcccggccggctctgcccaggtctcttcctgggctcccgccaccggttctgagccaaagacccccgccacccttcccttcctcttgccttcgacccgggccgccagaacctccggggttgggggktgcgaatcccagcccccccggtgacgcggggtccgcggggagccccctggccgggttggcggtctcaaccctcgggctctgtctccgcagcgtcctccgccagctcctgtgaccagc

SEQ ID NO: 241998 - DNA, 313 bp, Homo sapiens
cggcgcccccgcccgcgcagtgacgtctccagccccgcagcccggcccggggtaggtgcgcgccgcggggctcccggccggctctgcccaggtctcttcctgggctcccgccaccggttctgagccaaagacccccgccacccttcccttcctcttgccttcgacccgggccgccagaacctccggggttggggggtgcgaatccsagcccccccggtgacgcggggtccgcggggagccccctggccgggttggcggtctcaaccctcgggctctgtctccgcagcgtcctccgccagctcctgtgaccagc

SEQ ID NO: 241999 - DNA, 567 bp, Homo sapiens
ctcattgtgtgccaggaagtattttaagtgctttacacataacaatgcttaattattaattattattattatcatccccattttagaggtgaggaagtaggcacacagagagatcaagaagtatgctggagctcacacagctagcaaggggcagagccaaggttcgatgctgggcaatccacgccagagactgtgtgcagagtccccccagtttagcagctcatatccttaggaaccctgggtattcatcaattcattcaacaagaatgtatggagctctgccgcaataaacacccagtgctagattctgtaaaaagtgccagctgtttctttccacgtgcatatttccttaccattttcctgacagccccagacaccctgatgtgtgatgcctgccgctcacctgggagcagaaacgttattctcaggatggtgactgttttgatgcactrgccttgggaggtcagggaagctatgacagagcaaaggcttttccggaacatagacaaagtgctgaagccacgatgcagtgatctaaggcatagtcagcgttgagtaaggcaggga

SEQ ID NO: 242000 - DNA, 540 bp, Homo sapiens
aaattatttaaagtatacaaagtccaaacagccaggggtaaggtctccaagaggccttcccagggtaagggagagggccacargggaaccttggagtttgaaagacaaagggaacacatgacatcaaagtgcaggctagaaatttcacttagaagaaaataacattactgaaaatattcgtaagagtaacaatagcacctgcacagtgggactgtgaggaagagagagactgcctgtaggaaaatggaagcaaatctttacattaaaatgagacaagtgctgaacttactatgttaactatgatagtgtgtctactatagatatcagatggttaaaagctggtaaaaggtaatgattctaaaaacaaaaatagcattgaccctttttctacctagcccagacctcattcattttgtgcactataaagagtgaggtgtgaggtgttttatcattatcaaatgctgcatcaaaatagatgatttttttccccatgtgtttttccactataaaagacatctatttttttttatggataagctt

SEQ ID NO: 242001 - DNA, 256 bp, Homo sapiens
gggaacagtgggataagcagttaatatatcttattttatccctaaaacaacctttgttttataatcaagaatmctgaagctcagagaagtcaagaaatatactcctctcccaagagtataaagtggcagccatgatttcaatccaggtctatcttaacaatccccaaatcttaaccactcagtgagaagcaatactgaacagaggttaagggcacagactctaaggccaaactgcctgagtccaaatactgtatgg

SEQ ID NO: 242002 - DNA, 256 bp, Homo sapiens
gggaacagtgggataagcagttaatatatcttattttatccctaaaacaacctttgttttataatcaagaatactgaagctcagagaagtcaagaaatatactcctctcccaagagtataaagtggcagccatgatttcaatccaggtctatcttaacaatccccaaatcttaaccactcagtgagaagcaatactgaacagaggttaagggcacagactctaaggccaawctgcctgagtccaaatactgtatgg

SEQ ID NO: 242003 - DNA, 666 bp, Homo sapiens
cttcttgctgcttccaccttcctcataatgtctgaaattaaggtctggggttttgagatacaggaactattttgcaaccatgaaacaagtcacacattgaagatggcacagttgaaagagagaagctgatactaggacatttgtgatagcatcaagccactgcatcacccagagctgcccactccagagttcattcaactatacaaaacaaacctttatttgataaagctaccatctctgaaggttttcttttcatgcattttatctgaataccaattgtgataggatgcccaaatagttttcaccttttctccaacatttatactaagctcaactctgaacactgcgatgatagaaatttaaaacttgagrgagcttatctcagcctctcaatacttcccttattttaaaagttttaatggaaaaatttcaaacatatatttaaaaatagtaaatactatgaaatgcagtcacttttccattacccaaactcaagattatcagcttacgaccacccttgttgtatccataactttacccgttctgtattattgtacatagagagggtaatgtatgcctaaacacattatcacattaccaaggaacacttattaacccacgcctcactgcagtgcactctcctgcagtcccctggcactggaccat

SEQ ID NO: 242004 - DNA, 666 bp, Homo sapiens
cttcttgctgcttccaccttcctcataatgtctgaaattaaggtctggggttttgagatacaggaactattttgcaaccatgaaacaagtcacacattgaagatggcacagttgaaagagagaagctgatactaggacatttgtgatagcatcaagccactgcatcacccagagctgcccactccagagttcattcaactatacaaaacaaacctttatttgataaagctaccatctctgaaggttttcttttcatgcattttatctgaataccaattgtgataggatgcccaaatagttttcaccttttctccaacatttatactaagctcaactctgaacactgcgatgatagaaatttaaaacttgagggagcttatctcagcctctcaatacttcccttattttaaaagttttaatggaaaaatttcaaacatatatttaaaaatagtaaatactatgaaatgcagtcacttwtccattacccaaactcaagattatcagcttacgaccacccttgttgtatccataactttacccgttctgtattattgtacatagagagggtaatgtatgcctaaacacattatcacattaccaaggaacacttattaacccacgcctcactgcagtgcactctcctgcagtcccctggcactggaccat

SEQ ID NO: 242005 - DNA, 666 bp, Homo sapiens
cttcttgctgcttccaccttcctcataatgtctgaaattaaggtctggggttttgagatacaggaactattttgcaaccatgaaacaagtcacacattgaagatggcacagttgaaagagagaagctgatactaggacatttgtgatagcatcaagccactgcatcacccagagctgcccactccagagttcattcaactatacaaaacaaacctttatttgataaagctaccatctctgaaggttttcttttcatgcattttatctgaataccaattgtgataggatgcccaaatagttttcaccttttctccaacatttatactaagctcaactctgaacactgcgatgatagaaatttaaaacttgagggagcttatctcagcctctcaatacttcccttattttaaaagttttaatggaaaaatttcaaacatatatttaaaaatagtaaatactatgaaatgcagtcacttttccattrcccaaactcaagattatcagcttacgaccacccttgttgtatccataactttacccgttctgtattattgtacatagagagggtaatgtatgcctaaacacattatcacattaccaaggaacacttattaacccacgcctcactgcagtgcactctcctgcagtcccctggcactggaccat

SEQ ID NO: 242006 - DNA, 502 bp, Homo sapiens
caattaattttaactatcaacacctaaataaacaagtaagattttayagcaagcttagaaaaggatattttacacatactatgtattttacatatatgtattagacaaatattttacatttagaaaaagcataaacccatgaagggaagaaaatcattagtaataaaaaatgcatattatgtacttattgtgagcttataatttttacatagagacagtaaaatgcatgattcgaagagatttacaatctcataaagctaattttctgtgtattttaaaaatgcataacacataggaaacagtggaaagaatacaacacacagaaaaggaaactgcattcaagcccaattcaacagcttaactatcaataaagcattaagcctcattgttgtacttttattatttataaaattgaggaaataatacctatctttatgggttactctgatactaaatatcaaatggaattttacagtcatccaacaagtacatgttaaaccat

SEQ ID NO: 242007 - DNA, 612 bp, Homo sapiens
ttgggaacccagagagctgattgctttccagggaaatagcaaaaatactggttaaatggttaaatcctagaccacggaatttttaaaaacagaatatgtgtatacacacacacacacacacacacacacacacacacacaaatacaccttttaggggagaaattgatatttttgcctcagcaggatatccatttgccttaaaattcttattcttaggtatgtacatcaatcatctggggaggtccaagctgtgaaatccaaactgacagaaatttatagctccattagcatttatcaaaaatacaggattaagtgtagaaaatatgtattcatgcttcacctttctatatctttactttaagaggtaagtatttgtattcagtatttgttagctcctaccttcaaacggccaaacataatctscaataacatttcagaattctactgggccaaaaatgtatcctattgacctgtgtgtcctctgacttacgactgcatgtttaaatatgaatttaagaaaatgctgcactgattatttggagtttttcagaatggctagtgaattccttggtgatttattggtaaaaaaataaaataaaataaccatgttgg

SEQ ID NO: 242008 - DNA, 545 bp, Homo sapiens
agtggaatattattgaaaaattcaacattttctgacaattatgaaattacaatgtctctgaatctacgattatttattgagaaaatatcgtttgccaaatcattgtttctgtgaccattatattggtcttactttaactagtaaatataacatttgttttattcaaccatttttccaaatcaaacatcygtttgaagtccatcttaaaactttccagaactgataaaaaaaatacatattcttgaattcaaatacagtgcaagttatcttgtaatgatttattaacattaaagaaaacataagaaaagaggtatagccctttttgtctagttaacattaacttatgaaggtacaatttatattaaacaaaatgcagagatcttaaatattcagtatgttgagttttgacaatttcatgaacccatgtaatgaacacctacacaaaaaatataatatttttatcacactgtaaaatttcctaatatccctgtacagactatcttgtcagatgcagctgcttttgacttcaatcaaaattgcttagt

SEQ ID NO: 242009 - DNA, 437 bp, Homo sapiens
gtgcaatacgttatttgagaaatgttagaattcactattaatgaacttctgaaaaaatgagaaataaacaggaaaacaaaatgtggcacataacagaacccaagattcacagacaatctgaaaccatataatttagattatgtattaargataaattattttgggccctaagaaaaatattttgggttattttacaaaaggagacataaaatcaaattagccagtacctgcattttaggaaactctttttcaaataattattactgtcagaaaaaaattggttctcagcaagcaaattatttaataaatttccaaattcaccatgatttcagtgtgcaaacctttacattagtaatcaaatctctattgctagaacatgcctaaaccattgaaaagcattcaataagcgctcaaggagcaaagagaagaagaaatat

SEQ ID NO: 242010 - DNA, 437 bp, Homo sapiens
gtgcaatacgttatttgagaaatgttagaattcactattaatgaacttctgaaaaaatgagaaataaacaggaaaacaaaatgtggcacataacagaacccaagattcacagacaatctgaaaccatataatttagattatgtattaaagataaattattttgggccctaagaaaaatattttgggttattttacaaaaggagacataaaatcaaattagccagtacctgcattttaggaaactcttyttcaaataattattactgtcagaaaaaaattggttctcagcaagcaaattatttaataaatttccaaattcaccatgatttcagtgtgcaaacctttacattagtaatcaaatctctattgctagaacatgcctaaaccattgaaaagcattcaataagcgctcaaggagcaaagagaagaagaaatat

SEQ ID NO: 242011 - DNA, 551 bp, Homo sapiens
tgttaatcaccaaggcatggggaaaatgtctccagggtgtgtcagagacatttgtggcagcccctcccatcataggccaggagccctaggagaaaaaagcggtttcatgggccaggtcctggaccccccyttccgtgtgcagcctaggaactcggtgccccgtgtcccagctgctccagccatggctataaggagtgaagacatagctcaggctgcggcttcagaaggtgcaagccccaagccttggtagctttcacatggtgtggagcctatgggtccgcagaagtcaagaactgaggtttgggaacctccacctagatttcagagaatgtatgaaaatgcctggatgtccagacaaaagtttgctgaaggggcagggccctcatggagaacctctgctagggcagcatggaaagtaagtgtggggttgaagtccccacaaagagttgccactggcgcactgcctagtgaagctgtgagtagagggccactgtcctccagaacccagaaagtagatttactgatagtttgcactgcatgcctggaaagca

SEQ ID NO: 242012 - DNA, 551 bp, Homo sapiens
tgttaatcaccaaggcatggggaaaatgtctccagggtgtgtcagagacatttgtggcagcccctcccatcataggccaggagccctaggagaaaaaagcggtttcatgggccaggtcctggacccccccttccgtgtgcagcctaggaactcggtgccccrtgtcccagctgctccagccatggctataaggagtgaagacatagctcaggctgcggcttcagaaggtgcaagccccaagccttggtagctttcacatggtgtggagcctatgggtccgcagaagtcaagaactgaggtttgggaacctccacctagatttcagagaatgtatgaaaatgcctggatgtccagacaaaagtttgctgaaggggcagggccctcatggagaacctctgctagggcagcatggaaagtaagtgtggggttgaagtccccacaaagagttgccactggcgcactgcctagtgaagctgtgagtagagggccactgtcctccagaacccagaaagtagatttactgatagtttgcactgcatgcctggaaagca

SEQ ID NO: 242013 - DNA, 593 bp, Homo sapiens
gttttctttttgttgaaatttactacatattattataacctcaactttgatatgttaccctaattcacatagaatcaaagtaatctctttacatatcatttttcttcaaagcaaactctcttttatattattgttatcctgagtgaaatatataagaacacttttgtaatcaagatttcttaattaccagaaagaaaaaagtttatatttacttattttataatttatttatttattttgagatggggttttgctctgtcacccaggctgtagtgcagkggggtgatctcggttcactgcagccttcgcctctcgtgttcatgattctcctaactcagcctcccgagtagttggtattacaggcatgtgccaccactcccagctaattttttgtatttttagtagaaacggagtttcactgtgctggccaggctggtctgaaaccattaacaacttcaagtgatcagcccaccttggccttccaatgttctgggattacaggcatgaaccactgtgcccggcctaaatttaatttagaatcatggcaagaataatttataatttctaaattattttatgaatagcaagggtgt

SEQ ID NO: 242014 - DNA, 553 bp, Homo sapiens
ttgatatgttaccctaattcacatagaatcaaagtaatctctttacatatcatttttcttcaaagcaaactctcttttatattattgttatcctgagtgaaatatataagaacacttttgtaatcaagatttcttaattaccagaaagaaaaaagtttatatttacttattttataatttatttatttattttgagatggggttttgctctgtcacccaggctgtagtgcagtggggtgatctcggttcactgcagccttcgcctctcgtgttcatgattctcctaactcagcctcccgagtagttggtattacaggcatgtgccaccactcccrgctaattttttgtatttttagtagaaacggagtttcactgtgctggccaggctggtctgaaaccattaacaacttcaagtgatcagcccaccttggccttccaatgttctgggattacaggcatgaaccactgtgcccggcctaaatttaatttagaatcatggcaagaataatttataatttctaaattattttatgaatagcaagggtgttgtata

SEQ ID NO: 242015 - DNA, 593 bp, Homo sapiens
gttttctttttgttgaaatttactacatattattataacctcaactttgatatgttaccctaattcacatagaatcaaagtaatctctttacatatcatttttcttcaaagcaaactctcttttatattattgttatcctgagtgaaatatataagaacacttttgtaatcaagatttcttaattaccagaaagaaaaaagtttatatttacttattttataatttatttatttattttgagatggggttttgctctgtcacccaggctgtagtgcagtggggtgatctcggttcactgcagccttcgcctctcgtgttcatgattctcctaactcagcctcccgagtagttggtattacaggcatgtgccaccactcccagctaattttttgtatttttagtagaaacggagtttcactgtgctggmcaggctggtctgaaaccattaacaacttcaagtgatcagcccaccttggccttccaatgttctgggattacaggcatgaaccactgtgcccggcctaaatttaatttagaatcatggcaagaataatttataatttctaaattattttatgaatagcaagggtgt

SEQ ID NO: 242016 - DNA, 553 bp, Homo sapiens
ttgatatgttaccctaattcacatagaatcaaagtaatctctttacatatcatttttcttcaaagcaaactctcttttatattattgttatcctgagtgaaatatataagaacacttttgtaatcaagatttcttaattaccagaaagaaaaaagtttatatttacttattttataatttatttatttattttgagatggggttttgctctgtcacccaggctgtagtgcagtggggtgatctcggttcactgcagccttcgcctctcgtgttcatgattctcctaactcagcctcccgagtagttggtattacaggcatgtgccaccactcccagctaattttttgtatttttagtagaaacggagtttcactgtgctggccaggctggtctgaaaccattaacaacttcaagtgatcagcccaccttggccttccaatgttctgggattacaggcatgaaccactgygcccggcctaaatttaatttagaatcatggcaagaataatttataatttctaaattattttatgaatagcaagggtgttgtata

SEQ ID NO: 242017 - DNA, 553 bp, Homo sapiens
ttgatatgttaccctaattcacatagaatcaaagtaatctctttacatatcatttttcttcaaagcaaactctcttttatattattgttatcctgagtgaaatatataagaacacttttgtaatcaagatttcttaattaccagaaagaaaaaagtttatatttacttattttataatttatttatttattttgagatggggttttgctctgtcacccaggctgtagtgcagtggggtgatctcggttcactgcagccttcgcctctcgtgttcatgattctcctaactcagcctcccgagtagttggtattacaggcatgtgccaccactcccagctaattttttgtatttttagtagaaacggagtttcactgtgctggccaggctggtctgaaaccattaacaacttcaagtgatcagcccaccttggccttccaatgttctgggattacaggcatgaaccactgtgcccrgcctaaatttaatttagaatcatggcaagaataatttataatttctaaattattttatgaatagcaagggtgttgtata

SEQ ID NO: 242018 - DNA, 553 bp, Homo sapiens
ttgatatgttaccctaattcacatagaatcaaagtaatctctttacatatcatttttcttcaaagcaaactctcttttatattattgttatcctgagtgaaatatataagaacacttttgtaatcaagatttcttaattaccagaaagaaaaaagtttatatttacttattttataatttatttatttattttgagatggggttttgctctgtcacccaggctgtagtgcagtggggtgatctcggttcactgcagccttcgcctctcgtgttcatgattctcctaactcagcctcccgagtagttggtattacaggcatgtgccaccactcccagctaattttttgtatttttagtagaaacggagtttcactgtgctggccaggctggtctgaaaccattaacaacttcaagtgatcagcccaccttggccttccaatgttctgggattacaggcatgaaccactgtgcccggcctaaatttaatttagaatcatggcaagaataatttataatttctaaattatkttatgaatagcaagggtgttgtata

SEQ ID NO: 242019 - DNA, 541 bp, Homo sapiens
ataggacactgcaaaaatgacatatttagagataaagttgcataagctcaaaaggggttaaaaatcacaaagaaatactttgtagtggtcaatactctgactctaragtcaaatatttgtaggtgtgcattccagctctgcaaactgttagccatggcacttgaggaagtatatctttgacctttcccgttcaaggaatttattataaaaattattagataagtaagcatatgcttatgtatactatgtattgaagtattttttataatgacaaaatataatagcctggagtagttcattttaaattattacttggatacattatgctataggcttacaatgaagtataatattgctgtcacataacataacttcatagtattatacaaaaaatgctatagtaaatctatatttataaacatgggctgatattcactgtgtgtctgtgtgtctataatatgtacatatttagagagtgaaaaagattagcaaaataagcatttaaatgtgtagaatgagtaagtttagttggctggctttt

SEQ ID NO: 242020 - DNA, 661 bp, Homo sapiens
tgtataaggattcagcaaaatgttagttgacatgtggctaaataaacttaaagtttaagaaagataagaaaagaaascaaatatgcataaatctggggagaaaatttgatattgctgctaataaaaaggggaggggcatcatattgggaagcttcattaataaaagtaacaaattatgagaacaaatagtcttattatagtttatctggtgaagcattttaatgaggcgtagttgtctgttccattacggaaagagttttcttatgtgtgctctggtagattttcatgtggccacactgaaagatactcccaaatgtctgactaataattctatttataggcaactgttctgaaggtttaaagtaaggaggatgaagttcatttggaagcagtggggaaaaaaatggtaatgctgggctttgaattttatggatgctgtagctgttctttatttttcaataaataaatgttttaaatgccatgttttttagctattgcagttaaactgccctcatctttttgcccagcaaaaaaacccattaagttattcactgagattgactctagattttttataaaattaataactttgctaccagtttctcaaaaatgagtagaaacgacttttcaatgcaaatgccagtttttgctacagtgaaat

SEQ ID NO: 242021 - DNA, 457 bp, Homo sapiens
tagatgactgaccattttattattttcccaagtaagctgaggctgacaatatcatgaatcatttacatatatcagtattcaaatgttccatttttaaattgggagggggtatgttttagaatagaataatgaaattccctccatctcctcctaatgtacatcattaagaagaatctaatggaaacataaggttctaaggctcttgytggaaaccataatcagaactggaggaattctcttatggaaaacattaaaaaaaggaaattctagcaatagaattcattgttaaagctgtaagttacaacaatattgtctctgcatgctgactgtaatcctctataatcttcaaaggcaaacaggaacagtaataatcttttcatgtactcttaacttccttctctgaaaggctagaaaatgtcttacatgtagcactcatagtgtcatttaatcaaaccca

SEQ ID NO: 242022 - DNA, 455 bp, Homo sapiens
taagtttattatttttatcatacaaaatagttttaggcaagaagcataaaaataaagaggattaacaattttcagagattttaatatacttctctcagtaactgactgacaaatacagtagaaaaaagtaagatatagactatttgaacatgattaacgataaaataatcagggtgtctcacaactaaagtgtaaacattttttccccaaacacataaatgtgtataaatagaacattttaaaaagttasttcatactgaaccctaaagtaagggtccattttctaaagattggcattttgcaaaccatattattgaccacaataaaattaagctagaaaattttaataaaataattatctaacaaataaacaaattctgtagatagaaaatgaagaaatgaagcaggatgtttccctgacgccttcccaggtgggagttggagtgcatgagctc

SEQ ID NO: 242023 - DNA, 346 bp, Homo sapiens
gagtcccattgcacagatgaagaaatcaagaggtaaagtaattttcccaacatcagatcttggtggtggaggttggctatgaactcagattgagtctgaagcctaacatatattaccttgtacactgtcctgagccaaatgtgtgacccatgcaatctgggggaaacttggcttccaaataaagtgttactcatgtgctgttgatatayatctttgtatgtttctgttacttatctcattattctggaaaaatttacattatgtttaagagtgaggctttcagaaacatgacatgcaaaaccaacttccaatctttctttttttgaaaaccttgcagatacaggga

SEQ ID NO: 242024 - DNA, 598 bp, Homo sapiens
agactatgtctataaaatcactggttgggcttggctcggtggctcacatctgtaatcccagcactttgggaggctgaagcaggtggatcacttgaggccaggagttcgagaccagcctggccaacatagtgaaacctcatttctactaaaaatacaaaaactagccaggcttggtggcgtgcacctgtaatctcagctacttgggtggctgaggcacaagaattgcttgaacccgggaagtggaggttgcagtgacctgagatcacatcactgcaaaccagcctgggtgacagaatgagactctttctcaaaaaataaaaataaaaataaaaataaaataaagccattgggaaattgcacattgagcaatgtcagtgtgggcagacattgtggaaaatcaatcagaaaaggataccttttcyctcaattaagaaatgttaactttccctgaattaagtggctgctttgatctattctgtattttagtcatggccagatacgtcattgtttgttcagtttgaaagaaaaataaaaagaactcagagaactgtatctggaaaagcatatttactgagtacttactgtgtaccagtgtcaa

SEQ ID NO: 242025 - DNA, 586 bp, Homo sapiens
tcttaaatgattggcttttacaggggtattcaatagctatygaattgatggcactagactggttatttttatctttttttttttttttatttttagagacaggatgttgttctgtcactcaggctggagtgcagtgatgcaatcatagatcactgcggccttgaactcctgggctcaaggaatccacctgcttcagccttctatgtagctagaactacaggtatccaccaccaacctcagccctgggttctactggatgtgccggccaggggccacctctacttctgctggggcctcccaatgctggccctccacaggtggcctccggaaacaaccctcagaaagaaggatggttccactcataccagaaccttttttgtcatctttgcattttatacaggcagtcagacctcaggcgtgtgctccatcagaggcctgacctctcctcagtggctgtgattattgcctggagaaccagccagattttacgtaaatttcaaacaaatcttttaagagtagggtcctatcctggaggcagctggagggagaaaaagatccctcttagaactcggcctttgaagtgaat

SEQ ID NO: 242026 - DNA, 550 bp, Homo sapiens
gccaggacctgaggagaggatgattcaatccaggaggcaaggggaagatcacttagtcatcttaagcacttactatgtgtcaagtatttctataagtactgggaatacaaagaaaaataagataagtcatctaccttcagaaactttatcytgagtcatgaagacaaggggtgtttaataatgcttaatgatgaagggtcagagacaacagggacagataaaggacctttggatttgttggtgaaatgcacccttcaccttctatttgacattaattttaatgtcaaaaactgcaattccctttgcaccaacctaatagaaagcattttcaatagacaaatcagattgaatgggggaatatttgatgaaaaaatgaacacaagatcaataatgcctttattcccagaacctttttttgtttttcactctcttggcaattattcagcttcttggccatcttcattttaattaatttgtattatgatagtaatgttctgatattttaattcagattttaaataatattgaagccaagttaaaatttagtcac

SEQ ID NO: 242027 - DNA, 492 bp, Homo sapiens
gagtggcagcggatataagagcaatggtccatgtcttttctaaataaaaaaccaaaagacaaaatttagcttaagggaatgaaaatcttaggaaatctcatagctcactttgatttaacccacatttactgggccaagtcccatagcaagatgaacaagattcagagtgtattcctcatagggtaaatatgactagaatgggaatcatgaataaaaagcagaatgggaaaagagtaataaggtaccagcaataaattcttcgggagcatggagcaaagattcagaagccccatctaaagtgaactctaaggagactttggccttccctttctgtcaaggtgaaagtgcaacctgtgaaaagtgaaatccacaacagaaactgccygtgaggtcatcttaccagcctcccctgctctcacggtcaagatagctccttaatgtctgacatctttttctcagcattgcaaacagtggcaggcctgggggcagatg

SEQ ID NO: 242028 - DNA, 493 bp, Homo sapiens
ggccacagggaaaggtgagcatcgtctacccgctcaggctcacctgtggccatactgtagmtgttctttccaggccagtccctccaggccagtccaactgtcacctccttggcaaggcctaagtcccctggttcctctgtctgcccagcgctgtgttcttaggcaaaccacttagccatttggtggctcagttcccatttttgtaacttagagatgataatagtacctttctcctaggtttgatgtgaagattctatgagatgaaataagttagcacttaagcaggacctggccagactcagtgattcatacatttaaccatcatcatcattctatctggcctggattccaaggatccaggagggaatttgctagcaggagctccacctgaacggctcagtactcaagcttccatgcagcaaaagcctccttggttgccccaacagaggggtttccaccctgcttggaaccccactggtctgtgtatgtgtta

SEQ ID NO: 242029 - DNA, 609 bp, Homo sapiens
aacagcatattactttctccattaggatatacattagcatattgttgaattgaattttccgccttcactttttaatatatttccaatttccaactactccctggaaaattttaaaaaggggcagcagaaggattggtgatgtgcatgccacagatggagatggaaaaactgcccagaacatgttgacatttgtaaaaaagttaacatccccccacactttaaaactatgatattaggaatagcataatggcaaaagttactcgtacaacatctgttccttccaatgggaggatttctttcctgccaagaatttatgaattttctataggagcttggttctgttcggggaagagggaaggaagccagccagagcagccccttggcttcagggaatgcagggatgcattgctcctggcttttagatggctcctgaagctgctgatggggccaaagtcacccttcagaaggacttggctgcaaacaagaaaaatctccaacagccacccatggtttaaagtgactaggccgtcactaagaaaggtcaaggccatatggcttgaggacagagatgagttggttataactcycattcgcagaagacctaatcct

SEQ ID NO: 242030 - DNA, 494 bp, Homo sapiens
tttccactcctcgccgaccacagaagcattcttggaatgcatctcgccccgaatgaattgactcggccctccctgccaacgccaggaatccctctaagatccagagtcggacgcccttgagtgtgacttccatcctctagcttggctctggccaarggctgccagggttgcagctgggggatgagagtgttttggcagggaaaccgaggtcctccttcctatgacctcgaggagttcaaccccacccccctatataggatcaggccagttactttaactctgatttttactttaagcccttttcaaacggaggaaccaaaaaaggaagacacctgccacttcctcccctactcctttaattgtgatggcaacatcttgggatgctgtgatttgagggctgcatgggaaactcaccactttttcaggaaagccaaagtccctcaccctggatgaacagtggatgagcccttgattggcagccatctcccttggga

SEQ ID NO: 242031 - DNA, 607 bp, Homo sapiens
agctcactggcattatttatcaaaaacaatcagggaggaatgcctgaaggacacatagtctactcttgcaggaattcctttcttttcttttctttttttttttttttttttttttttttttttgagacggagtctcaatctgttgcccaggctggaagtacagtggtgcaatctcgactcactgcaacctccacctcctgagttcaagcaattctcctgcctcaatctcctgagtagctgggattacaggtgtgtgccactatgcccagctttttttgttgttgttttttgtatttttagtagagagagggttttgccctgttggccaagctggtcttgacttcctgatctcgggtgatctgcctacctgggcttcccaaagtgctgggattacgacttgagccactgkgcctggcctactcttgcagaaattctaaaatgtacatctaattagagagtttactttctataatattgaattaactgaactgtacctactggtaaaaatgtggtagatgatgctatttatatcattacgcactgtccacatgggatccccaggaagaaatttttctctgagcttagtagtaatcacattttcacttct

SEQ ID NO: 242032 - DNA, 610 bp, Homo sapiens
agtcagttttacatagttcagtgctttgttttatttgttggtttgttataaaattaaataatctatttgagaactgacacaggtgagcaataagaaaaggaatttacagaggtataaaatgtaagttatatccaaagtaccagtcaagactcatctcaaagactgagcactcttcgaatactgttaaaatttgtggaatctttgtactccagtatgtggatgaakttagaaacctgagtatgacttcttagggtgtagaaatctagctcaagcaaaggaggaaagaaaaacaaatttaaaattaaggttagaaacttctgaaaaaaaaagagaaacttaaaaaaaaaacctggatttaaaacatagtggatgagtttgctagggctgccattacaaaataccacaggctgggtagtttaaacaacagaaatgtgttttctcacagttctagagaacagacggctaagatcaagttgatgtcgacaggatggttttcttctgagatctttcttcttgacttgtggatgtctaccttagtgctgtgtcctcatatggtcacccttttgtttctgtgttgtttgtgtcctaatccactttttttctaagcgca

SEQ ID NO: 242033 - DNA, 610 bp, Homo sapiens
agtcagttttacatagttcagtgctttgttttatttgttggtttgttataaaattaaataatctatttgagaactgacacaggtgagcaataagaaaaggaatttacagaggtataaaatgtaagttatatccaaagtaccagtcaagactcatctcaaagactgagcactcttcgaatactgttaaaatttgtggaatctttgtactccagtatgtggatgaatttagaaacctgagtatgacttcttagggtgtagaaatctagctcaagcaaaggaggaaagaaaaacaaatttaaaattaaggttagaaacttctgaaaaaaaaagagaaacttaaaaaaaaaacctggatttaaaacatagtggatgagtttgctagggctgccattacaaaataccacaggctgggtagtttaaacaacagaaatgtgttttctcacagttctagagaacagamggctaagatcaagttgatgtcgacaggatggttttcttctgagatctttcttcttgacttgtggatgtctaccttagtgctgtgtcctcatatggtcacccttttgtttctgtgttgtttgtgtcctaatccactttttttctaagcgca

SEQ ID NO: 242034 - DNA, 610 bp, Homo sapiens
agtcagttttacatagttcagtgctttgttttatttgttggtttgttataaaattaaataatctatttgagaactgacacaggtgagcaataagaaaaggaatttacagaggtataaaatgtaagttatatccaaagtaccagtcaagactcatctcaaagactgagcactcttcgaatactgttaaaatttgtggaatctttgtactccagtatgtggatgaatttagaaacctgagtatgacttcttagggtgtagaaatctagctcaagcaaaggaggaaagaaaaacaaatttaaaattaaggttagaaacttctgaaaaaaaaagagaaacttaaaaaaaaaacctggatttaaaacatagtggatgagtttgctagggctgccattacaaaataccacaggctgggtagtttaaacaacagaaatgtgttttctcacagttctagagaacagacggctaagatcaagttgatgtcracaggatggttttcttctgagatctttcttcttgacttgtggatgtctaccttagtgctgtgtcctcatatggtcacccttttgtttctgtgttgtttgtgtcctaatccactttttttctaagcgca

SEQ ID NO: 242035 - DNA, 614 bp, Homo sapiens
aaaacctttttcttctttatggcaaaagcaaatggaggatattcttgcctcccttcttcaaacactgtaatcctagttctgaaattggaaaatgtcactgattactaacagcaatcatactggkaagtaagtaaatgtaaggaaaaatagaaaagggaagcagaattttcagtctagtagatagatctaaactttcatacactaaaaaaaagttataaagttttagaagatgataaatataaaaatgtgtccctgaaattgatgctataatttgagaaaaagtgaaaatttgatcagtctattttttatttttctttttgagacagagtctcactctctcacccaggctggaatgcagtggtgtgatctcagctcactgcaaccttctcctcccaggttcaagtgattctcctgccttagctgggattacaggtgcatgccaccacacacagcttatttctgtatttttagtagagatgggcttttgccatgtgggctagtctggtcttgaactcctgacctcagatgacccaccagcctcagcctcctaaaatgctgggatgacaggcatcagccgccacacctggctgatcagtcttttatgcaggtgaata

SEQ ID NO: 242036 - DNA, 614 bp, Homo sapiens
aaaacctttttcttctttatggcaaaagcaaatggaggatattcttgcctcccttcttcaaacactgtaatcctagttctgaaattggaaaatgtcactgattactaacagcaatcatactggtaagtaagtaaatgtaaggaaaaatagaaaagggaagcagaattttcagtctagtagatagatctaaactttcatacactaaaaaaaagttataaagttttagaagatgataaatataaaaatgtgtccctgaaattgatgctataatttgagaaaaagtgaaaatttgatcagtctattttttatttttctttttgagacagagtctcactctctcacccaggctggaatgcagtggtgygatctcagctcactgcaaccttctcctcccaggttcaagtgattctcctgccttagctgggattacaggtgcatgccaccacacacagcttatttctgtatttttagtagagatgggcttttgccatgtgggctagtctggtcttgaactcctgacctcagatgacccaccagcctcagcctcctaaaatgctgggatgacaggcatcagccgccacacctggctgatcagtcttttatgcaggtgaata

SEQ ID NO: 242037 - DNA, 614 bp, Homo sapiens
aaaacctttttcttctttatggcaaaagcaaatggaggatattcttgcctcccttcttcaaacactgtaatcctagttctgaaattggaaaatgtcactgattactaacagcaatcatactggtaagtaagtaaatgtaaggaaaaatagaaaagggaagcagaattttcagtctagtagatagatctaaactttcatacactaaaaaaaagttataaagttttagaagatgataaatataaaaatgtgtccctgaaattgatgctataatttgagaaaaagtgaaaatttgatcagtctattttttatttttctttttgagacagagtctcactctctcacccaggctggaatgcagtggtgtgatctcagctcactgcaacctyctcctcccaggttcaagtgattctcctgccttagctgggattacaggtgcatgccaccacacacagcttatttctgtatttttagtagagatgggcttttgccatgtgggctagtctggtcttgaactcctgacctcagatgacccaccagcctcagcctcctaaaatgctgggatgacaggcatcagccgccacacctggctgatcagtcttttatgcaggtgaata

SEQ ID NO: 242038 - DNA, 605 bp, Homo sapiens
tgagccaaacagcagtggcagaaatgtgcttcaaaggaaaagcacttaaacagatttccacacaggtgtttaggcaaaaatacagtctaccaacaggataaaagatactttagtcaaatatctgtacattttgttstacacatgggtaaacatctgtatacccagaaatatttagatattttaatgtttcactttatatttcagtatacttgtatattcatgaatattcatgtatgttgcacagaatttgttaatctttgcacttgggtgaatgtaaacgaagttctgttgctttttggaaaagaggagtttgatgttggctttctagggctgagatgtaaaaattaaaagggaaatgctaaattccagtgaccagagtccagagagtttccactctgctctgggagggcttatggtttgccatgtgccaggggccaatttcagggcacttgaaacatctgctccccctacttacaaatcaatcatagcctttatgggtctggaagcttcaaagtcttggaaagaggcaagaggacccagtctagactgctgtgggtatggtcaaccgctaggactgggaaggagaccagatattaggcatcctg

SEQ ID NO: 242039 - DNA, 458 bp, Homo sapiens
tggctgacaacattccagaattgttgaaagatcctaatccttagatccaagagtttcaatgaatttcaagcagatagaaagaaagaaagggctgggggtggtggctcaarccttatagtcccagcacttttggaagctgaggtgggatgatctcttgagaccaggagttttaagactagcctgggcaacatagcgaggccccatctcttaaaaaaaaataattaaaaaaattagctgggtgtggtggcacacacctgtagtcccagctggtggggaggctgaggtgggaggattgcttgagcccaggagtttgaggccgcagtgagttaggattatgtcactgcactctagcctgggttacagagcaagagcttgtctctaaaaagagagagagagaagaaaaatccacatcttcatatattagttatgaaattgcagaatattaaagaaaaaaagtg

SEQ ID NO: 242040 - DNA, 458 bp, Homo sapiens
tggctgacaacattccagaattgttgaaagatcctaatccttagatccaagagtttcaatgaatttcaagcagatagaaagaaagaaagggctgggggtggtggctcaagccttatagtcccagcacttttggaagctgaggtgggatgatctcttgagaccaggagttttaagactagcctgggcaacatagcgagrccccatctcttaaaaaaaaataattaaaaaaattagctgggtgtggtggcacacacctgtagtcccagctggtggggaggctgaggtgggaggattgcttgagcccaggagtttgaggccgcagtgagttaggattatgtcactgcactctagcctgggttacagagcaagagcttgtctctaaaaagagagagagagaagaaaaatccacatcttcatatattagttatgaaattgcagaatattaaagaaaaaaagtg

SEQ ID NO: 242041 - DNA, 378 bp, Homo sapiens
aattctctcagcatttgtttatctgaaaatgactgtatctttccttcatatatgatgcttagtttcactgcatacaaaattcttggctgataactgttttgtttggggaggccaaagatagggccccactccttctagcttgtagggtttctgctgagaaatctactgttaatttgataggttttcctttataggttacctggtgcttctgtctcacagttcttaaaattctttccttcatcttaactttggataacctgatgacaatgtgcctaggcaaagatctttttgcgatgaattttcaggtgttctttttgcttcttgtatttggatatctaggtctstagcaaggctggggaagttttcttcaattattcc

SEQ ID NO: 242042 - DNA, 542 bp, Homo sapiens
aactgtaaaacccagataaaatgaataaattataggacatgtacaacattgacaccacgaaagaagtagaaaacccaaacaggcaaataatgagtcatgatagtgaatcagtgataaaaaatctcccagtagagaaaagcccacgactggatggctctactgmcaaattctatcaaacttacaatgaaaaaatagcaccaattatcttcaaaggattccaaatacattgcagaggagggaattctctctaatgcattatagcaggtcagcatcacccattaccaaaatcaggccaagacatacaccaaataaaaggataccacaggcgaatattcctgatgaaaatagatgcagaaatcctcagtaaaatgttagtatacttaaaccaacagcacatctagaaaagataatacactatgatcaagtgggatttatcccagggatgtaaggatagttcaacgtatgcagatcaataaacatgatacatcacatcaacagaatgaaggacaaaaactttatgatcatctaaattgatacacaaa

SEQ ID NO: 242043 - DNA, 374 bp, Homo sapiens
ggcggcgggcgccgtgggggtgccgctgtacgcgcccacgccgctgctgcaacccgcacacccgacgcccttttacatcgaggacatcctgggccgcgggcccgccgcgcccacgcccgcccccacgctgccgtcccccaactcctccttcaccagcctcgtgtccccctaccggaccccggtgtacgagcccacgccgatccatccagccttctcgcaccactccgccgccgcgctggccgctgyctacggacccggcggcttcgggggccctctgtaccccttcccgcggacggtgaacgactacacgcacgccctgctccgccacgaccccctgggtaaggcggccgggcgagggtgggggcgaggaagcg

SEQ ID NO: 242044 - DNA, 555 bp, Homo sapiens
aaatactaccattgtggctgatttcagtctatcaatgtggtgtcattagacatagagctgggaagaatatatrcaattggctcttgtaagcctgtatgagctggctccagtagactactgaagagcttccattagttgtagcttccgtgtagatcaccaactggtaagcccacaggctatatatggatccagatgtgctctgttcaggctataaatgtttaaaatattttgggttagttgccagagtttaaatatcatatatatttccagattttcatgaaaaatgagactagaatatatatatatatatatacacacaccacacacacatatatatatatatacacacacacatatatatacacacatatgtatatattttccagaccttcatgaaaagtgagaaaatattgcagtattgggcctggtgatcagaaagattcgatgatctatccaaagtgataccaagaataagtgtctaaaccagaaaaagggctcaggtcttttgactcccaaaccaaagtttgcaccacttcttcaggttgtcctctcatt

SEQ ID NO: 242045 - DNA, 555 bp, Homo sapiens
aaatactaccattgtggctgatttcagtctatcaatgtggtgtcattagacatagagctgggaagaatatatgcaattggctcttgtaagcctgtatgagctggctccagtagactactgaagagcttccattagttgtagcttccgtgtagatcaccaactggtaagcccacaggctatatatggatccagatgtgctctgttcaggctataaatgtttaaaatattttgggttagttgccagagtttaaatatcatatatatttccagattttcatgaaaaatgagactagaatatatatatatatatatacacacaccacacacacatatatatatatayacacacacacatatatatacacacatatgtatatattttccagaccttcatgaaaagtgagaaaatattgcagtattgggcctggtgatcagaaagattcgatgatctatccaaagtgataccaagaataagtgtctaaaccagaaaaagggctcaggtcttttgactcccaaaccaaagtttgcaccacttcttcaggttgtcctctcatt

SEQ ID NO: 242046 - DNA, 507 bp, Homo sapiens
ggaatatcttaatagccagktaaatactcatcacccagattgaataatattaacattttttagcctactttcatgagtcatctttgaaaatgtgttacaagtgcagttccttgggggctctggagcaaatcatctagcaaacaagaccttagatgttgtccagggctatcccactcttatggactgaacagaattcatatgctgaaatctttacccccagtgtgacggaattaggaggcaggggctttgggaggtgattagatcatgagagtagagccctcagaaatgggattcatgcttttctaagaagagacatgagaggttgcttcttgtgtctctctgctctctgccatgtgagcactcagtgagaagacagccatctatgaaccagaaagtgggcccgctccagacactggatctgtcggtaccttgaccttggacttccagtctccaaaactgtgtgaaagaaatgcttgttgtttaagtacccagtctgttatatttgtt

SEQ ID NO: 242047 - DNA, 577 bp, Homo sapiens
ggaattctcagggtctttaagatatgaatgtgccatgtaaatatccagaagaggataagacatgacaaatttctcaagtttattcgaccctaggatcctttctttctcatatcccacactctgtgaggctggcatacacaagagaaaaatggataaccagccgggcgcggtggctcacgcctgtaatcccagcactttgagaggccaaagcgggcagatcacctaaggtcaggagggagctcgagaccagcatggccaacatggcaaaaccccatctctaytaaaaatacaaaaattatctgggcatagtggcgggcacctataatcccagctactcgggaggctgaggaaggagaatcgcttgaacccgggaggcagaggttggttgcagtgagccaagattgtgccactgtgcaccagcctgggtaacagagtgagtgagactctgtctcaaaaacaaaacaaaaaaaaaccccgcaatgtgtcaaataaatacattaaaaaatggataacctataagacatacaaaaccataattttgttttagtccatcagcgaattgcgctgttatacaaag

SEQ ID NO: 242048 - DNA, 423 bp, Homo sapiens
aatcagacaggccctgcttgggcaggctcagaaagagactacacatatgaggagctactgaatcgagtgttcaacatcatgagggaaaagaatccaggtatggttgctggggasataaggaaatttgtcatgaaacctccacaggtcgtccgagtaggaaccaagaaaacgtcttttgtcaactttacacatatctgtaaactattacatcatcagcccaaacatctccgtgcatttttgttggctgaattgggtacaagtggttctatagatggtaataaccaacttgtaatcaaaggaagattccaacagaaacagatagaaaatgtcttgagaagatatatcaaggaatatgtcacttgtcacacgtgccgattactggacacaatcctgcagaaggacatgcgaatctatttcctacag

SEQ ID NO: 242049 - DNA, 423 bp, Homo sapiens
aatcagacaggccctgcttgggcaggctcagaaagagactacacatatgaggagctactgaatcgagtgttcaacatcatgagggaaaagaatccaggtatggttgctggggacawaaggaaatttgtcatgaaacctccacaggtcgtccgagtaggaaccaagaaaacgtcttttgtcaactttacacatatctgtaaactattacatcatcagcccaaacatctccgtgcatttttgttggctgaattgggtacaagtggttctatagatggtaataaccaacttgtaatcaaaggaagattccaacagaaacagatagaaaatgtcttgagaagatatatcaaggaatatgtcacttgtcacacgtgccgattactggacacaatcctgcagaaggacatgcgaatctatttcctacag

SEQ ID NO: 242050 - DNA, 508 bp, Homo sapiens
gtataaaacgttgagggctgttgggatatacacagctgaagcatattcctggaagttactgctcagctttggaaggtttgatagtaatgatgcattaacggactttttacrtgacagggtaataggatacttagatcaaaaaaaatgacagaggtttggtagacaatggtttgtggtttataggaacaagattaggatgaaattgtttgaatcttatttgaaggataaggaaaaagcagaggtgggagtaggttgtacgttagaagtggtttggatttttgaaagtcatagtcatttatagtttaagtagaaatctgttgtatcttgttttactaagaaatgaactattacgtagcaagcattaccaggagcttcaccatgcactacacctctaccctcccagttcctcccccacttcatcctaagctctttgatgttcttggaaaaaggttttctaaaaatcaaaagaaagttattaatgtgggaatcatttgaagtaatcttttct

SEQ ID NO: 242051 - DNA, 391 bp, Homo sapiens
ttgaacattagtaaatgaaaggttatcaattcatattcaaaagcaaccaaacatctaaggtaaaactataaaaaatatgagcttacatctccaaaaaagtctcccctgaaattcatttccatcttagaattaagttttgtaamttcttaagtcaaataaataaaactaattcttcccaagaaattgaagataaaagttcccccttgacccatctgcacttgataactaacccaaatgacccaagcacttgttctttttttcattcatggatattgaattgttaaaagaaattcaaagatatgttctctctgtaaacataaaaaagcaagaacaaataaactatattttttaaaataaaccaactgaatactagagtttactgtttgacaag

SEQ ID NO: 242052 - DNA, 570 bp, Homo sapiens
ttctgtcctcagttcaggtccaaaatccaaactataactttttaaaatagcccaatttgccagtcacagaaataacttttytaggtcaactagcacatttcgatgtgccaattagcaaagagtgagattttcaagcctatctgcattggtgacaacaaggtttttccagcagcacacatgggtacaaggtgtgtcagtggaaaagctgcatcccaagaacatcaatatagtgtttgtgaatggaggctagacaccccagtaatgacagaatcattactatcttcttccactcagtctgaaagttaggaatactcaaaagaaccatcccatccaacagagcagaaagaactgggcaaaaggagagtggtagtaaagggggtaaaaaggaactaacataatagatcaacatggatatataataatgggcaagtttgataataagataataatgtacttgaggctttaggccttgaagaagaaaggagcttgatgaaaagaataattatcatgcttctcctagtagaagacagatgggtacaaacacaaatgcaggccaggctagagtttttg

SEQ ID NO: 242053 - DNA, 556 bp, Homo sapiens
aagcttggtctaaactcaaaagtagggctaatgctgggctgacacccaaatatccaatggggaaagtttattcttggatctagaccctatgagacctagcaatcatttttttttctcatctggaatatggggataattctactccatatgttcttcatgtcaaatgagaaataaacttgtaaatagtctaccgtctagtctccaggagcaggaagtgacataaggttgtgattcttaaagtattttgcagaatacaaactgttactaaaaaaagaatcacttgctaaataagtttggggaacactggataaacaatggcatgttttttgtctgtaggggccactcaggtccttcatattccaataatacacatgggaaaccaccaakgggatatattatatactacatctcctaaatttttaaccaaactttcttagtggagcatttacaagtaccttctctacaaaagacatctaggaagatcctgatctagatcagaagaatattcattttgttcttttttttttcctgcaattgtaaagagaagtgaattggt

SEQ ID NO: 242054 - DNA, 367 bp, Homo sapiens
gtaacaaacacaactctaccccctaacccgcactagcccatatagccagaatggaaaagtagattgtttctttgtcgcttctgttatggttttacttaaatgaattatcagatcagacccctgtttgtacagaagtttcaaaaatgtttgttgtaaattgatctgagccaatttgattttccacagttaattagattctattctggtaggtatcattaatctccaatagtcagaggtaggtaagtgctataggtttttmccccacaaccagtagattacagtgaaaggaattctgattaaattctgccacgtaactttattaataatcaggcacaagacagttatacagcctgacctgtacacccag

SEQ ID NO: 242055 - DNA, 562 bp, Homo sapiens
ttccaggcaatggtattttcttccagaggtatacatttctgtaaataaagtctgaatgcattggaataacttaccctgggggttatttgtagcagtctcaaatcatttgatcagggtcactactggtgatatatagagggaaataggagagtgaagtaatgcagaacataccttctgtaatttagatttggatcatttttgctgggcctggagaggaggagctaggggagtacagcttacccatggcgctgcttacggaatttagacataagagatggctgttcattattctgggattccacatctgtacagagtgtagaacataactgaatactcagtrggtatttcttgattatgcgatttgctaaaatcactctgctagtgtgttaaaaataccatttagagttttctataccatttaccatttaattgataagcatgtggtttgataaatgttgttgttattattgttattagaagtagttttatgtagttcttatagagatataagggcctttagatcatttgatttggggccctgcctcagctattaaaaattgca

SEQ ID NO: 242056 - DNA, 633 bp, Homo sapiens
gatcttttgggtttgtttacttgctctgaagcaagtcagacaaacagcctgataagaggtaccacatccacagaggcactaccaagtccttctaaaggaaattgggtaaggaggcacaggcaaggacgctaaacgtatttgtccagggcccagcccatggtgaattctatttacattcaattagtcacttaaaaaacattgatctacacctcccttccaactgccacatggaatcctctcccttcattgactagaaactgaccccacaaggtcacaatgtctggttacttcagtcaagggcagaggggatgggggatgatcagtcaaagcattaaactggttaggaaattctagctacagctgcctttatgaacagctggggttatctcaaataccagtattctgtacccacatctaatttatgcattcctgctttaaaacctttaacgtcttttaaatgcgttctggaccaagcctaaaccccttagtcctctaaaggtatttttttttgcacctcactagtatttcatctccagcttcccgagcctgccacttgtctgtgcccagcacaccctgtcctcacwgcgatgccctcactccctgccttatctgataaagaccttggctaagcac

SEQ ID NO: 242057 - DNA, 604 bp, Homo sapiens
atcaaagttactaaacaagtatatagcaacagcaacaccaccaaaagagaaagaaagaaagaaagaaagagagaaaagcaacaaacccaggataaaggggacttatttccagagttgccacatcatattatctaaagtgttcagttttcaacaaaatatatgagacattcagaaaaataggaaaaartgcattcaatataaattgtcccatgggggacagttgttgaaattagtacccaaagactttaagtcagctattaaaaatattttcaaggaactagagaaaatcgtgtctaaaaaaattaaagtataacaatagtatctcaccaaatggagaatgtcaataaagagacagaaattatatttttaaagaactaaatgaaattcttgaatgaagctcaatcaatgctaagaaggagaactcagggagactcatgcctaaatacatcataaaaccaaagccagagattcttgaaagtagcaagaaagaaatgactcatcactgatgaggaataagattgtcatctgacttctcagcagagaccatggtggccagaggtagtaagatgacatgttcaaagtactgcaagtaaaagaccgtcag

SEQ ID NO: 242058 - DNA, 484 bp, Homo sapiens
ttgctataaaccaagactgactaccaatataagaaccattctgcttggggaaggccagatcacaggatggggagactggagaagaattgtatgtattaaggacccacatatatcaggtgcttttcatcmatctgtgatgtgtgatgtgtattcatttattcttcccaccttaggagggttggtcttcataatcaggaagatataggttcaaatcctggctgcactatatgccagctgggtgtccttgggtaagttatttaacctttctgaccctcgttttctcatctgtatttagaaattatagtctatacctcacagagcctgaaccttttaaagtgcatttttgaagaatgtttaatagcatgggaaaatgctcattaacagcattaaaagaaaaaaatataggatgacacacaaaaaccacataactctagttctgtaaaaagaatatatacatgttgaatatatgcatatctatatgctg

SEQ ID NO: 242059 - DNA, 576 bp, Homo sapiens
tcattcagcaggcaagatagaactagatccccaaattgcaaactagctgtccagagttctttcctcaatgagcaatttaaaagctacagaatgtacaaaaaaagcctcccaacagtttagatgtaaaaacttttacaaaggctctaaagggctggaaaactcaataaaactatraacttcacccatcccacctcccagaaacccagtgacaatcaaagcagcgtcaggctggttcaaggagtaatggtgtctccaacaatttaattgctcttcttcctcctttacccatttctcacaggcagagaaaaaatgcatctaagactactgaaacttactttgaaccaatacagatgtttgttgatacctgaaatttagtgattcgcaaatacgttttctgccaagagcttacagaaatcacactcttagagctaaaacatcaggtcattccatgagtctcaagccctggagaaaattaaatgccttccccagaaacgggtcctctcccctgtcctgcgcaggtaacaaacgctgctggagagacttggcttcatcagctgtctaaatgcagacttttca

SEQ ID NO: 242060 - DNA, 576 bp, Homo sapiens
tcattcagcaggcaagatagaactagatccccaaattgcaaactagctgtccagagttctttcctcaatgagcaatttaaaagctacagaatgtacaaaaaaagcctcccaacagtttagatgtaaaaacttttacaaaggctctaaagggctggaaaactcaataaaactatgaacttcacccatcccacctcccagaaacccagtgacaatcaaagcagcgtcaggctggttcaaggagtaatggtgtctccaacaatttaattgctcttcttcctcctttacccatttctcacaggcagagaaaaaatgcatctaagactactgaaacttactttgaaccaatacagatgtttgttgatacctgaaatttagkgattcgcaaatacgttttctgccaagagcttacagaaatcacactcttagagctaaaacatcaggtcattccatgagtctcaagccctggagaaaattaaatgccttccccagaaacgggtcctctcccctgtcctgcgcaggtaacaaacgctgctggagagacttggcttcatcagctgtctaaatgcagacttttca

SEQ ID NO: 242061 - DNA, 599 bp, Homo sapiens
ctgggtaacagagtgagaccctgtctctaaaaaaaaaaaaaaaaaaatctaaccaggtggtggcagcagctcacacctgtagtcccagctacttgggaagctgaggcaagaggatcacttgaggccagaaatasaaatccagcctagacaacatggcaagacctcctctctaaaacaaataagtaaagaaaaaaatcaaacaacaaaaaaagccatagaagaatatctatatgaccccaggataggaaaggatttcttaatatgaaaaaatgtacaaatcataaaggaaatattgataaattcaattatattaaaatcacaacctacaaaggactagtattcagagtacataaacagctccagcaaattagtaagacaaacacatagaactcaatggaaaaataggtaaaagatttgaataggcacttcataaattaggaaatgtaaatatgaaaaggtactcaacctcattggtaattagaaaagtgcaaattaaaactccaatgagttattattatatactcaccagatgggaaaatatgtaaaaatctaacattgccaagcttgacaagaatgtggaacaacgggaagtctcatac

SEQ ID NO: 242062 - DNA, 599 bp, Homo sapiens
ctgggtaacagagtgagaccctgtctctaaaaaaaaaaaaaaaaaaatctaaccaggtggtggcagcagctcacacctgtagtcccagctacttgggaagctgaggcaagaggatcacttgaggccagaaatagaaatccagcctagacaacatggcaagacctcctctctaaaacaaataagtaaagaaaaaaatcaaacaacaaaaaaagccatagaagaatatctatatgaccccaggataggaaaggatttcttaatatgaaaaaatgtacaaatcataaaggaaatattgataaattcaattatattaaaatcacaacctacaaargactagtattcagagtacataaacagctccagcaaattagtaagacaaacacatagaactcaatggaaaaataggtaaaagatttgaataggcacttcataaattaggaaatgtaaatatgaaaaggtactcaacctcattggtaattagaaaagtgcaaattaaaactccaatgagttattattatatactcaccagatgggaaaatatgtaaaaatctaacattgccaagcttgacaagaatgtggaacaacgggaagtctcatac

SEQ ID NO: 242063 - DNA, 586 bp, Homo sapiens
gcgtggtggctcatacctgtaatcccagcactttgggaggccaaggtgggtatttcacctgaagtcaggagttcgagaccagcctggccaatatggtgaaaccccaactctactaaaaatacaaaattagccgggcatagtggtgcacacctgtaataccagctacttgggaggctgaggcatgagaatcacttgaacctgggacacggagggtacagtaaacagagatcatgtcactgcactccggcctgggtgacaaagcaatattccatctcaaaaaaataaaataaaataaacccagcaagcaatgttcttactttataaatactaacaaatsgtgtggcgctgatctctttaagtttactctttttacttgaatgaaccacagtattttttttttcctaaaggcctggcagaaggggtaacacaagaggacccatttaatattttggctcttggaatggaatcaacatatgaaattgtcttttatctgccagtgtactgggttgaatactgtcccctcaaaattcatgtccactggaacctcagaatgtgatcttatttggaaataaggtttctgtacagt

SEQ ID NO: 242064 - DNA, 450 bp, Homo sapiens
caactaactaaaaatctacccccccaattttttttttttttgagatggagttttgctcttgttgcccaggctggagtgcaatggcktgatctcggctcactgcaacctctgcctaatgggttcaagcgattgtcccacctcagcttctgagtagctgggattacatgtgcctgccaccacacccggctagttttttatttttagtagaaaaggggttttgtcatgttagccaggctggtctcgaactccctacctcagatgatccacctgcctcggcctccgaaagtgctgggattacaggcgtgaatcaccacacccggcctaaaatccccgttttaagatttttatttatttctatttttttttaaatatagatggggtggggtggtgggtctcactttgttttccaggctggtgttgaactctggggctcaagtgatcctcctgcct

SEQ ID NO: 242065 - DNA, 450 bp, Homo sapiens
caactaactaaaaatctacccccccaattttttttttttttgagatggagttttgctcttgttgcccaggctggagtgcaatggcttgatctcggctcactgcaacctctgcctaatgggttcaagcgattgtcccacctcagcttctgagtagctgggattacatgtgcctgccaccacacccggctagttttttatttttagtagaaaaggggttttgtcatgttagccaggctggtctcgaactccctacctcagatgatccacctgcctcggcctccgaaagtgctgggattacaggcgtgaatcaccacacccggcctaaaatccccgttttaagatttttatttatttctatttttttttaaatatagatggggtggggtggtgggtctcactttgttttccaggctggtgttgaactctkgggctcaagtgatcctcctgcct

SEQ ID NO: 242066 - DNA, 380 bp, Homo sapiens
tttatgaggcagttttccctgctctcacttgccctctctctcctgctgccatgtaagacatgcgtgattccccttccaccacaattttacgtttcctgaggcctccccagccaggcagaactatgagtcaattaaacctctttccattataaattacccagacttgggtagtatctttatagcagtgtgagaatgaactaatacaaacagcaattgcacagaggcagatgatcaataaatgtctgctcaaccaatgagcaaatatttctgttctatccacccttcarttccatactgatggaatgtaatttcagccacaagcaaacctatgttttcgttggcattatgtcctctttataggcttgtgaccaatgatcttt

SEQ ID NO: 242067 - DNA, 503 bp, Homo sapiens
gcaccattgcactccaaacctgttaagtcattaggtttatggtaatttgttacagcagcagtaggagtaaagacgggggccagggattgaggtaattctgctgagcagaatgggaagaagatgatgggagaccagcacagtsgttaatgcctagaatctaagctctttgagaggctgaagcgggaggattgcttgagcccgggagatcgagaccagcctgggcaacatagtgagaaccgctctctacagaaaaatttaaaatttagctagatgtggtggcgtatgcaggtggtctcggctactcaggaggctaaggtgggaggattattcgggcccagaaagttgaggctgcagtgaactgtgattgagccactgcactctagcccagcaacagaatgaaactctgccttaataataattattattatgtaattatatttaattattttttaattattttaattattattattattattgagggaatggttcttgaactagtt

SEQ ID NO: 242068 - DNA, 503 bp, Homo sapiens
gcaccattgcactccaaacctgttaagtcattaggtttatggtaatttgttacagcagcagtaggagtaaagacgggggccagggattgaggtaattctgctgagcagaatgggaagaagatgatgggagaccagcacagtcgttaatgcctagaatctaagckctttgagaggctgaagcgggaggattgcttgagcccgggagatcgagaccagcctgggcaacatagtgagaaccgctctctacagaaaaatttaaaatttagctagatgtggtggcgtatgcaggtggtctcggctactcaggaggctaaggtgggaggattattcgggcccagaaagttgaggctgcagtgaactgtgattgagccactgcactctagcccagcaacagaatgaaactctgccttaataataattattattatgtaattatatttaattattttttaattattttaattattattattattattgagggaatggttcttgaactagtt

SEQ ID NO: 242069 - DNA, 503 bp, Homo sapiens
gcaccattgcactccaaacctgttaagtcattaggtttatggtaatttgttacagcagcagtaggagtaaagacgggggccagggattgaggtaattctgctgagcagaatgggaagaagatgatgggagaccagcacagtcgttaatgcctagaatctaagctctttgagaggctgaagcgggaggattgcttgagccygggagatcgagaccagcctgggcaacatagtgagaaccgctctctacagaaaaatttaaaatttagctagatgtggtggcgtatgcaggtggtctcggctactcaggaggctaaggtgggaggattattcgggcccagaaagttgaggctgcagtgaactgtgattgagccactgcactctagcccagcaacagaatgaaactctgccttaataataattattattatgtaattatatttaattattttttaattattttaattattattattattattgagggaatggttcttgaactagtt

SEQ ID NO: 242070 - DNA, 503 bp, Homo sapiens
gcaccattgcactccaaacctgttaagtcattaggtttatggtaatttgttacagcagcagtaggagtaaagacgggggccagggattgaggtaattctgctgagcagaatgggaagaagatgatgggagaccagcacagtcgttaatgcctagaatctaagctctttgagaggctgaagcgggaggattgcttgagcccgggagatcgagaccagcctgggcaacatagtgagaaccgctctctacagaaaaatttaaaatttagctagatgtggtggcgtatgcaggtggtctcggctactcaggaggctaaggtggraggattattcgggcccagaaagttgaggctgcagtgaactgtgattgagccactgcactctagcccagcaacagaatgaaactctgccttaataataattattattatgtaattatatttaattattttttaattattttaattattattattattattgagggaatggttcttgaactagtt

SEQ ID NO: 242071 - DNA, 199 bp, Homo sapiens
tcacaggaaccattggttgcagcagagcccctcagctgtctcacttcctccagtggcatgagcctgctgctgtaccttgtattcacctggtgacagtgatgaccaagatgyttacacctgctgcagtgatgagcacacaggcatgagcagtccttccacagttgtgtgtgtgtcggagggcattggaggggaagtgaat

SEQ ID NO: 242072 - DNA, 628 bp, Homo sapiens
accgctgtggccggggctgtggccatgcactttggctggtgaagctacactctcccagcgtcttgccaacatccaagagctggtcatccctgtacagctgctgaggatgccctcgacgatgcacttcaactcaaacaccatgctagacaccctggcatctgtgaagatggtgatgcagtggcacttgatcatgaggaacacgctatctctgtggccacctctcccttcagcacacatgcacggccatgttctgccgggttcccagcagccagcgcccacagcccagcatgccatgygcatggccccgccgcttgcccgccccactaaaagctttctaaggaggtttacaaagtctttcttccaaagacaaatatctacagctgggcgcaatggttcaagcctgtaatctcagaactttgggaggctgaagtgggaagatcatgtgatgtcaggagttctagaccagcctggccaagatggtgaaaccctgtctctactaaaaatacaaaaattagttgggcgtggtggtgcatgcctgtagtctcagctactagggaggctgaggcaggaggcagaagaatcgtttgaactggaaggccaataatccctccaggatgttccattctgg

SEQ ID NO: 242073 - DNA, 554 bp, Homo sapiens
tgactccaaactggaggaagtggcacgagttgtgattttatcatgaacacatgcagtgttccctcaaagagaacatggtaagactggcaaatgggcaagatgaataatctcagaagcaaatgcgatgatgtagtaactaattattacgtagacacaacaaaaagggaactaaaaatcaatttgtaagctttctgatgactgaatttactttaatgacacagagacaatactaaatccttaatcattctctgagccttacttgctagcatggttcattaaaaactcatttaaatagagctagtgtttaactggacgagtaagcaaaaggatatatttgaaccaatgatgttttgtaatcatagtaatacaaactataccaataaaaactcgctacagaacaagaatcttaagcttgccactggaaaactttaaatgttatgcatgygagattaattccacgcttcatcagcatattaagaagggtatatactgtctgataaaaaagacctaaaacttagaaaagaacactaaaataccatgagcacattaaagac

SEQ ID NO: 242074 - DNA, 578 bp, Homo sapiens
gagaaagtagcaagacaagtctaaaataaaattttagaaattaaatatacaacatcttttttcagtaaaagcatattcataaaaacttaagttcataaaaataaatctatttcagagctattcattttcaataatttgtcctaactctgaaaaaggagtgtaattctatactctagaagcaagaatagtgaacttcgaaatttaaaaagtaaattktaagtgtctatcatttaacttttcaagacagtaaagtgccatggatgattatattatatattttttatttttagatatttactgtttgaggcgtggtcttgttctatcgcccgactggagtgcagtggcttgatcttagctcaatgcatactcgacctcctgggttcaagtgatcctcccacctcagcctcctgagtagctgagagtgcaggcactcaccaccacacctggctaattcttatatttttctagagatggggtttctccatgttgcccagactagtcttgaactcctagactcaagcaatctgcccacgtaggcctcccaaagtgctgggactacaggtgtgagtcaccgcacc

SEQ ID NO: 242075 - DNA, 578 bp, Homo sapiens
gagaaagtagcaagacaagtctaaaataaaattttagaaattaaatatacaacatcttttttcagtaaaagcatattcataaaaacttaagttcataaaaataaatctatttcagagctattcattttcaataatttgtcctaactctgaaaaaggagtgtaattctatactctagaagcaagaatagtgaacttcgaaatttaaaaagtaaattgtaagtgtctatcatttaacttttcaagacagtaaagtgccatggatgattatattatatattttttatttttagatatttactgtttgaggcgtggtcttgttctatcgcccgactggagtgcagtggcttgatcttagctcaatgcatactcgacctcctgggttcaagtgatcctcccacctcagcctcctragtagctgagagtgcaggcactcaccaccacacctggctaattcttatatttttctagagatggggtttctccatgttgcccagactagtcttgaactcctagactcaagcaatctgcccacgtaggcctcccaaagtgctgggactacaggtgtgagtcaccgcacc

SEQ ID NO: 242076 - DNA, 602 bp, Homo sapiens
taaagggtagacttgttaatgacagaactttatttattagtgacagaaccttatgtgtcgacaaagagaaggaggaattaaagtacactgaaatgcaagtataayttttatgtcaaaaataaaaattgaggctatcattgactagggaccaggctttcatactcatttcccaccatttgaggtgattattacaccaactgcttacttagagaatgaataattaacccaaaagtatttttaaaaatctaccctctcttttcagtaggaactgtatttcagagaaatcaacagtaccagttcatgaggggaaacctgtcttttcagaagaatgccaaataatggaaatagaactaataacagaattagaaatatgaccattttcaactcctaatgaaataattcaggcaaagataatcatactaaaactattatgttaagagttgatagataactggatatttgcatagtgacaaaatatcacttgaaaagaaaaagatctacttttgaaatgaagagctcaggctccacacaactctcaccttttggtgtctggagtccagtatgctactggtacccacccctctgctccttcctgaatctat

SEQ ID NO: 242077 - DNA, 446 bp, Homo sapiens
tgaggaggatcgactggctcactccagtttgccgtcttacacactctgttgccttttratggacagaagctcttaattttaataaagttcaatttccccaacgttttcctccatggttaatgctgtgtgtgacttgactgcgaaaatttgcctgtatcaggatcatgaagaagttctccatgattttcttctggaatttaaatgtctcacttagatgcatttccatctaattgatatttttgtataataggatgtagggctcatgatttttccttgatatttggctaacccataaccatttattgcaaagattatccttttcctactacattgtggtgcaaactctgccataggtcagttgactatgcatgtatgtgtgtgtgtgtgtgtgtgtgtgtgtgtatgtatgtgtgtatatatatatatatatgtcatcttacgaattc

SEQ ID NO: 242078 - DNA, 569 bp, Homo sapiens
cttgttccaaactcagccctatcacccactagttttgtgaccttgggcacgttgctcaattgcttcaacttcagtgtcctcgattataaaatggaaaagtgattatatctacttcataagaaatttgtaaggattaaatgaggtagaacgagtaaagctcttggcacaatcacwagcataaaacaagttctcaaaaattatagctattattattatcattctttattataggcgtgtagttaatgtcatggattgtacttttatggatatgaacttgaaggaagtgtttatccagggacaaatagtagtcactgacatagaactgttccactttgcttatagctgcaaagtgtccaatatccaacatacccactctgcttacatatggctttaactttgcattcagagggatgtgctctataatgtcctagcaaactactattgctggcttccccaccaacttaagagtcccccgccagctccattccaccctgatgacacaatcagtcccacattgtctcgagggtctgttggtccaaaccctggtatgaaatgtcaagtataatcaa

SEQ ID NO: 242079 - DNA, 567 bp, Homo sapiens
tctttttcttgcctttctctctttctctccctctctctccatgtccttgccccgctctctttccctctctctctccatgtctccctctctctctctccttctctatttctcccactctctctcaaaaatcaccctgctaggcactacaggagatacagcagcatgtaatggtttgcagagacatttccatttcaggcactcctctaaaggcttgttattgcatttcatcttcacagcaactctgtgaggtcagtactattttgatcccattttacaactgaaaaataaactgaggcacaaaagtgttctaaccccggtttgtaccaatgttaaaaacaatgttaccccagtttatataaccagtgaacagaagagttctgttttgggtgtagggtctacgtgctaactacttattattcaattggagaagacatggatgtattgtgtataacacaatataattacaagtagtaaccacaaatattcaygttaatggtagaattgtgtaacagttgcagtttacagttgtaccactattaatcagggctagtgagctaaatgcttgta

SEQ ID NO: 242080 - DNA, 613 bp, Homo sapiens
atttttttttttttttgagacagagtctcgctgtgtcccacaggctggagtgcagtggcgcgatctcagctcactgcaggctccgcctcccgggttcacaccattctcccgcctcagcctcccaagtagctgggactacaggcacctgccaccacacctggctaattttttgtattttcagtagggatggggtttcaccgtgttagccaggatgatctcgatctcctgaccttgtgatctgcctgcctcarcctcccaaagtgctgggattacaggcgtgagccactgtgcctgggcctagattttttttttctttctttcttttaggtggaacttacctgaaacagaataagaattcctgggtttgtaggccaaaaatctgtaacagtactataaatagcaagaatgtccggtggtaagcctgctgaggtatcagggggcattttcgtacattaccaacaacaaatttgaagttgaaaaaaagttttgtaaactactaataataaaaaagcaaagcaaatttcaatcagccatgctagaagaaagacttcattatctttctattctctttggaatactataaaatagttgtcatatgaagaatttagtaaag

SEQ ID NO: 242081 - DNA, 480 bp, Homo sapiens
aggtgctttctagcctgccccatgggtgggcagaggaggttcagtggccagggtaagcggtcaggccaagacatgcagatgctggtaggtggaagtcaccccagtgggcacagaagtgtgatcagggtgaggggttgtatgggtggggcactgacagcatgtgctacagtttatatatgtatatatatattttttagagatggggccttgctctgttgcccaggctggagtatagtggcataatcttggctcctacagcctcaaaatcctcctgagcttaagtgatccttytgcctcagcctcctgcgtagtcctcagctcctgaccagtcttagctcctagtggtgtatggtgtgccttgctatttaaacttttttttttttttttttttttttttttggtgtgtgtgtgtgtagagagaggcgtctcactatgttgcccaggctggtcttgagcttctggcttcaagcgatcctgcta

SEQ ID NO: 242082 - DNA, 619 bp, Homo sapiens
tttatttattttccagtttcctggttggtcgatagcagctggccacaatatccagtgggtagtcatcaaaactaaagaaagtgaatttgtatggaaagtattttggtagaaagtttccacgatgaaatttagcccagccctgcccattcatattcaccatttcctgtggtatttcagtgttccttgtggtgggaaattgtcactgaaataatataagtgtcccagagcatgtgactttgcttctactaaaaggttttgttttttttttttttttcttggagacagggccttgctctgtcgcccaggctggagtgcagtggcgcaatctcagctcactgcaacctccgcctcccaggttcaagcgattctcctgcctcagcctccacagtagctgggattacaggtgtgtgccaccatgcccggctaatttttgtatttttagtagagacagggtttcaccatgttgtccaggctggtctcaaactcatgacctcaagtgatctgcctgcctyggcctcccaaagtgctgggattacaggctactaaaagttttaaaagcagcatggtggtaaggaggaaacgtgtaacgtttctccatcagagcagaaggctgtggtgt

SEQ ID NO: 242083 - DNA, 582 bp, Homo sapiens
cctgcagacaagtcctcactacacagaggtagtgagagagtgtatgcaggaggccttgtctttatgcataacctgctagcaatgtagcaagacagtgctgggggcacagcaataaaattacacttcgtgcccagattatagatccaggtgaggtgacttgctagagaaagggcttccccattccccccagctatataaggtaatgaattatgctagggtctcaggatttcctgattggcagggtaggaggcttggttttccccctctgctcccactcagggcttcctgtgatatggcaggcggaaaaccaccaccatgaccactcatgaaaatgggagacgggccgggcacagtggctcacacccgtaatcccagcactttgggatgctgaggcaggtggatcacatgaggccaggagttccagaccagcttagccaacatggtgaaaccctgtctctactaaaaaaaaaaaaatacaaaaattactcaggcatggtggtrcacatctgtaatcccagatactcgggaggctgaggcacaagaatcgcttgaatccgggaggtagaggttgcagtgggccaa

SEQ ID NO: 242084 - DNA, 647 bp, Homo sapiens
tgtacagtactagttttgtggcactcaataatgttgtattgatttagatctgcatctcaccacaaagcagctagaagagatgtttttccgtggaacttttcgaggcctgagacacagtttccacacagcatctttttagaatcctgaagtgtgctagcctacaacccaaaagtacagatggccttccaggctggagcgccacctgactggctacctggctgccccagatcgaattcccacattcccactgacatgactcagaccgaatgtgggtgatttctattcccatggttagcgtgttcactggaaaagaaaaaggccctgaaccaagagtctgatcatagttaaaacattaaagaataagagaaaaaacaggaagagggtattctaaaccaaaatggctcaaaggagtttcacacctaagtaaccagacaaggagaggtaaagaaaattttaaaaargcaagaaggggccaggcgtggtggctcacacctgtaatcctagcacttgggaggccaaggtgggcagattgcttgagcccacaagttcgagatgagcctgggcaacatggtggaaccccatctcaaaagtttaaaaaaaaaaagtcaaggacagacgtaaaagaaaagggccttaaatttaatact

SEQ ID NO: 242085 - DNA, 607 bp, Homo sapiens
tcaggtctaagaacaggtgaccaagcacaagaatcatagtcaagaaggctcatttttgctatgctagaagtgtaacaccatcactccacgtggatacgtccctggtcatctccagacatccctggmaatttttttttccttcagaagttcaacattttagaagacccagcacagaatgacagtctaatcggtcatccagcagggcactccacctactgggccccactcaccctaccacataaggtctccccttatgccccaagagctgacatgcccaacaactgtggcccaaggccgttccgaagaacgtccatttgatccaaaatttacaattgagtcactccagagagacgtggtctttatcacaagtgccatctgtccaggccacagctgggtcttaagaattctaggcaacccccatctcccaacaaagggatctcttcccttatcaaacaaaaaccagctagtcccattctgcctcaaaaccccactgccctgagaatgacaagtagaggcttccagcctttcatcctcacgctcctctgccttcctttcttccaacatggacttccacttatctcgttcctctcagatctttctgccaagc

SEQ ID NO: 242086 - DNA, 607 bp, Homo sapiens
tcaggtctaagaacaggtgaccaagcacaagaatcatagtcaagaaggctcatttttgctatgctagaagtgtaacaccatcactccacgtggatacgtccctggtcatctccagacatccctggaaatttttttttccttcagaagttcaacattttagaagacccagcacagaatgacagtctaatcggtcatccagcagggcactccacctactgggccccactcaccctaccacataaggtctccccttatgccccaagagctgacrtgcccaacaactgtggcccaaggccgttccgaagaacgtccatttgatccaaaatttacaattgagtcactccagagagacgtggtctttatcacaagtgccatctgtccaggccacagctgggtcttaagaattctaggcaacccccatctcccaacaaagggatctcttcccttatcaaacaaaaaccagctagtcccattctgcctcaaaaccccactgccctgagaatgacaagtagaggcttccagcctttcatcctcacgctcctctgccttcctttcttccaacatggacttccacttatctcgttcctctcagatctttctgccaagc

SEQ ID NO: 242087 - DNA, 556 bp, Homo sapiens
gccactgtagtgacagagcaggagaccatgtttctcttagagcatatgttaataatgtcagtccagtttaacattactaaatctttttctatctcaccatttttctttattataaggttgcattgaccatgaacactatcatattggcatataactttctgtatgaagatccctctgccatggaatgcttcctctcaccccttttcactagttggcaaagttcttggccaagtaaaatgagaggaggagggggtagaatgaatttcatttaaagctcaacctagttcagaaatgttaaacaaaaccagagcaattgaatattcttctgatatcttgcagtatttttgytgaattcattttcttccactaaaaaaaaaaattcatacaaacaatattgaatcaagctatcctgtcagcttggtgttatatttgaaaatcatttgtcaaattatatttacatcatactcttagcatttataaatttttcatccggggacagtgtctcatgcctgtaatcccagcactttgggaggctgaggtgggcagatcacaaggt

SEQ ID NO: 242088 - DNA, 574 bp, Homo sapiens
gcactccaacctgggcaacagagtgagaccctgtctcaaaaaaaaaaaagaaaaatttgtactacattaaatcccttaaaattacattgttgtaaatgttttaaaactttataaaaatgctgacataatatatacatataaatactatatacatatatacaccatatatatatatatakagagagagagagagagctatttatctatctatatatatatacatagtcatctcttggtacatgtgggagattgattcaaggagcctctcgtataccaaaatccgagtatattcaagtctgttagtcagccctgaagaactcacgtatagaagtcagccctctgtatatacacgcgggttttgcatactatgaacactgtagcatcaatctgcagttggttgtaaaacaatccctgtataagtggacttacatggttcaagcccatgatgttcaagggtcaaccgtatatccttttgcaatttgctttcttattaagggctttctacgtgcaaggcaccatgttgggcagtgtggatgaaaagacaagttagataacattttgcattgacattagc

SEQ ID NO: 242089 - DNA, 527 bp, Homo sapiens
caaaaattagctaggcatcgtgggaggtgcctgtagtcccagctacttaagaggctgaggcaggagaattgcttgaacctgggaggcggaggttgcaatgagccaagatcgcgccactgcaccctagcctgggtgacacagtgagactctgtctcaaaaaacaaaccaaaaagagagctgcattcattgctgaagggtgagggcaggtgagggaagggagctggtgttggaggagctactccatgcagggcgcacttggctgagtgctccactagttttctctcattcatactgtacgagagaggcactttatccctattttacacgtgacgaaatgggagctctgaggggacgtggggaatctctcagctggtgaggagcaacgayaggctgtcactgtaccccaccaatgcttttgacatgtgctcatctcaggatatgtgtgcaagggtgaggatcttggcctaggacggggctgactgctgttagactagggtgtactcagattccagtctgcaactgtgggg

SEQ ID NO: 242090 - DNA, 603 bp, Homo sapiens
tggagtgcagtggcatgatctcrgctcactgtaacctccacctcccgggttcaagtgattctcccacctcaccctcccaagtagttgggactataggtacgtgccaccacacccagctaatttttttgtatttttagtagagacagggtttcaccatgttggtctggatggtcttgaactcctgacctcatgatctgcccgccttagcctcctaaagtgctgggattacaggtgtaagccaccgtgcccagccagtgcttttatttttatttattgattgactgattgattgagacaaggtcttactctgttgcccaggctatagtgtagtgttgtgatcatggctcactggctgcctcgacctcccggggtcaggtgatcctcccatttcagcctcctaggtagctgagactacaggcacatgccaccatgcccggctaatttttgtttcaccacgtttcctacactggtcttaaactcctgggctcaggcaatctgcccaccttggcctcccaaagtctagtgcttttattttgatagcacttcatgtttttgccaacaccatttgagagtacctgtttctcagtattctcactagcagtg

SEQ ID NO: 242091 - DNA, 537 bp, Homo sapiens
aagtttaaggtgtcagcagggttggttccttctgaaggctttcttcttggctttagatggtcttctccctgagtctttacatagacttttctctgtacccagccatgtgcaaatttcctctacttataaggataccaatcatattggattaggagccactctaataacctcattttaatttaataacatctctaaagaccctatctccaaacagtcgcattcggaggtactaggggttaggaccataacatatgaattttggagggatgcaattcagcccatagacaaagctcatgctcacccacatcacagcatccctggaaagctgagatgtgtccatatcttcatccccggccctggtttcacactgcattagaaatcatacattacatattgcaatggatccatattcttctaacatgtgcttcaaaaagcattcaactttgtagtgtaaggtccttactgttggctgagcatatttaaatawaaaattcatagaatctggatttttaatttggaaaacaaattctacttgta

SEQ ID NO: 242092 - DNA, 618 bp, Homo sapiens
gaattccttcttgggtactttaccccatcaggaagcccccaccccttccctcttcagtctcacccctctctacaaacatgcagaagtacatcctggaaagcctcccttcaagtcagagattcctgggagttcttgccctctacatctcacttcagttgttgccaatgttcttcaaagtattattcatttatttactaaatatttagtgagtttctctcactttgtggcaagcattatgctagatgttggggaaataaagagcaagctgaggttccactttctagttaaggaaataagaatccctacccaaagaaaaatacaacagrctatcactcacgttaatgttattacgaaacaaggagctgtaatatagagtaatcagagtctctactgaagataggtaggaaaggcctctccaatgagggagtattttggataagacctgaaggatgaaaaggagccctgggaagagtgaggaaaatggcaattccagctgagggaacagcttgtgcaaaggccctgaggcagaaagatcctggcttgtttgaagagccaaaaggccactgtcattaaagtgcagtgagcaagggtaaaatcaaaatgatcttaggtaggtgg

SEQ ID NO: 242093 - DNA, 618 bp, Homo sapiens
gaattccttcttgggtactttaccccatcaggaagcccccaccccttccctcttcagtctcacccctctctacaaacatgcagaagtacatcctggaaagcctcccttcaagtcagagattcctgggagttcttgccctctacatctcacttcagttgttgccaatgttcttcaaagtattattcatttatttactaaatatttagtgagtttctctcactttgtggcaagcattatgctagatgttggggaaataaagagcaagctgaggttccactttctagttaaggaaataagaatccctacccaaagaaaaatacaacagactatcactcacgttaatgttattacraaacaaggagctgtaatatagagtaatcagagtctctactgaagataggtaggaaaggcctctccaatgagggagtattttggataagacctgaaggatgaaaaggagccctgggaagagtgaggaaaatggcaattccagctgagggaacagcttgtgcaaaggccctgaggcagaaagatcctggcttgtttgaagagccaaaaggccactgtcattaaagtgcagtgagcaagggtaaaatcaaaatgatcttaggtaggtgg

SEQ ID NO: 242094 - DNA, 628 bp, Homo sapiens
aaatgatagcaccatggatttaggactggatcagtacacaaataataatttatgttaatttaggctgtcccttcgttaccttagcaggcatttcctgaaggtctggtgtgtgcaaggtatgtgttaagatttgtagtggaacaaaaatgagggcatagttcttgtcctaagatatttatggcctaataagagaaacatgccacacatgaataattaaaatrcaaaacaggatgagagaggtattataatggaggtacaaataacctgctatgggaattcaaggaagagattagttattataagcttccggtgttgagggagctttactagggagatgtcatcatacctgggctttgaaagaggggtaacattttgagaagcagaaatgataaagaaggtgatctagggaggagaaagaggtggctagctgcagaacagtgagaacacatagagtagattctgaaaagtatgagttgttcagctggactggggcatggtggatttaaaaaggattagtgactttttcaatttatttttttaatattttatagactactgtgtacaggtctttcagctccttggttaaatttattcctaagtattttaatttttgtagctactgtaaatg

SEQ ID NO: 242095 - DNA, 628 bp, Homo sapiens
aaatgatagcaccatggatttaggactggatcagtacacaaataataatttatgttaatttaggctgtcccttcgttaccttagcaggcatttcctgaaggtctggtgtgtgcaaggtatgtgttaagatttgtagtggaacaaaaatgagggcatagttcttgtcctaagatatttatggcctaataagagaaacatgccacacatgaataattaaaatgcaaaacaggatgagagaggtattataatggaggtacaaataacctgctatgggaattcaaggaagagattagttattataagcttccggtgttgagggagctttactagggagatgtcatcatacctgggctttgaaagaggggtaacattttgagaagcagaaatgataaagaaggtgatctagggaggagaaagaggtggctagctgcagaacagtgagaacacatagagtagattctgaaaagtatgagttgttcagctggactggggcatggtggatttaaaaaggattagtgactttttcaatttatttttttaatattttatagactactgtgtacaggtctttcagctccttggttaaatttattcctaartattttaatttttgtagctactgtaaatg

SEQ ID NO: 242096 - DNA, 632 bp, Homo sapiens
tttcccttcttctccactaaagatgcatckttgggtcccattcttgctgctctacagttgacagtcagtctgcatggtgatttagtggttatttgtgttagccattctagacaacaagcttctttttattaataataatataaacagatgacatttggaaagtactctcacctgagaggtagattggcaccttaaacctaaagaaggatgccaagtgggagaatcaagttgagagagagaagatattgggcagataggacaagaagtacttctcaactcatggacacaaaaaggaaaacaatagtcactgtgacctaccaggatatggagggtaggagcagggagaggatcaggaaaataaagaatgggcactaagcttattacctggtgatgaaataatccatacaacaaaccccatgacatgagtttacctatataacctgcacatatacccttgaacttaatttgttttctaaaaggaaaataaagtttgcatttttgcttatggaagtaacaacccatcattgtagtccaaagtgaaaattttgggggaatgtcatttcagcacctttagaaaactaggtttgaaatgtatttgtaaactgctgtgttggagtggatattgacaagaa

SEQ ID NO: 242097 - DNA, 632 bp, Homo sapiens
tttcccttcttctccactaaagatgcatctttgggtcccattcttgctgctctacagttgacagtcagtctgcatggtgrtttagtggttatttgtgttagccattctagacaacaagcttctttttattaataataatataaacagatgacatttggaaagtactctcacctgagaggtagattggcaccttaaacctaaagaaggatgccaagtgggagaatcaagttgagagagagaagatattgggcagataggacaagaagtacttctcaactcatggacacaaaaaggaaaacaatagtcactgtgacctaccaggatatggagggtaggagcagggagaggatcaggaaaataaagaatgggcactaagcttattacctggtgatgaaataatccatacaacaaaccccatgacatgagtttacctatataacctgcacatatacccttgaacttaatttgttttctaaaaggaaaataaagtttgcatttttgcttatggaagtaacaacccatcattgtagtccaaagtgaaaattttgggggaatgtcatttcagcacctttagaaaactaggtttgaaatgtatttgtaaactgctgtgttggagtggatattgacaagaa

SEQ ID NO: 242098 - DNA, 632 bp, Homo sapiens
tttcccttcttctccactaaagatgcatctttgggtcccattcttgctgctctacagttgacagtcagtctgcatggtgatttagtggttatttgtgttagccattctagacaacaagcttctttttattaataataatataaacagatgacatttggaaagtactctcacctgagaggtagattggcaccttaaacctaaagaaggatgccaagtgggagaatcaagttgagagagagaagatattgggcagataggacaagaagtacttctcaactcatggacacaaaaaggaaaacaatagtcactgtgacctaccaggatatggagggtaggagsagggagaggatcaggaaaataaagaatgggcactaagcttattacctggtgatgaaataatccatacaacaaaccccatgacatgagtttacctatataacctgcacatatacccttgaacttaatttgttttctaaaaggaaaataaagtttgcatttttgcttatggaagtaacaacccatcattgtagtccaaagtgaaaattttgggggaatgtcatttcagcacctttagaaaactaggtttgaaatgtatttgtaaactgctgtgttggagtggatattgacaagaa

SEQ ID NO: 242099 - DNA, 522 bp, Homo sapiens
attcttcctcacaactgtcagaaggagccaattttgctcaaacctcaatcctggacttatagcctgcagaacygtgagacaataaatttctgttgtgtaatccacccagtttatggtacttggtcctaacagtcttagcaaactaatatagcctccttgtagaccagacctcactactagggctatccgatcccttgggtcccttctaggggctgctgaaggcagcatatgtctctagtttgtgcccctctaagcccctctaagcccaaggggtaaccaagggacagctgttcatgtggcttagatgcaccagcttgcacatgagagagccctttgctggtacaggagggaggtggagggataaagagaggagctgcaggcctggactgaggtcagttcctcttccaatagagactccaaggattgtaagaattctaaatttgaaccttgccttttaggtaagtaaagacaatggtgaatttatcaagataggaggctaaatcgcgttgtttttaatgattt

SEQ ID NO: 242100 - DNA, 522 bp, Homo sapiens
attcttcctcacaactgtcagaaggagccaattttgctcaaacctcaatcctggacttatagcctgcagaactgtgagacaataaatttctgttgtgtaatcyacccagtttatggtacttggtcctaacagtcttagcaaactaatatagcctccttgtagaccagacctcactactagggctatccgatcccttgggtcccttctaggggctgctgaaggcagcatatgtctctagtttgtgcccctctaagcccctctaagcccaaggggtaaccaagggacagctgttcatgtggcttagatgcaccagcttgcacatgagagagccctttgctggtacaggagggaggtggagggataaagagaggagctgcaggcctggactgaggtcagttcctcttccaatagagactccaaggattgtaagaattctaaatttgaaccttgccttttaggtaagtaaagacaatggtgaatttatcaagataggaggctaaatcgcgttgtttttaatgattt

SEQ ID NO: 242101 - DNA, 522 bp, Homo sapiens
attcttcctcacaactgtcagaaggagccaattttgctcaaacctcaatcctggacttatagcctgcagaactgtgagacaataaatttctgttgtgtaatccacccagtttatggtacttggtcctaacagtcttagcaaactaatatagcctccttgtagaccagacctcactactagggctatccgatcccttgggtcccttctaggggctgctgaaggcagmatatgtctctagtttgtgcccctctaagcccctctaagcccaaggggtaaccaagggacagctgttcatgtggcttagatgcaccagcttgcacatgagagagccctttgctggtacaggagggaggtggagggataaagagaggagctgcaggcctggactgaggtcagttcctcttccaatagagactccaaggattgtaagaattctaaatttgaaccttgccttttaggtaagtaaagacaatggtgaatttatcaagataggaggctaaatcgcgttgtttttaatgattt

SEQ ID NO: 242102 - DNA, 554 bp, Homo sapiens
taccacccaattgactcttcccaaagaccccacagcrcatgcttatgaccacagtgaccacctctcagctgcagggtgaccccgcctaaatcatgcctgcttgctctaaacccaccaattagaattccccatgggaaacctgcctgggtaatgccctggatcccaacaaaagcttcagccctcagattcctctccctcgcccgctccccaccctctggttgagggtatggttcccagctggctccccttcccattggcctggagaggcctgctgccctcctctctggcgtctgtaagtagtaaacatgtcttctgttagagcatatgttgtgcctgtgctgccctgtgtctcacatgactggcacacccaaacagaattctcctcccagctagagctctcctagagtgcggtgtcttggtggaaataaactggacacaggtcagacaacagccacaagataccgccaggataagcaaggtaagagggacacctggtcacgactgggcacggaggatacaggccatccactagaatgaattatcctgtgaaaggc

SEQ ID NO: 242103 - DNA, 554 bp, Homo sapiens
taccacccaattgactcttcccaaagaccccacagcacrtgcttatgaccacagtgaccacctctcagctgcagggtgaccccgcctaaatcatgcctgcttgctctaaacccaccaattagaattccccatgggaaacctgcctgggtaatgccctggatcccaacaaaagcttcagccctcagattcctctccctcgcccgctccccaccctctggttgagggtatggttcccagctggctccccttcccattggcctggagaggcctgctgccctcctctctggcgtctgtaagtagtaaacatgtcttctgttagagcatatgttgtgcctgtgctgccctgtgtctcacatgactggcacacccaaacagaattctcctcccagctagagctctcctagagtgcggtgtcttggtggaaataaactggacacaggtcagacaacagccacaagataccgccaggataagcaaggtaagagggacacctggtcacgactgggcacggaggatacaggccatccactagaatgaattatcctgtgaaaggc

SEQ ID NO: 242104 - DNA, 554 bp, Homo sapiens
taccacccaattgactcttcccaaagaccccacagcacatgcttatgaccacagtgaccacctctcagctgcagggtgaccccgcctaaatcatgcctgcttgctctaaacccaccaattagaattccccatgggaaacctgcctgggtaatgccctggatcccaacaaaagcttcagccctcagattcctctccctcgcccgctccccaccctctggttgagggtrtggttcccagctggctccccttcccattggcctggagaggcctgctgccctcctctctggcgtctgtaagtagtaaacatgtcttctgttagagcatatgttgtgcctgtgctgccctgtgtctcacatgactggcacacccaaacagaattctcctcccagctagagctctcctagagtgcggtgtcttggtggaaataaactggacacaggtcagacaacagccacaagataccgccaggataagcaaggtaagagggacacctggtcacgactgggcacggaggatacaggccatccactagaatgaattatcctgtgaaaggc

SEQ ID NO: 242105 - DNA, 485 bp, Homo sapiens
tatacctagaaaaccctaaagattctgccaaaaggcccgtagaactaataagtgacttcagtaaagtttcaggatacaaaatacatgtaataaaaatcagtagcatttctatacaccaataacattctaggtgagtgccaaatcaagaacacaattccattcacaatagccaccaaaatatgaaatacctagaaatacaactaaccgaggaggtgaaacatctctttaaggggaactacaaaacactgctgaaaaaaaaaatcagagatgacacaaataaatggaaaaatgytccatgctcatggattggaaaaatcagtattattaaaatggccatactgcctaaagcaatttacagttttaatgctatttgtatcaaactaccaacattatttttcactgaattagaaaaagccattctaaaatttatatgaaaccaaaaaggagcccaaatagccaaaggaattctaagcaaaaagaacaaa

SEQ ID NO: 242106 - DNA, 485 bp, Homo sapiens
tatacctagaaaaccctaaagattctgccaaaaggcccgtagaactaataagtgacttcagtaaagtttcaggatacaaaatacatgtaataaaaatcagtagcatttctatacaccaataacattctaggtgagtgccaaatcaagaacacaattccattcacaatagccaccaaaatatgaaatacctagaaatacaactaaccgaggaggtgaaacatctctttaaggggaactacaaaacactgctgaaaaaaaaaatcagagatgacacaaataaatggaaaaatgttccatgctcatggattggaaaaatcagtattattaaaatggccatactgcctaaagcaatttacagttttaatgctatttgtatcaaactaccaacattatttttcactgaattagaaaaagccattctaaaatttatatgaaaccaaaaaggagcccraatagccaaaggaattctaagcaaaaagaacaaa

SEQ ID NO: 242107 - DNA, 633 bp, Homo sapiens
tctagatcaagcgccttgttggtagtgaccaggagactctgaggattcacgagaggcttgtggcagggtcaaaggcaggggccatcgcccagagcagcatctacccaatggaggtgaggggccgcctgggtcctggggcgggcagtgggcacaggactggggagaggcacaggctgtgctcacgcgtcccgctgctcctgttgtgcaggtcctgaagacccggatggcgctgcggaagacaggccagtactcaggaatgctggactgcgccaggaggatcctggccagagagggggtggccgccttctacaaaggctatgtccccaacatgctgggcatcatcccctatgccggcatcgaccttgcagtctacgaggtgaggcccaagctggacagatttagaaaccycctcccagcacacctccacctgctgtctccctccttgacggacgcgtggttagtgcaggaaactgcatcaaagactgcgcctccttcctgctcttctgtttactgcagctttccttcaccctgcctgcccctggcagaccccagcagctcctgtgagccctgcacccaggctctgcatccccagaggctcagcaggcagatccccagagcagggtggcccccagg

SEQ ID NO: 242108 - DNA, 607 bp, Homo sapiens
ctgtttacattaattgctcctgatcttccacactcttgattttccggattctaactccatcaaaatgtaacttgatgtgttcaggccccggggacacctaggcacttgaggggggcgggtccgtgtttggcctgctgggcttagyaggagggtctggcccggggcggggagcgcgatgctctgctgggtcagcatctccagccacctggctttgctggtgtggcctcgcagccttgccaaatgtgagcagcttacagagcaaccagttgcacgtgcttaagctgccgaggtgacacagggcgctgtagggtccagccccacagggtcggtaggtctctccctgtgtgcggcgacgagagagtgtagaaataaagacacaagacaaagagacgagaaaaggcagctgggcccgggggaccactaccaccaatgcgcggagaccggtagtggccccgaatgtctggctgcactgttatttattggatacaaggcagaaggggcagggtaaagaatgtcagtcacctccaatgataggtaaggtcacgtgggtcacgtgtccactggacagggggcccttccctgcctggcagcggaggcagagagggag

SEQ ID NO: 242109 - DNA, 383 bp, Homo sapiens
cagccctcggctcatgccaggtggcccagtgcccagtgggctatgcctgtgcagactctcttgctgcccctcccaccctcatgagggctctctgatgccttatttcagccaccctcccacccagcctcctcccgccccctcccaggggctctccactgcctatttcagcaaccctttcacttcagcttctggagtagctggggctgcagctgtgtgccacygcactgcatgagcttgtttaaaaattggggacccaaggcccagggccaggcaggccttgccaatggccccatggtgaggctgggaggttcgagaccctgatggggactgtgaccacggagccggagccatggccatggcgggctctggtttctccccccagc

SEQ ID NO: 242110 - DNA, 588 bp, Homo sapiens
gacctttttctttctttcagtcttcaatgactcactgcttcatctcgctccaccaaagataaatgaaatctacatctcttatacattaacaatgcatgacaatttataaatagctaaatttttggagctaactttaagtacctgaatggaatttaatcaacccactaatctccttctcacttctcagttatcaagtttatgtcaagggacaaggaaaaattatccaaacattgtttaaaacaatcatcattaattagtaacacttatccaggggggtttttaacctttcccccactcaaggattattctaatgtcagagtagaataaaaaataagtgcagcgatgctgactcttccaagcttaacatttctcacaagtcaattagctttgtactgggaggagggcgtgaagggctgcttgcggtagttrtgtagcagcagcacaatggccgcagacaaggaaaacagtttctaggaattcctcgtatataattttatatttttgacaagattaatgacccatgctcccttcctctccatttcttttttaggaattctgtgttggtatgtagttactatattttattaa

SEQ ID NO: 242111 - DNA, 588 bp, Homo sapiens
gacctttttctttctttcagtcttcaatgactcactgcttcatctcgctccaccaaagataaatgaaatctacatctcttatacattaacaatgcatgacaatttataaatagctaaatttttggagctaactttaagtacctgaatggaatttaatcaacccactaatctccttctcacttctcagttatcaagtttatgtcaagggacaaggaaaaattatccaaacattgtttaaaacaatcatcattaattagtaacacttatccaggggggtttttaacctttcccccactcaaggattattctaatgtcagagtagaataaaaaataagtgcagcgatgctgactcttccaagcttaacatttctcacaagtcaattagctttgtactgggaggagggcgtgaagggctgcttgcggtagttatgtagcagcagcacaatggccgcagacaaggaaaacagtttctaggaattcctcgtatataattttatatttttgacaagattaatgacccatgctcccttcctctccatttcttttttwggaattctgtgttggtatgtagttactatattttattaa

SEQ ID NO: 242112 - DNA, 647 bp, Homo sapiens
gattaaaactgccattagaataaataattcaaaagctagagaaagagtacaatgagaagccatgagttgcatttgaattataatattatgtcttacagatttggggtatatgctaaagtaaccaaagttgtagaaaataacgccgggcattgtggctcacatctgtaattccagcactttgggagggccgaggtgggcggatcatttgaggtcaggagttcgagaccagtctggccaacatggtgaaactccgtctgtactaatagtacaaaaattagccaggcgtgatggtgtgcatctgtagtccttgctactcagaaagctgaggcaggagaatcgcttgtacccaggaggcagaggttgcagtgagcagagattgtgccactgcactccagcctgggtgacagagtgctatgagtcaccacacctggtatgagccaccgtgcctggcccacaatgacttttacacatgttgttaaaycatcttacagattttataatttgggggaagaaaagttttactaaatggtcttttaatggaaactctacaagaaccagaatctttgctttgttcacttatgtatccattcctaggcctagaaaaatgtctgacacatagcggcaattattcattgaataaatggacc

SEQ ID NO: 242113 - DNA, 588 bp, Homo sapiens
aagccaacacacctgagtgagaatgaaatgaaagtgttttgtcagatataaaaggacttagaatggacactacaaaaactgaaggccactgaaagtcactacagaatgtacacagtgaggagaaaactgagctcacacatacgttctctgattacagtgaagttgactagaaattaataacagaaggatatctaggaaatctctgtgcgtttaaaaatggagaaatgcacttccaaataacctatragtcaaagaggattttagaaaatagttcgaacctgaatttttttacccaaactaaattttttaaaaggacatcaaacaaattaaaatagggaacatcaaaacctgatctacaagaactaccctacgagaaatgccaaggggcccttcaggctgaaatgaaagaacacgggacaataattcacagccacatggagagataaagcgcactggttcaggtgcctacaatggtaatatgaaggccagtagaattgtaaggttttttgtaattcctcttctttccctatatgatttaaaggacaaatacatgaaacaacaattacaaatatatgctaatgggcatac

SEQ ID NO: 242114 - DNA, 583 bp, Homo sapiens
  misc_feature (1)...(583): n = A,T,C or G
acaaatatatgctaatgggcatacaatatataaagatgtaatttgtgacaataataaggaaggaggaatagaactgtgtaagttcagggtttttgtatactattgaagttaagtcagtattaatgaaaactagaacattatattaataagtttaaggtgttaattgtaatccccaaggaaaccactaagaaataactaaaacatatacaaaaatgtaaatgagaagggaaccaaaatgatataccaaaaaacaaaaaaaaaaaaaaaaacaccttaaactaascagaaggcagtaatggaaggattgtgaaacaaaaaaaaagaaacatttctaaaaataataaaatggtagtagtcttttcttatcagtaataattttaaatgtaaattgcttaaattatccaattaaatagcagagattgncagaatggataccaatagcaacaaaaccccaacaaaacaaagcttatggttcatctatatgctatctagaacagactccttcagatccaaagacacacataggctgaaagtgaaagaacagaaaaagataacccatgaaaatcataccaaaagagagcta

SEQ ID NO: 242115 - DNA, 430 bp, Homo sapiens
tgatggctgggggctctccttgctgagacttccagacccagcattctggacacaggaacagacactgggaggccagggacccagggaagggttctggaatcgtcctgcctttgagagtcccctgggtgccttgcagggtgggattggtccttccctctctggggcactccctccaaggggccctaaaatttccggttggttcctgccgaccagtttcctgcttgcccagatgctgtcctgctgtcccgagtaaagactgctggaagcctttggcatggtggaagcccttcttccccacaccctcatcactgaractggggcggcgtggctgccggcatcctctgagccttccttctggctccacagctccctcgagaaaggccaggaggggtcagaggtcctccccagagcaggataaggggggttgccc

SEQ ID NO: 242116 - DNA, 405 bp, Homo sapiens
ttttttcttttggtctgttttgtttattcctattttaataacactgccttaaatacatagcttcatttaaaattttgatatctgaaatagcagatactaatacatcttgtttttctttttcaaaacatcttggttattcctaactctttgtacttttacatatatttttggcaagttcacaacatactctygacatttttatttggataatattagctctacaaatcaattggaagaggatcatcatctttacaacactatgtcttccaattcgtcaacatcctatttcttttgatttatttaggtatctagtaaggttttacaattttttccatgaagatatttgcattagttcattcttgcagtgctataaagcaatttttaatataaaatatattattgtta

SEQ ID NO: 242117 - DNA, 405 bp, Homo sapiens
ttttttcttttggtctgttttgtttattcctattttaataacactgccttaaatacatagcttcatttaaaattttgatatctgaaatagcagatactaatacatcttgtttttctttttcaaaacatcttggttattcctaactctttgtacttttacatatatttttggcaagttcacaacatactctcgacatttttatttggataatattagctctacaaatcaattggaagaggatcatcatctttacaacactatgtcttccaattcrtcaacatcctatttcttttgatttatttaggtatctagtaaggttttacaattttttccatgaagatatttgcattagttcattcttgcagtgctataaagcaatttttaatataaaatatattattgtta

SEQ ID NO: 242118 - DNA, 561 bp, Homo sapiens
tctgcctcctgtctgccatttttttctccccctaaaacactttctgaatctgggccactatcctttgttcaatatagtgtgtcaaaagtgaaatattgaattttcaagccttggcttcaagatgccttgcaggttatgctcttgcattttggaatacatagagctataaaaagaagctagataacttcagctgcatgaaagaacccgttgagatcagtgcaagaatattccaactaatcttcatacaaactaatgacccacagaacttttgaggatataaaatttttgttgtttcaagctaaatttgggagtcatttgctatgcagacaaagataactgaatcagaaaatgatatctggaaattgggtgctgcacaacaaaaartaaaatgtttcacgggctttgggactaggcaataggtagaggccaaaatgtagtgaggaaaatgctattgggactgggaaaatagtgactcatatatgtaatatgaaacaattggcaaaactgggcatctgagtcaagtgcaaattgttacatcacaaaattgtaatcatataaaat

SEQ ID NO: 242119 - DNA, 579 bp, Homo sapiens
ttagcaaggttattgggtacatagtcaatatacaaatgtaaattatattttgatatgctaacaataatcaggtagaaaacaaaattgaagccagatattataaaaatactttaatcaagcaaataaaagaataaatctaataacaaatgtgtaagaattctatggagaaaaccacaaaattttactgagagaaattaagatagaccaaaataaatagataaatatgatggatggaaaagattggtaaaaatgtcattttcacccaaaattgatttatagttttaaatatcatcataatcaaaagcacaatattgtgtatgtgtaagacaacaattctaaaatttatatggaaattcaaagaactggaaatagccaatatatccttggtgaagtataaggtaaaagacttgatctatcaaatataaagacataatgaggctagggtaatcaygacaacacaatattggcacaaggatagttaggctaagggaatagaagataaaaagccctaatgtctatcaacaataaaatggaaatggtggtatattcatacaataatatatcacatggcaacagaaa

SEQ ID NO: 242120 - DNA, 496 bp, Homo sapiens
tgttttttgagaaacatggatggagctagaggccattatcctcagcaaactaacgcaggaacagaaaaccaaataccacatgttctcacttataartgggagctaaatgatgagatcacgtggaaacaaagaggaaacaacagatactggggcctaccaggagagaaggtaggaggaaagagaggaacagaaaaaagaactattaggtactagtctcagcacctgggtgacgaaataatctgtacatcaaactcccatgacacaaggttaccatataataaagctgtacatgtacccctgcacctaaaataaaagttttttgaagaaaaggaaatcaacgtttggtgcgatattattaactaaactacagaccttatttgattttcacacatttttttcctatgtgttctttttctgtctggcatcctatccagagtcatatactgtttttgttttcctttcttagtcatttccagtcggcaacagttcttcaatt

SEQ ID NO: 242121 - DNA, 518 bp, Homo sapiens
caaacaagcccagagagtgaagactataataaatacctaactcttctatgcccagacaccaatgaacatctactagcatcaacaccatgcaggaaatcatgacctcaccaaatgaactaaataaggtaccaaggactaatcctgaagaaacggagatatatgacctttcagacacagaatttaaaatagctgtgttaaggaaactcacagaaattcaagataacacagagaaggaattcagaatttgatcagatatgtttaacaaagagattgaaataatttaaaagaattacaattttttcagcagaaattttggagctaaaaaatgcagttggcatattgaagaatgcatcagartattttaatagcagaattgatcaggcggaagaaagaattagtgagcttaaagacctgttatttgaaaatacagtcagaggagataaaaaagaataaaaaacaataaagcatacctacaggatctagaaaatagcctcagaagggtaaatttaagagttatt

SEQ ID NO: 242122 - DNA, 462 bp, Homo sapiens
aaaaaaaaactatccaaaaacttatatggaaccacaaaagaccaagaagagccaaagctatcttaagcaaaaagaacaaaactggaggaatcatattacctgactttaaattatgccacagaactataataaccaaaacagcatggcattggcataaaaccagacagacccatggaacagaacagagaacctggaaacraatccacacatttacagtgaactcatttttgacaaaggtgccaagaaaatatactggggaaaagacattctcttcagtaaatagttctgggaaactagatatccacatgcagaagaatgaaactagactcctatttctcgccatatacaaaagtcatatacaaagtagactaaaggattaaatctaagacctcaaactatgaaactactataagaaaacattgatgaaaatctccaggacatttgtctgagcaaaaatttctt

SEQ ID NO: 242123 - DNA, 462 bp, Homo sapiens
aaaaaaaaactatccaaaaacttatatggaaccacaaaagaccaagaagagccaaagctatcttaagcaaaaagaacaaaactggaggaatcatattacctgactttaaattatgccacagaactataataaccaaaacagcatggcattggcataaaaccagacagacccatggaacagaacagagaacctggaaacgaatccacacatttacagtgaactcatttttgacaaaggtgccaagaaaatatactggggaaaagacattctcttcagtaaatagttctgggaaactagatatccacatgcagaagaatgaaactagactcctatttctcrccatatacaaaagtcatatacaaagtagactaaaggattaaatctaagacctcaaactatgaaactactataagaaaacattgatgaaaatctccaggacatttgtctgagcaaaaatttctt

SEQ ID NO: 242124 - DNA, 476 bp, Homo sapiens
tggatatacaattttggagtcaaaagaggagttcctgaatatagacggtattttgatccatgagaactaggtaagatcatatagatgtaaaataagagacataaaaagattgagctctaaataactccaacattaagagatcatagagaaggggaggaactagccaaagagactaagaagaagcagtcaacgaggtatgaggaaaaaaaagattattatgtccctgaagcagagtgaagaacaaattgcagtgaagacaaaatgatcaaaagtgtcaaatgctaytgacaggtcaagtaagagactaagaattgaccattagatttagcaatatgatagttattggagaccttgacaacagcagctttagaatgctcttgcagaaaagataaaactctaatttgactgaatttcagaataaagttaagtaagagaccagcagcattggacaaattatgaagaataatgttgtgaag

SEQ ID NO: 242125 - DNA, 577 bp, Homo sapiens
taaatataactaatttaatctcttcttcttccagtctttaaaattaactaaaatcatttttttaaaaaagaggccacaattttttcttttctgtttatactacttcctaagtacttagctagaccttctagatgtctggatatctggccactcttttggttcttcatatatgccatgctctcttgtgccttagaacctttaagtttgctgtttcccctgctgggaaagttattttaatctgtcccttttcttatttaattcctgctttttcttcagatctmagttcaaccatcatctttgaggcaaaaatttcaacttctttatctaaagacaagtagagggctacaatagcatattacagaaattttaagagctgtgcttaatccactttgctcaccttgaatctctagtcctcagatagtggttcttattttccatgaaatgaggaaacattgaagggtaatggggaatggcttaggttatgttttaaaaggatcactctgactgttttactgagatgaaagtaggggcacaaaagtggaataagaaagataacttatgaggctaccaataatcc

SEQ ID NO: 242126 - DNA, 561 bp, Homo sapiens
ctaaatttcctttcatctgttcaattctctccaaatcaactgttaccactctactccaagcaaacatcatctctggcttagaatactacaatagcttcatgactgatttttttctccaatcatatcttctacctttcaatttactcagcacactaaaactgatctttccctgcttaaaacattgcagtggccttccattattcttagagtcgyaggaagaaaaccattgcttctgatgcaatgttaagccaaaggaacagaggattttaagaaaattgggcaattatactaaaagtttctgagatgccaaataggataaggattaaaaatgtacactgaaaacagtgctgtgaagatcactgatggctttaataagagcagtgtggtaggggaaagaagttgctgaggagtgggtatgaagcaagtagacaactctttttaaactttgactgtcaaggggaagagaacgactggcaggaagctacaggaataaatggaatcaaagaagggatctttcctttttctttgtttaaggttagattaaccagaacatatgtaaat

SEQ ID NO: 242127 - DNA, 488 bp, Homo sapiens
ctgtggttcatgacagatgaccagtttttggatattatttggtgttatgacagctatcacttattgtgtatctataatataccagccactaaaaggatccagtgttattgattcttatactaaggcagatattgtgatactaattttacagatgaaataagtttaaacattattaaataatctaccctagtaaggggtcaagctgagttccattaggraggaaaaactctttccttgacctcttggtttcagtggcagcagccctgaatattgaactgacaaaaaaataggataacaggagaaaaaggtttatttcatatgcatgtggatggggtctcacagaaataaaataaaaactgtagagaggtggtcagacccaaacacttggacactaattttacaaaagggcaggtcatgtcctttgcatacatagaagaaatagggatgcaaatttgcggagaaataacaagacaaagaaaaagagtttt

SEQ ID NO: 242128 - DNA, 493 bp, Homo sapiens
aatggtgtggactgtggttcatgacagatgaccagtttttggatattatttggtgttatgacagctatcacttattgtgtatctataatataccagccactaaaaggatccagtgttattgattcttatactaaggcagatattgtgatactaattttacagatgaaataagtttaaacattattaaataatctaccctagtaaggggtcaagctgagttccattaggaaggaaaaactctttccttgacctcttggtttcagtggcagcagccctgaatattgaactgacaaaaaaataggataacaggagaaaaaggtttatttcatatgcatgtggatggggtctcacagaaataaaataaaaactgtagagaggtggtcagacccaaacacttggayactaattttacaaaagggcaggtcatgtcctttgcatacatagaagaaatagggatgcaaatttgcggagaaataacaagacaaagaaaaag

SEQ ID NO: 242129 - DNA, 493 bp, Homo sapiens
aatggtgtggactgtggttcatgacagatgaccagtttttggatattatttggtgttatgacagctatcacttattgtgtatctataatataccagccactaaaaggatccagtgttattgattcttatactaaggcagatattgtgatactaattttacagatgaaataagtttaaacattattaaataatctaccctagtaaggggtcaagctgagttccattaggaaggaaaaactctttccttgacctcttggtttcagtggcagcagccctgaatattgaactgacaaaaaaataggataacaggagaaaaaggtttatttcatatgcatgtggatggggtctcacagaaataaaataaaaactgtagagaggtggtcagacccaaacacttggacactaattttacaaaagggcaggtcatgtcctttgcatacatagaagaaatagggatgcaaatttgyggagaaataacaagacaaagaaaaag

SEQ ID NO: 242130 - DNA, 520 bp, Homo sapiens
ttggtccgagattaatgaaagttgaattggggggtattttgaacaatataagacacactcaatttatgtgtgaatcaatctagcctggaaatgtaatattaaacgttgattatgttgctttgtatctgccgtgtctctttccaggttcaggcattagcaattatgttttcagaggcctcagttttcattctgtcttgggaatcaagggatgttagaaggtcccttccagagggcaattattttttggcatttccatgagagatgagttaagacaaggcttctcagaggtgtgctttgttattctttttctgattgacccttttctccctattacaactttggtgaagaaggcagcagtgacatttgtcctttgtatacattactgtcaagtttyttattccatgtttaatcctaaagatgtaatggagggcaaggtcttttgctgctgtccaggggtgcccatttggttaggctggtaatgcaaaacttgagacaccatgtcttaatcgctgcacgctaa

SEQ ID NO: 242131 - DNA, 588 bp, Homo sapiens
ttttaaaaaagatgccctctgtaccacatattatattttgtatgctaatatgggctcagagtgttttacattttgcatgtctaattttgcaaatcaatatgtttctgttatgggaatcaatggaagtttataagtagtaaaaaaataaaaataaccagggttgtaaaacacaaaaattattgatttattagcctttgcttttttttaatttattcacttattcatcactcatttgacaaatatttattgaacatgtctgccaggcattatggatctaggcaagatcctagaactcaaggagctcaatttagtgaaagagactaaagggagaaaatgaactagtgcatatccaacgctgaatttattaccagaaaagcaagcgtgggttttgccactaaaggtaatggcaataaattaccaattacaaatggtaatttattaatagtaaatggtaatggtaatttgttrccattatttttaatggcaaaacctgcaatcacttttgcaccaatctaaatacaactccttgaaaaggaatgaatcatctaggttgctgcagaaatcattttcattactggtccagtaaaa

SEQ ID NO: 242132 - DNA, 563 bp, Homo sapiens
tgcagaccccatattcctctttgcacagagaagacattaaatacatatttgctaaataaatgaatgtagaggcatggtttcttcartagtgtatcataaaacagtaggacaaaaaatatatttaagtctttgtctgcttcttgtatcaatataatgctgacctcatagaatgaattgggaagcttttttcatttttatatggtgggatatcttgaatagaattggcattatttatttctcaaatgtttgacagaactcactaatgatgccacctaaacctggagtttttactgtgggaaggtttttaactaaaaattcatttactttaattgatataagggtatttgggttatctatcttttttgaatgagctttagtaatttttcttttttggctggtggcggtagaatttattcgaatgtgtcttaatacaggcactgggggcttgcccatggtgcgcttgatatataaagcctagacattctgccaatttttcttgagtaatgacaccaggaagttgacagtcaggtgaatgttatacacaagtttaatgtctgtaacat

SEQ ID NO: 242133 - DNA, 587 bp, Homo sapiens
ccactggtggcatgaggcaagagaagaaaaatgtgtttcatcccatttaaaatactctgtgggcatctaacacttgttatgatgcactgcgcttataatactgacaattcagaaatgtggcctcactcttaasagagtctctgcccttaaggaccttacgggtgaggggtgaggggaaagagagatgcagagagagagagatgcagacagaatagatgtgccattctaatagtacagagggctgagccaggggccaggggagggggcattaatggctgtgtttgtgacccatttcacagaagagttccacttgagtagaccagttctggtgtctcccacccttccttccatgcacacctcattcctgcagtagagaattagggattccctctgtactcactataaagtgaaataagctattttgaatgttagtgaatgcacaagaacacactgtcaatgtcaataggaagagtcaatacttaacagctaaaaattacgctttcatgttctctatccccctcccctatattatagataaaagtgaaaaaaatgacaaaatgccaactggtctttgataaggtgagggc

SEQ ID NO: 242134 - DNA, 407 bp, Homo sapiens
aggaaagaaaccaacagctaggtacagaaaatgtagaggtcatcaactaagttcaacccaaaaaggagttcaccaagacatataataatcaaactatcaaaaatcaaaaacaaaaaatttctgagagcagcaagagacaagcaatatattacctacaaagaagtctcaatacaatcatcrgtagacttctcagcagaaactctctaggccagtgggatagtattttcaaagtgctgaatgaaaaaaaaacaaaaaacaaccctgccaaccaagaatgctctaaccaccaaagctttcagaaatgagagaaataaaagctttcccaggcaaataaaagctaagaaaattcatcattattaggtctctcttacaggaattactaaaagaaattctttaagctaaaaaaa

SEQ ID NO: 242135 - DNA, 542 bp, Homo sapiens
cagacatgtacaaaacataccaaaccaacaacaaccaaatacacattcttgtcaagagcacacagaacattttccagaataaaccatatattaggtcacaaggcaagtctaagcaaatttaagaagattgaaatcatatctggtatttttttctgatcacaatgggttaagactaaaaatctgtaacagtaagactttcagaaaactcamtgaaattaaacatgctcctgaatagccagttgatcagtgaataaaagggaaattaaaaaatgtcttgagacaaatgaaaatggaaacacaacataccaaaatttaggaatgcagcaagagaagttctgaggggtgagtctgtagcaataagtgcctatatcaaaaagaaaaaatatttcaaataaataatgtcacaccttaagaaaacataaaaagaacaaactaagcccaatgttagcaaaagaaaataaataagaattatcacagaaataaatgaaatagaaaccagaaaaatgatttaaaaaatcaataaaactataaaactaagagtg

SEQ ID NO: 242136 - DNA, 542 bp, Homo sapiens
cagacatgtacaaaacataccaaaccaacaacaaccaaatacacattcttgtcaagagcacacagaacattttccagaataaaccatatattaggtcacaaggcaagtctaagcaaatttaagaagattgaaatcatatctggtatttttttctgatcacaatgggttaagactaaaaatctgtaacagtaagactttcagaaaactcaatgaaattaaacatgctcctgaatagccagttgatcagtgaataaaagggaaattaaaaaatgtcttgagacaaatgaaaatggaaacacaacataccaaaatttaggaatgcagcaagagaagttctgaggggtragtctgtagcaataagtgcctatatcaaaaagaaaaaatatttcaaataaataatgtcacaccttaagaaaacataaaaagaacaaactaagcccaatgttagcaaaagaaaataaataagaattatcacagaaataaatgaaatagaaaccagaaaaatgatttaaaaaatcaataaaactataaaactaagagtg

SEQ ID NO: 242137 - DNA, 572 bp, Homo sapiens
tcctcagaccctatcaggagaagagcttgtggaagatcaaatcaaattcaaatgagaataatccagaaaaggtggtgaaacaacaggttggaaactggattagggtataaggaaatgcagcaaccctacctcctcatcctgtgcattggagagaagrgcaaaagcagaaacttcctgggggtgaagttaggggaagcaagataccagttccaggacagacacacaagaagtgtatgttgtaatgtctgagaatgcagaacagaaacacagggcacagggcaagaagctgcagaggaaagacctagaggtgatgtatgtttcagaaaagatctcccccccccccatatatacaaccatatatcatatttatatcacatatatatgatatatgttatctagtaaccagggtagtgagtccaaccacccaaaggaaaggagaatgcctagtagctagaataatattttccagatggtgggagaagtagaattaagtcattagaatttagttactgatagaagaaatagccagaccctaattccagttgcatgaattaaaaataaaaattaaagca

SEQ ID NO: 242138 - DNA, 572 bp, Homo sapiens
tcctcagaccctatcaggagaagagcttgtggaagatcaaatcaaattcaaatgagaataatccagaaaaggtggtgaaacaacaggttggaaactggattagggtataaggaaatgcagcaaccctacctcctcatcctgtgcattggagagaagggcaaaagcagaaacttcctgggggtgaagttaggggaagcaagataccagttycaggacagacacacaagaagtgtatgttgtaatgtctgagaatgcagaacagaaacacagggcacagggcaagaagctgcagaggaaagacctagaggtgatgtatgtttcagaaaagatctcccccccccccatatatacaaccatatatcatatttatatcacatatatatgatatatgttatctagtaaccagggtagtgagtccaaccacccaaaggaaaggagaatgcctagtagctagaataatattttccagatggtgggagaagtagaattaagtcattagaatttagttactgatagaagaaatagccagaccctaattccagttgcatgaattaaaaataaaaattaaagca

SEQ ID NO: 242139 - DNA, 572 bp, Homo sapiens
tcctcagaccctatcaggagaagagcttgtggaagatcaaatcaaattcaaatgagaataatccagaaaaggtggtgaaacaacaggttggaaactggattagggtataaggaaatgcagcaaccctacctcctcatcctgtgcattggagagaagggcaaaagcagaaacttcctgggggtgaagttaggggaagcaagataccagttccaggacagacacacaagaagtgtatgttgtaatgtctgagaatgcagaacagaaacacagggcacagggcaagaagctgcagaggaaagacctagaggtgatgtatgtttcagaaaagatctcccccccccccatayatacaaccatatatcatatttatatcacatatatatgatatatgttatctagtaaccagggtagtgagtccaaccacccaaaggaaaggagaatgcctagtagctagaataatattttccagatggtgggagaagtagaattaagtcattagaatttagttactgatagaagaaatagccagaccctaattccagttgcatgaattaaaaataaaaattaaagca

SEQ ID NO: 242140 - DNA, 572 bp, Homo sapiens
tcctcagaccctatcaggagaagagcttgtggaagatcaaatcaaattcaaatgagaataatccagaaaaggtggtgaaacaacaggttggaaactggattagggtataaggaaatgcagcaaccctacctcctcatcctgtgcattggagagaagggcaaaagcagaaacttcctgggggtgaagttaggggaagcaagataccagttccaggacagacacacaagaagtgtatgttgtaatgtctgagaatgcagaacagaaacacagggcacagggcaagaagctgcagaggaaagacctagaggtgatgtatgtttcagaaaagatctcccccccccccatatatacaaccatatatcatatttatatcacatatatatgatatatgttatctagtaaccagggtagtgagtccaaccacccaaaggaaaggagaatgcctagtagctagaataatattttcyagatggtgggagaagtagaattaagtcattagaatttagttactgatagaagaaatagccagaccctaattccagttgcatgaattaaaaataaaaattaaagca

SEQ ID NO: 242141 - DNA, 554 bp, Homo sapiens
ctgatcactgccactccactggttttatttcaggagatttattgtaygctcatgtccctagatgatagcctgggctttggatttatcctgactaatgttcacaatatggaatctcggaggagagaattctggtttctcccagaagactcctgagttccttatgcaaatttgctcacatttccccagtaagtttcgagttaatcatatgcaagctgccagagtaatcaacctgctacagatggtgtatcaattatctattgctgcataacaaagccaccccaaaacctagtggcttaaaacaagaaccatttatttgctcatgattctacaggctggaggctggactgaggctgaataaatcaatatgcctggccctcacagcagcaacagctgagagctggtaggacctttgtctctagcagagtagcctgacttacaaggggtagctcagagctccaagataaccgaagctaccagacctcttaaagcctgggctcagaagtcccagaaggtcacattccacaaagtcagcccagattcaagggggagggaga

SEQ ID NO: 242142 - DNA, 554 bp, Homo sapiens
ctgatcactgccactccactggttttatttcaggagatttattgtatrctcatgtccctagatgatagcctgggctttggatttatcctgactaatgttcacaatatggaatctcggaggagagaattctggtttctcccagaagactcctgagttccttatgcaaatttgctcacatttccccagtaagtttcgagttaatcatatgcaagctgccagagtaatcaacctgctacagatggtgtatcaattatctattgctgcataacaaagccaccccaaaacctagtggcttaaaacaagaaccatttatttgctcatgattctacaggctggaggctggactgaggctgaataaatcaatatgcctggccctcacagcagcaacagctgagagctggtaggacctttgtctctagcagagtagcctgacttacaaggggtagctcagagctccaagataaccgaagctaccagacctcttaaagcctgggctcagaagtcccagaaggtcacattccacaaagtcagcccagattcaagggggagggaga

SEQ ID NO: 242143 - DNA, 554 bp, Homo sapiens
ctgatcactgccactccactggttttatttcaggagatttattgtatgctcatgtccctagatgatagcctgggctttggatttatcctgactaatgttcacaatatggaatctcggaggagagaattctggtttctcccagaagactcctgagttccttatgcaaatttgctcacatttccccagtaagtttcgagttaatcatatgcaagctgccagagtaatcaacctgctacagatggtgtatcaattatctattgctgcataacaaagccaccccaaaacctagtggcttaaaacaagaaccatttatttgctcatgattctacaggctggaggctggactgaggctgaataaatcaatatgcctggccctcrcagcagcaacagctgagagctggtaggacctttgtctctagcagagtagcctgacttacaaggggtagctcagagctccaagataaccgaagctaccagacctcttaaagcctgggctcagaagtcccagaaggtcacattccacaaagtcagcccagattcaagggggagggaga

SEQ ID NO: 242144 - DNA, 460 bp, Homo sapiens
caagagagcatgtattgttctgtctctcctgtctgtcctaaatcaggccttcctcctactctctttctaccctttcatgctcccgtgtgttggtaaaaattagatatcattgtcctgcccccgatgcaatggaatgctcctccttaccaactcactcagcacagacccagcagccattctaggatcctcatctttcactgccagggaagaggagagagaccctccctcacagaaccttcgtggggtttcctaggctgggaggatccaagattacaattgcttttttttattgtgggaatttgcttataggtctcccagctctgctaccatcatcaccctcctcaccagtatactccatgccaatgtcaggtgaatgcatgttaatatgtgtgttgtatatacccttacatgtatgcaaatgtgccttcttatgstaacaagtgtcaaagactcaacagac

SEQ ID NO: 242145 - DNA, 556 bp, Homo sapiens
agaattctgtgtataaatgttttattgagggagtgaataaagcaggataggacaagggaagaagataggcaaagaaatgggttcagaggaagtctagtctgtctgatcccgtggggagctctgaagtatgaattaccacctaaaatgtatgccacttacacaaaaggatacyagcctcttatatcccactatcagtcaggggtacaacagtcacacttaggggcacttgtaagtgacatgagtctgagtaggagggcatctttgaggcaggctatcccagtctaccctctagccttccaaaattcacttccctcccacatgcaaaatacacttccccctttccaagtttcccaaaagtctcataccattatggcttcagatcaaagttcagaatcccttcatctaaatgaggtctaggtgctcatggggttcctttgagggtagttccttaagcaagctccttgaatacgctacttttgattttaaaaccttcaaactagacagacaagttatcccttcctcccccaacacttgatgttggaacatggataggata

SEQ ID NO: 242146 - DNA, 545 bp, Homo sapiens
aacaagtggaatctctgggatatcagttgataggttacttttctcagttgtcttattggtgattttctgtgttttctattattttgtgcaggaaatatgtcgtacttctgcaayctgaatatcaaataaacccttataaataaaaatgaactctaggctcagagcggcagcaggaggtgaatcccgcaaatgcctgagtgtctcgccacagagaccatgagggtgccgggagcccctggtgggtcagaggtacgccttcagcaggcctcaggtctgtcctgcccctggcccaactgggaccatggctttagtcagcactgggaagggagggcacctcctctcaggtgctgttctcatcccggagtgcccggcccaggcccctccatgctgcattcagtcagtgcaggaactcttcctgtgggcctatcacaataaggtggagatggtaagtgcctgcctgagccagaaggtccccaccatgcaaggacctccatattccttcaccctagtgggcttacctgcctggaatgctactctccctcatt

SEQ ID NO: 242147 - DNA, 572 bp, Homo sapiens
actcattatcatgagaacagcacggggggaaccactctcatgatccaatcacctccctccctcgacttgtggggattacaggtccctccctcaacacgtagggattaccattcgagatgagatttgggtggagacacagagccaaaccatgtcacatatgaaaatgtgcttgacttcattgatcattagagaaatgcaaatcaaaactataatgagatatcatttcattccagttaaaatggcatatatctaaaagataggcaataacaaatgttgatgaggatgtagagaaaagggaacctttgtacacttttggtgggaatgcaaattagtacatccactatggagaacagtttggaggttccttaaaaaactaaaaatcgagctaccatatgatccagcaatcccactgctgggtatayaccaaaaagaaaagaaatcagtatatcaaagagatatctgcacttctatgtttgctgcagcactgtttacgatagctaacatctggaagcaacctaagtgtccatcaagagatgaatggataaagaaaatgcgggacagatacacaatgg

SEQ ID NO: 242148 - DNA, 547 bp, Homo sapiens
gtggcaacacaaacttgcaccagccccctacatctgagccatttgaggtgatttatatgaagatgattgcaggataattcattgagacakgaattcatgctgtatttttccctctgttccaagtgggaagcttctctgtgctcctgcacctctggggagccttgtggtacaggctggggttaaagtctgcttagagacgatgaatttcctggactttgccttccaggagccagagcagcttaatgggatcacgcagtagaggagagggcagagagaaggaaggagccccatccaaaggagcttgtggagttcccctcatgagtagaaccagcagccctcctagggaggtggaggacctccaagagtactggttaccaggatggccaaggataggcctgaatatctggcttccctctaagcccaagcctagaacctgaatttctgtgcaaagatgcaccactcttccaccaacactcccctgcatccttgcagctgttaaggtgaaggggactcagctcactcttggaagctggctgcatcactccaa

SEQ ID NO: 242149 - DNA, 547 bp, Homo sapiens
gtggcaacacaaacttgcaccagccccctacatctgagccatttgaggtgatttatatgaagatgattgcaggataattcattgagacatgaattcatgctgtatttttccctctgttccaagtgggaagcttctctgtgctcctgcacctctggggagccttgtggtacaggctggggttaaagtctgcttagagackatgaatttcctggactttgccttccaggagccagagcagcttaatgggatcacgcagtagaggagagggcagagagaaggaaggagccccatccaaaggagcttgtggagttcccctcatgagtagaaccagcagccctcctagggaggtggaggacctccaagagtactggttaccaggatggccaaggataggcctgaatatctggcttccctctaagcccaagcctagaacctgaatttctgtgcaaagatgcaccactcttccaccaacactcccctgcatccttgcagctgttaaggtgaaggggactcagctcactcttggaagctggctgcatcactccaa

SEQ ID NO: 242150 - DNA, 547 bp, Homo sapiens
gtggcaacacaaacttgcaccagccccctacatctgagccatttgaggtgatttatatgaagatgattgcaggataattcattgagacatgaattcatgctgtatttttccctctgttccaagtgggaagcttctctgtgctcctgcacctctggggagccttgtggtacaggctggggttaaagtctgcttagagacgatgaatttcctggactttgccttccaggagccagagcagcttaatgggatcacgcagtagaggagagggcagagagaagsaaggagccccatccaaaggagcttgtggagttcccctcatgagtagaaccagcagccctcctagggaggtggaggacctccaagagtactggttaccaggatggccaaggataggcctgaatatctggcttccctctaagcccaagcctagaacctgaatttctgtgcaaagatgcaccactcttccaccaacactcccctgcatccttgcagctgttaaggtgaaggggactcagctcactcttggaagctggctgcatcactccaa

SEQ ID NO: 242151 - DNA, 630 bp, Homo sapiens
aagcttttcttgatttctcacaggaatcaaggccagaatcaacctctgatttgtatccctgtagcacattgttaatacccttacatcaatatcatggcacattggaggcactggtctatgttcccatttaacaaaggcttctgtgggtggggatggtttygtattgatcccccagcaccaagcacagggcctacctcataggagagaggctgtgactatttactgaaagtgttcttcaagcacttatgacatgcaaataagtggctctataaaaaggaataagaattgatctgggatttccagggctcatagcctaggactggcttcaaggctgactttgtgatatctgggcacctgtgtcctggaattttccaggaaagttccaattttacatatatttgtcctctgcagtcttaaatccaactccaacagaaagtccaatattatatatgaaaatcatatctgccctttacagtgaaaatagcacaaaatcttatgtaatccaactgctttgatttttcatttatgtaagacagtagttgactacatgggccattcatgtgaaaacttaagaagtggcctagcattttgcatatactcctgggagacttcctgctctcctccacaagc

SEQ ID NO: 242152 - DNA, 466 bp, Homo sapiens
catccagccttccatccatttaatcaatcattcaacaaatttttttttaggacttattcaatctggcstttttcttctaggtgctagggatatggtagtaaaaaactacagtccttatcttttttttttttttagacaggatcttgctctgttgcccaggctggagtgaagtggtacaattttggctcactacaacctctgcctcccaggttcaagcaattcttgtgtctcagcttcccgagtagctgggattacaggcacaggccaccatgtccagctaatttttgtatttttaatagagatggggttttgccatattagccaggctggttttgaactcctgaactctgcccaccttggcctacaaaaatgttgggataacaggcataagccaccgtgcccagccagtccttatcctttcataacttagataatactaaggtgaaccaagagcttggtggcaaaa

SEQ ID NO: 242153 - DNA, 466 bp, Homo sapiens
catccagccttccatccatttaatcaatcattcaacaaatttttttttaggacttattcaatctggcgtttttcttctaggtgctagggatatggtagtaaaaaactacagtccttatcttttttttttttttagacaggatcttgctctgttgcccaggctggagtgaagtggtacaattttggctcactacaacctctgcctcccaggttcaagcaattcttgtgtctcagcttcccgagtagctgggattacaggcacaggccaccatgtccagctaatttttgtatttttaatagagatggggttttgccatattagccaggctggttttgaactcctgaactctgcccaycttggcctacaaaaatgttgggataacaggcataagccaccgtgcccagccagtccttatcctttcataacttagataatactaaggtgaaccaagagcttggtggcaaaa

SEQ ID NO: 242154 - DNA, 551 bp, Homo sapiens
gaatgtgctgcctgcaatgctcatctttctctctaatttcttgaactagcacattcctgctcgttcaaaatttaactcgtgtcatctcaaaatatttgttggttgcctactatgcactaggcactagggttacaaagatgaatgaggcaaccccaacctttcagaactcagaaaatgaaggagacagacacaaattggttgttttaacataatacagggaattattaaatatatggcacaaagtctgtggagggaacatagaaaaggggcttatgatgcaaacctggttgccaagcaggtttcctagaggagattccccagcttaaacagtcagccaagcaaagaacagaggaaggcagcccagagmatgaacacagaaggcacaatcttggaaacagcatgatgtatatgagaagcagcagcaatttcacataactgaagccccagtgcacagtgtatgaggctggagaagaaaggagaggccaagtcttaatgtcatcgggcttaatcttcacagtgggtgaggaactactgatgggtttcctggtgag

SEQ ID NO: 242155 - DNA, 542 bp, Homo sapiens
catttttgtctaatttgcctaacattcttcctgctgtcctattgtaatccttgctagcgatgcttggcttatagttggcactgacacatgtaagctcatgtcccagctctgctgccagtggtatgatactgagcaagtgataacattgtcagttacctcatctacaataaatggggcaatggcatagaccacactgtattgtcatcagataaactgaaataatggatgccagtgcggatcctggcccatcagagatggggaaaatgtaagtcagtttccttttcttacaagcacgctaaatctattcagcctggcactttcccgtcaaggaggagtttcttaaaaattgctaagtggtatggtcgaggtggggktggcggggagaactcagaggagggagatgaagtcataccaacatgcccctgctcacccctttccaaaactcagctatttggactggagtgatttgccacagagagaaacatgccctttgccctgagacaaaggggagcttttcctgaccagcaaaagctaaaatggat

SEQ ID NO: 242156 - DNA, 636 bp, Homo sapiens
actcataatttaggtagctgatttcacatatgttggaaagttctatcaaagtctaagagtttgaactgtttctccttatgaggagttggggaggcatagcttctctctcacactcttgcacactcccttgcatggacttaaggcaggtatgtgcacatcccagtgtttgcaaaggcatggctcctgctctcaggagttgctgtttccgaccctttgtcatcctgaaagcagccctagggatcgtacctccttttctgctttaatgtctatttttcttcctcatgtagctacatttacagagtggccagcagcccaggctcacactgccaagagctggtgtgacagcttatagggaggtgggatgtggcaggccccactaccatggccccatgtgacagatctcagttggctagttctgaatgaggatgctggatgaagacaagccatttggcctttgttcatattgcaaggtaagagtcctttgtcatcaaaatgaagggctcttgggaaaggagktggcctgtgtcaatgagatcctgtttcccattgtctcctagagcagaagatgctactcaagccacaggggaacaatctgcatgcacatcagccaggcggaactgagcatggaggtcagtg

SEQ ID NO: 242157 - DNA, 527 bp, Homo sapiens
cagatctggatgtcaccccgtgggagcagtctgagccaacataggacatgttcctttctgaggtcataactcacaggctgacttagatagtgaaaagtgtttccctaagacaggcaatgtgttttcaaaatgaattgccatctccctgtctgttctgcgtggtattttataactatctatctttgataacaaaatgctacaattaaggtggaatccacatatgcaaacctaacaattttttggcatttcccattcatcttagaacagttgggctgaaagcagatagatgcccctcccccatcccagtgcaggcwtgcacacatgcacacacacactcactcatagaggcactgaacactcactccactcactcccatttcttattagcttttctcctttgatttcatcctgtgatgattttgctttctttgtcccctagaaattatattcgttctctgctaaagcataatagatcatcagacttggagctggaaggcccaggccttagtcctgatataccacttagc

SEQ ID NO: 242158 - DNA, 510 bp, Homo sapiens
tgtacaatgggaggaaagtaagaacaaaaattaaatgcatgaaagtacttagatcaatacctgttacctattacctagtaatcattcagtgaaagctgtcaccagtgctgctgtgtgattgttattgttattttttggtatttccattcccttgatggttgacaataatsagacaaaacaaatttataatatgccaattggcatggatctttctgatcagtcagagattttaaactttatttttaagtaatagcactctttttccctgcaaaataaaatttcacatgaaccctaacattgaaaacatattatatagttttacgttttaatggtacacatttattttataagttcatgtttaacatttgcttattataaaatcttaaaaatttgttgagaaaaacattttaaaacaatggtgatggaaggaagttataatcttcagcctaaaaatcagtggatctctattacatattttatacaaatttattttataagttcatgtttaac

SEQ ID NO: 242159 - DNA, 474 bp, Homo sapiens
tcctcttcctcacttttccagtatccttttatggaattctgatttttctgattttattacaattttagacttttcactttaccttccatgacttttatcctctcttttactctttttaaaatcatttttccctatagaatgaattttggataatttctttagatttatcttttagttcactaattttctcttcaactataggtaatgtgatataaaatgtaatcattggcattttatcaatttatcaattattattttttccttttcaaatatttttaaaatatggctattctctattcatattatyctctattttaaaaacatattaaacatcttatgtgttatacctgataatcctaatatctgcaatatcttgtaggttggttctgctatctgttccactggttttccctcactgtgagttgtttccttgtgtttggttatttttgactatcaattgttaacatgtaaaga

SEQ ID NO: 242160 - DNA, 339 bp, Homo sapiens
gtttctgacaccaaaggaaaaaaaagagaaaaacggtgctgaagaatcagaaaggtgggaacacagaggcacttctattatagcttatctgctgcaagttatacctcttactagctgtgtggcctcagataagtaatgaaatttgattctcagctgtttcatctacaagatgagaataacaacacctacatcatggtacagttgagaggattaaaagggacaaagaatataaaaatattaagtgtcatacccatgtatcttcatcatcttcctccctacttttrgtggataggaagtgaaagatttcaagtaagccattttcaaacaatgacaaatttc

SEQ ID NO: 242161 - DNA, 339 bp, Homo sapiens
gtttctgacaccaaaggaaaaaaaagagaaaaacggtgctgaagaatcagaaaggtgggaacacagaggcacttctattatagcttatctgctgcaagttatacctcttactagctgtgtggcctcagataagtaatgaaatttgattctcagctgtttcatctacaagatgagaataacaacacctacatcatggtacagttgagaggattaaaagggacaaagaatataaaaatattaagtgtcatacccatgtatcttcatcatcttcctccctacttttagtggataggaagtgaragatttcaagtaagccattttcaaacaatgacaaatttc

SEQ ID NO: 242162 - DNA, 549 bp, Homo sapiens
cacgcggaactgcgagtcaattaagcttctttcctttattaattacctagtctcaggtatttctttatagcagtgtaaaaatgggctaatacaactaccataggatgactatagttaacaataatatatcatatagttttaaatagctagaagggagatattgaatattcccaacacaaagaaatgataaatgtttgatgatgaatatgctaattaccttgatcttatcactatatattttgtgtatcaaaacatcactatctacctggaaaatatgtacaattattatatgtcaacttaaaaataacatcaaataacaaagaaataataacatagaaacctagggaaaaactagtattttttttcctttggaggatggcatagttcatattttaagatayagagaagacaaataaaggcttaaaagtatctgttggatttaacaaaggagttattagtgaccttaccaaaaataagttcaattgtataataggaaacctaattgcagtgagcaaggaaagatgaatcaaacatgaacagaggagactt

SEQ ID NO: 242163 - DNA, 465 bp, Homo sapiens
gatcctccatatatcatttttttttaagttattaaaaaaaagcagtggaaagcatttaactggaaagagaccgtctcagagtgcttacactgtaacaaaaagctaaagcacatcacatatatgagtgaaactaaatttcctttctaaataaaaatgttgattcccatcacaaatgaggttattctgaagcatattaactttcccaaacatgaaarcatcaaaatattatttacctatttccatagttgaaagaataaaatagagactactacttttttgccctgtgctttcaaaagcctctttaaattctgtaattagaaaccagatgggccccacctcataaagagattatgttccaaaagtttttaatttagaaatatttaattcaacatggaaaaaataatctattgaaccaaaaatctagctgagctatagtaataaataagtttcatgatttagagaagg

SEQ ID NO: 242164 - DNA, 575 bp, Homo sapiens
aataaattatcttgatttattttttcaaagctcagttgtgggtgcatcactgtttattatataatttacacttacatgtatgcctgaaatatttcattatgaaaacactgttttaaaagtctttttaagcacaagttttttgtttgttttttgttttttttttagttagttctatcrtcttagtgtagatattgctgctgaatcagaatgggagaggcgtattctgtgatggtaataactaccttttatgggccaggtactgtgctagtaattgttgtgcatatctgactcaccctaggggtaggtattaccatctcattttacaaatgaaggaatagggtttcagatattaaatcacttgcccaaagtcccatggcttgtaagtgctagaggtgggatttcattttatattttccaactctaaagcccaaacagtttgtaactcttgtgccgccttagcctccgaagtatgaattttatatactacaatctaattttaaaactggtatagttaaaaatactatgagccaatgctcagtcacatggctagtagggaaaacaggaacctgacaggt

SEQ ID NO: 242165 - DNA, 635 bp, Homo sapiens
aagctctttctggggctggtgagccctgtgacatcatcgacagcagtgatgagatggatgcccaggaggaaagcatccatgagagaactgtctccagaaaaaagaaaagcaagagacacaaaggtatggagcttgttctcttttggtttattagacctgcctgtggtgacaaattgaagatgttactttcccagtagcacaggaggagatataagasgtgataccaggagagtttaaagaaaacttggctctccctaagaaccttggtagtgggccgggatttaatacacctgggctttcttttttcttttgtctgaattcgagagggaaagagattagtacgtgttagtagagttctggagctgtgaactggactctagtagcccttcattgagaacatgttattatcaggtaaaaacccataaggcaatgtgaaaataaaaggcctttgcatttctggatttctgaatgtgtaaggaagcagagatgtaaccaaaaaatgttttccaaagtatgtggattttacgttaactagttttgttacacacaaacatagacattatcgtgggcttttaagtgctctgcaattagtaatgtctgctttatgtctaataagtattgtgggaaatagaaaa

SEQ ID NO: 242166 - DNA, 577 bp, Homo sapiens
aagcttgagttgagccagccctgacaataatatasttgagggacaatggggccagggctatctgtgagtcagttcagcgccacacaatgtatcagctgcttctggcaaagtgtcactccctggtgaaggagacaggcacagagccaggtgtgaatctattttcccaagtggcacacagcagctccagggacttgctaatgcacccagctgttcccatgggaagggctgaaagctatctctggctcactccacagctcacccaggggggcaaatttttgaaggtggggaagaggggcacatgtttgctttagtaatctccacagctgccatggctagggaattcaagtggaggaggaactgcttcctgtggcaaatggggctgagaaacatgcctttctattgtatcagcgctatgtttagaaggaagggcggccctggcccttacgtgcatacacatgtgtacacacagccatactgtgccaagaggactatgggaactgataaagtgggagacaggctcaaggagaagacaggtcattaccttttccagtgtaagtgagcaacccgcttggccccc

SEQ ID NO: 242167 - DNA, 623 bp, Homo sapiens
cattttccagatttgggaacctgatcacagaggggtaaagtctcactgctagtcgtgttgggggcccagagaactggatgcttttgaagggatctgtggctagcagtggaaactcttaagtggggcttttccaagagttttttctctgggaatggcttcctgtagccagaatagatttgtaattttcttattgtagttcagtgggcccagccttgaggcgctttgggagcctagggtgctgagagttcatgaacacttaccgagttttgctgggtgctgatctcagcactttgtgtaggctgactctagacatcctgtgtcccagctgtctgaggtgggtactgttatcattcccattcacagaggttggggaatggaagctcagagagattcaggatcttcccagggtcacctgcatcatcagctgctctggagtctgcctttcaagacaggagcagcccccatcttgctctcaagaaggtttaattttcagaccaggtgtggtggctcacacctataatactagcactttgggaggccgaggtgggcagacagctgaggtcaggagttcaagaccaccctggccaaaatgstgaaatgccatctctactaaaaataaaaaa

SEQ ID NO: 242168 - DNA, 432 bp, Homo sapiens
gaattctaccaaacatttaaagagctaacatgaatcctcaagctgttccaaaaaatttaagaggaggaaacactccctagttcatcctgtgaggctggttttgccctgataccaaagctagcaaagatacaataaggacactacagatcaatatcccttttgaacattcatataaaaatcctcaataaaatactagccaaaagaattaagcagcatcttaaggattatataccgtgatcaagggggatttattcccggatgtaataatggattaacatatgaaaaccaatgtaatacaccacaytaacataacgaaggggaagaaaaccacataattatctcaattgatgcagaaaaagcatttgacaaaattcaacatactttcattataaaaacattccacaacctgggaatagaagaaaattaccacaa

SEQ ID NO: 242169 - DNA, 432 bp, Homo sapiens
gaattctaccaaacatttaaagagctaacatgaatcctcaagctgttccaaaaaatttaagaggaggaaacactccctagttcatcctgtgaggctggttttgccctgataccaaagctagcaaagatacaataaggacactacagatcaatatcccttttgaacattcatataaaaatcctcaataaaatactagccaaaagaattaagcagcatcttaaggattatataccgtgatcaagggggatttattcccggatgtaataatggattaacatatgaaaaccaatgtaatacaccacactaacataacgaaggggaagaaaaccacataattatctcaattgakgcagaaaaagcatttgacaaaattcaacatactttcattataaaaacattccacaacctgggaatagaagaaaattaccacaa

SEQ ID NO: 242170 - DNA, 393 bp, Homo sapiens
cagcccaaatcatgtatcttataagggattagtatccagtttatatagagaactccaaacactcaacagcagcaacaacaacaaaaaaacctgattcaaaaatgggcaaaaggagttgaatagacatttctccaaagaagatatataaatggccaataagcacatgaaaagatgctcaatatcactgatcatcaggggagtgcaaatcaaaaccacaatgagattccatcccacacatattaggatgamtactattaaaaagaaacaggaaataacaagtgctggctaggatgaacaaaagttgaaatccttgtgcactgtttgtggaaatgtaaaatggtgcagctgctgtggaaaactgtatggtggttcctcaaaaaattagaaatagaa

SEQ ID NO: 242171 - DNA, 475 bp, Homo sapiens
ccttcaatttgtaaaacacacaatatctgcaaagcacattttaaagtgaaatgcagtaaagcaagrtatacctgtataattttccatgctgttacctccaacttttttaaagttattagattcaggtgagcctcttattgacaggaaaagctgtatttgttttccaactgagtaagacagtctgtttttggctaatgccaaaatgtagttaatttctgtttttaatagattatatttatatttatggatttgtttatctccaatgtgatttatatcacagcacataccttttatttttatttttattccctcttttattgcctaaaaagattgggattggttgagtttttcttttcttccccattacatttctttttctctctagtttgggcattaaacactatttctagcatttggaattatcctaaaaatttaacacaaatatttttacttaatgtttatagttaatatgatt

SEQ ID NO: 242172 - DNA, 540 bp, Homo sapiens
actggttcactcagtgaccttaaacaagtctattagcctctgttcctagttctccacctgtggagttgagataagaatattcttaatccataggaatagtgttagaattaatggcttgttatgggacttggtggaataagaatctgggccatgtacacgcaggtaatgaaaagcaaagaaaaaatttgcctgtcttttctatccaatttatttttttcaggacaatccagtgttttcaggattataatggagtataatcaatgtacttsctccagaaattctaatactattaagagttcaagaccatgcaaatgacctgtgatcatgcaaaactaagttgattaaacctactgcaacaagataaaaaataatctaaagtgaatcttcatagttctcagaagacatagggcataaaagaatatatgtatatatatatatgcatatctgcataaaaggatatatacacatagggttttgaggtctgtgctcaaacaagcaaatctttcaaggaggacacctttcaaatctttcaaggaggac

SEQ ID NO: 242173 - DNA, 396 bp, Homo sapiens
tttcctcaacttgcacctgtgattcttcttcagagtatgcccttggactactatycctttgcccagaagcccagagaactggtggtgcctgggaagtacattcatcccaggtggctgttaaccaatgactgaatggtgagagagtctcaatcaagggacaggaccactctgaggcataggctaaagctattctgtataggactttgcctaaagccttacttggcttctttctcctccatgccatgcttccccctctccctattgatttttctcaggagtacttccctaatgattcatttgcatggagcttggtgcatggtctacttctagagagcttgatctaagaataccacttaatctccctttcatgtccattttgtttggttacagaaaaag

SEQ ID NO: 242174 - DNA, 626 bp, Homo sapiens
ctccttctttgttctaagcacttagaatagggacactaagggttcagtgaaagcactgaatacctttgtaagctagtcattatcatcctagttttacagatgtaaatgaggctcagagagatgaaataattgaggcaaaggaagataattgattaatagcagaacttgaatgcgatcttctgacttggtatgaatttttccacaccacccttcctcaccttcctctataccatcctccgaatcctatgactgtgtcattatgcctkattttcaagggaaagtcctgtgtatagtgacctcagccacagaaagttagtcacaaacatcttcttgtaggctttttggagaagggaagaatcattgcaaagcctttgtcactactggaaataaaaacagaatcttcctgatcaggcttcctcctcaaatatgaacattaattaacagttttctttccttcttggagaaactgtgcacaactttaagctttcattgaaaacatacctataataagatcaagcatcagtttttatatcatttttatctgtttggtaagcaatctacaatctactgggagggaggggtccagccatgctagaaggaaagtattgtgtctttagggaaggtgt

SEQ ID NO: 242175 - DNA, 583 bp, Homo sapiens
acttgggtgttgtgatagaagttttttgtcactgcacttgtatctgcatcagggtgttacagtaggtagctagtcagacatgagcagagcagaagagggctcccccaaccaccccatacacacacacacccggaatgtcaggcaaccatcaggtgatggtcaggtggttgttaactgtctctctaaaataataattggtaacaaccagcaccagagaaaggcagtcttctaataatctgaaacacctgaaactggtgatcagcmgcttcccaataagatcccaggagttggccaagtaggctcaagcacgtacattaagaggcaaaatggcagagtttaactggtatatgaccttctaagaatattcagctggtaagggaaggatgactcaagtgagaatgcatataactccagtaaacacattgtgcatgcatacctaacaagtgctagcagaccactgcatatgcagacagctcatcccaagagaagaatcaagggagaagagatgcagaccccgtaagtatgccaacatataaaaccccaagtcaaaaggtcaaatggtgcacttgtcctcaagttgccc

SEQ ID NO: 242176 - DNA, 549 bp, Homo sapiens
  misc_feature (1)...(549): n = A,T,C or G
nnnnnnntgaactttacacattcagataagaagttgtgttttacacttgcttttctcctgtaaaattttagtttctttctgtactataaacttccttctgtgaatctggtgaatcatactattccataaagtatgttgccaagaagttgtaccctttattcttatatcacatcacatgccctgtaaatggtttttaacacagcagctattattctgtcaagttgaataattttaggcttacctccatatcttctattcattccacaaatacttaccaagcaataactatataatggtattggctatccaaagataaataggaaaggttgctattttcaaggagcttccakgctctttaggagattataaagtgatataaaaggacagccaagtactgaatggcacttgccatgtagctttcattctctcctggtgccactctttccattatctcccacatccaacttatcagcaagtcctaatggcactgtcccccaaatctttctcagttctgtagctccattctttaaatctttagtccaagccacc

SEQ ID NO: 242177 - DNA, 462 bp, Homo sapiens
tgttctaggctatataaagctcctactatgcaccaggtactctgccagatgctgagaatactaataagataaaagctagttcctctgccccaaggacatggtctattctttagccattttccctgagggaggagtcccattggtcacktaaggcatagagatagttccagactacagaattctgtcctacatttccaaattaccagatgtaagcacagagaagacaatttcacaagctggaaaatcaggcagcttgaaaaggaaaagccaggctgtcatgcttgtgctcatgatgcccttgttattgttccaggtggaaggcagaggaacagcagatgaaggcttttaatatgctggcaattaattctttcacttactttaaattaaaatgttcagcttctcctggtcactcatcaacaacagttaacatcagtgtcttttcagcatttggaaggctctaag

SEQ ID NO: 242178 - DNA, 609 bp, Homo sapiens
tgcctttgaacctgtaaaatcaaaagcaagttagttactttttagatacaatggaggcattgagtaaatacacccattccaaaggggataattgtccaaaacaaaggggctacaggccccatgcaagtcctaaatccaatagggcagtcattaaaccttaaagttccaaaatgatctcctttgactccatgtcttacatccagcatgcactgatacaagaggtgggctcctgcagccttgggcaggtccacctctgtggctttgccaggtacagtccccctcccacttgctttcacgactggagttgagtktctgcagcttttccaggcatatggtgcaagctgtcagcggatctgccattctggggtctagaggatggccctcttctcacagctccactaggcggtgccccagtggggactctatgtgggggctccaacctcacatttcctttccacactgccctagcagaggttctccacagtgaccctgtccctgcagcaaacttctgcctgaacatccaggtgtttccatccatcctctgaaatctaggcagagggtcctatacctcagttctttacttcgtgcacccacaggcccaatgccatg

SEQ ID NO: 242179 - DNA, 547 bp, Homo sapiens
tacacattttaaacatagcattgacatctcatgtcttctactcatattatattctgttccattagacacctaaattattctattataagaaattygcatcaggcagtttaacaactaagatctgcaggctttaattacttcggagatatttgagcaaccaaagaaagtcttactacaaaatggagcttatttaaggggctctaggccctgaaaagaatctgactagcaaatcaggtagttagctttttgcctacagagcccttgatggagtacacacctcacagatgctcccattgtctctcagtctggtatgtgcagttttgtttttctaaacactttccttttcaattacccaaagccccctcagcttcccttacctgattaacttctacttacccttcaggtctcagtttagatactatttcccttgggaaacttttcttgaccttcaagaataaattgaatggaccctagaggactgctttgaaaatttaataaattaataaaaagacggccgggtgcagtggctcacgcctgtattcccagc

SEQ ID NO: 242180 - DNA, 548 bp, Homo sapiens
ttttaaagtggaaagtggtgtggggaaatgggccctagtccttcaagggtattatttcgaggtgatgagcgaggttagggcaaagcctgcatctactacttcttggacctacaagcttaggaatgctgcttgtatatactctcagagtctgagtgccaggcaaaccttgaagctcaatcctttccaattttgttgttgttgttgtgtaagcaataaaaccatgtttcccccaacaaaatmttataaagaactcaacaagtaaaaccattctgaaacatcagaatacatttattttataagcttgaatgtatactatttgttaattgtaaggcttatcaataagatcaataaggctgtttgagaaacagaaactgaaatccaggaatatggataacgatcacagtctttgtcaacatcagcttccatgaaatggaataaaacatttgtgaaaattttgcagtaccactctcatagaatgaagtactaaaactagtgccccaacacccttattttacagatgagaaaattaagggccagagatatcgcat

SEQ ID NO: 242181 - DNA, 622 bp, Homo sapiens
ttacttgtgcacaatataggccaagaatgattttgggaaatgactataggatagtcagcaactgatacagaaaataatgaaacaacagcattctacactcctttagtggcaagtgcctgaaggaatttaagaccttcctaaaagaaatgccacaccttcaaggtaataaaaagatctccttaaacctggaaataaccaagaggttaattaaaatggtgttattataagggagatgtttacaaatctggtctaagatgattttcaacagcaaatgaacatactctaccagcacagaataatactgtcttacaaatgaccaaaagtttctgaacattatcatcttaagaatcacatagtttccagtgtactgactgtagttaaaggccaaacaagacaaattgtatcacatttgggatcaccactccttaacagtaatcccwttcctaaaataacacgttaatgaagaagcccaactgtttctcaatatgaattggttggccacatgaaagaggctaaaaaagatttaaggctaagcactgagaaatccacagaacctcaagcttttataccaaatccaattactttggtcatgtggcacctacaaaatactaagtgctttagc

SEQ ID NO: 242182 - DNA, 474 bp, Homo sapiens
tttcatgaggaagggtaatagttaacagtgttaaatatcctgwtaagttcacagtactgtgtaaggtacataaaaaatggcttgttggtttcaggaattagggagctgtggtgacagcagtagagaagtttcagtaacattaacaaacgagaggagagattgcagttgcatgagaaatgaagatgcagaaaatagaaaaatattttccacagggtgtttgtgaaaaacaaatgaagtattgataatattttgaaaactataaagcattacgtatttgtgaatgttttcaatatgtttttcacagaattcagaggtgtctgtgtttgaagtcaacattcgatttattggaggcctacttgcagcatattacctatcaggagaggaggtgagcaaaatcaagcaatgcattgtttgttttggaggggagggttggaatttaataaaatgaacaatttccctagaagcatattagtt

SEQ ID NO: 242183 - DNA, 487 bp, Homo sapiens
tcatgaggaagggtaatagttaacagtgttaaatatcctgttaagttcacagtactgtgtaaggtacataaaaaatggcttgttggtttcaggaattagggagctgtggtgacagcagtagagaagtttcagtaacattaacaaacgagaggagagattgcagttgcatgagaaatgaagatgcagaaartagaaaaatattttccacagggtgtttgtgaaaaacaaatgaagtattgataatattttgaaaactataaagcattacgtatttgtgaatgttttcaatatgtttttcacagaattcagaggtgtctgtgtttgaagtcaacattcgatttattggaggcctacttgcagcatattacctatcaggagaggaggtgagcaaaatcaagcaatgcattgtttgttttggaggggagggttggaatttaataaaatgaacaatttccctagaagcatattagttttctaaattggtaat

SEQ ID NO: 242184 - DNA, 588 bp, Homo sapiens
gatcttgtttaagaaacctttcctaatccagaattcataaagatattttcctatgttatctgccagaagctttattgttttactttttccattcaatctataatccacctaagaatgatttttgtatataatgtgaggtaagtttactaaccaacttttgaaggattcttttatcttttggagaagctgamcttctgctgtcctggttttactcctaaatttgaggctaatcaaggtggtaggtctcccaaactcctaacaggtaagtgatctaccagatcatcaaaatatcataaagaatatatacatataatacaatttatacatacagtatgtatgtacattcatacatagtcataattatctaccaagaatagaaagaggtatccctttacaaggagaaagagatataatggttaagtgtgactatgtttttgagacaaggcagaagataagaaatctgaaggactggttatcaacagagaaattagggatctatttatttatttatttattgagaccaagtctctcgctctgttgcccaggctggagtgcaatggcactatctcggctcactgcaacctccac

SEQ ID NO: 242185 - DNA, 586 bp, Homo sapiens
ttactgatttaatcttgttacttgttacctaccctcttcatgttaaatggcttaacgtatgktcagtcctggtgcatgtttcaagtgctaatgtgttgtgggaagtcagggaccctgaacagagggactagctgaagccacagcagaagaacataaattgtgaagatttcatggatgtttattagttccccaaattaatacttttataatttcttatgcctgtctttactgcaatctccgaacataaattgtgaagatttcatggatatttatcacttccccaatcaatactcttataatttcctatgcctgcctttactttaatttcttaatcccatcatcttcataagctgaggatgtatgttgcctcaggaccctgtgatgcttgtgttatccatacaaattgtttgtaaaacatgtgtgtttgaacaataggaaatctgggcaccttgaaaaagaacaagataacagtgattctcagggaacaagggagataaccataaggtctgactgcctgtggggctgggcagaacagagtcatatttctcttcttgcagaaagcgaataggagaaatatcactgaatt

SEQ ID NO: 242186 - DNA, 556 bp, Homo sapiens
ggctagaagccaaagaaatttatgtccacatcattcagagtcaggaaaatgttaaatccttcttgaccagtctttagttataaagaaatactatacataattaattatttataagaatgttaccttaaatatggtatcttcacagaaatatacattagacaaggttatgtattgatcagttgatagaaattttgtgactagaggcttgcaggagcctaaatttgtatttcctttaggaacaatgtttcagtatttgctaattcagtgtttgcaacaattttatagaacaaaactactacagaaagttgaattgactttacttactatgagccagcattgttcctggtgctagaaatacaaaataaataaaacagataatcccttcctcttgtgggtcttattgtttagtgagggagctatatatttatatgtaaaagatgaatcaatacataagcactgtacaaaaaggtaaatcagggtgagaggacagagagtggcaggggctgctacgtaygatggaagggctagataagagttctctaaggatggagcatat

SEQ ID NO: 242187 - DNA, 555 bp, Homo sapiens
cagcctgaaagtgggcttgcttcagtctgggtgcattcaaatcggtcagttctcagtctcctagacactggccccctggaggaaactgaggcggcttggtagccatctgattattatttctgtgaccaggaagccaggtaagagtcagttggattttgcttccattaatgtttccctgttgtgaaaaacaaaaggtaaaagtttttaataatgtctcccttcaagtcatatgagattctcaccggggtgaatttctttttctttctttctttctttctttctttctttctttctttctttctttctttctttctttctttctttctttcttctttctttctttctttcyttctttctttcttcttttttctttctttctttctttctttctttctttctttcttctctctccctctctctctctctctctctctctctctgactctctctttttctcactctctatctttcttgatctggatcaagaattagcccaggagagtgaggattttgacccaattaaatccattcagttggaacaactaatattaagcc

SEQ ID NO: 242188 - DNA, 616 bp, Homo sapiens
actctaaatagactgtgagaccttaaggatatatataatgcaaagaggtagagttaaaagaaatcaaatagatatattaaggtagaagtctaaaacaatattcaaataatccataagaaggcaggaaggaagaacagaggaaccaaaaccagaagygacaaaaataaataaataataaaatagtagaacaacatacattcatattggtaatcacaaaacatattaatgaaatacatgtttcaattaaaatgtagagattgtcaaaatgaataagactataaaacccaactaaacactgcctgaaaaagatgcatttaaaatataaatacacagaaatgtggaaaggaaatggttaaaaaattttataccatgtaaatagtaattgtaaaatagctgaaatagctggacattaatatcagataaaatagacttaaagatgaaaaatattaacagagatcataatcacttcaaaatgatgaaaagttcaattcatcaggaagacatacattataaatcaaaatacataaataaaaactgacaaaatggaagagaaaataggcaatgtcaatatcataattggagttttaataccactctcttgacaaccgaactacac

SEQ ID NO: 242189 - DNA, 556 bp, Homo sapiens
catcctcaaacatggcaagccacaaatgcattgtgttaagcaccatccaaagaaaagaggggtgggtgttatgggcaccaagacagaaaatcttggaataggatcaggcrtctcacgctgtaacaaagggttgtcaattcttgtcaatttcagaaagcaaagcccctgcttccatggtgagggaagcagtaaaggaaaaaggaaatgaattggcttattaaatatcacctagttttccgcttcgagtctatctagaaaattgcaatttccctgctttttgtctgatatttcaaatcatggaaaatacaatcttattaggcagtttagatccacggatcaaggaaatattataattaacaaagcaaatattaaaaacaataatagccgctgagtccttaagcttttatttagcttgccaaccacatcacagccaagtctacttgtagactacctccatgtcttttagattattctgaagttaacaatgagggccttaaaaaaaattagtcatctatattctcatattcccacacagtaaatggtcactcataggaag

SEQ ID NO: 242190 - DNA, 556 bp, Homo sapiens
catcctcaaacatggcaagccacaaatgcattgtgttaagcaccatccaaagaaaagaggggtgggtgttatgggcaccaagacagaaaatcttggaataggatcaggcgtctcacgctgtaacaaagggttgtcaattcttgtcaatttcagaaagcaaagcccctgcttccatggtgagggaagcagtaaaggaaaaaggaaatgaattggcttattaaatatcacctagttttccgcttcgagtctatctagaaaattgcaatttccctgctttttgtctgatatttcaaatcatggaaaatacaatcttattaggcagtttagatccacggatcaaggaaatattataattaacaaagcaaatattmaaaacaataatagccgctgagtccttaagcttttatttagcttgccaaccacatcacagccaagtctacttgtagactacctccatgtcttttagattattctgaagttaacaatgagggccttaaaaaaaattagtcatctatattctcatattcccacacagtaaatggtcactcataggaag

SEQ ID NO: 242191 - DNA, 492 bp, Homo sapiens
ataggacagatgaaaacccaggctcacaggctcagtaccttcacaactagagaacaactgaaccaaagcctttttaacttttcccactaggctatatcaaataacagctttaatgtagatcagctaacaatcagttaaaataaatgtctgaaaacataacatgtatatactttgagaacagtcataaaaaacacttgttttatgttacaggaagctttgaaattaggaaaaatcaagaaaggtaaacattgtctaatggttgataaagcagttatgaagtgcttttaagatcttttttcttctctctattcttgcctctgggaacctcatctatttctttacaaagygtagtgtttctccaaaattctagtgccacatttccatcgatttgttatatctctccattttgatgtcccaccaactcttctaggcctccagacgcccagtttctctagacttccttgctcccataaatggagttatcatttattc

SEQ ID NO: 242192 - DNA, 589 bp, Homo sapiens
tgattggaaggagggtgatatagagaatgtgtagtgcaagaaggatgagaaggtaaagaggagcaggtgtatgcaacaaggaagacgatcatatgaggaagatgcaaggattcatcactgcatggcagatttctggctgggatgactggcagaacccaattgtggcataaaatactataggaaaaggacatttttttctctttcttggaraggatgttatgttgaatttcatgttgaacaaccagatggatggtgattatataattctgagtctgatggagagattttagctacagatggagatttgagaatgatcaatagacagataataattaaaacctaaccagcaatgactgcctaagtatgtgtaaaatgagaacataagagtgctaaagaataaaataagtaaggggacagttactaaggaactaagaagaagaagaagcctgaaaactaaagaaaaccagaggaggagatcattatggaaatcacgtaagaaaaggatttctgaagaccacatgagtatgagaagttaacttttcccatatggcaggggctgaaaaatctttattgtgatatttacaattta

SEQ ID NO: 242193 - DNA, 626 bp, Homo sapiens
aggatgttatgttgaatttcatgttgaacaaccagatggatggtgattatataattctgagtctgatggagagattttagctacagatggagatttgagaatgatcaatagacagataataattaaaacctaaccagcaatgactgcctaagtatgtgtaaaatgagaacataagagtgctaaagaataaaataagtaaggggacagttactaaggaactaagaagaagaagaagcctgaaaactaaagaaaaccagaggaggagatcattatggaaatcacrtaagaaaaggatttctgaagaccacatgagtatgagaagttaacttttcccatatggcaggggctgaaaaatctttattgtgatatttacaatttaggtgataggtgatcttgacaagagccactgagaggaatcagagagtggaagtaacaaagctgtcttttatttcaaggccagctctagatagtgtaatattttctatttattattctgaatcaaattttcccttcacataggtgggtaagtgtctggggaggaaggaagtgcagattttatgagtttcaatgaagaactatggtaaacattttattttgtttctacaaatatttatcaagcatctgct

SEQ ID NO: 242194 - DNA, 626 bp, Homo sapiens
aggatgttatgttgaatttcatgttgaacaaccagatggatggtgattatataattctgagtctgatggagagattttagctacagatggagatttgagaatgatcaatagacagataataattaaaacctaaccagcaatgactgcctaagtatgtgtaaaatgagaacataagagtgctaaagaataaaataagtaaggggacagttactaaggaactaagaagaagaagaagcctgaaaactaaagaaaaccagaggaggagatcattatggaaatcacgtaagaaaaggatttctgaagaccacatgagtatgagaagttaacttttcccatatggcaggggctgaaaaatctttattgtgatatttacaatttaggtgataggtgatcttgacaagagccactgagaggaatcagagagtggaagtaacaaagctgtcttttatttcaaggccagctctagatagtgtaatattttctatttattattctgaatcaaattttcccttcacataggtgggtaagtgtctggggaggaaggaagtgcarattttatgagtttcaatgaagaactatggtaaacattttattttgtttctacaaatatttatcaagcatctgct

SEQ ID NO: 242195 - DNA, 596 bp, Homo sapiens
tgtttggctagctggtataatcgtctaataagcaccctcgaaaccactactaaacataaaagctagttcatacaatatttacatataaacagtataacccctcatcacaaaccctgactctcctgacccagaagtaatcattaatttgaatcccatgttcattgtccccttgctttctttttattgttattttattacatctataagtattcctagagatttatttttaattgtttattttcataaaaataatttcatgaacatttacccctacatcacaccatacacaaaaatcaattcaaaatgcatcttattttgagctaaataaaaattttaaaacagcatatcaaaatttgttggatgcagctaatataataatatgagggaaatttatagcagtacatgcttatattagaaaaaaagaaaaaggtctaaaatcaatgacctcagtttcaccttaagaggctagaaaaggaacagtaaagaaaactcaaggctgtgtgtggtggatcacaccwgtaatcccagcactttggaaggctgaggcagggggatcacgaggtcaggagtttaagaccagcctggccaacatagtg

SEQ ID NO: 242196 - DNA, 610 bp, Homo sapiens
tgacctgtcttgcttgtttctaatagttttccaagttttttcaaaaatatttttgtctttgttttcttttaaaaaattaaaatgacaataaaactgtctcaaatagaacaaacacactgtagactaacaaatggtatcacgactgtgcctaaaataacaacacatgaccactgaaacctgtgcagggttgggaagatttgatatrctagtactcttaggagtcatgattactaattttaaagtgagtaaatttaaaattcataggtatagaagcatgtgagtgagtgtgtgaatgtatctctgtgtgtgtatgtacacgcatgtgtgtgggtgtaatatacatatttttatataaaatggaatatttttatgtaaaaataaacaaggacattccccctcaattaaactctgatttctctttttgatatgcttgcccattgttttccatggttcttggctgtaacttctttgtttatcattttccttggttatatctgaagtcagtgttgcagaggttgccttttctgggaatagaagagtttgtatgacctgcttactgctggagcaagcttgggagccagtagtttgttttggtctaggttcatgtttt

SEQ ID NO: 242197 - DNA, 402 bp, Homo sapiens
gcttaattaaaagccagtattcaagctctaacagcctgggattccttgagaaaaacagaggagatgccacagaccccatgttgggaaaaacctctgttttcctyatggaactcaagaaattaaaagtggataaatccctctcaaaatctaaggctctgttctgttttgcattgcattatcttacattttttacttttgagagtatcagaaactattttgcattatgagagaactttggtgtgtaaaaactaactaggtaggaaatatacttttagcaatggctgttggcagttacggggggatacttggctcttttcacatgtggctcagagaagcatgctctttgccaccggaaggtatggagatatcaccaccctccactgaggataaaactcccatcaa

SEQ ID NO: 242198 - DNA, 402 bp, Homo sapiens
gcttaattaaaagccagtattcaagctctaacagcctgggattccttgagaaaaacagaggagatgccacagaccccatgttgggaaaaacctctgttttcctcatggaactcaagaaattaaaagtggataaatccctctcaaaatctaaggctctgttctgttttgcattgcattatcttacattttttacttttgrgagtatcagaaactattttgcattatgagagaactttggtgtgtaaaaactaactaggtaggaaatatacttttagcaatggctgttggcagttacggggggatacttggctcttttcacatgtggctcagagaagcatgctctttgccaccggaaggtatggagatatcaccaccctccactgaggataaaactcccatcaa

SEQ ID NO: 242199 - DNA, 529 bp, Homo sapiens
gctcataattctggaggctggaaattccaagaagatggcactggtactgctaggcttccagtgaaggccctgtgctatatcacaacgtggcagaaaagcagaaatggaagcrgatccacagcagaaactcagaataggcttattaaaacattgtcaaaatagctaggctattagtctagctcctgagtcccccctcttccagtgggggtgcacacttagaatttgtgtcatcttaattgcatcttgcaccatcccccttgcttaaatcctcagaaaatttctatagcacttctttcaagcatgaaggaaaaggattctgtactgctaaaagagggcagaattctccctcccccatctcatggccgagtatctaagcttagaaatgggaggaatttagtacacaccaactgagagagataggctaggaggagtggattaatcactggctcttttatgattgttttgtctttaattgtgtgttatttataacatactcattggggaaagtattgtaccttatagaaacctg

SEQ ID NO: 242200 - DNA, 568 bp, Homo sapiens
agcggtgaatttctttgatcacatctcacatatgttacgatctaaggctacttggaacacctgtagtggcacaataatatgctaattagcctggggttctgcgattttctatacaagaagaagaggtattcttttaaaacttaattaataattccttggctcaaactccttctcttgtcacttaggtaattctaatttttttacctggaaggtcctatataatctatgatgcctcccaaagtctctaatctcatcttctaccactttctcttttggttattcaaattcagcaactgatacttgatattcctcaactrctgacacttgatattcctcaaatccactgagcacacatacacttcaaggtctttgtatttgctcttcctttaggctctaatgctttctgccgagaccagctcagctggggagaccctaacccagtggcactagaggaattaaagacacacacacagaaatatagaggtgtgaagtgggaaatcaggggtctcacagcctttagagctgagagccccaaacagagatttacccacatatttgttaacagcaa

SEQ ID NO: 242201 - DNA, 568 bp, Homo sapiens
agcggtgaatttctttgatcacatctcacatatgttacgatctaaggctacttggaacacctgtagtggcacaataatatgctaattagcctggggttctgcgattttctatacaagaagaagaggtattcttttaaaacttaattaataattccttggctcaaactccttctcttgtcacttaggtaattctaatttttttacctggaaggtcctatataatctatgatgcctcccaaagtctctaatctcatcttctaccactttctcttttggttattcaaattcagcaactgatacttgatattcctcaactactgacacttgatattcctcaaatccactgagcacacatacacttcaaggtctttgtatttgctcttcctttaggctctaatgctttctgccgagaccagctcagctggggagaccctaacccagtggcactagargaattaaagacacacacacagaaatatagaggtgtgaagtgggaaatcaggggtctcacagcctttagagctgagagccccaaacagagatttacccacatatttgttaacagcaa

SEQ ID NO: 242202 - DNA, 395 bp, Homo sapiens
cctggcccccacccctgaggaccctttgccctggttctaccctgcctctgggccttgacctgtgccctcttcttccacagctgtgattgtgggcggggtggtgggygccctctttgctgccttcttggtcacactgctcatctatcgtatgaagaaaaaggatgagggcagctacacgctggaggaacccaagcaggcgagcgtcacataccagaagcctgacaagcaggaggagttctatgcctagtggagccacagtgcctccctgcagcctcaacaccaccctgctgtccagtccccagcctggccccaccagcccaagcctgggactgggcctggaacctggccccagttcttctctgccctctctcccaaggtctgcccaggctgccagc

SEQ ID NO: 242203 - DNA, 652 bp, Homo sapiens
taacacacagtcttaaaataagaaaactaatttggacttgaagagctcaaaagaactagtgagatctcccagtccactttytctcctcagagccaaaaatatatctttatttggattagaattatatggattttgcatgcctatgtaccttcagccctagcatggtgcctagagcctcatggatttaaaagaaaaaaaagctaaacgaacgaaagaaactaatgagatgatattagaagaagagagagaaatagaggggctcataatcaaataagtttcccaaaacacctccactcccaattgcacattaaccatacttagaatattacaatctcctagaagtcctctggtaagtaataataacagtaaaaataacatttgattgagtgcagccattcttttgctggcaataggaaataaaataatgcccatatcaaggcccatataggccttgattcatctggtcccccactgtattagttcattttcacactgctataaagaaccacctgagactgggtaatttagaaagaaaagaggtttaattgattcacagttccacatatctggggaggcctcaggaaacttacaatgacagaaggcaaaggggaagtaaggcatatcttacgtggcagcaggagagagagagaga

SEQ ID NO: 242204 - DNA, 652 bp, Homo sapiens
taacacacagtcttaaaataagaaaactaatttggacttgaagagctcaaaagaactagtgagatctcccagtccactttctctcctcagagccaaaaatatatctttatttggattagaattatatggattttgcatgcctatgtaccttcagccctagcrtggtgcctagagcctcatggatttaaaagaaaaaaaagctaaacgaacgaaagaaactaatgagatgatattagaagaagagagagaaatagaggggctcataatcaaataagtttcccaaaacacctccactcccaattgcacattaaccatacttagaatattacaatctcctagaagtcctctggtaagtaataataacagtaaaaataacatttgattgagtgcagccattcttttgctggcaataggaaataaaataatgcccatatcaaggcccatataggccttgattcatctggtcccccactgtattagttcattttcacactgctataaagaaccacctgagactgggtaatttagaaagaaaagaggtttaattgattcacagttccacatatctggggaggcctcaggaaacttacaatgacagaaggcaaaggggaagtaaggcatatcttacgtggcagcaggagagagagagaga

SEQ ID NO: 242205 - DNA, 652 bp, Homo sapiens
taacacacagtcttaaaataagaaaactaatttggacttgaagagctcaaaagaactagtgagatctcccagtccactttctctcctcagagccaaaaatatatctttatttggattagaattatatggattttgcatgcctatgtaccttcagccctagcatggtgcctagagcctcatggatttaaaagaaaaaaaagctaaacgaacgaaagaaactaatgagatgatattagaagaagagagagaaatagaggggctcataatcaaataagtttcccaaaacacctccactcccaattgcacattaaccatacttagaatattacaatctcctagaagtcctctggtaagtaataataacagtaaaaataacatttgattgagtscagccattcttttgctggcaataggaaataaaataatgcccatatcaaggcccatataggccttgattcatctggtcccccactgtattagttcattttcacactgctataaagaaccacctgagactgggtaatttagaaagaaaagaggtttaattgattcacagttccacatatctggggaggcctcaggaaacttacaatgacagaaggcaaaggggaagtaaggcatatcttacgtggcagcaggagagagagagaga

SEQ ID NO: 242206 - DNA, 652 bp, Homo sapiens
taacacacagtcttaaaataagaaaactaatttggacttgaagagctcaaaagaactagtgagatctcccagtccactttctctcctcagagccaaaaatatatctttatttggattagaattatatggattttgcatgcctatgtaccttcagccctagcatggtgcctagagcctcatggatttaaaagaaaaaaaagctaaacgaacgaaagaaactaatgagatgatattagaagaagagagagaaatagaggggctcataatcaaataagtttcccaaaacacctccactcccaattgcacattaaccatacttagaatattacaatctcctagaagtcctctggtaagtaataataacagtaaaaataacatttgattgagtgcagccattcttttgctggcaataggaaataaaataatgcccatatcaaggcccatatmggccttgattcatctggtcccccactgtattagttcattttcacactgctataaagaaccacctgagactgggtaatttagaaagaaaagaggtttaattgattcacagttccacatatctggggaggcctcaggaaacttacaatgacagaaggcaaaggggaagtaaggcatatcttacgtggcagcaggagagagagagaga

SEQ ID NO: 242207 - DNA, 365 bp, Homo sapiens
ttatgtctagcctcagtttaaatgcaggttatttttaaactatagtaaataacaatttaaaaataacctgaatttaaactgagacaagactcacatctgcatcagtggattcggtgttttggcagagcctatgaatttcttcctgacatctgtttctcccwttcttagtaatagaattcctgatttttagctagccacatggacatctggaataaatgttacatttcatggcctaagtaccctgtttactagcagagaaacgaatgttgaacctctaatataacaccataacttggagaaaacacctacctcccggtaaaatgtcgcttacgtgtatttttctttttttgataatagaataagta

SEQ ID NO: 242208 - DNA, 547 bp, Homo sapiens
gttgtgagtattcgaatgaatccatcctggggaaatttttctttacttgtggacttattaacctcaagaaacaaattatcttttccccaaaatacaataatgagatcagcatraaatcacagttgtaaacattcattcaaaaggggagaaaattgaaggaaaagtaattcactggttccaaacaattttaaaatctagtcaggcatcaggtttcaaggccaggggaaaaatcttttgtggcttgtggctctgtcctctaagattgcattgaatctacagattaacaaggtaaaatttgacatgacatctttactatatttacttctttattttctttcaataattttcagttttccaggtagaggccttgcacatattttgttagatttatttcttggtgtgtggtgggttttaattcaattataagtaatatattttaacatttttatttcctaggtattgcagttacagaaataaacaattttgctttcatagtgaccagtgtgcttaataaacttacttaacaaatctagtagtttttctgtag

SEQ ID NO: 242209 - DNA, 622 bp, Homo sapiens
tcagtttctgttctcttatctggaaaatgaagctgttacttgccatgtatatttgagagttgatgtgaaggttgatttgacacggctttgtgaactctcagcgctttgttaactcaaaagaagtttacacaaaggtattggctataatgaatggccatctttcttcaaataatgatttttaaacataacagtagtatgaagtgccagaggactttataaagttttagtcccaaggactctaacgcagctccagcagaaggtccaaatacttcatatggtctataaaaagaaaaaaaaatcctagattttcttgaaataaacaaaagcaataggcaagttcaaacattatcaataatttacatgaattttctcaggatatatgtctttaatgttaaaataaaagtttcaaacatctcaatctgcatagaattgagaagcatrtagcaaactatctttaccttaagtcaaaaccacaaaaacttccatctgttggatatcatccatgattacgctctttcctataatttctgatatagggttccagaaatttgggaatatcaactggaaatgagcactatgtaaaatgctactactctggacagcttttgtcattctgtgaaag

SEQ ID NO: 242210 - DNA, 493 bp, Homo sapiens
atgtccacatcatgcacagggaggaaaaactcaggcagaacctggtagactgtctggattctatcgatgcagctgagaatctggaaaggacaaggtagctagagatcacagaacaaactactgagggagagactgctgcagagagcaagaaggccagagaattacagaagatttcccttgtgtattcagcagaatactgattagctcatgtgygtgaggaaattatccaatgttggagaaaaacaatccaaaaggattacatggaatatccaatgctcacagggggttttgaaaatagcccctgtttctgtcaggcaaactagaaaacctcataattcacagggcatcatacaggatagtcaggagtgtgcacatagaatactcagtagtggacataattagctctacgtattaggtgggacatagctctgaagtaatctaacaaattttgaaagtgaaaccctagagtactgaacagtttccaaataattta

SEQ ID NO: 242211 - DNA, 493 bp, Homo sapiens
atgtccacatcatgcacagggaggaaaaactcaggcagaacctggtagactgtctggattctatcgatgcagctgagaatctggaaaggacaaggtagctagagatcacagaacaaactactgagggagagactgctgcagagagcaagaaggccagagaattacagaagatttcccttgtgtattcagcagaatactgattagctcatgtgcgtgaggaaattatccaatgttggagaaaaacaatccaaaaggattacatggaatatccaatgctcacrgggggttttgaaaatagcccctgtttctgtcaggcaaactagaaaacctcataattcacagggcatcatacaggatagtcaggagtgtgcacatagaatactcagtagtggacataattagctctacgtattaggtgggacatagctctgaagtaatctaacaaattttgaaagtgaaaccctagagtactgaacagtttccaaataattta

SEQ ID NO: 242212 - DNA, 493 bp, Homo sapiens
atgtccacatcatgcacagggaggaaaaactcaggcagaacctggtagactgtctggattctatcgatgcagctgagaatctggaaaggacaaggtagctagagatcacagaacaaactactgagggagagactgctgcagagagcaagaaggccagagaattacagaagatttcccttgtgtattcagcagaatactgattagctcatgtgcgtgaggaaattatccaatgttggagaaaaacaatccaaaaggattacatggaatatccaatgctcacagggggtkttgaaaatagcccctgtttctgtcaggcaaactagaaaacctcataattcacagggcatcatacaggatagtcaggagtgtgcacatagaatactcagtagtggacataattagctctacgtattaggtgggacatagctctgaagtaatctaacaaattttgaaagtgaaaccctagagtactgaacagtttccaaataattta

SEQ ID NO: 242213 - DNA, 620 bp, Homo sapiens
ctttggtgaagggtctattcaaacattttaatcatttatattgcgttgtttgttttcttgttgaacrtagagagttttgagtatattctagaaatgagttctttatcagatacataatttgcaaatgttttctttcagtccatggcttgtcttttcattctctttactagtgacttttgaaatagtgatttttttctatgaacactaatttatctttttttctggaatgtacttttgataacatatctaagaaatatgtgcataattcaaagtaaatttttttctctttttttctgaaagtgttagggttttaggttttacatttagatctatgatccattttgaattgagttttgtatatgatattacaaagcagtgatcaaagttcaattttcttctttttacatatagacgtccaatatttgcagaaatatgttttgaaatgattatcctttctctactgaatttcttttgcacttgtgtccaaaaaggatttccatatacatgtgggtctatttctggacactgttttacaccattgttctatttatctgtctaaagccagtactacacttattttagctttataatgagccttaaaatcagagtgtattagttcc

SEQ ID NO: 242214 - DNA, 620 bp, Homo sapiens
ctttggtgaagggtctattcaaacattttaatcatttatattgcgttgtttgttttcttgttgaacgtagagagttttgagtatattctagaaatgagttctttatcagatacataatttgcaaatgttttctttcagtccatggcttgtcttttcattctctttactagtgacttttgaaatagtgatttttttytatgaacactaatttatctttttttctggaatgtacttttgataacatatctaagaaatatgtgcataattcaaagtaaatttttttctctttttttctgaaagtgttagggttttaggttttacatttagatctatgatccattttgaattgagttttgtatatgatattacaaagcagtgatcaaagttcaattttcttctttttacatatagacgtccaatatttgcagaaatatgttttgaaatgattatcctttctctactgaatttcttttgcacttgtgtccaaaaaggatttccatatacatgtgggtctatttctggacactgttttacaccattgttctatttatctgtctaaagccagtactacacttattttagctttataatgagccttaaaatcagagtgtattagttcc

SEQ ID NO: 242215 - DNA, 535 bp, Homo sapiens
gccagtactacacttattttagctttataatgagccttaaaatcagagtgtattagttcccctattttgttcattcctctttcaaagttgtttggatttttctcgttcatttgamttcccatataaactttagcatgagatgatgtcaagtttgacataaacaacaacaacaacaacaaaaagaacaacctgctgggtctttcactggtatcacacataattaaattaggggaaattaacatcttaacaataaagagtctttttaacccataaaaacagtatataacttcatttgtttaggccttccttaatttctctatactgttctgaaagtttcattgttcagatcttgcacatattttgtccgatttatgtttaagtattttatattagggcaaatgacatttaaacattttttgattatttattcctaagatataaaaatagaattaatttttatattgattttgtaccctgaagccttgctaaactcatttattaattctgttagcttttctgtagtcttttaaatttt

SEQ ID NO: 242216 - DNA, 535 bp, Homo sapiens
gccagtactacacttattttagctttataatgagccttaaaatcagagtgtattagttcccctattttgttcattcctctttcaaagttgtttggatttttctcgttcatttgacttcccatataaactttagcatgagatgatgtcaagtttgacataaacaacaacaacaacaacaaaaagaacaacctgctgggtytttcactggtatcacacataattaaattaggggaaattaacatcttaacaataaagagtctttttaacccataaaaacagtatataacttcatttgtttaggccttccttaatttctctatactgttctgaaagtttcattgttcagatcttgcacatattttgtccgatttatgtttaagtattttatattagggcaaatgacatttaaacattttttgattatttattcctaagatataaaaatagaattaatttttatattgattttgtaccctgaagccttgctaaactcatttattaattctgttagcttttctgtagtcttttaaatttt

SEQ ID NO: 242217 - DNA, 549 bp, Homo sapiens
agaaataaaaggcatctaaataggaaaagaagatgttgaactctcttcactgacaatatgattgtatacctagaaaaccctaaagattctgccaaaaggcccgtagaactaataagtgacttcagtaaagtttcaggatacaaaatacatgtaataaaaatcagtagcatttctatacaccaataacattctaggtgagtgccaaatcaagaacacaattccattcacaatagccaccaaaatatgaaatacctagaaatacaactaaccgaggaggtgaaacatctctttaaggggaactacaaaacactgctgaaaaaaaaaatcagagatgacacaaataaatggaaaaatgytccatgctcatggattggaaaaatcagtattattaaaatggccatactgcctaaagcaatttacagttttaatgctatttgtatcaaactaccaacattatttttcactgaattagaaaaagccattctaaaatttatatgaaaccaaaaaggagcccaaatagccaaaggaattctaagcaaaaagaacaaa

SEQ ID NO: 242218 - DNA, 549 bp, Homo sapiens
agaaataaaaggcatctaaataggaaaagaagatgttgaactctcttcactgacaatatgattgtatacctagaaaaccctaaagattctgccaaaaggcccgtagaactaataagtgacttcagtaaagtttcaggatacaaaatacatgtaataaaaatcagtagcatttctatacaccaataacattctaggtgagtgccaaatcaagaacacaattccattcacaatagccaccaaaatatgaaatacctagaaatacaactaaccgaggaggtgaaacatctctttaaggggaactacaaaacactgctgaaaaaaaaaatcagagatgacacaaataaatggaaaaatgttccatgctcatggattggaaaaatcagtattattaaaatggccatactgcctaaagcaatttacagttttaatgctatttgtatcaaactaccaacattatttttcactgaattagaaaaagccattctaaaatttatatgaaaccaaaaaggagcccraatagccaaaggaattctaagcaaaaagaacaaa

SEQ ID NO: 242219 - DNA, 601 bp, Homo sapiens
agaattcccaaagcaacaagccccccagcacccttgactgtctcttcggaggggaaaaaacaaatgattgaacagttgccggagactcaggcagccaaggggtcgacagaagccaagaaggccagctgcaggctgcaggctcagcacttggccagcrcacacagacgctgttcattctcagggcccacctgtcagccaagctgtgcaggtgttagctgaacagtgcttttgcctctctggcccttccatgattcctaaagagaaaggactgtgaaagaaggacgagaacacccatctggaatcacagactttctgaacttttaacccagaagaatccttaaagatccatctaccttacctcccccaccttccttcatttcagaagaaaatggtgccctgcaaagatcacaagatttgcctgggattaccaaaggtagaagtcagaatttttcctggacctctcaaccccagccacttattgagcactgtaggagacagtcaagcaagggaggagatacagtctgtcttcaaagatgtcctaacatggttcaatgtgaagggcctggcatacaatgcatgctcaaaaaatgatagtgcctac

SEQ ID NO: 242220 - DNA, 575 bp, Homo sapiens
cacagcccttttcctgccttgaggagaagtaagtgggacaatgacatagatcaggagaatgaagaaggtgggggcgatgggtcacctgggggcataaaaggccattgcttttgggaaggtggcccaagcagagttgtgagaacctgtgtaagtgcttcaaagagcagcctcaccaggagggcctgcaggaaaagcaaacactgcagcaaagttttttgttgttattgctgctgtttttataaatctctgaactattctactttgttgttaaaaaygactaaattaagcttttaaaagtaaaatatacccaaatgaaagagaactgttattcaactcctggggaagagaggggggacttcttttgggcagagcatctttccatgcctatttttgcttctaatttctctgcttcaggaccaggaaatgtgtccatcccttggacggccctgttcaagagaattccctggcaacctgctctcaagagctgactttggaagtcacccaatcctccgcagctgctctccaagccccacaggcatggagtgaggaaaggtcaggcaaagtggggctgcttg

SEQ ID NO: 242221 - DNA, 575 bp, Homo sapiens
cacagcccttttcctgccttgaggagaagtaagtgggacaatgacatagatcaggagaatgaagaaggtgggggcgatgggtcacctgggggcataaaaggccattgcttttgggaaggtggcccaagcagagttgtgagaacctgtgtaagtgcttcaaagagcagcctcaccaggagggcctgcaggaaaagcaaacactgcagcaaagttttttgttgttattgctgctgtttttataaatctctgaactattctactttgttgttaaaaatgactaaattaagcttttaaaagtaaaatatacccaaatgaaagagaactgttattcaactcctggggaagagaggggggacttcttttgggcagagcatctttccatgcctatttttgcttctaatttctctgcttcaggaccaggaaatgtgtccatcccttggacggccctgttcaagagaattccctggcaacctsctctcaagagctgactttggaagtcacccaatcctccgcagctgctctccaagccccacaggcatggagtgaggaaaggtcaggcaaagtggggctgcttg

SEQ ID NO: 242222 - DNA, 330 bp, Homo sapiens
ggatatacataggattgactgaaactcagtaygcaaagctgtttgttcagtgcctggcacatagtaagcctcaaaaactgttagcaattattattagaagcaatagaatggttgactcatatttattgacacctaatatgtgcaaaccacttgtacacatacaaatgaatattggacatagctccttgccttgagaaacatacaaatatttaaaggtaattatgtgtgcataaaagtgtaatagttgagtacagtgtattctgggtgaggcagatgacatagcatgaagaatttcagagactccaggatggcgcaaagggactgtagaaa

SEQ ID NO: 242223 - DNA, 605 bp, Homo sapiens
tccgtaccaacaaaccataacccaaagtctacatttcccagccagaagattgagaatccatgcttgagccagagcctccattaaaaccattgcctgatgctgattcccacacattgctgcaccagaattagaaccactgtaagagttatttctagaaccaaagacctggtttggctccctttgcatgttgccttgactttggttattacctgatgggcctgactggttctgctggctggctaacatgctcatcctaccccaactgctctgcagcgctgcctgggctgcagccatcatggctggattaatgctgagcacaccaaaattcatctaccacctrtattggtacctcgattgttttccaagccagatccacccctctactgttaccaaatccactcagattcccaaatcttccacttctttctatctattgctgtcgtgtgattaggtttggcactggatatatgcatgctgagtcctttaatgatcaagtcctctccacaaagagattgggcaatctgatcaactgcaaatgtaacaaaggcaaaggccctgaatggcttggggatgaagacatccaccacttctttgtactgacagaa

SEQ ID NO: 242224 - DNA, 540 bp, Homo sapiens
agacttctgtaaccaaatatgtgggagttttctctgcacactaaccaagcaatcagttttgcagtggacaccagctggtgtcctccaattcaattctgatgctatcttcctggagagaacatcagatcccacaggttaaggtttcagtcccatgagattgcccccacttctatgccaatcaaaagccccactggcttctgacccatcagctgtaagtagggtttctcacaactcccttcttgggttcaactaatttgccggggaagctcccaaaactcwggtaaacactttacttacatttactgggttattataaaagatattacaaaaaatacagatgaagagatgcattgggtaaggttatgtgggaagggatgtgggacttccatgccctcttatatgggccaccttccaggaacgtccatgtattcagctatctgaaagcccccagaaccctgtccttttgggtttttatggaagctccattacataggcatggtggattaaatcattggctattgataatcgactcaaccttca

SEQ ID NO: 242225 - DNA, 552 bp, Homo sapiens
agatcttttacacatgaaaccacaaaatcaatagagcccccgtaatctatccagcgatatgaaaaaatataccgaggtgcccagaatgattactcagggaaatgtcaacaggtattgacaaggaacctggcaaggcagctgtggtggaggcttggccactgtctcctgcacactagcgccctcctggtgaacaragactcattctgagagctcaggaatggtgagggagctcaggagatgggcacttttcaccctctccaagttctgcagaatttctctttctgcaattgggtcagagctgcataggaaaaatgatagcctaagcagcaccacggagagtgtgtgattacacctatttgtggtcaatatacggtccttttaaaacctgctattgttatccttatgctatgatggtcattatcactgtggctgaaaattattaagtattttgaagatgccaactatctttgtggatacctgtggggctgcagggccaaggctgcagtcacaaagctgtggagttccgctcagagggtttagttttcccactta

SEQ ID NO: 242226 - DNA, 533 bp, Homo sapiens
agagcccccgtaatctatccagcgatatgaaaaaatataccgaggtgcccagaatgattactcagggaaatgtcaacaggtattgacaaggaacctggcaaggcagctgtggtggaggcttggccactgtctcctgcacactagcgccctcctggtgaacaaagactcattctgagagctcaggaatggtgagggagctcaggagatgggcacttttcaccctctccaagttctgcagaatttctctttctgcaattgggtcagagctgcataggaaaaatgatagcctaagcagcaccayggagagtgtgtgattacacctatttgtggtcaatatacggtccttttaaaacctgctattgttatccttatgctatgatggtcattatcactgtggctgaaaattattaagtattttgaagatgccaactatctttgtggatacctgtggggctgcagggccaaggctgcagtcacaaagctgtggagttccgctcagagggtttagttttcccacttatctggaaagggtt

SEQ ID NO: 242227 - DNA, 534 bp, Homo sapiens
tattgacaatattaataggagaactttctttgatgtttggttaagactggttgaaagagcacaaaagtctctttttgctgaaaggagacaagcttggctttgttaacttacttgcagctcttccttccctttcagctttcagattgaataacagtgcctggcacacagtagggccctataaggactgattttctttccagctgcacaataatttttyataaatgttcaacaactgctagatgctgggcactgtgctatgtgctgggaacataaaaatgagaaatgccaactctcagcctgcagagagtttacagactggtggggaggttatccaatctgtagatgcaaataatctcaggtaatgcagcagaaatagcaacaggggtctctacaagatgctgtgggagtacctagaaggaaattgatctggtttggctgtgtccccacccaaatctcaacttgcattgtatctcccagaattcccacatgttgtgggagggacacacggggaggtaattgaatcatgggggctgg

SEQ ID NO: 242228 - DNA, 420 bp, Homo sapiens
aatcagacaacctatttctaagttgtggctctgttagactatatacaagactgttagcagctaactcactgccctccttgggcccagttttctaatctgtagagtgtgggggaggacagggcatagatgagcaggattctgagacctgtgcttttgtttcwccaaaggcagctcacactgatcattttcatgtcttggctctttgtatgtgattttgtatgaagcaagggttcttctgtacaaaaatgcttgcaaattgctgacgatcactaagactctctccatctctacaatttggtggtctcttggtcacttggagctcatgatcagtcaagggcctactcatggccattaattttcttacccctcatcctttgggtgaaacatccacacagcgaacatcattgaatgcttaacatg

SEQ ID NO: 242229 - DNA, 424 bp, Homo sapiens
caatcagacaacctatttctaagttgtggctctgttagactatatacaagactgttagcagctaactcactgccctccttgggcccagttttctaatctgtagagtgtgggggaggacagggcatagatgagcaggattctgagacctgtgcttttgtttctccaaaggcagctcacactgatcattttcatgtcttggctctttgtatgtgattttgtatgaagcaagggttcttctgtacaaaaatgcttgcaaattgctgacgatcactaagactctctccatctctacaatttggtggtctcttggtcacttggagctcatgatcagtcaagggcctactcatggccattaattttcttaccmctcatcctttgggtgaaacatccacacagcgaacatcattgaatgcttaacatgtgt

SEQ ID NO: 242230 - DNA, 201 bp, Homo sapiens
  misc_feature (1)...(201): n = A,T,C or G
nnnnnnnnnnnnnnnnnnnnnnnnnnnnnnnnnnnngcagcaaggttgagcctcatgggtcacagagcaggccagggtttgaatgcgtcacatcaaacacaygcttccatttcctccacccaccctttgctcttgtctgctggtggagggatttggagaatagtgtgtggggcacaggggaggggaggaaaccagaggcag

SEQ ID NO: 242231 - DNA, 576 bp, Homo sapiens
attcttaactatgatgctgtcttacctctcagtaaatgagtatctgattaacaaagaatttttcatgaaataaaatgcagcagaaattactgtgtgtgtgtgcrtgtgtgtgtgtgtgtgtgtgtgtgtgtgtgtgtgtgattgacaaatctccagccactcccttctgaggagagaggatcctgattccccagctcactttgatgctgagcataggaagggtgtggttgtgcatgttggaagcaggagttctggggcagagtggaattgttgtgcttaataaaggagtggcaaggtgggttcccagggaagatcctgagctggagaaaagagccagggaaactgatccctgaagaagagaaagttgaaaaagaagagaagatcatggtggctggaagaggaaacacgtgaaagagaattttaagttgatggctgtggggtaatgtgcaaggtaaactgttccctacctcccccatgaaactgtacattctactttgctcacttatgctcttgtgcaaataccattttgaggggagggcagaagtcttgaagaagagaataagaagacaatttttc

SEQ ID NO: 242232 - DNA, 578 bp, Homo sapiens
aaattcttaactatgatgctgtcttacctctcagtaaatgagtatctgattaacaaagaatttttcatgaaataaaatgcagcagaaattactgtgtgtgtgtgcatgtgtgtgtgtgtgtgtgtgtgtgtgtgtgtgtgtgattgacaaatctccagccactcccttctgaggagagaggatcctgattccccakctcactttgatgctgagcataggaagggtgtggttgtgcatgttggaagcaggagttctggggcagagtggaattgttgtgcttaataaaggagtggcaaggtgggttcccagggaagatcctgagctggagaaaagagccagggaaactgatccctgaagaagagaaagttgaaaaagaagagaagatcatggtggctggaagaggaaacacgtgaaagagaattttaagttgatggctgtggggtaatgtgcaaggtaaactgttccctacctcccccatgaaactgtacattctactttgctcacttatgctcttgtgcaaataccattttgaggggagggcagaagtcttgaagaagagaataagaagacaatttttc

SEQ ID NO: 242233 - DNA, 576 bp, Homo sapiens
attcttaactatgatgctgtcttacctctcagtaaatgagtatctgattaacaaagaatttttcatgaaataaaatgcagcagaaattactgtgtgtgtgtgcatgtgtgtgtgtgtgtgtgtgtgtgtgtgtgtgtgtgattgacaaatctccagccactcccttctgaggagagaggatcctgattccccagctcactttgatgctgagcataggaagggtgtggttgtgcatgttggaagcaggagttctggggcagagtggaattgttgtgcttaataaaggagtggcaaggtgggttcccagggaagatcctgagctggagaaaagagccagggaaactgatccctgaagaagagaaagttgaaaaagaagagaagatcatggtggctggaagaggaaacacgtgaaagagaattttaagttgatggctgtggggtaatgtgcaaggtaaactgttccctacctcccccatgaaactgtacattctactttgctcacttatgctcttgtgcaaataccattttgrggggagggcagaagtcttgaagaagagaataagaagacaatttttc

SEQ ID NO: 242234 - DNA, 609 bp, Homo sapiens
ctatggtttatttgtccccactcatgttgwttgcatgagtgtaataagtagggggagaaaaacaaactcatgttgaaacttgattcccgatgtggcagtgttgggcctggtgggaggtgtttgggtcatggggcagatccctcaggaaaggcttagtgctgctcttgtggtagtgagtgggttctcctggctagacagactcattctcactgggcccatggaaatgagttgttgtaaagcaaggttcctcctcctgtttggtccctcttcgaatgtgcccacttccttttttaccttctctgccatgttttgaagcagcacaaaagtactcaccaggatgttcctaatttattttctttatagaacttaaagtatataaaatatttgcatacattttctagaatagaagcttcatgagagctgagagcaagcactttgtctttctcatttatatccccagggcccagaacagtacctggcatataataggtgctcaataaaacacaataagcatgtttatgtcaatttaataaaaaagctctcaccagaagccaagcagatgctggcatcatgcttcttgtacaacttgcacaaccatgagccaaatag

SEQ ID NO: 242235 - DNA, 606 bp, Homo sapiens
gtgaaaaccacctctgcttattgaacaccaataatataccagaaacagggctgggggcttctttacayattctcttactcagagctcacacagtcctttcaagggaaagtgccattacacccatttcacacactggaagacagaagctcagaaaagggaagtggcttgctcatgggcagttggtaagaaaatctgggccctgaacccaagtctgtctaatcctcatgtccatgctctgtcaactgcaggacacaggtgaaaggatattagtcactataattaggtaagtcatttagctcacccacctcattgcacagatttagaaactgagccacaaagtaccagacactgatacttcacacagcaagtaagaaattgattgaggtaggaaacccacttctcttgctgctcaaatcattgctttcttacctacatactaacgttcttaaaggaagggcccgtggactgagccagggagagaggcaccaggaaatacagggctgcacgtttccttgtcggccactgtgtgtttgctatctgcactgcatgttttgtattattacacattttatgtcctcaactagggtctacgcttcttgaaggcag

SEQ ID NO: 242236 - DNA, 606 bp, Homo sapiens
gtgaaaaccacctctgcttattgaacaccaataatataccagaaacagggctgggggcttctttacatattctcttactcagagctcacacagtcctttcaagggaaartgccattacacccatttcacacactggaagacagaagctcagaaaagggaagtggcttgctcatgggcagttggtaagaaaatctgggccctgaacccaagtctgtctaatcctcatgtccatgctctgtcaactgcaggacacaggtgaaaggatattagtcactataattaggtaagtcatttagctcacccacctcattgcacagatttagaaactgagccacaaagtaccagacactgatacttcacacagcaagtaagaaattgattgaggtaggaaacccacttctcttgctgctcaaatcattgctttcttacctacatactaacgttcttaaaggaagggcccgtggactgagccagggagagaggcaccaggaaatacagggctgcacgtttccttgtcggccactgtgtgtttgctatctgcactgcatgttttgtattattacacattttatgtcctcaactagggtctacgcttcttgaaggcag

SEQ ID NO: 242237 - DNA, 542 bp, Homo sapiens
gttgaaaataattctaagtgcatgttgcatgataagtgttcaatagatatgtattccctttagtgaagaatatggatatagcacagtggttggaaacrtggaccctgccacttactaactgtgtaatcatgggcagataatttaatcatcttaagtttcaatttcctcacctgcaagctggaaatactgtcatctgcctcatagagtggttggttgtgaagaataagtgaacttattttgtacccacattccaataagcactcaataaatttcaattgctgaagtaggttctgagtcagattgcctgattcaagtcctatctccaccctttatcagtcatgtgacccacagacaaattagtttacctcactgtacctcagtttcctcttctaaatgagtcaatgagagtacatacttcatagggttgttgtaaccttgaggtgaaacaatctttgtgagcatgtggcatagtgcctgacacagagtaagagttcaaaaatgttacctattattgctgtacagtgtaggtgttattattacca

SEQ ID NO: 242238 - DNA, 608 bp, Homo sapiens
cattctgaggctgtctttgggggcaaccaacatagcaaagcaatgtagcacataaatcacagcaacatgaatggtatttgttttttgcaaagagataatgaactacacctgctgttttccacctaatgcttttaatctgaggaatgacatacttgcagtgttctggcaccttggaaatcaagctgcctggttctgcctgagagccacagacatgcagaagctccatggaggtgtgagggtggctctcccacctgcgccacaaccaagaccatgtgggaaacaagtagaagacatggtggccagactcatatcctttgggctcctagcctgtcaagtagccacagaaacagctcaccttgagaccagactagactgggaagcaatccagcatcccactacctctgtacttccttagggacctcaactgatttgcatctctctcttttccactctggagtttaagtcacattggcttttctgagtagaatcttgctgctgaggaaasaagtcctctgcagggtctccctcatctcccattatactcctagctttgtctggctaatccctacttgttctacttgtctctggctccttcttctgacccccac

SEQ ID NO: 242239 - DNA, 602 bp, Homo sapiens
gtaaatgacatttgaatggaagcttgagtagcctttggaaagatgatggaaagggaggaggaggggcatttagagtagggacaaatatgtgcaaaagttcagggtaatggtgcctatcatggcccgggcactgaggtaggcatgggggcaaatgcagaaggatgagatagaattattgcctcaaggtggctcaataaagaatggtcaaaggaaagagtgctagcattttttaccaactagtatgtgcaacacatatctcttctcatttcaagaattattttggttggaaccatgcagaagagaaaactgaaattggattaaagaaccgggctttcaacccaggccttttggactccaaagctgaagctagcttttactactctgacatagttgtaccatgtcaagtgtcttttaataactcagcattttgtgtttctctgtctccctgttgcaggtattaccagcagagatatcacgacatgttttggaggctccttgggcattcaatatgaagacaaaataaatgttggtggaggtttatcaggagaccattgtaaaaaatttggaggtggcaaaaytggcaagtgtttagtaatagatct

SEQ ID NO: 242240 - DNA, 585 bp, Homo sapiens
aatttccctaaaacctcctctagttgtttcaggtacataattcttattctgactttaacaagattgaggactctggaatgacttgaagcatcaatatatatgttagtcaccagacatttcttgagtacctactatacactaggattgtagatttggccttcaaggagctcaaaatctaataggggaaactgatggataaacagaaaattcagtgctacctaacatgttcyctatttgaggcatgactggagggctgtgggattctgaggctggctggtgtgattggcctcccctagagatgggtcagagaaggcggattgatcgtcactagttggcctcttcaaatccactctccactctgggaggctgaccaatgtgtacctcatctatgaactgactcttcaattcattcacttatttaatcacagctacttactaagtccctgctacatttaaggcacaagcctgacctccggggctacagtgctaaacaaaagaagcctgacttctgccctcaagattattatctcttaggaagagataggtctcacatagtcacaggagatgtgggattaaatatatatg

SEQ ID NO: 242241 - DNA, 332 bp, Homo sapiens
attttaaggagaggaacctgaggcccccaaaggggaagtgatttgccaaggtcacagagcaagtcagsagtaggactgtgccagagcaagtcagcagtaggactgagccacattacggtagtcgcacttccctggaaacagaagtcaactgagggcactggcaatagctttgtctgagttcctggaaatgtgtacagaaagacctgtggcaaacagactttggcctgtggtcaggggttgcggttgaggtcagcaggcaggtaatatcaggactggtagggtccccagaaaaggggagaaaaccacttactggaagttcagagaattcagtc

SEQ ID NO: 242242 - DNA, 612 bp, Homo sapiens
accactgccttacctatcagtgtggacgagctccttcctgaagtcagatgtgtgagaggaaagatcaatacgtacagagagagaattcaaatattcaactgattccactggaaataggaagaggaatcctaagatttgacttsaatataagcagattcctgaggtttctttgggatacattcatggcagccaggcacttaagatgtctctttttctgtggtctctgtgtagctccaaccccagcccctagacagagctctccatccaaatcatctgcatcccatgccagtgatcctaccacagatgacatctttgaagagggctttgaaagtcccagcaaaagcgaagagcaagaagctgtaagtgaccagtttgttatttgtttgtgtttttccttaaaattaagacctctgtaactgaaatggataatgcatgaggaagcctacatagaaaagaatgctggctcaatctcataagttctcaaggggttgctaaaggggctttcttttgtgttcaaatgagtcagctgaaaaggactgcctttttattaaattgttactacaagtccacatttgtggtgtagcatcctctaaatgccgttgcaccctcctt

SEQ ID NO: 242243 - DNA, 558 bp, Homo sapiens
ggtgatagaatgaggcatggtccatgctacttagcatgcatttagtttctggaagcatcaacattttgagatggacacattctgcccaccctgataatttctcagtgagccatggtccagatgctttaatcttttaagcaaaatgtcactgcatttgcctacagtctgcagatctaaagaggtcaccaatcaaacacacagagaagccagactaagaagcaaaaacaagcagtgcttgaaataagattgatcgagatgtaagatcagaggaagcccttttcgtctagccagaaaggaccctgcaccctgcatcctttctgatgtgaaattcaaagcccagagatgtgtagcactcacttctgaggctgtgctgtttgcacctgtgctgcagcatgtggattgccaccaaatcacttcagattccatcagcagctactttgagagagatgtacttacatttactagaagtggctttkggcacttgaatttcaatacatctgatttgatcgaaagaaagaggagctgatgaagcaaaccttcttaggagacagaagtaca

SEQ ID NO: 242244 - DNA, 361 bp, Homo sapiens
tagtagggaaacaaggaagaggctggcagcagcagtcccactgagtggtataagcctgaatcatggcaatggccagggcgagaggatggggagaaccagcatatgagatgcttctcatgtggaatggwtagaaagtgatggtggatggtggaggtggggtgctaaaggaaggccttttaagtggatgctgttttcccatttgagtgtgtgggcggtgggaaacacagcagaaaataaatcttgatggggaagacttgagtttcgggtggggcatgctgagttccaggtgccatgaaacacctacggagactcatttagtaaatagttcctatatgggcttggatctcaggatgagagattt

SEQ ID NO: 242245 - DNA, 533 bp, Homo sapiens
tcacacaagatctggtttttgaaaagtctggggcttcccccgatcactctcttgcttgcgctcttcccatgtgatattcctgcttcccttcgccttccaccatgactgcaagcttcctgaggccctyacaagaagcagatgccagccccatgcttcctgtgcagcctgcagaactatgagcctattaaatctcttttctttataaattacccagcctcaggtatttctttatggcaacacagaaacggactgatagaatcttctcaaagtaggagtgacatttgcgatggatcttgaaaagatgaacatgattttaccagatggagaatgaggaccccagtaaaaagtccacgtgacagagggaacaactgtaccaaagttgcacaagtcaggaaatataaggatttattggtggagatccaggatttaatctagaagggtatgcatttactcatgggaaaggatggaagaggagaggaggagaggggaagggaaagaaaaaaatgccattttgtgctaaggatctatttgct

SEQ ID NO: 242246 - DNA, 533 bp, Homo sapiens
tcacacaagatctggtttttgaaaagtctggggcttcccccgatcactctcttgcttgcgctcttcccatgtgatattcctgcttcccttcgccttccaccatgactgcaagcttcctgaggcccttacaagaagcagatgccagccccatgcttcctgtgcagcctgcagaactatgagcctattaaatctcttttctttataaattacccagcctcaggtatttctttatggcaacacagaaayggactgatagaatcttctcaaagtaggagtgacatttgcgatggatcttgaaaagatgaacatgattttaccagatggagaatgaggaccccagtaaaaagtccacgtgacagagggaacaactgtaccaaagttgcacaagtcaggaaatataaggatttattggtggagatccaggatttaatctagaagggtatgcatttactcatgggaaaggatggaagaggagaggaggagaggggaagggaaagaaaaaaatgccattttgtgctaaggatctatttgct

SEQ ID NO: 242247 - DNA, 533 bp, Homo sapiens
tcacacaagatctggtttttgaaaagtctggggcttcccccgatcactctcttgcttgcgctcttcccatgtgatattcctgcttcccttcgccttccaccatgactgcaagcttcctgaggcccttacaagaagcagatgccagccccatgcttcctgtgcagcctgcagaactatgagcctattaaatctcttttctttataaattacccagcctcaggtatttctttatggcaacacagaaacggactgatagaakcttctcaaagtaggagtgacatttgcgatggatcttgaaaagatgaacatgattttaccagatggagaatgaggaccccagtaaaaagtccacgtgacagagggaacaactgtaccaaagttgcacaagtcaggaaatataaggatttattggtggagatccaggatttaatctagaagggtatgcatttactcatgggaaaggatggaagaggagaggaggagaggggaagggaaagaaaaaaatgccattttgtgctaaggatctatttgct

SEQ ID NO: 242248 - DNA, 533 bp, Homo sapiens
tcacacaagatctggtttttgaaaagtctggggcttcccccgatcactctcttgcttgcgctcttcccatgtgatattcctgcttcccttcgccttccaccatgactgcaagcttcctgaggcccttacaagaagcagatgccagccccatgcttcctgtgcagcctgcagaactatgagcctattaaatctcttttctttataaattacccagcctcaggtatttctttatggcaacacagaaacggactgatagaatcttctcaaagtaggagtgacatttgcgatggatcttgaaaagatgaacatgattttaccagatggagaatgaggaccccagtaaaaagtccacgtgacagagggaacaactgtaccaaagttgcacaagtcaggaaatataaggatttattrgtggagatccaggatttaatctagaagggtatgcatttactcatgggaaaggatggaagaggagaggaggagaggggaagggaaagaaaaaaatgccattttgtgctaaggatctatttgct

SEQ ID NO: 242249 - DNA, 509 bp, Homo sapiens
ccaccagtaccatctcagtcccttgcatgagaaggggagtagtgaacccgaactccaagaacagcaagcacttgccatatcatccattccccagtgacttccactagcaaagggagacttttaaaaagaaaaaaacccaggcaactccaaagtcatttgtaaaatgttatttactctcctcctaagtagaatgaccttcctaaactgtctggtttgggcttatmaaaaaaaaaaaaaaaaaatatatatatatatatatatatatatatgtatgtatgtatttgcctccccaaaaacagggactttgaataagttttgtggccaggggaacaacactgagacgcaaactggaggcaaggatgtcaaatgcacccaatgagaatatctatccctctccctgccaatctcctctctcaccactcccaccacctcttctttccccaaatcataaagtgtcactcacaccttcaccctctgacatgacgattagagagtccaggtagtggggt

SEQ ID NO: 242250 - DNA, 496 bp, Homo sapiens
agtaccatctcagtcccttgcatgagaaggggagtagtgaacccgaactccaagaacagcaagcacttgccatatcatccattccccagtgacttccactagcaaagggagacttttaaaaagaaaaaaacccaggcaactccaaagtcatttgtaaaatgttatttactctcctcctaagtagaatgaccttcctaaactgtctggtttgggcttatcaaaaaaaaaaaaaaaawatatatatatatatatatatatatatatgtatgtatgtatttgcctccccaaaaacagggactttgaataagttttgtggccaggggaacaacactgagacgcaaactggaggcaaggatgtcaaatgcacccaatgagaatatctatccctctccctgccaatctcctctctcaccactcccaccacctcttctttccccaaatcataaagtgtcactcacaccttcaccctctgacatgacgattagagagtccaggt

SEQ ID NO: 242251 - DNA, 365 bp, Homo sapiens
cagggtagggggagagggcctgggctgggctggagcctcctaggtatttcccagaagccccttcaggaactgtcacctggactccagyaccacccctcgtcatgttgtcacttcctgtggtggcgggagcgcagggtgtgagggaaaatttgggtgacagggcagtgctgtggccggcagtgttcaaggccttgccccctagggacctggcatggggctggaaggggggatcaacagcgccttccagcgtcccagtagcctcccctgacgtccttctgggtcctcctctgggtgcagagctcgggcctggggaagacacacactcaccctccaccctggctcttccttctcctctcctcagagcc

SEQ ID NO: 242252 - DNA, 421 bp, Homo sapiens
agatctactgttactggctgggaattaatatggatctgcagcaacttcaattcttrcctcctgggaagaaagaattgactgaggcaattctttcttaaggcagaagtaaagactgaggcaagtttcagaggagaagtgaaaacttattaaaaagcttcagagtaggatcgaaaggaagtaaagtacacttggaagagggccaagcgggcaacttgagacagtcaagtgcactgattcttcccttggggtgggctgtccgcatgctcagtgacctgccagcacttgggagggagcatgcgcagtgtgtttactggagttgtacgcatgctcccttgaggcgctcttcccttaccaggtgaatgtgcctagcaggtcatataccagttaaactctgccattttgcctcttagtgggcatgtgt

SEQ ID NO: 242253 - DNA, 426 bp, Homo sapiens
tgttactggctgggaattaatatggatctgcagcaacttcaattcttacctcctgggaagaaagaattgactgaggcaattctttcttaaggcagaagtaaagactgaggcaagtttcagaggagaagtgaaaacttattaaaaagcttcagagtaggatcgaaaggaagtaaagtacacttggaagagggccaagcgggcaacttgagacagtcaagtgcactgattcttcccttggggtgggctgtccgcatgctcagtgacctgccagcacttgggagggagcatgcgcagtgtgtttactggagttgtacrcatgctcccttgaggcgctcttcccttaccaggtgaatgtgcctagcaggtcatataccagttaaactctgccattttgcctcttagtgggcatgtgtgagcccacttgcc

SEQ ID NO: 242254 - DNA, 612 bp, Homo sapiens
ctataatgtagtgggtaaaagctctggatctaaacctcatttcagatccccagtctgaacttcccaactctgtgaccctgagcaagtgactcagcctctctgtgcctcagtactcatctgtcaaatgaggaggatgatgataacaatagtacctccctcataggactgtggtgacacttaaatgagttaatatagataaagtgcttggctgggcatggtgactcatgcctgcaatcccagcacctggggagacccaggccggaggattgtttgaggccaggagttcaagaccagcctgggaaacacagcaaaaccctgtctcaaaaaaacaaaaacaaaaacaaacccaagtaacacaactttgggcaagggataagatataaaaatatggctatcatttctaaagatatgccacttgacatttattattattacattatccattatatttcccagtatttttcaccagagaaatttccatgtgattagcttattttwaaatttactatgaagttcctgaaagtgtaaactgcttctttactttttaataacaggaatcagcttgtatctcttttttctttggctgccaggaaactcatagccaaatcagaa

SEQ ID NO: 242255 - DNA, 616 bp, Homo sapiens
caggtcagcacaagacacaggtcacaaagaccctgctgataaaacgggatgcagtaaagaagccrgtcaaaacccaccaaaaccaagatggcgatgaaagcgacctctggtcatcctcactgctcattatatgtgaaatataatacattagcatgctaaaagacatggcaccagtgccatgacagtttacaaatgccatggcaacatctggaagttaccctatatggtcctaaaaggggaggaatcctcatttctgggaattgccttcccctttcatggaaaactcatgaataatttacaccttgtttagcatatattctttaataactataagtataatctgttgagcagcccattccactgctctgcctatggaatagccgttcttttattcctttacttttttaacaaacttgctttcactttatgaactcaccctgaattctttcttgtgtgaggtccaagaaccctctcttggggtttagattgggacttctttcggtaacattgttatcacactcaagaattttttataaaaaatatatttaaatataattcacatctcatacaattcactcatttaaagaatataattctatgtttttagcatacccag

SEQ ID NO: 242256 - DNA, 591 bp, Homo sapiens
gtaaatggtagatattgccaccactgatcatcccacatttacctatgctgatatttggcagatgtccccaagaatctgtgtgtaggccaggtgcagtggctcacgcctgtaatcccagcactttgggaggccgaggtgggtggatcacctgaggtcaggagttccasaccagcctggccaacatggtgaaaccatgtctctactaagaatacaaaaaattagccaggcatggtggcgggcgcctgtgatctcagctactcaggaggttgaggcagaagaatcgcttgaacctgggagatggaggttgcagtgagttgaggtcactccactgtactccagcctgagcaacaagagcgaacctccatctcgaaaaaaaaaaaaaaaaaaaaaagaatctctgtgtggaagtctgcaaaagcaaccacgttgggtattaggaggaacacaggcctcggccgctgagggtctgctttctaatcccagctctgccaccacaagctttgggcaaggtaccgcctctctgagcctcagtttccttatccaattgatctaaaggtggaatggacatgctggctgttcatcatgactgct

SEQ ID NO: 242257 - DNA, 591 bp, Homo sapiens
gtaaatggtagatattgccaccactgatcatcccacatttacctatgctgatatttggcagatgtccccaagaatctgtgtgtaggccaggtgcagtggctcacgcctgtaatcccagcactttgggaggccgaggtgggtggatcacctgaggtcaggagttccacaccagcctggccaacatggtgaaaccatgtctctactaagaatacaaaaaattagccaggcatggtggcgggcgcctgtgatctcagctactcaggaggttgaggcagaagaatcgcttgaacctgggagatggaggttgcagtgagttgaggtcactccactgtactccagcctgagcaacaagagcgaacctccatctcgaaaaaaaaaaaaaaaaaaaaaagaatctctgtgtggaagtctgcaaaagcaaccacgttgggtattaggaggaacacaggcctcggcygctgagggtctgctttctaatcccagctctgccaccacaagctttgggcaaggtaccgcctctctgagcctcagtttccttatccaattgatctaaaggtggaatggacatgctggctgttcatcatgactgct

SEQ ID NO: 242258 - DNA, 578 bp, Homo sapiens
tgcccttccctcccaggcccccggtcgggggagcaggtgtggcaagtgttaggaactcccttctggtgacagctggtcttcctagagtgttgctggtaactatcgcctcttggtcttctgacatcattgccaggaacggggcactttttcgtcttrtagtttggccctcgggtttcctcactaggtattgtgtaactccctcaaaaaaaggtttatgaaatgctgaacctcaggtttcatagacgtctttgtacactaaaaattctgcagcagaatatttttaaacattcgcagttttttgtaagctatatttttgtatatttaattgctattttaaaattttaatgcattttgctaatcactcctcaaaaataaaacatgcatgtaattgactcaaacgtgtaaataaaagcaaattttgaaaaatagtgttgtgcatatgcctttgaacagagggaacatccatgtgccacttacgcaagcaccttcagcaagacttggaaactcaaggtgagtaattctatcagagctggtaactagtactgagtgattgtgatggaagcccctgcccttcctgt

SEQ ID NO: 242259 - DNA, 592 bp, Homo sapiens
tttacataggaattaaatggggcactgaggagagtgacaagtcaagaattctattgctgatttgatttctgatggtgcaatagaagacaccagggtactcctactctccatatcaacagtgggttatttacttcacaacactagccttgccattgggtgccatttgcaaacatcagtgaccccagaggcgtcatgcatcttcggaattctcaatacccttgtattttttaattaacttgtcaaaaggtcagacctactacttaggaagactcttttttgagaaaggcccattgcttagtaagtataaataaagatctggtgactaaagggataaaaaactatctgtaactgactatgagacatctcacgtgycaactcaaggaagaagccaaattatttcttcttggatatcaaagtattattcctttaaaataaagaatttaatgtgtgttattgagcactttttctttggatatgagcaagaaggatgagggcataataaaactgcatgagctccacaaaattagtaccagataaagtttacaaagacacttttgaaattagatgaggttagatccagatgcctaatgat

SEQ ID NO: 242260 - DNA, 387 bp, Homo sapiens
gttatgtgatactctttgtggttaaaaaagacagcttggctgtccttactttcacttcccttgatatcaatctctaccacaataaagtagagacaagccttagagtattcagaaagttctttttctagattatatatatattaatgaagttgtaggcatggtaagagctccayagagtgagtcagatcctcaactgacacaaacacccatcataatgaggcagattatctgcttcacaaaacactcatcataggacacaagcagacttggaacctacgagaaggaaggttttgattttacatctctgccctgtgaatttaccttaaagaaagcctttgtgcatattattttagggttgagtgctatggattctgttgcttgggatta

SEQ ID NO: 242261 - DNA, 387 bp, Homo sapiens
gttatgtgatactctttgtggttaaaaaagacagcttggctgtccttactttcacttcccttgatatcaatctctaccacaataaagtagagacaagccttagagtattcagaaagttctttttctagattatatatatattaatgaagttgtaggcatggtaagagctccacagagtgagtcagatcctcaactgacacaaacacccatcataatgaggcagattatctgcttcacaaaacactcatcayaggacacaagcagacttggaacctacgagaaggaaggttttgattttacatctctgccctgtgaatttaccttaaagaaagcctttgtgcatattattttagggttgagtgctatggattctgttgcttgggatta

SEQ ID NO: 242262 - DNA, 501 bp, Homo sapiens
ctgggggaaaaaaagttcatcatcagttttttgcctctttgagtcatgcagattttattttggtattaaagaagtttttcatctatttcatcagccaaattacccaatagacatgggctcagttactacaaaggagaaaaacaagtccctattatcaacactgttcacctgaaataggcatrttaatatctaacaagaatatattcctaacatgagatagaaaagattattgggagagctttctcttttctgattataaaatgtaaatcttcaaggtactttcaggagatctggggaatgataaaatttttgcagtttcagaattgaaaggaacttagaggtccctatttccctgggtccaatccccagcccattgcaagaatcttttctgtaggctcagtgacaaatgggtattcagcatttggcagctcctgagtatctgagatgtggtacccgtagacagcagaccattccatctcttagaaatcccttccctaatcc

SEQ ID NO: 242263 - DNA, 591 bp, Homo sapiens
  misc_feature (1)...(591): n = A,T,C or G
taaaaatctatattggacagttacaagaaattaccagagaaagagacgcttgtgagcttgccaaacaaggatttcagggtagatttttatctttcacaaatgaacttaaaggaacaaatgacagttaaagtttgaatggaagagcctgctgtcgttccacatctagttgttgctgtttatattcctttgtggagcctacattttcctaagcttttttagtaagtatatgttgaccacttctgtttcacggytaagacagaatcagaggctatggatactgacaactgatttatcttttttttctgtcttttttcatgactcttacctattgcctcatcttgatttataagaaaaacccggaaaacctacaaatataagtgtattggcttatctagaaaaatacggaaaatattgcagttattttttggtgaagaaantaaactntaatttatatcaatctaaataaaatgcgaattttgtttaaaaaatttgattaatcttgatatcttaatcagattataggaccttaatcatttcacatttattgggaaataaagctgagcatgtttgatatattttaaagatgaatat

SEQ ID NO: 242264 - DNA, 552 bp, Homo sapiens
acctaaggaaagtagcacttctgactgttgattgaaaacaaagaggagtttgaagggaattaaaggtgtgggacatggagcctccaattgggagataaagctgtgcattacactgtgttctttggatgttctgtccatttcagcaatgggggctagtatggagagccttttctgttctaggtggtaagggaattacaaagaagctttgctggagttaaaagrggcctggacataagatcagaaaatgctctggctggaaaaataaaaacaattaactaatgttaaggtaatttaattgagagagttatggaatgaccaaagcagcaagctttcacatggaattatttgaaaagttgaaatgtgtagaggcatcattgcaattcagaagccacggaataatatatactgacttacttctgaagatagacttatttataccatatgtatactgaaagaacctgggagtgtgttttggttgataatagcaagtggtaaagtctagtgagaaggggccacattgtattaatcggttgcatttcttcaatattttgc

SEQ ID NO: 242265 - DNA, 619 bp, Homo sapiens
aatgtcaggcaagtaataaggggtaaagatccagatattctgaccccagtgccacatttcttttttcttttttttttttttgagatggagttttgctcttgtcacccaggttggagtgcaatggcgtgatctcggctcactgcaacctccacctcccgggttcaagagagtctcctgcttcagcctcccgggtagctggkattacaggcacctgccactatgcccggctactttttgtatttttagtagagatggggtttcaccactttggtcaggctggtctcgaactcctgacctcaggtgatccacccaccaaagcgtcccaaagtgttgggattacaggtgtgcgccaccatgccaggcacacatttcttaaccactacgccacacagggtcatgcaggtatattgaactggggaaaatgcattggtaaccaaaagatctcaatactagctaatgattctggtgtcaattaaatctgtgacctaatcccaactgagtcacaacattttggggttccagctttctcatctataaaatctttagcttgtggaggaagagttctgggcatgtccagtgtttaagattcatggctggatgcaaaagtgagagagaccag

SEQ ID NO: 242266 - DNA, 619 bp, Homo sapiens
aatgtcaggcaagtaataaggggtaaagatccagatattctgaccccagtgccacatttcttttttcttttttttttttttgagatggagttttgctcttgtcacccaggttggagtgcaatggcgtgatctcggctcactgcaacctccacctcccgggttcaagagagtctcctgcttcagcctcccgggtagctggtattacaggcacctgccactaygcccggctactttttgtatttttagtagagatggggtttcaccactttggtcaggctggtctcgaactcctgacctcaggtgatccacccaccaaagcgtcccaaagtgttgggattacaggtgtgcgccaccatgccaggcacacatttcttaaccactacgccacacagggtcatgcaggtatattgaactggggaaaatgcattggtaaccaaaagatctcaatactagctaatgattctggtgtcaattaaatctgtgacctaatcccaactgagtcacaacattttggggttccagctttctcatctataaaatctttagcttgtggaggaagagttctgggcatgtccagtgtttaagattcatggctggatgcaaaagtgagagagaccag

SEQ ID NO: 242267 - DNA, 619 bp, Homo sapiens
aatgtcaggcaagtaataaggggtaaagatccagatattctgaccccagtgccacatttcttttttcttttttttttttttgagatggagttttgctcttgtcacccaggttggagtgcaatggcgtgatctcggctcactgcaacctccacctcccgggttcaagagagtctcctgcttcagcctcccgggtagctggtattacaggcacctgccactatgcccggctactttttgtatttttagtagagatggggtttcaccactttggtcaggctggtctcgaactcctgacctcaggtgatccacccaccaaagcgtcccaaagtgytgggattacaggtgtgcgccaccatgccaggcacacatttcttaaccactacgccacacagggtcatgcaggtatattgaactggggaaaatgcattggtaaccaaaagatctcaatactagctaatgattctggtgtcaattaaatctgtgacctaatcccaactgagtcacaacattttggggttccagctttctcatctataaaatctttagcttgtggaggaagagttctgggcatgtccagtgtttaagattcatggctggatgcaaaagtgagagagaccag

SEQ ID NO: 242268 - DNA, 619 bp, Homo sapiens
aatgtcaggcaagtaataaggggtaaagatccagatattctgaccccagtgccacatttcttttttcttttttttttttttgagatggagttttgctcttgtcacccaggttggagtgcaatggcgtgatctcggctcactgcaacctccacctcccgggttcaagagagtctcctgcttcagcctcccgggtagctggtattacaggcacctgccactatgcccggctactttttgtatttttagtagagatggggtttcaccactttggtcaggctggtctcgaactcctgacctcaggtgatccacccaccaaagcgtcccaaagtgttgggattacaggtgtgcgccaccatgccaggcacacatttcttaaccactacgccacacagggtcatgcaggtatattgaactggggaaaatgcattggtaaccaaaagatctcaatactagctaatgattctggtgtcaattaaatctgtgacctaatcccaactgagtcacaacattttggggttccagctttctcatctataaaatctttagcttgtggaggaagagttctgggcaygtccagtgtttaagattcatggctggatgcaaaagtgagagagaccag

SEQ ID NO: 242269 - DNA, 595 bp, Homo sapiens
ttcatcacagcaggaaatattcggggttatgttataaaagattcactcttttgggtctgggcctaggtctatacctagcaccatatagagcatgttcagtgccaaaataattaggattggcacaaaagcaccttgccttagctgaagttttttgtttgtttgtttttgtttttgtttttttttagacggagtcttgctctgtcacccaggctggagtgcagtggcatgatcttggctcactgcaacctctgtctccygggttcatgtgattctcctgactcagcttccccagtagctgggactacaggcgcctgccaccatgcttggctaatttttttgtatttttagtagagacgaggtttcagcatcttggccacactggtcttgaactcctgaccttgtgatccacccatctcggcctcccaacctgctgggattacaggcatgagccaatgtgcccagcctgagctgtagttttgactatgcatgagtgcattcattttgtcagtcttcaatgaattgggaaatttcctgaattggaatcatctttgatctacttggaccttctgcctcatccacatcttgaccaatgctg

SEQ ID NO: 242270 - DNA, 496 bp, Homo sapiens
tgtccccaaaagctaagggcagattggcactgtggagaaacattttcagaagctccctgaaaaggatgaaggaggtcagggcaagtttctctgcaccatagaagccacttcttccctcccattgttaaatatctccacctttccacagacacagggtgtcaccagatctttgatctgtacccacttacatgtcctgtactcaggcccagtatagacaggcctcttcccygagacgagagagaaacagtccaagtccttttgctacagagcaggagcaaagtcagctttcctctcctgcatcaactgaagttcagtgtaacatgatacaggatcactggtgactgagatgaaaagaggtcaaatggaagtgaacccaaaaacagtcagagggaaagtgggaaatagaagggaactttcatttatttagtagttctaaattataggtgcattttctttcagtcattcatgcattcactcaactagtatttgggggtag

SEQ ID NO: 242271 - DNA, 563 bp, Homo sapiens
gtgtgagtcatgttttgtgaaagtacttcatttttcctttgcactcagcacaaggaaccctggtttatgaattttatggcaaaacacaagagaagagagtcccaacatgctgcaaactttttaaagtgaagtgaatgcttccaaggagtttcacatataccaggtgagggacctgaattcagaatttgtgcagtaaatgcaatggtaagctgggctgtacagtattttcacctcacagtagctggaacaacttgaaagaggaaatagaggggccatctctttgaatgttcaatgtgtaacctgtcagtgaagactttacaggttctgtacagagggaaggactcaggagtggaaaatctcaatttctttcacagaataccaccacagtgagaaatctattgcatattgccttaggaagttttatttatgttatcagttaataaaytcagggaggcttgttcacagtgacggggtatcaatgccacccctcttccatacagtaccacatcttcccagcaacagagaaaactactaggtcagcattctgaagcagggaagttggg

SEQ ID NO: 242272 - DNA, 560 bp, Homo sapiens
atgaacctgagaaagggttttgtggaatgctaaaatatttatttctccttgcctataaacaatgtcagctcctaacctctccccaaataaacaattgatgttgggaataactggagctcattaagaaggttaggaaaggtatatggcatttgaaagaactggcattcaagagtgcattgaggttgtgtttacttcaaaagacagattattaattttgactgaattggctagactgatgatttcttatccaaaacaaaatctcaaccatcctatttattagactggtgcttttttaaatgacttttttcccccctcaacaaactggtcaatatagtgaatatagtgacactggtttgtgtatctatagaaaaactmaaaaaataaaagttaacttcattatcatttattggttatgtgattgagcaaattacttgatctctttaggcctaagttttgccatttgtaaaatggtgctaataatagtcccgtctcattgggttgctgttaggatgaaatgagatatgcatgtatgcttcttagaatagtatttggcacacagt

SEQ ID NO: 242273 - DNA, 560 bp, Homo sapiens
atgaacctgagaaagggttttgtggaatgctaaaatatttatttctccttgcctataaacaatgtcagctcctaacctctccccaaataaacaattgatgttgggaataactggagctcattaagaaggttaggaaaggtatatggcatttgaaagaactggcattcaagagtgcattgaggttgtgtttacttcaaaagacagattattaattttgactgaattggctagactgatgatttcttatccaaaacaaaatctcaaccatcctatttattagactggtgcttttttaaatgacttttttcccccctcaacaaactggtcaatatagtgaatatagtgacactggtttgtgtatctatagaaaaactaaaaaaataaaagttaacttcattatcatttattggttatgtgattgagcaaattacttgatctctttaggcctaagttttgccatttgtaaaatggtgctaataatagtcccgtctcattgggttgctgttaggatgaaatgagatatgcatgtaygcttcttagaatagtatttggcacacagt

SEQ ID NO: 242274 - DNA, 617 bp, Homo sapiens
aagagatttgctttactgaacaaggagtgtggtgctgagtttatgggtttaagaatctcctgaaattagcacaatttatacttgcaatagatttgtcagatgcaatctcagatttcaaactgaggcttttatgtaaatgcttacaaagcctacttaytggatttataaaaagctgactatattggcaatcttgctatttatctgttaaaccttgtttgttggttgatctgctttcaataaataggactatgcattggtactccaaattctcctcaattccttgtgtcctcacactgtgttaattcttattgcagtgctatctacagcaggtatggacccttcccctggaaatactctcagcaatccactacagaatgttgtggggtcaagagcacagcttggtgcagtgttgaagagctcttgagccaggcatctgggctttgaatctggcttggtcactcactgtgtgacctagggacaagtgtccctctcatgtcttgtttttcttatctctcatgtgaagtcttgtctcaccacctcatttccaccccctgccctcccttaccctgttatatttcccttcatggctttgattaccacatggcatgatgtgtgtt

SEQ ID NO: 242275 - DNA, 397 bp, Homo sapiens
acataattcaaaataaaattaaaaaataaatgagtaaaatctatactctattacatggtgataagtgctatggaaaaaaattaagtcagggaggaatcaggactgctggagtgggaggattgcaatttttaaaagggttgctagraaaggcctcactgcaaagaaaaggtttgagcaagacattgaaagaggtgagggcatattcaccttttggatatttctgggaagaggaacagcaagtgcaaaggctctgaattgagcacgtgccaggagcggtcaagaagctagagggagaccagtgtacatggagtgtggtggagtagggtggagtagagtgcagtgaggaaggtactgtggattggaggcaggcaggggtgtggttagggttatgcaagta

SEQ ID NO: 242276 - DNA, 477 bp, Homo sapiens
tttctctttcaagggctacaaactgagatgccaagatgttaactcttatttccagatcacacaacccccaggccacctctaacatatccacagctgtcattcagattccaaagacattgacttatttctcatcacaatttgcaagcaaagccgtaatgctctaattatgtgtctattatcaccatcatcgtaatgcacccacatggatggtggcagcaaggctgggttaatatattcattagggacaggcacsagcaacatgatattaatactgctaataatacctaattgggcttaattacaatgtgatgcctaatatattgtgatgaatttattctcaaagtatttacatatttgtagttaagtaattagcattctgtccataaataactcctcaaaagtccactccagctctggagcagaagggagactgaacacaccctgctccttaaaatggactggcagaaaaaaaagttc

SEQ ID NO: 242277 - DNA, 477 bp, Homo sapiens
tttctctttcaagggctacaaactgagatgccaagatgttaactcttatttccagatcacacaacccccaggccacctctaacatatccacagctgtcattcagattccaaagacattgacttatttctcatcacaatttgcaagcaaagccgtaatgctctaattatgtgtctattatcaccatcatcgtaatgcacccacatggatggtggcagcaaggctgggttaatatattcattagggacaggcacgrgcaacatgatattaatactgctaataatacctaattgggcttaattacaatgtgatgcctaatatattgtgatgaatttattctcaaagtatttacatatttgtagttaagtaattagcattctgtccataaataactcctcaaaagtccactccagctctggagcagaagggagactgaacacaccctgctccttaaaatggactggcagaaaaaaaagttc

SEQ ID NO: 242278 - DNA, 497 bp, Homo sapiens
caccctcagctacagaaagtctcggggagaarggcacagatctatcttagcactttgccccagccacccatgaccacaccaactcccagttcaggctgcttgactccacttcctgagcttctccagctctcctgagctaccttgatggtgccatgtaaagggaagagaattatggcatctcctgagcttttggcttaggaggaggaaatttggcaaggaagagccagtttcatctaaacaaatattcattaacctgtggcaaggtagccaggtctacaaatttcctcaaagtgatattaaaatgtatttatatatagagctaggtggtatttctatatacatgaatatgtaaatttctgggtttgtaagtatcagtagttgagaatgagaatgaggcagtgagtacagagccatgaattcataaaatgtttaaaaggagctctctccaaccttttggtgtgttatcttagtaaggtatagtagacttgctaagtgtg

SEQ ID NO: 242279 - DNA, 497 bp, Homo sapiens
caccctcagctacagaaagtctcggggagaagggcacagatctatcttagcactttgccccagccacccatgaccacaccaastcccagttcaggctgcttgactccacttcctgagcttctccagctctcctgagctaccttgatggtgccatgtaaagggaagagaattatggcatctcctgagcttttggcttaggaggaggaaatttggcaaggaagagccagtttcatctaaacaaatattcattaacctgtggcaaggtagccaggtctacaaatttcctcaaagtgatattaaaatgtatttatatatagagctaggtggtatttctatatacatgaatatgtaaatttctgggtttgtaagtatcagtagttgagaatgagaatgaggcagtgagtacagagccatgaattcataaaatgtttaaaaggagctctctccaaccttttggtgtgttatcttagtaaggtatagtagacttgctaagtgtg

SEQ ID NO: 242280 - DNA, 445 bp, Homo sapiens
tttcaggtagctcagcatatatgaaggatggacagaagagagagctcctatattaatgcttaaagaaattaatacaataaaaaacaggatcttaactttatccacatattttgtttttcctaaactcttaattttaaatttctrtctgttataattgctcttaaaaatgtctttatttcacctttagttttggaggatgttatctctacgtatactattctagtttgacaggttgttgttgctttttttctcctgtgtagcaattaaaagaggtcattccattttcttctggatttcattgtttctgatgaaaagtcagcaaaaatgtgtgtgtgtgtgtgtgtgtgtgtgtgtgtgtgtgtgtgtgtgtgttctctagctgctttaaatattttctttttcttttcactgtgagatacttaggtgtggtttttattatattcat

SEQ ID NO: 242281 - DNA, 515 bp, Homo sapiens
gaaacttatctcccctgccactgctacagctaatcagtgtttatcattatactctcatttccccacatttaatctaaaggagatgggagggacgttgccagcaagatgcaacgtcaggcctggaaagtccatgcttggcttattcattatgccagactccatagatgacaagatgcaatttcttttcttcttcttcttcttttttttttttttttttttttgatagtgacagagtctcaytatcaccagggctgaccttgaacttctggactcaagcaatctttccacctcagcttcccaaaatactggaattacaagtgtgagccaccacacctggccgagatgcaatttcttaagctgaatagtgtttgggagtgctcaaacctctcaatgccttcctcatcttgatcaaccagaatccccaaggatgcatacccctaggttcagcccctccagaccctgcccaagtctgcatgttagaaggccatctccactagtgtgaatctagtctagtc

SEQ ID NO: 242282 - DNA, 472 bp, Homo sapiens
ttcagttatatcaggttttacttagtttattttgaagtgcaaccaataggtgcatgcatgttcaattgaattgacccttttatcactatggattgtcacattttggaggacatatttggaatattctttgcccccaggtattctttatctgatatkaatatagccacccaacgtttcatttgattagagtttccacagtctatcctttttccatcttttagtttctaacctatctgtgtctttataattaaagtggatttgttttaggcagcatatcattgcgtcttggtttttttatttaagatgacaatctctgccttttaattggagtgttcaggtcatttaatgtaatataattgtcaacgtggttgacagggtcaattcattaagacaagatttaaatctcccatttttctgtttctctttgtatgtttcatatgttctttgttcctctcattttttgtgcctgttt

SEQ ID NO: 242283 - DNA, 654 bp, Homo sapiens
cctctggtctaaacaccttcatttttaaaatagaaatttggcatctactaactctacaatgtgtactaagtcattttgatattttaaaaattgtatttcttctgtttagttacagcaagagaaataaaatctgaaagtagctgctgaacctccacataatgtttgagatcaaaaattcattgataatccatgtttgtgattccagggccttttactgtctctaagaggtggaaacaaacgccaagcagccaatttgtttctaatggtatttgcctcattatagtagggtttgaggaaggtttgtttttcaaattcttcctacgtatgtttcactgagattggaatggctttaaaaatgtgaagcaagctgttaggtgactcattgtccttcatgttaaaagataatactgctaaaatagtttcttcctgcaacatgagttactggtaagcacattacaaagtctgtgttcctttcttaactgatctctctatgtgtcctttgctyaatacctacagttgctttaagaacttgtcactgatagtcgctagagttgtgctttataggagtctgaacttctagctcagtttgagacactctatttctaattgtgtatctgtgtgttttctgtctatgttggctgctttgttaaagtt

SEQ ID NO: 242284 - DNA, 579 bp, Homo sapiens
ctcccctaggccttggattctgaggcccacccacacatatggggttgctcaggggtggcaaagccctgcctgtctttccaggggactgctggctgctggctgccatcggctcccttaccacctgccccaaactgctataccgcgtggtgcccagaggacagagcttcaagaaaaactatgctggcatcttccattttcaggtgaaggacagtgtgagagccactgtggctttgttgggggcgggggaagaatcatatatgctttgaagtttaccttctttccttttgaaaaatagcatttattagggtgggttttggrctaattatcagagaaatatctgcccaccaaagaaatcatgtaagctaattttttaagtcccaaaagaaaatagttgttagcaatttgtggctctttctcccttctccttctcttcctctccactgtgtgtgtgggtgtgtgtgacactggtagtctctgtcacataatttttgtaatctgcccctttgacttagcaatgtgtggacaaattcccctctggagaccgtggcagaagctggagaggaggcggggccgggctca

SEQ ID NO: 242285 - DNA, 579 bp, Homo sapiens
ctcccctaggccttggattctgaggcccacccacacatatggggttgctcaggggtggcaaagccctgcctgtctttccaggggactgctggctgctggctgccatcggctcccttaccacctgccccaaactgctataccgcgtggtgcccagaggacagagcttcaagaaaaactatgctggcatcttccattttcaggtgaaggacagtgtgagagccactgtggctttgttgggggcgggggaagaatcatatatgctttgaagtttaccttctttccttttgaaaaatagcatttattagggtgggttttggactaattatcagagaaatatctgcccaccaaagaaatcatgtaagstaattttttaagtcccaaaagaaaatagttgttagcaatttgtggctctttctcccttctccttctcttcctctccactgtgtgtgtgggtgtgtgtgacactggtagtctctgtcacataatttttgtaatctgcccctttgacttagcaatgtgtggacaaattcccctctggagaccgtggcagaagctggagaggaggcggggccgggctca

SEQ ID NO: 242286 - DNA, 561 bp, Homo sapiens
ctctttttgtttgttgttaatgggattctaattttctgatggaaactgttgaaaggaaatgctgcaacaagtaatttgggttatccttgtgacacattagaatttttgtatcctgtcaattttctgaaggtgtttacaagacagaacatatgaacttttaaagactttgtactaaaatgtaatatacattaaaaatacatgagtaccactcaattattttagaaactaatatatccatatagccagcacctagatccagaagcagaacttttgccagcccctagaacactcccctcatattctttgtaattatcacaaggataaccactattctgacttaaaatagcacagatgagtttggcctattttcatgggtacrtgaacttctattaccttacttaatctacaagcagaaacacaggcgtggagacatgaagcaatttctacagtgtcttgcaactcttgaagagtgaaatctaggcttttcatgtagtgtgcttctacagaactgcctgcagcctctaaaagtcctcctaataaccaatgaagggaggaatctag

SEQ ID NO: 242287 - DNA, 588 bp, Homo sapiens
ctgacaatgtataatgctaagattatttgtgaatttatcttagctgctgaaatagatacagacaggtagattatatgtttgagcatttatacaatggaggtattcaaactcaactaagaatttgtaattacagactctcactctttagtttgaatataggaatggaattatgcctagaatttttttatggttgggataaatcatatcagaatggaattgccaatatcctttataaggataaggctttttagaacatatatatctaaaaattaaatgttatataataagataaatggtaacttcatttattcagtaagaattgtgtggattactctgtgcagcccatgttgagtgctggaccatcaayaatggagagacatgatccttgctctcatggaacttatgctgtagtggaagacaacatgtaaacagctgcaatacagttaaatatttgctgtaatgaagttatatatgtagtgtaaaaagggacaggaaaaatctttaattcaaggaaatctttatgaggacgtagaacttgaacagaaatgtgaagccatctttttctcaggacatttgggaaagggaatt

SEQ ID NO: 242288 - DNA, 446 bp, Homo sapiens
aagggctcagtatatactgagtgaatggatgaatgaatgaatgagtgaatgaatgaatgagccacctgtcaaactgctttctcagatcagtccagtcaggggaatggcggtggccatgggcttctgtagtggatgtccttaggctcggtgtggctggtgatgarggactgagagtcatcccagagagtgcagaacacctcccatgaccttccccagagtccaagcccagggagcagttgtgacatccagccaagctcacacttggcctggaggccggaccccatgaggaccaacctgtggtcttcagaggttgtcgggagggaggccccagtggacgctgaattccagcctctgtctggaggcctttgagccgcaagcacctggtggctgtgcctgtggatgggcttgatggtctgaacccataacacccattcaggcatcagaaa

SEQ ID NO: 242289 - DNA, 446 bp, Homo sapiens
aagggctcagtatatactgagtgaatggatgaatgaatgaatgagtgaatgaatgaatgagccacctgtcaaactgctttctcagatcagtccagtcaggggaatggcggtggccatgggcttctgtagtggatgtccttaggctcggtgtggctggtgatgaaggactgagagtcatcccagagagtgcagaacacctcccatgaccttccccagagtccaagcccagggagcagttgtgacatccagccaagctcacacttggcctggaggccggaccccatgaggaccaacctgtggtcttcagaggttgtcgggagggaggccccagtggacrctgaattccagcctctgtctggaggcctttgagccgcaagcacctggtggctgtgcctgtggatgggcttgatggtctgaacccataacacccattcaggcatcagaaa

SEQ ID NO: 242290 - DNA, 446 bp, Homo sapiens
aagggctcagtatatactgagtgaatggatgaatgaatgaatgagtgaatgaatgaatgagccacctgtcaaactgctttctcagatcagtccagtcaggggaatggcggtggccatgggcttctgtagtggatgtccttaggctcggtgtggctggtgatgaaggactgagagtcatcccagagagtgcagaacacctcccatgaccttccccagagtccaagcccagggagcagttgtgacatccagccaagctcacacttggcctggaggccggaccccatgaggaccaacctgtggtcttcagaggttgtcgggagggaggccccagtggacgctgaattccagcctctgtctggaggcctytgagccgcaagcacctggtggctgtgcctgtggatgggcttgatggtctgaacccataacacccattcaggcatcagaaa

SEQ ID NO: 242291 - DNA, 446 bp, Homo sapiens
aagggctcagtatatactgagtgaatggatgaatgaatgaatgagtgaatgaatgaatgagccacctgtcaaactgctttctcagatcagtccagtcaggggaatggcggtggccatgggcttctgtagtggatgtccttaggctcggtgtggctggtgatgaaggactgagagtcatcccagagagtgcagaacacctcccatgaccttccccagagtccaagcccagggagcagttgtgacatccagccaagctcacacttggcctggaggccggaccccatgaggaccaacctgtggtcttcagaggttgtcgggagggaggccccagtggacgctgaattccagcctctgtctggaggcctttgagcmgcaagcacctggtggctgtgcctgtggatgggcttgatggtctgaacccataacacccattcaggcatcagaaa

SEQ ID NO: 242292 - DNA, 446 bp, Homo sapiens
aagggctcagtatatactgagtgaatggatgaatgaatgaatgagtgaatgaatgaatgagccacctgtcaaactgctttctcagatcagtccagtcaggggaatggcggtggccatgggcttctgtagtggatgtccttaggctcggtgtggctggtgatgaaggactgagagtcatcccagagagtgcagaacacctcccatgaccttccccagagtccaagcccagggagcagttgtgacatccagccaagctcacacttggcctggaggccggaccccatgaggaccaacctgtggtcttcagaggttgtcgggagggaggccccagtggacgctgaattccagcctctgtctggaggcctttgagccgcaagcacctggtggctgygcctgtggatgggcttgatggtctgaacccataacacccattcaggcatcagaaa

SEQ ID NO: 242293 - DNA, 576 bp, Homo sapiens
gcagcgactgtaatgctggtgccaggggaacaacctgggccctgagccaggcagaggcaaccctggtccccaagaagcctgcagtcagttctggagaacaagrcataaacctgggaagatgatcgaacaacgctgacaaagtggactagaaacaaggctgaccagcgcagagcccaggggccctgggaagagccggagctgtgagaaccgctgttggctgtgggtatgctaggtgccaggagcatccgtattctcttttaagcctcacccagccttgtgagctaaacataacatccctattccacagacccagaaacaggcccagagagggaaagtgacctccccaaggtcacacagccggaaagtactgaagtcaggttttgaattcaggtctaactataaattggtgtcccagggagttcaatccaggaggcctttctgtgggtgtttaacataatttagaggatctgagggaatgggaggagcatgttccggtagcggccagggaattgaggcacagagaccattctatgcagcagaagacaagtgagaggtggctgcgtggcatgagaagtc

SEQ ID NO: 242294 - DNA, 576 bp, Homo sapiens
gcagcgactgtaatgctggtgccaggggaacaacctgggccctgagccaggcagaggcaaccctggtccccaagaagcctgcagtcagttctggagaacaagacataaacctgggaagatgatcgaacaacgctgacaaagtggactagaaacaaggctgaccagcgcagagcccaggggccctgggaagagccggagctgtgagaaccgctgttggctgtgggtatgctaggtgccaggagcatccrtattctcttttaagcctcacccagccttgtgagctaaacataacatccctattccacagacccagaaacaggcccagagagggaaagtgacctccccaaggtcacacagccggaaagtactgaagtcaggttttgaattcaggtctaactataaattggtgtcccagggagttcaatccaggaggcctttctgtgggtgtttaacataatttagaggatctgagggaatgggaggagcatgttccggtagcggccagggaattgaggcacagagaccattctatgcagcagaagacaagtgagaggtggctgcgtggcatgagaagtc

SEQ ID NO: 242295 - DNA, 623 bp, Homo sapiens
tgaattcaacagtacattaaagagatcattaaccatgatcaagtggtactcatcccagggatgcaaggatggttcaacatatgcaagtcaataagcatgatacatcacattaacataatcaaggacaaaaactatataatcacttcagtagacacagaaaaagcatttgataaaatttgacatcccttcatcatacaactctttaaaaatcagatatacaggaaatgtacctcaacacaataaaggtcatatatgacaaacacacagctaacatcatattgaactggaaaaaattaaatgctcttcttctaagatctggaataagacaatgatgccctcttttaccacttttattcaaaacagtactggaagttttagctagtgcaattaggcaagagaaagaaataaagggcawccaagttggaaaatacaaactcacattgttcctgtcttagtctatttgtattgctataaaggaatacctgaggctaggtaacttgtaaagaaaagagatttatttagctcatggctctacaggctgtacaaaaagcttagtgtcagcatctgcatctagtgagggcctcaagctttttccactcatggtggaagaggaaagagagcca

SEQ ID NO: 242296 - DNA, 598 bp, Homo sapiens
tgatatgtcaaatgtcatgaaataagttaaaggcaggtattatcctatacattagcataagaataacgggtaagagacctacctgctagaccctgtaatctgaggacaattttgtttcttccacttactagctgtatgttttttggcaaactatttaagttctttctgtctctattttctcctctctgagatctgaattaaaatagtactaatttcaaaaattttgtgaaaattaaatgagatgatgtgtgcaaaatgtttaacactatgtttggcctataattagtgcttaaaatgttttagctaaaaattaagaaatgatagaggctagtaaacaatttgtcaatagataaataaatagtatgtataagatgggctttgccatgagtttagagaagatagcaatctctatgggcctgggtgatgtgaggaagcttttgcagagagaagcccgcaggatttctctrgccaagcatgcttacttcgtaatatttaaaaaaaacctgctgtccaagctgttagctggaattgaaagatagagggatggttagagggcctatttagtaagagcagaaaaatgcactgggagtgaatcatt

SEQ ID NO: 242297 - DNA, 598 bp, Homo sapiens
tgatatgtcaaatgtcatgaaataagttaaaggcaggtattatcctatacattagcataagaataacgggtaagagacctacctgctagaccctgtaatctgaggacaattttgtttcttccacttactagctgtatgttttttggcaaactatttaagttctttctgtctctattttctcctctctgagatctgaattaaaatagtactaatttcaaaaattttgtgaaaattaaatgagatgatgtgtgcaaaatgtttaacactatgtttggcctataattagtgcttaaaatgttttagctaaaaattaagaaatgatagaggctagtaaacaatttgtcaatagataaataaatagtatgtataagatgggctttgccatgagtttagagaagatagcaatctctatgggcctgggtgatgtgaggaagcttttgcagagagaagcccgcaggatttctctagccaagcmtgcttacttcgtaatatttaaaaaaaacctgctgtccaagctgttagctggaattgaaagatagagggatggttagagggcctatttagtaagagcagaaaaatgcactgggagtgaatcatt

SEQ ID NO: 242298 - DNA, 574 bp, Homo sapiens
ggtgattgagtaccatggctccttgaaattttaatattttctgaattgtactaaagtttctacactatgtagaagtttccccagccctaaaaagaacgctgaggtttggcttccattgaaacatcttctaaaggaagtgtgcatttcccctacatatagaatttggtgacrggcaggttgcctaaaaagatattttcactgcaattagttttctttactccctgacagagggtttcagagcccagaggcaactttcaccaggataaaaatactctgcactgtcagtagaagatattcttacataacatgcactgatttctttcccccattttgcaagtgctcagaggaatggtagggtttgctgacatcttcaagcaggtcaacacgcattaaggctttactcccttgtctgatataagcagaacattgcttatttaaactattctctgagtaagttgctgaagagaactttaggtcaagggtaaagattattttcacttttatttataggcgttctttctttttaaaataatgttggaaaaataatgaaagcattttactacaacagtggttc

SEQ ID NO: 242299 - DNA, 574 bp, Homo sapiens
gctatgattgtctattgtcagggtcagcttcatgggtgtacaaactgtgcagtcacagtctttgtgcttagaagagccccatgcctgatttaattatctgctagttaccttctggaaatttttaacgctttttttttttttttttttttttttgagrtggagtctcactctgtcgcccaggctggagtgtagtggcgcaatcttggctcactgcaatctctgcccctcaggttcaagtgatactcctactcagactcccgagtagctgggattacaggtgcccaccaccatgcctggctaatttttgtattttttagtagagatggggtttcactatgttggctaagctggtcttgaactcctgacctcaaatgatccgcctgcctcggcctcccaaagtgctgggattacaggcatgagccactacaccaggccgaaatttttatgactttttgaacaagaggccccacattttaatttcgtaccaggccctgaaaattatggaactgtttgtactcgttactatcatctgttgcctttcaaccttattcatttatattttagcacctagctc

SEQ ID NO: 242300 - DNA, 574 bp, Homo sapiens
gctatgattgtctattgtcagggtcagcttcatgggtgtacaaactgtgcagtcacagtctttgtgcttagaagagccccatgcctgatttaattatctgctagttaccttctggaaatttttaacgctttttttttttttttttttttttttgagatggagtctcactctgtcgcccaggctggagtgtagtggcgcaatcttggctcactgcaatctcygcccctcaggttcaagtgatactcctactcagactcccgagtagctgggattacaggtgcccaccaccatgcctggctaatttttgtattttttagtagagatggggtttcactatgttggctaagctggtcttgaactcctgacctcaaatgatccgcctgcctcggcctcccaaagtgctgggattacaggcatgagccactacaccaggccgaaatttttatgactttttgaacaagaggccccacattttaatttcgtaccaggccctgaaaattatggaactgtttgtactcgttactatcatctgttgcctttcaaccttattcatttatattttagcacctagctc

SEQ ID NO: 242301 - DNA, 329 bp, Homo sapiens
tagctacatatgtggaactggaaagtctggatagtagmattaatgctggttccactttataagacaatgtcaaattgtttctcaaagagcttgcaccaatttgtgtttctacctaaagtgtgttaagtattcccattgatttacattatttctaattctaaaataataggtataaagttgtctcattattttgcaattcctgattacagaagatggacatctttacttgtttattttacattattttttcctcttttgtgagatacctcatcaacattttgccaattattctattgagttgtttgtgttctttcttaatgatttgtggg

SEQ ID NO: 242302 - DNA, 329 bp, Homo sapiens
tagctacatatgtggaactggaaagtctggatagtagcattaatgctggttccactttataagacaatgtcaaattgtttctcaaagagcttgcaccaatttgtgtttctacctaaagtgtgttaagtattcccattgatttacattatttctaattctaaaataataggtataaagttgtctcattattttgcaattcctgattacagaagatggacatctttacttgtttattttacattattttttcctcttttgtgagatacctcatcaacattttgccaattattctaytgagttgtttgtgttctttcttaatgatttgtggg

SEQ ID NO: 242303 - DNA, 581 bp, Homo sapiens
tattaaattcatacctttctttacaaaacactgtcttattttatattgatagatcctgtgtataggaatcatttttattacacaattcaatatgctcaagaacatttgctgaacrcttcatatgtgcagacagtatgctagtgcaacaaaaagtaataaagataaattatattttgtataatatgttgattattatacaacatattaattatacaacatattatatatatgttgtatataattatatatatgttgtatatatatgttgtataaatatatatgttgtatataattatatatatattatatatatgttgtatatacaacatataattatacaacatattatacaacataattaatatgttgattagtttcaaaataaaaagattaaatatctaaattaatacaaagcttccatgatgcacaaaacatcaaaattttcaatgaaaacagcattgcttatttataaacaggaacgaggactaccgatttgtttagggaatgtaggaaacaacctactaagtgccttgtctgttcttctctaaagtccctgcttattgaactttgcagcgtgatca

SEQ ID NO: 242304 - DNA, 581 bp, Homo sapiens
tattaaattcatacctttctttacaaaacactgtcttattttatattgatagatcctgtgtataggaatcatttttattacacaattcaatatgctcaagaacatttgctgaacgcttcatatgtgcagacagtatgctagtgcaacaaaaagtaataaagataaattatattttgtataatatgttgattattatacaacatattaattatacaacatattatatatatgttgtatataattatatatatgttgtatatatatgttgtataaatatatatgttgtatataattatatatatattatatatatgttgtatatacaacatataattatacaacatattatacaacataattaatatgttgattagtttcaaaataaaaagattaaatatctaaattaatacaaagcttccatgatgcacaaaacatcaaaattttcaatgaaaacagcattgcttatttataaacaggaacgaggactaccgatttgtttagggaatgtaggaaacaacctactaagtgccttgwctgttcttctctaaagtccctgcttattgaactttgcagcgtgatca

SEQ ID NO: 242305 - DNA, 539 bp, Homo sapiens
aaacataaaacagtaaaattgaatagaaatatatgatcacacaggtaatgtgaatgtcttatttagcttgcctttggttggttgttaattgcaactacttgtgacttgcttcaattataaagaagaattgcttacttcacaaaactggaaaactcaaaattacatgggctcaggtaaggtttgttcaaagatttaacctccatttctctgtggttctcttaactcgggcttcttctcaatgtcagccccatttcagactggtcttcctcatggctkcaagatagcaacatattatcaattaaggctttgttgccccttatccgtaaaaaggtaacagactgggtaggtttccaccactatcaaacaaaagatcctatgttagtgctaactaaacccttatgaatcaacattatggtcaggggaatgccacatattttgtgccaggttagggtttaaggtcaacaccactcctcaccaggcagcggtgtagtaggagactggcttagcaagaggaaaatctccatgaaattggaacggtg

SEQ ID NO: 242306 - DNA, 498 bp, Homo sapiens
gtgtgtgaattttagtcaggcaggccctgagattgggtattaggaaccaaygagttaagctgtgtttcaagttcaaagtctggtgtagagtgaaagcagaacctgaggaccaggatctgagggagaatgtcagtcagacaaacaggctgttcatactgtcaggtataagtgggaaggccaggtgctcttgtcagtacagggtggcatactcaaaggatggagacataaggcacctataggttataaagttctcctcagtactacctggccagctctcattattttaggtcaatttcagaccagagaatatgcaggcaggggaaagtagaaacttctcttctcaagcattctttatatccacaaaatgacatgattcactactcccaatggttttcccccttgatctacctctaaattgctctttctccaaatagatgcatgtgcaaattctacaatccttcaataagcagctaatggaacatctactctctgaacttt

SEQ ID NO: 242307 - DNA, 618 bp, Homo sapiens
ggatgcattgttagtttcttcaaaagtaagaaagatttccacaaacaccttgatcccaaacatgtataagccggtataaattataaagaatgggcatatgtgggaagtggcaagtacttgaaggtagatcaagaaaactcctgtatttggattactgaagttttagccagcatatggtggaaagctggcactgaggcataaacctggtccctcaatgggagcacaagtgtaccagatttggaacaaatacaggattgaggagaggcatactcaaacctccatctcatagtcttttcaatacaccacactatagcagtaaagacaaggctgtccactgtctaacatccattgctgagggtcttttagagccaccttgtaacaagacgccaaccaaaagtgaggacatatctaggtcaagatgaccaagggatagtgaaactatatgagagatctttctgtgcaccaaagaatcactctgttayaaagaagaagatagagctaattattattatttctaataatcgtagcaatgtcctgttatagtgcttagcttctggaagtttttgacaagtgctaatgaggataaggttgcagttttgatggacataagggtaagtt

SEQ ID NO: 242308 - DNA, 439 bp, Homo sapiens
tctctctgcttctctcttcactaacactttatctgtacatctcatacataataccaacttctcacctcacatttgtggaaaattcagaaagccaactgtatctgtagtcccagttcagttctatacccagctcagcacaatgattgccacatagtagacatttaagtactgttagccaaataataaatgcccttttaagkttccatttatgcttgctatttggaagattttcttcagtaggattatctaaattaggtttggcaatgtgaattttacttttttcagtttctttattgtcagtaattactgagtcaaaaaatcattttttaactgaggaaataaatttctgtaatcaaaggaataatggccaaagagttcccagcaggaagagttgcactattttgtggaaaatatctgctctcatccaccttagctgaat

SEQ ID NO: 242309 - DNA, 578 bp, Homo sapiens
ttacctgctcttgctcacatcatatcctatggagttcagctgccttctgactatggmaaaatccagctgggagaagcaggagatagagaagtacatagaaagtattactggatgtaaattaaagaacaatataatatggggagtagaaataattaagttgatggaaaaaaatgaaagaaatatcaagatttaaaaatgccttatagaacatctagttgaggcccccattgaatgcttatttggccccttcaacaatttgtcccagaagagcatttgcaaataactttcatttcatttttgtatgcaaaaacctgagttcattttggacttcatccacaccagcctgtgttttcctggctacttcccaaggtgtccccttgcctcttgatctcagcagcagtcccccaataaatcagaaggaggctctgaccttcccaacaggatccagaactttgacttcccttttccaatctgttactttagatgcaggaccagagtgaggaaagacaatcacaatctctgttatttgtaagaacattgcctgtatttgctaatgtttgcaagctggggacagtcag

SEQ ID NO: 242310 - DNA, 578 bp, Homo sapiens
ttacctgctcttgctcacatcatatcctatggagttcagctgccttctgactatggaaaaatccagctgggagaagcaggagatagagaagtacatagaaagtattactggatgtaaattaaagaacaatataatatggggagtagaaataattaagttgatggaaaaaaatgaaagaaatatcaagatttaaaaatgccttatasaacatctagttgaggcccccattgaatgcttatttggccccttcaacaatttgtcccagaagagcatttgcaaataactttcatttcatttttgtatgcaaaaacctgagttcattttggacttcatccacaccagcctgtgttttcctggctacttcccaaggtgtccccttgcctcttgatctcagcagcagtcccccaataaatcagaaggaggctctgaccttcccaacaggatccagaactttgacttcccttttccaatctgttactttagatgcaggaccagagtgaggaaagacaatcacaatctctgttatttgtaagaacattgcctgtatttgctaatgtttgcaagctggggacagtcag

SEQ ID NO: 242311 - DNA, 445 bp, Homo sapiens
gtacaccttttacatcatcattctagtgccaagactgagaagaccaagtaaatggtatctctgaacaataataatccctaagtgagatatgccatcccttacataagcaagcaagaaaasactgagacaggaaccaaaaaacagacattttatatatcatgccaaagaccgctgagggtaagtaaaaatctgagaaatgccatccatcatccatccaggcaattgtctgctctgacagcttatgcagggagcaaggacatattgctggagagcttggaggaagggggagaattctgtgcctctgtgtccttaaaggtgagctttagactggcaacatcattcaatttctcttctgcaagggtctattcatgtaatggtcatgcaagagtttcttaactgatttgcatttttaatttacatttaaaatagtaagaaatctagcata

SEQ ID NO: 242312 - DNA, 592 bp, Homo sapiens
gtcttaataggacttattctaactcaatttatcagtgcatttattcatcaaatgtttgtagrctatcaattattggccacataattgatagtctaggttctaagaatttaaaataaaaagacacaattatctttataaaattgtgtgttttattattgtagttgttcacagcccagagaaagagacaaatctgtaaacaagtcaaaagcccagtggtggcagatattgtgacatagagatcaaagaaggaaactgacatatccaaagtcacaaagctaataacttgcagacctgggtttccacgtctgttgggactttgctcaatgtatttttttttttttcacctaaagtcacaaaagctgctaacatttgagttctacttctttccctctaaaggacattggaggttttagaagacgtttgatagtccttgactaggaggattaagacactaaattgcactgacatggtccataaatcaccaaatgagtcagatccagacagtggctcagtaggaacaggacacatcaagagtgatagccatcaagattgtgttggagaattgcaggctatatacagggtccaggccaag

SEQ ID NO: 242313 - DNA, 592 bp, Homo sapiens
gtcttaataggacttattctaactcaatttatcagtgcatttattcatcaaatgtttgtaggctatcaattattggccacataattgatagtctaggttctaagaatttaaaataaaaagacacaattatctttataaaattgtgtgttttattattktagttgttcacagcccagagaaagagacaaatctgtaaacaagtcaaaagcccagtggtggcagatattgtgacatagagatcaaagaaggaaactgacatatccaaagtcacaaagctaataacttgcagacctgggtttccacgtctgttgggactttgctcaatgtatttttttttttttcacctaaagtcacaaaagctgctaacatttgagttctacttctttccctctaaaggacattggaggttttagaagacgtttgatagtccttgactaggaggattaagacactaaattgcactgacatggtccataaatcaccaaatgagtcagatccagacagtggctcagtaggaacaggacacatcaagagtgatagccatcaagattgtgttggagaattgcaggctatatacagggtccaggccaag

SEQ ID NO: 242314 - DNA, 592 bp, Homo sapiens
gtcttaataggacttattctaactcaatttatcagtgcatttattcatcaaatgtttgtaggctatcaattattggccacataattgatagtctaggttctaagaatttaaaataaaaagacacaattatctttataaaattgtgtgttttattattgtagktgttcacagcccagagaaagagacaaatctgtaaacaagtcaaaagcccagtggtggcagatattgtgacatagagatcaaagaaggaaactgacatatccaaagtcacaaagctaataacttgcagacctgggtttccacgtctgttgggactttgctcaatgtatttttttttttttcacctaaagtcacaaaagctgctaacatttgagttctacttctttccctctaaaggacattggaggttttagaagacgtttgatagtccttgactaggaggattaagacactaaattgcactgacatggtccataaatcaccaaatgagtcagatccagacagtggctcagtaggaacaggacacatcaagagtgatagccatcaagattgtgttggagaattgcaggctatatacagggtccaggccaag

SEQ ID NO: 242315 - DNA, 634 bp, Homo sapiens
attatagattaccatattctctgtgtcttctcacagccttccttctgtaggtgtctctgtcctaatctcgtcttcttataaggacaccagtactattggattagggctgaccctaatgacttcttgctaacttaattacctgtttaaagatcctatctcctaatacataaatatactgaagcaccagggattaggacttcaacatataaatggggggaagtagggcaggattcagcctataacctgggaamtttgattttttatccatctctggccaccattgtctctctgacaaaggaaatgtgccagttatgacaaatattcccatattttagagaatgcataagctgtgacccaaaatgaaggatagcattaactgtttagcaaataagtagtagtcttaaatggagaagatttagaaaagattgactagaaagtgaatctatgaaataaaataattcaacacatacaatcattgttataaacaagttatatgtattatctaattaacccttgcaatagagctataagataattagttgataatatgcagagaataggtaaaaattgtcttaaaattcatctgcattaaaatatttgcccttggtagaagatgtgacttcactgatcaagc

SEQ ID NO: 242316 - DNA, 634 bp, Homo sapiens
attatagattaccatattctctgtgtcttctcacagccttccttctgtaggtgtctctgtcctaatctcgtcttcttataaggacaccagtactattggattagggctgaccctaatgacttcttgctaacttaattacctgtttaaagatcctatctcctaatacataaatatactgaagcaccagggattaggacttcaacatataaatggggggaagtagggcaggattcagcctataacctgggaaatttgattttttatccatctctggccaccattgtctctctgacaaaggaaatgtgccagttatgacaaatattcccatattttagagaatgcataagctgtgacccaaaatgaaggatagcattaactgtttagcaaataagtagtagtcttaaatggagaagrtttagaaaagattgactagaaagtgaatctatgaaataaaataattcaacacatacaatcattgttataaacaagttatatgtattatctaattaacccttgcaatagagctataagataattagttgataatatgcagagaataggtaaaaattgtcttaaaattcatctgcattaaaatatttgcccttggtagaagatgtgacttcactgatcaagc

SEQ ID NO: 242317 - DNA, 634 bp, Homo sapiens
attatagattaccatattctctgtgtcttctcacagccttccttctgtaggtgtctctgtcctaatctcgtcttcttataaggacaccagtactattggattagggctgaccctaatgacttcttgctaacttaattacctgtttaaagatcctatctcctaatacataaatatactgaagcaccagggattaggacttcaacatataaatggggggaagtagggcaggattcagcctataacctgggaaatttgattttttatccatctctggccaccattgtctctctgacaaaggaaatgtgccagttatgacaaatattcccatattttagagaatgcataagctgtgacccaaaatgaaggatagcattaactgtttagcaaataagtagtagtcttaaatggagaagatttagaaaagattgactagaaagtgaatctatgaaataaaataattcaacacatacaatcattgttataaacaagttatatgtattatctaattaaccsttgcaatagagctataagataattagttgataatatgcagagaataggtaaaaattgtcttaaaattcatctgcattaaaatatttgcccttggtagaagatgtgacttcactgatcaagc

SEQ ID NO: 242318 - DNA, 565 bp, Homo sapiens
ggttaaactcaattttgtttaaactagagataaccacacatattttactgcagggcctttttttttctttctcataacacccaatcacatctcattgacataatggtctgtgaaatccagattggatttctttgctcccctaagcatactcaggaaagtgtaccactccagtgccccagagtttgtgtctttttctttcaagcttccagcwcagaatgagttgaatgtcttagcccaggtccaacaatggggtttgaggggattgccattgagcttaccctgggttgggtccagttcagtgtattcatagttgaaacaaggctgctgggacaaagcctttgagttgggaggtatgcacaaggacagaagcaaattctggctttcacagataccccaaatacagctgtatcattattttctgaaggtgtggcctagtggttcttatacccaagaaaacaactaggttgggtgcggttgttcacacctgtaatcccagcactttgggaggccgaggcgggtggatcacctgaggtcaggagttcaagcccagtctgaccaacatggt

SEQ ID NO: 242319 - DNA, 565 bp, Homo sapiens
ggttaaactcaattttgtttaaactagagataaccacacatattttactgcagggcctttttttttctttctcataacacccaatcacatctcattgacataatggtctgtgaaatccagattggatttctttgctcccctaagcatactcaggaaagtgtaccactccagtgccccagagtttgtgtctttttctttcaagcttccagctcagaatgagttgaatgtcttagcccaggtccaacaatggggtttgaggggattgccattgagcttaccctgggttgggtccagttcagtgtattcatagttgaaacaaggctgctgggacaaagcctttgagttgrgaggtatgcacaaggacagaagcaaattctggctttcacagataccccaaatacagctgtatcattattttctgaaggtgtggcctagtggttcttatacccaagaaaacaactaggttgggtgcggttgttcacacctgtaatcccagcactttgggaggccgaggcgggtggatcacctgaggtcaggagttcaagcccagtctgaccaacatggt

SEQ ID NO: 242320 - DNA, 608 bp, Homo sapiens
ctctttctgaatcatcagtcaagcacattgttttagagctacacccctttctatgactctcttttccctaaccaaaactgaagccccaactcttcaagaggctactggaagccctctacaagtgagtgatcacctccttttatggcctaacctcctatggtccacacttcagtttcaatgatttgcttggggttctccaatagtgtcagctctctatataaggtttttcctctgccagaaatgttctctctgtatcctaaactgaggcagtgcctctcagccatggcagtattgatgttcagsgcctgataactcttggctatagggactgtcttgtgcattataagatgtttagcaacatctgtgggtccatggtcactaacccctactccctaagtgtcaatatccctccacactcatcagttatgaaccaaccatctctccaaacaatgccaaatgttcctcaggggacaaaactgtctactcttgagaaccaaaattgtctactcccttctgctcaccatcaaaaatctagcccttctgatattcctcagatcttcctaacacatgcttatgctttgctttgcatcaactgcttaagaatattg

SEQ ID NO: 242321 - DNA, 608 bp, Homo sapiens
ctctttctgaatcatcagtcaagcacattgttttagagctacacccctttctatgactctcttttccctaaccaaaactgaagccccaactcttcaagaggctactggaagccctctacaagtgagtgatcacctccttttatggcctaacctcctatggtccacacttcagtttcaatgatttgcttggggttctccaatagtgtcagctctctatataaggtttttcctctgccagaaatgttctctctgtatcctaaactgaggcagtgcctctcagccatggcagtattgatgttcagcgcctgataactcttggcyatagggactgtcttgtgcattataagatgtttagcaacatctgtgggtccatggtcactaacccctactccctaagtgtcaatatccctccacactcatcagttatgaaccaaccatctctccaaacaatgccaaatgttcctcaggggacaaaactgtctactcttgagaaccaaaattgtctactcccttctgctcaccatcaaaaatctagcccttctgatattcctcagatcttcctaacacatgcttatgctttgctttgcatcaactgcttaagaatattg

SEQ ID NO: 242322 - DNA, 608 bp, Homo sapiens
ctctttctgaatcatcagtcaagcacattgttttagagctacacccctttctatgactctcttttccctaaccaaaactgaagccccaactcttcaagaggctactggaagccctctacaagtgagtgatcacctccttttatggcctaacctcctatggtccacacttcagtttcaatgatttgcttggggttctccaatagtgtcagctctctatataaggtttttcctctgccagaaatgttctctctgtatcctaaactgaggcagtgcctctcagccatggcagtattgatgttcagcgcctgataactcttggctatagggactgtcttgtgcattataagatgtttagcaacatcygtgggtccatggtcactaacccctactccctaagtgtcaatatccctccacactcatcagttatgaaccaaccatctctccaaacaatgccaaatgttcctcaggggacaaaactgtctactcttgagaaccaaaattgtctactcccttctgctcaccatcaaaaatctagcccttctgatattcctcagatcttcctaacacatgcttatgctttgctttgcatcaactgcttaagaatattg

SEQ ID NO: 242323 - DNA, 577 bp, Homo sapiens
gtgttagcagtttggtagagtgcttgacagcccaaactgcattacaggtagctaatccccatggctgagctccattaaagaatagatggtatctgttaatacagccatagagtgtgggtcattgtgctgaaaggcagtctagctgctaacagaaagattataatgtgacttcattctattttaaacttgcaaaatgtatggtagatatactagtcatgattgattaaagatatgagagaggattttatgactcccctggtatgtgccaggtttataattcccaccaggaagaaaaatgtctccagtggcttaaayaagaccaatagcaaatttcaagctgtggacagctacgtatctcctgtatatccttcatagtgactttccaggtatttcatgcagttctttggaagagataagagtctgacaccttgattcttaatgcttattaaaagtgaccccttaagaaaaaaggacttctggtccaatattgtgtctgcagtcaaatgtgggttattttttttttttcgtgttagactagtaaaggcaagtacatgtcaatttatgtgccatttctaaa

SEQ ID NO: 242324 - DNA, 638 bp, Homo sapiens
cattattttataggaccgctactatttaacatctctccaaggacagtataacactcttcccagctttcgaacttctgcctggtttgaacctttcatgtttatcttcaaatagatttttctgtgtcttctcttaatttaataatatccatggccattggtctaggtctattctacatctgaataggattcttacactgmtgtatgctgtttgccccggtaatgctgtttacctcctgttttactgacttaggacccatcaaggtgaagaaagctagccctctttccctgatacctagcttcttatgttcctgcctttcaaaagttgagaaacaagagcaagaaaattatgtagtacccttcatggtgacttttttttcctaagagttatctgccatttctctggttccatattacttatcaatccaggactgcagccttcataatctcaagcaaaaatcagggtctgttataaggggaacattggtgaggcagagacgaaagggggagaggaagaccatcttgccttcattgagatgaaaatttacacaaatcaatttgtttctaacgtcacggagttctctgagtgtatttttaaaaagctgttcataaaaaagtaagtaaataaacttgagttaatt

SEQ ID NO: 242325 - DNA, 638 bp, Homo sapiens
cattattttataggaccgctactatttaacatctctccaaggacagtataacactcttcccagctttcgaacttctgcctggtttgaacctttcatgtttatcttcaaatagatttttctgtgtcttctcttaatttaataatatccatggccattggtctaggtctattctacatctgaataggattcttacactgctgtatgctgtttgccccggtaatgctgtttacctcctgttttactgacttaggacccatcaaggtgaagaaagctagccctctttccctgatacctagcttcttatgttcctgcctttcaaaagttgagaaacaagagcaagaaaattatgtagtacccttcatggtgacttttttttcytaagagttatctgccatttctctggttccatattacttatcaatccaggactgcagccttcataatctcaagcaaaaatcagggtctgttataaggggaacattggtgaggcagagacgaaagggggagaggaagaccatcttgccttcattgagatgaaaatttacacaaatcaatttgtttctaacgtcacggagttctctgagtgtatttttaaaaagctgttcataaaaaagtaagtaaataaacttgagttaatt

SEQ ID NO: 242326 - DNA, 540 bp, Homo sapiens
ggtctagttccttccctttttcgcaatggtaaagaaactgagactcagaaaatttaaatgaatttttccaaagctgtacagtgcagtggcagtacaagactataaaaactgtctctagtttgtgatgattcacagagctaatatataatgaagagctcagcagagtagatgcatagggtagacattcagcatatgtcaagtctctaacgtcaagcctctactagaaatcggtcaccgcatgtttaatggcaataatagacataatcccacacagtcattttgcaggtggaaaaaaactgagacacacagaaaaccgactcatccacacaatgcaactcgatagtggcactggccaacgtggaacctraagcttctgactctaagtgtcttttttgcactataccatgctgcccctctctcactatttaaagtaaataataataaatgatgactctatgtatcccatatatagaaccagttctagaattttagctcaaccatttagttggaaatcaaaaaacatccaaaaacgtggtggag

SEQ ID NO: 242327 - DNA, 549 bp, Homo sapiens
aggcagcagccccagtggtcctcttgaaatctaagccagagtcagttcatgtcactgcccattacaaaactttccagtgttcccattttaattacagcaaaaatgtggtccatacaatggcccacaaatccctacatagtctggcccattgacctctctgttttatctcccaggactctctccaattgtcgcttggctccagacatggtggcaccctctccccktctccaacatgcaaggaaattcttgcctcaggcctttgaaatagctgttgctttagcctggaatgtttttccctacctatctgtatagtgaactctgttaccttctgtaagtctttgttcaaatgtcacattgaccaccatatttgaatcgccacctacttcagcactcctattcttccttatccagctccactttttctttattccctcacagcacttaccaccttctcccatagtaaaataatttactcgattattaagtatattgtcctgttgtcctctgctgaaatgtagactccatggtagcaggcgtttgggtttcatt

SEQ ID NO: 242328 - DNA, 549 bp, Homo sapiens
aggcagcagccccagtggtcctcttgaaatctaagccagagtcagttcatgtcactgcccattacaaaactttccagtgttcccattttaattacagcaaaaatgtggtccatacaatggcccacaaatccctacatagtctggcccattgacctctctgttttatctcccaggactctctccaattgtcgcttggctccagacatggtggcaccctctcccctyctccaacatgcaaggaaattcttgcctcaggcctttgaaatagctgttgctttagcctggaatgtttttccctacctatctgtatagtgaactctgttaccttctgtaagtctttgttcaaatgtcacattgaccaccatatttgaatcgccacctacttcagcactcctattcttccttatccagctccactttttctttattccctcacagcacttaccaccttctcccatagtaaaataatttactcgattattaagtatattgtcctgttgtcctctgctgaaatgtagactccatggtagcaggcgtttgggtttcatt

SEQ ID NO: 242329 - DNA, 484 bp, Homo sapiens
tgtgaactgctcatgcaagggatctaggttgcactctccttatgataatctaatgcctgatgatctgaggtggaacagtttaatccccaaactatccccacactgtcccttcccacrgaaaaattgtcttccttgaaaccagtccctggggccaaaaatattagggaccactgatctataggattttcattttatttaaatgtgatgtgaaagcatgggaaagtttggaaaagtctcatgatcttatttaggatgataaaatcatgaattaaaaagctacttggtggagagagaaagcaaagagaccagcaaggaggctattgtagcatcaagtgacaaatgatggtggattgagccagaatggtggcagtggagtggaatcaggttctggatattctttgaagatggatttgatatggtaagggaaggagaggaattaagaataggtcctagattcctcagctgagctgggaaaatccatttt

SEQ ID NO: 242330 - DNA, 484 bp, Homo sapiens
tgtgaactgctcatgcaagggatctaggttgcactctccttatgataatctaatgcctgatgatctgaggtggaacagtttaatccccaaactatccccacactgtcccttcccacagaaaaaytgtcttccttgaaaccagtccctggggccaaaaatattagggaccactgatctataggattttcattttatttaaatgtgatgtgaaagcatgggaaagtttggaaaagtctcatgatcttatttaggatgataaaatcatgaattaaaaagctacttggtggagagagaaagcaaagagaccagcaaggaggctattgtagcatcaagtgacaaatgatggtggattgagccagaatggtggcagtggagtggaatcaggttctggatattctttgaagatggatttgatatggtaagggaaggagaggaattaagaataggtcctagattcctcagctgagctgggaaaatccatttt

SEQ ID NO: 242331 - DNA, 484 bp, Homo sapiens
tgtgaactgctcatgcaagggatctaggttgcactctccttatgataatctaatgcctgatgatctgaggtggaacagtttaatccccaaactatccccacactgtcccttcccacagaaaaattgtcttccttgaaaccagtccctggggccaaaaatattagggaccactgatctataggattttcattttatttaaatgtgatgtgaaagcatgggaaagtttggaaaagtctcatgatcttatttaggatgataaaatcatgaattaaaaagctacttggtggagagagaaagcaaagagaccagcaaggaggctattgtagcatcaagtgacaaatgatggtggattgagccagaatggtggcagtggagtggaatcaggttctggatattctttgaagatggatttgatatggtaagggaaggagaggaattaagaatrggtcctagattcctcagctgagctgggaaaatccatttt

SEQ ID NO: 242332 - DNA, 522 bp, Homo sapiens
atactataccaaagtcgggttgcaatttggtatcttattgccacaaagagtctgtttggtcagtcttatgatctcagttttaatgttaatgctggtcacctgtgcctaaactccaaaaaggcaggagtataacgaggcaaatctaacctcccttcccgtcatggcctggaatttagtttttcaggtttctctgtgttccctttggccaagatggggttcattcagtcagttgggrgcttaggattttatctttggtttatactttaaaggtttttagttagcctttgttagccacagctcttattgttatctcaggcagctacagtgtagaaaaatttctcattttttcaataaacaccttaggtatagagctgtttatacacagtgagctctgagtcaggtcaaataaaggcaagccttgagcatgcagctttttagggaactaccagacaacacaaatagtgataattcctctgggatggggcattttgcggagattaaaacccactctacccacccagt

SEQ ID NO: 242333 - DNA, 611 bp, Homo sapiens
ttattaaatgaaccaatgctttgaaagacacaagctgctaagacttacagaaacagaaatagatcattggaataggcctatacctattaaagaaattgaatcaataattaataacattccacaaatacaagaaccagtgaattctaccaaacatttaagatataaaatggaagagggactatttcctaactcattctatgaggccatgattaccctaattcaaaaaaacagataaaaacattacaggaaaagaaaaccacagaccagaaattctcatgaatatagattcaaaaatactcatccaaatattggcaaatatatccattaaaaataggttctggccaggcatggtggctcatgcctgtaatctcaacacttagggaggcagaggcaggaggatagyttgagcccaggagttcgagacctgcctgggcaacatagtgagatcctgttctccacaaaatggaaaaaaaaaagacaaaaaaaaaaaggttctgttggacaagaggttgttggaaaaaaaagaaaaaaattggtaagttggacttttattaattaaacaattctgctttcctaaaagacacttaagagaataaaacaacaagccacag

SEQ ID NO: 242334 - DNA, 621 bp, Homo sapiens
atcactgctatatgaaaactccgagttttatgagtgcttctgggaatacctagtaaagaaaacatatctgtgtgctttatcttttaatagttaaaaacagttttgacaataagtagtttatatttattagttattataatatgtataattgtaaatagtttatmggtattagttattataatatacatgtacatataacacattcatataaactataagtagtttatacgtattagtaattataatatacctattataataactaagaatagaaaggcaatgtagaaactaagagttatataatacccatagtaattaatcaataagcaaatactatttttagtatttttatactatttgtatatgtattcattactttatgtatataattctttatataattcttaggttctataatacctttattctgtatattttgaattatgtatttaatagcctaatatatttctaatttgcagaaaacaaggaaaattgtcttccttcaattattataagtatgcttttctttatccagggaggctaaaaggcaagatcataacaagctattatatggaaaattatttcttcaaaatattccttttaaaattgaggcaacagaat

SEQ ID NO: 242335 - DNA, 559 bp, Homo sapiens
gttttcctattgtttcaaatcagagaaattaactggacaaagggctgcagatctaattctctcagtgtgtgaagagtctcaagaagctagtgctttgagagaatccatgagaaacccagggacctttaacatctcctcattattatttgcatagcatactaccaggggagatggagaattaaaataataatatatttttaataactttaagttctcttaaatcatatggttttttaaggattaaaaaaaatatcctggatatctatggctatacttagacatatgtaatatacatatataacacaatagcttttggggacaagtggtttttggttacagagtggtaaagtctgagattttggtgcccatgtcacccaagtagtgtacattgyacccaatatgtagtgttttatccctcacccacctcctactataccccttagttgtctccaatgtccattataccactctgtatgcatacccatggcgtagctaccacttaaaagtgagaatatatgatatttggttttccattcctgagttacttcacttagaataa

SEQ ID NO: 242336 - DNA, 335 bp, Homo sapiens
ttataccactctgtatgcatacccatggcgtagctaccacttaaaagtgagaatatatgatatttggttttccattcctgagttacttcacttagaataatggcctscagctccagttggagttgctgcaaatgacattatttcattctttttagggctgagtattatgtcatggtgtatgtttaccacatttctttatccactcattggttgaggagcacttaggttggttctgtatctttgtaattgtgaattgtactgcaataaacatatacatgcaggtgtatttttgatacaatgactttttaatttgagtagataaccagtagtgggat

SEQ ID NO: 242337 - DNA, 335 bp, Homo sapiens
ttataccactctgtatgcatacccatggcgtagctaccacttaaaagtgagaatatatgatatttggttttccattcctgagttacttcacttagaataatggcctgcagctccagttggagttgctgcaaatgacattatttcattctttttagggctgagtaktatgtcatggtgtatgtttaccacatttctttatccactcattggttgaggagcacttaggttggttctgtatctttgtaattgtgaattgtactgcaataaacatatacatgcaggtgtatttttgatacaatgactttttaatttgagtagataaccagtagtgggat

SEQ ID NO: 242338 - DNA, 651 bp, Homo sapiens
catcagggggacaaaaagttctcaagttaatgacctaacgtagcaactaggggaattagaaaaaaagcaacagaaaagacccaaccccaaagctagtagaagaaaaaaaaaactgaagtcagagaactgaaaaaaaattgttatctaaaagtccacacaaaagatgaagccaagagtttttttaataaacaatactgatagatcattagctagattagcaaagaaaaagagaagatccaaataagtataatcagaaattataaagattatgttaaaaytgatcccatgaaaatacaaaagatatgcagagactattatgagcacctctctgcacacaaatctagaggaaatgaataaattcctggaaacacacattctcccaagattgaatcaggaagaaagtgaaaacctgaacggaccaataggaagtttggaaatggaattagtaataaaaaacctacgaaaataaaataaaataaaataaaagccccgtaacagatggattcacagctgagttctgtcagatgtgcaagggagaaatgataccaatcctactaaaatgtctccaaaaaatcaagcagaaggggcttctacctaactcatactacaaagccagcattaccctgttaccaaatctggcatagaccacgg

SEQ ID NO: 242339 - DNA, 651 bp, Homo sapiens
catcagggggacaaaaagttctcaagttaatgacctaacgtagcaactaggggaattagaaaaaaagcaacagaaaagacccaaccccaaagctagtagaagaaaaaaaaaactgaagtcagagaactgaaaaaaaattgttatctaaaagtccacacaaaagatgaagccaagagtttttttaataaacaatactgatagatcattagctagattagcaaagaaaaagagaagatccaaataagtataatcagaaattataaagattatgttaaaactgatcccatgaaaatacaaaagatatgcagagactattatgagcacctctctgcacacaaatctagaggaaatgaataaattcctggaaacacacattctcccaagattgaatcaggaagaaagtgaaaacctgaacggaccaataggaagtttggaaatggaattagtaataaaaaacctacgaaaataaaataaaataaaataaaagccccgtaacagatggattcacagctgagttctrtcagatgtgcaagggagaaatgataccaatcctactaaaatgtctccaaaaaatcaagcagaaggggcttctacctaactcatactacaaagccagcattaccctgttaccaaatctggcatagaccacgg

SEQ ID NO: 242340 - DNA, 651 bp, Homo sapiens
catcagggggacaaaaagttctcaagttaatgacctaacgtagcaactaggggaattagaaaaaaagcaacagaaaagacccaaccccaaagctagtagaagaaaaaaaaaactgaagtcagagaactgaaaaaaaattgttatctaaaagtccacacaaaagatgaagccaagagtttttttaataaacaatactgatagatcattagctagattagcaaagaaaaagagaagatccaaataagtataatcagaaattataaagattatgttaaaactgatcccatgaaaatacaaaagatatgcagagactattatgagcacctctctgcacacaaatctagaggaaatgaataaattcctggaaacacacattctcccaagattgaatcaggaagaaagtgaaaacctgaacggaccaataggaagtttggaaatggaattagtaataaaaaacctacgaaaataaaataaaataaaataaaagccccgtaacagatggattcacagctgagttctgtcagatgtgcaagggagaaatgataccaatcctactaaaatgtctccaaaaaatcaagcagraggggcttctacctaactcatactacaaagccagcattaccctgttaccaaatctggcatagaccacgg

SEQ ID NO: 242341 - DNA, 322 bp, Homo sapiens
ggacagattccctcagcatttgcttgtctgaggaagacattatttctctttcatttatgagactcagttttgctggatacaaaatttttgactaatagttattttgtctaaggatattaaagataagcctaaagatasagtgaacttctgggctgtaagatttctgctgagaagtctgctgttagtctaataggttttcctttataggttacttgatacttttgtctcactgttcttagaattcatttcttcatgttgactttagatagcctgattactatatggctttgtaatgtcagttttgcagtgaacctccccagag

SEQ ID NO: 242342 - DNA, 322 bp, Homo sapiens
ggacagattccctcagcatttgcttgtctgaggaagacattatttctctttcatttatgagactcagttttgctggatacaaaatttttgactaatagttattttgtctaaggatattaaagataagcctaaagatagagtgaacttctggsctgtaagatttctgctgagaagtctgctgttagtctaataggttttcctttataggttacttgatacttttgtctcactgttcttagaattcatttcttcatgttgactttagatagcctgattactatatggctttgtaatgtcagttttgcagtgaacctccccagag

SEQ ID NO: 242343 - DNA, 529 bp, Homo sapiens
ggggtgtgccactgatgtgcactcccccttatcctaagagtaggagtccctgagggccagactagtatgaatgctgctacttctctggctctagccacctagtgggactgccacactccaggttggtgctggggaatgtctacaaggggtccagtratgtgacctgttctcaaggctccgtagtgagtagcaacaacagctctcatgggggtgacaggagaatgacatagactctgtgagatttcttgattataagtagtcttggtgcattggtttttctgtaatgccacctgtagtagtaatgaactggtcacatggacagactcaggacctcctagttagccaaggttatataggcaaaggtgatagcttaggtcacacacaagttttctctttcctgtgcactgttagtgtgcctgcagatgctgtaatggattgtgtcagtaggcttccagccacaaggtggcacttgaaaaagagcaccagctggtagcagtgggatttgtgcttgccttatgttacccagggg

SEQ ID NO: 242344 - DNA, 529 bp, Homo sapiens
ggggtgtgccactgatgtgcactcccccttatcctaagagtaggagtccctgagggccagactagtatgaatgctgctacttctctggctctagccacctagtgggactgccacactccaggttggtgctggggaatgtctacaaggggtccagtgatgtgacctgttctcaaggctccgtagtgagtagcaacaacagctctcatgggggtgacaggagaatgacayagactctgtgagatttcttgattataagtagtcttggtgcattggtttttctgtaatgccacctgtagtagtaatgaactggtcacatggacagactcaggacctcctagttagccaaggttatataggcaaaggtgatagcttaggtcacacacaagttttctctttcctgtgcactgttagtgtgcctgcagatgctgtaatggattgtgtcagtaggcttccagccacaaggtggcacttgaaaaagagcaccagctggtagcagtgggatttgtgcttgccttatgttacccagggg

SEQ ID NO: 242345 - DNA, 406 bp, Homo sapiens
atattttaggctttgggaacattgtagaagtctctgccacaactgctaaaccctgttgtaacaagaaagtagacaatatgcaaacaaatggctgtggctacaatattatcaactttattcatagacacaaatgttawattttgttaattttgtgttacggactactattcttctgttgatatttttgtattattcaaaaaatataaaaacattcttagctgcaggttgtacaaaaacaggcaataggacaggttcagtatatgggctgaagtctgctaaaccctgtggttcaactagaaatattacagtatatagctgctaatagcaagagcaatgtcctatttatacacaagaaaattatcacgggtggaaattatattaaatacattttaatcatgcaaattat

SEQ ID NO: 242346 - DNA, 596 bp, Homo sapiens
tttatgaaatcttaggtaccacaggaagaagtataaattgatacaactgatttgaaaaaaagttagtctgtgattaaataagtatccacatatgtttgctcctaaaattccttggatagttatatgttgtagataaacttatgcatataattctgagagcatatgtccaagtattttcatattgactttgctcctaagcacccaaactttaaaataacacaaatgtatataaggaataaaatagaaaattctcatctatataaacaatcaaatattatagagcagtgaaaataaataaattacaacygcttgcaacaacagggctgtcactcataaacatatgttgaacaaaaggagtgtggcacaaaataatacagaaagaggatttcatagtaattatcaaagcaggccaaaaaaaactaaggtatgttgttcagagatgcatacatgctatacctttttgaagcacagcaaaaaaattatacataaaacttagggtgagaggagcttcttttaggaagggacacttgggggagtctggggcactaatatagtctaattcctggcctagtttggtttacatgggttagctttac

SEQ ID NO: 242347 - DNA, 563 bp, Homo sapiens
ataagcaaagtagcattgtcaatttaaaaaaatcacaatagcatttaaaatttcagaaaactgaacaaattaatgttcacaagaagcagaaaaataaagtgtgatttactcattccttggaatagtgacacacatatcagattggattattccgagaacaggacttagagagagagagaaaaaagcaaattaaatcaaagagaaccaacaggatgaaagatttactctattagacatcgaaactttataacatacagcaattcagacacatcttgttcttgaagatggatagtatgctggagtcaccttgcctcagcttctggctaygaagtctcccctgaactcctcatgaagatgggctttataaatacaaactaaccaattcccaaactcatactctatagggctgtcacactccaggccactgtgcttctgtcctaatcacgctagggccaaaaaccagagaaccagagacagctcttatgccccagagcccactgaaattattcaaatgagccagtcctaagcttgtttaccctgcttggtttcttcctgcaaacacc

SEQ ID NO: 242348 - DNA, 600 bp, Homo sapiens
caagtacacaataagcaaagtagcattgtcaatttaaaaaaatcacaatagcatttaaaatttcagaaaactgaacaaattaatgttcacaagaagcagaaaaataaagtgtgatttactcattccttggaatagtgacacacatatcagattggattattccgagaacaggacttagagagagagagaaaaaagcaaattaaatcaaagagaaccaacaggatgaaagatttactctattagacatcgaaactttataacatacagcaattcagacacatcttgttcttgaagatggatagtatgctggagtcaccttgcctcagcttctggctacgaagtctcccctgaactcctcatgaagatgggctttataaatacaaactaaccaattcccaaactcatactctatagggctgtcacactccagrccactgtgcttctgtcctaatcacgctagggccaaaaaccagagaaccagagacagctcttatgccccagagcccactgaaattattcaaatgagccagtcctaagcttgtttaccctgcttggtttcttcctgcaaacaccacagtctagggtcttgctcctgaattc

SEQ ID NO: 242349 - DNA, 437 bp, Homo sapiens
cttactaagctattaattcaaattctatattgttttaaacaataaaaattcaaaatatatattttgataagaaaggaatttgaatttgccaatagttgctttctcatttaattttagaaaagaaaaaagtccctatcttcgaatagacaactttattaaatctgatgaatttttgtaaagtctgtttaagttgtttsttctttgattggttaaacaagtaacttttaaaacaatgttaggaactaacatattatatatatttcaggatatcttataatattatttcatttttctatgtaactgtacttgtatctatgtctatgtctatatctgtatctgtatctatctatatctgtatttagacagagtatctacaagaacaagtaggtgggagttaggtcctaatccaaggattttcagtcactgataaatacagt

SEQ ID NO: 242350 - DNA, 511 bp, Homo sapiens
aagtctattcagtgtaaactgcctccaccttttttgatgtttatcaagagaaacccaaaatacaagattggagaattaaatattgaaatagtcaactatgggaatgttctcaaaaaacaaggaagcaagcaaacaaacaaacaaaaacacattgtgctggccaacactgtgaaagctaaagtaactctggaaaygtatttggatcagttactgcaaatttataattttcctttaggaagtagacagtaggataaaccattgaaatgtttctttcttgttttgatgtagttccaatacttactaaatatgtggcttggacatgttagcttctttatttttaaaacagaacaaaaaatagacgtcatattgatttgaatactaaataggatagaagtaataaaccatatatggcaatgcttagtacattagtaaacacttgataaataagtggtagctattattattgcttgccaaataactttacagaggtgtcaaaaaattcaaaatccca

SEQ ID NO: 242351 - DNA, 503 bp, Homo sapiens
gcatttattttctatctaattttttcagatatcaaataatccctcatatattatacatttcccatgaagtttttatttacaytggatgaatttgtagttctttaaccatgtgaaacatttcattatgaaatatttcaataaaaatatgatgtataagttttatcaatatgtttttgttcattcttgcatatattagtttttttggctattaaattttctaagtggaaactttttggtaagatttttctttctggtttaactggctatctgatcgaaaaacaaccaaaatatctccagatggattaaagaattacacacaaaaatacaactttagtgaagtatatccatatgttatcaaatagcttaaaactaacttttgaaaaaaaatcaatgtgactacttaaaaattttgttcagataattacagggataccagtttgaaataatctaacttaaaatcatacatttatgtacataaaaataaatttggtatcaatgaaaac

SEQ ID NO: 242352 - DNA, 503 bp, Homo sapiens
gcatttattttctatctaattttttcagatatcaaataatccctcatatattatacatttcccatgaagtttttatttacattggatgaatttgtagttctttaaccatgtgaaacatttcattatgaaatatttcaataaaaatatgatgtataagttttatcaatatgtttttgttcattcttgcatatattagtttttttggctattaaattttctaagtggaaactttttggtaagatttttctttctggtttaactggctatctgatcgaaaaacaaccaaaatatctccagatggattaaagaattacacacaaaaatacaactttagtgaagtakatccatatgttatcaaatagcttaaaactaacttttgaaaaaaaatcaatgtgactacttaaaaattttgttcagataattacagggataccagtttgaaataatctaacttaaaatcatacatttatgtacataaaaataaatttggtatcaatgaaaac

SEQ ID NO: 242353 - DNA, 468 bp, Homo sapiens
agattcaggtaaccctactactaatttacacaattacatagtgaatctttgaggcttaggtgctaatatatatgaagtaactaaaataaaaactaataaattccttgtaattggtttgcattwatttcagcagaaaagatatattactattttatttataattataaaatcatgtgttaattttcagtatgctattctgtaagtgaaagtatgtttgaaaattgtaatggtggagaaaaatttagctgcactttacttaaaactaaacatacacacattacagatagagtccaatgagtttttaagaaatttattgagctataattaacatattaaaagccaaaaatatgtaagataaattattagatatgctctgacatatttatacatccatgagatcatcattattgtcaagatagtgaacatataaatccacaaaatgtttcctcatgactacttttaataatc

SEQ ID NO: 242354 - DNA, 468 bp, Homo sapiens
agattcaggtaaccctactactaatttacacaattacatagtgaatctttgaggcttaggtgctaatatatatgaagtaactaaaataaaaactaataaattccttgtaattggtttgcattaatttcagcagaaaagatatattactattttatttataattataaaakcatgtgttaattttcagtatgctattctgtaagtgaaagtatgtttgaaaattgtaatggtggagaaaaatttagctgcactttacttaaaactaaacatacacacattacagatagagtccaatgagtttttaagaaatttattgagctataattaacatattaaaagccaaaaatatgtaagataaattattagatatgctctgacatatttatacatccatgagatcatcattattgtcaagatagtgaacatataaatccacaaaatgtttcctcatgactacttttaataatc

SEQ ID NO: 242355 - DNA, 468 bp, Homo sapiens
agattcaggtaaccctactactaatttacacaattacatagtgaatctttgaggcttaggtgctaatatatatgaagtaactaaaataaaaactaataaattccttgtaattggtttgcattaatttcagcagaaaagatatattactattttatttataattataaaatcatgtgttaattttcagtatgctattctgtaagtgaaagtatgtttgaaaattgtaatggtggagaaaaatttagctgcactytacttaaaactaaacatacacacattacagatagagtccaatgagtttttaagaaatttattgagctataattaacatattaaaagccaaaaatatgtaagataaattattagatatgctctgacatatttatacatccatgagatcatcattattgtcaagatagtgaacatataaatccacaaaatgtttcctcatgactacttttaataatc

SEQ ID NO: 242356 - DNA, 468 bp, Homo sapiens
agattcaggtaaccctactactaatttacacaattacatagtgaatctttgaggcttaggtgctaatatatatgaagtaactaaaataaaaactaataaattccttgtaattggtttgcattaatttcagcagaaaagatatattactattttatttataattataaaatcatgtgttaattttcagtatgctattctgtaagtgaaagtatgtttgaaaattgtaatggtggagaaaaatttagctgcactttacttaaaactaaacatacacacattacagatagagtccaatgagtttttaagaaatttattgagctataattaacatattaaaagccaaaaatatgtaagataaattattagatatgctctgacatatttatacatccrtgagatcatcattattgtcaagatagtgaacatataaatccacaaaatgtttcctcatgactacttttaataatc

SEQ ID NO: 242357 - DNA, 522 bp, Homo sapiens
ccatattacaaatagaagctgggtgataaatccagctagaatttaaggcacagcccaaggtgcaaattaattcctggaaattagtacaaatcaacttaggatgttccttaaactscaactaaatcctgtaaattagtgcagatcaacttaggacattccttaaactgtgagaagtaatttatctttcataggacccaccaataagcaataaactcagagactgtcaagactgttctaagaatcttgtctacccatactcacaaaataactggaaagagttcagaacgtgaatacagcattgtagtactttcctagggctgctggaacaaattaccacaaactgggtagcttaaaacaactgaaatttattatttcacagttctggaggctagaagtctgaagccaaggagtcaatagggtcaagcttccttgaaagccacagaaaaaatcttttcttgccctgcgtaggttcgactctctgctacacattttgaagcttattacttatagatttattactcc

SEQ ID NO: 242358 - DNA, 522 bp, Homo sapiens
ccatattacaaatagaagctgggtgataaatccagctagaatttaaggcacagcccaaggtgcaaattaattcctggaaattagtacaaatcaacttaggatgttccttaaactgcaactaaatcctgtaaattagtgcagatcaacttaggacattccttaaactgtgagaagtaatttatctttcataggacccaccaataagcaataaactcagagactgtcaagactgttctaagaatcttgtctacccatactcacaaaataactggaaagagttcagaacgtgaatacagcattgtagtactttcctagggctgctggaacaaattaccacaaactgggtagcttaaaacaactgaaatttattatttcacagttctggaggctagaagtctgaagccaaggagtcaatagggtcamgcttccttgaaagccacagaaaaaatcttttcttgccctgcgtaggttcgactctctgctacacattttgaagcttattacttatagatttattactcc

SEQ ID NO: 242359 - DNA, 607 bp, Homo sapiens
ggctcacacttgtaaaatcccagcacttagggaggctgaggagtgtggatcacctgaggtcaggagttcaagacaagcctggtcaacatggcgaaaccccgtctctactaaaaatacaaaaattagccaggcatggtggcaggtgcttttaatcccagctactcaggaagctaaggcaggagaattgcttgaacctgggaggtgaaggttgcagtgagccaagattgtgccactgcactccaggcaggtgacaagagtgaaaccctgtcaaaaaaaaaaaaaagaaagaaaaagaaagaaagaaagagaaagagagagagagaaagaaaaggagaaagaaagaaagagaaagaaagaaagaaagaaagaaagaaagaaagaaagaaggaaggaaggaaggaaggaaggaaagaaagaaagaaagaaagaaagaaagaaagaaagaaaggaaagaaagaaagaaagaraaagaaagaatttgaagaagtaaaattatgggagaaacgtgtttagtctaagttatggcaaggtttcaccgaacactgtgacctttaatgttgctccctgacaaccctggtaatatggatgaaaaagaagtttatctccc

SEQ ID NO: 242360 - DNA, 631 bp, Homo sapiens
cgtcgggctcagtggctcacacttgtaaaatcccagcacttagggaggctgaggagtgtggatcacctgaggtcaggagttcaagacaagcctggtcaacatggcgaaaccccgtctctactaaaaatacaaaaattagccaggcatggtggcaggtgcttttaatcccagctactcaggaagctaaggcaggagaattgcttgaacctgggaggtgaaggttgcagtgagccaagattgtgccactgcactccaggcaggtgacaagagtgaaaccctgtcaaaaaaaaaaaaaagaaagaaaaagaaagaaagaaagagaaagagagagagagaaagaaaaggagaaagaaagaaagagaaagaaagaaagaaagaaagaaagaaagaaagaaagaaggaaggaaggaaggaaggaaggaaagaaagaaagaaagaaagaaagaaagaaagaaagaaaggaaagaaagaaagaaagagaaagaaagaatttgaagaagtaaaattatgggagaaacgtgtttagtctaagttatggcaaggtttcaccgaacactgtgacctttamtgttgctccctgacaaccctggtaatatggatgaaaaagaagtttatctcccgtgtgtggaat

SEQ ID NO: 242361 - DNA, 481 bp, Homo sapiens
ccaaggatctaaagaatcagattaagagatctaaataattctctgatttgcccatgcctaatgattaactgagttcgtgarattactagtaaagctttatattttgtaagatcttagattctgataagtctaatgtcacaatccaatcagtttttcctatctcaaggaatcatgtccatataatggaattaatcctgaaactctgaaaagttttaatattctggggtaagggtagatgagaagtagtctccatatgacttataaacatgtaaggagaaatagtaaaattgttgtaaaattaaaagaagaacagaaattcataaaataacctataacaatcaggttaaacaacaaaaacaaaaagcaaagcgtctatcagtaacatgattgaatagaagagccaagagagagagttgtcagtggtaaaggaataaatattatctcatttgatagagtgattgtattagtccattttaacact

SEQ ID NO: 242362 - DNA, 481 bp, Homo sapiens
ccaaggatctaaagaatcagattaagagatctaaataattctctgatttgcccatgcctaatgattaactgagttcgtgagattactagtaaagctttatattttgtaagatcttagattctgataagtctaatgtcacaatccaatcagtttttcctatctcaaggaatcatgtccatataatggaattaatcctgaaactctgaaaagttttaatattctggggtaagggtagatgagaagtagtctccatatgacttataaacatgtaaggagaaatagtaaaattgttgtaaaattaaaagaagaacagaaattcataaaataasctataacaatcaggttaaacaacaaaaacaaaaagcaaagcgtctatcagtaacatgattgaatagaagagccaagagagagagttgtcagtggtaaaggaataaatattatctcatttgatagagtgattgtattagtccattttaacact

SEQ ID NO: 242363 - DNA, 529 bp, Homo sapiens
ctgataagtctaatgtcacaatccaatcagtttttcctatctcaaggaatcatgtccatataatggaattaatcctgaaactctgaaaagttttaatattctggggtaagggtagatgagaagtagtctccatatgacttataaacatgtaaggagaaatagtaaaattgttgtaaaattaaaagaagaacagaaattcataaaataacctataacaatcaggttaaacaacaaaaacaaaaagcaaagcgtctatcagtaacatgattgaatagaagagccaagagagagagttgtcagtggtaaaggaataaatattatctcatttgatagagtgattgtattagtccattttaacactgctgataaagacatacccaygactggacaacttacaaaagaaaaaggtttattggacatacagttccacatggctggggaggactcacaatcatggcaaaaaggagcaagacacatcttatgtgggtggcagcaggcaaaaaaagagcttgtgcagagaaaatcctgt

SEQ ID NO: 242364 - DNA, 561 bp, Homo sapiens
agatctcagtaggctttttatataaataacaaatattttttcaaaatttctatgtaatgttataaaatattataaattaatattgaaaatrttttacatgaaagttcaaatttctggagccttttaagataagaggatggcagtgtttctatggtataaatactaagtatataaaaactgaagacttctattaatatcagacaaaatgggccacaaatcaagaaatatttttagcaggataaagatcaatataattggtccaattcatcaagagaacctgataatgcaaaatgttttttcacacattaacaaacaattctgcatttaaaatactcaagccaaaaacttacggaattgagaagaaaaatatacaaatccacaatatatttaaagatttgaaaactattttctgatattattaaacaagtaaataaaaaattttaaagaaaatatctacaaatttaatgacattataacctaacaagttctaggatgcatggaatattatactcatcaccagcaaaaacttattttattttccacatgcactaacattcatca

SEQ ID NO: 242365 - DNA, 561 bp, Homo sapiens
agatctcagtaggctttttatataaataacaaatattttttcaaaatttctatgtaatgttataaaatattataaattaatattgaaaatattttacatgaaagttcaaatttctggagccttttaagataagaggayggcagtgtttctatggtataaatactaagtatataaaaactgaagacttctattaatatcagacaaaatgggccacaaatcaagaaatatttttagcaggataaagatcaatataattggtccaattcatcaagagaacctgataatgcaaaatgttttttcacacattaacaaacaattctgcatttaaaatactcaagccaaaaacttacggaattgagaagaaaaatatacaaatccacaatatatttaaagatttgaaaactattttctgatattattaaacaagtaaataaaaaattttaaagaaaatatctacaaatttaatgacattataacctaacaagttctaggatgcatggaatattatactcatcaccagcaaaaacttattttattttccacatgcactaacattcatca

SEQ ID NO: 242366 - DNA, 502 bp, Homo sapiens
actcttggaaccattagatgctatcatgatgttagcatagaagataaatttataagttgcagtgaggtaaggaaataaaacatgtaagtctttgaaaacaacactatgacagyccttgcaggctaaaacttagacaccaaagcattttttgttacttttggagaataaaagaagtgtgtccctcaatgtcttgtgggagaaaatatatagtttgatacaattgtcaatatctctaactcaaaaatgatgagtataaggagtgacccttattgtagtcttatatttctctccaacaattaagagagttggtggggatgttttttccatgagttcatcccgggccccaggagattttcatcttgtattctctttataatcctatcttagtgtttcatcctcatggctaagttcagcaatacttctgcattccagacagtaaaatgtgtaagaagagatgtaaaaacaatcggctttgcctttatggagattaacttaaatttat

SEQ ID NO: 242367 - DNA, 502 bp, Homo sapiens
actcttggaaccattagatgctatcatgatgttagcatagaagataaatttataagttgcagtgaggtaaggaaataaaacatgtaagtctttgaaaacaacactatgacagtccttgcaggctaaaamttagacaccaaagcattttttgttacttttggagaataaaagaagtgtgtccctcaatgtcttgtgggagaaaatatatagtttgatacaattgtcaatatctctaactcaaaaatgatgagtataaggagtgacccttattgtagtcttatatttctctccaacaattaagagagttggtggggatgttttttccatgagttcatcccgggccccaggagattttcatcttgtattctctttataatcctatcttagtgtttcatcctcatggctaagttcagcaatacttctgcattccagacagtaaaatgtgtaagaagagatgtaaaaacaatcggctttgcctttatggagattaacttaaatttat

SEQ ID NO: 242368 - DNA, 502 bp, Homo sapiens
actcttggaaccattagatgctatcatgatgttagcatagaagataaatttataagttgcagtgaggtaaggaaataaaacatgtaagtctttgaaaacaacactatgacagtccttgcaggctaaaacttagacaccaaagcattttttgttacttttggagaataaaagaagtgtgtccctcaatgtcttgtgggagaaaatatatagtttgatacamttgtcaatatctctaactcaaaaatgatgagtataaggagtgacccttattgtagtcttatatttctctccaacaattaagagagttggtggggatgttttttccatgagttcatcccgggccccaggagattttcatcttgtattctctttataatcctatcttagtgtttcatcctcatggctaagttcagcaatacttctgcattccagacagtaaaatgtgtaagaagagatgtaaaaacaatcggctttgcctttatggagattaacttaaatttat

SEQ ID NO: 242369 - DNA, 502 bp, Homo sapiens
actcttggaaccattagatgctatcatgatgttagcatagaagataaatttataagttgcagtgaggtaaggaaataaaacatgtaagtctttgaaaacaacactatgacagtccttgcaggctaaaacttagacaccaaagcattttttgttacttttggagaataaaagaagtgtgtccctcaatgtcttgtgggagaaaatatatagtttgatacaattgtcaatatctctaactcaaaaatratgagtataaggagtgacccttattgtagtcttatatttctctccaacaattaagagagttggtggggatgttttttccatgagttcatcccgggccccaggagattttcatcttgtattctctttataatcctatcttagtgtttcatcctcatggctaagttcagcaatacttctgcattccagacagtaaaatgtgtaagaagagatgtaaaaacaatcggctttgcctttatggagattaacttaaatttat

SEQ ID NO: 242370 - DNA, 387 bp, Homo sapiens
aacagttgcattttttacaggctcctgcwcctttacataggcccactgtggttccagcttcccccaaatatccctccctgcagctccagtagtacagcctcctatccctgttctccaagggaaggtgatagtagcctcccattgttgctaaattgtaggttgcctcactgtcccctggttggctttaatttttttaaagttatttctactatcaattccctttgttttaaattctcaatgatttcaattttcctggctagtttctgattacttcagatacctaatggaaatctcaaagaaagtatgactcaagagaaattgctgatttccatctcccagctactaccaaacctgtttatgcttatccatttcatttgatggcatcct

SEQ ID NO: 242371 - DNA, 411 bp, Homo sapiens
ttctccctgtcatccctaataacagttgcattttttacaggctcctgctcctttacataggcccactgtggttccagcttcccccaaayatccctccctgcagctccagtagtacagcctcctatccctgttctccaagggaaggtgatagtagcctcccattgttgctaaattgtaggttgcctcactgtcccctggttggctttaatttttttaaagttatttctactatcaattccctttgttttaaattctcaatgatttcaattttcctggctagtttctgattacttcagatacctaatggaaatctcaaagaaagtatgactcaagagaaattgctgatttccatctcccagctactaccaaacctgtttatgcttatccatttcatttgatggcatccttcct

SEQ ID NO: 242372 - DNA, 414 bp, Homo sapiens
aatttctccctgtcatccctaataacagttgcattttttacaggctcctgctcctttacataggcccactgtggttccagcttcccccaaatatccctccctgmagctccagtagtacagcctcctatccctgttctccaagggaaggtgatagtagcctcccattgttgctaaattgtaggttgcctcactgtcccctggttggctttaatttttttaaagttatttctactatcaattccctttgttttaaattctcaatgatttcaattttcctggctagtttctgattacttcagatacctaatggaaatctcaaagaaagtatgactcaagagaaattgctgatttccatctcccagctactaccaaacctgtttatgcttatccatttcatttgatggcatccttcct

SEQ ID NO: 242373 - DNA, 401 bp, Homo sapiens
ttttacaggctcctgctcctttacataggcccactgtggttccagcttcccccaaatatccctccctgcagctccagtagtacagcctcctatccctgttctccaagggaaggtgatagtagcctcccattgttgctaaattgtaggttgcctcactgtyccctggttggctttaatttttttaaagttatttctactatcaattccctttgttttaaattctcaatgatttcaattttcctggctagtttctgattacttcagatacctaatggaaatctcaaagaaagtatgactcaagagaaattgctgatttccatctcccagctactaccaaacctgtttatgcttatccatttcatttgatggcatccttcctctggttgcttaaactcaaagac

SEQ ID NO: 242374 - DNA, 414 bp, Homo sapiens
aatttctccctgtcatccctaataacagttgcattttttacaggctcctgctcctttacataggcccactgtggttccagcttcccccaaatatccctccctgcagctccagtagtacagcctcctatccctgttctccaagggaaggtgatagtagcctcccattgttgctaaattgtaggttgcctcactgtcccckggttggctttaatttttttaaagttatttctactatcaattccctttgttttaaattctcaatgatttcaattttcctggctagtttctgattacttcagatacctaatggaaatctcaaagaaagtatgactcaagagaaattgctgatttccatctcccagctactaccaaacctgtttatgcttatccatttcatttgatggcatccttcct

SEQ ID NO: 242375 - DNA, 262 bp, Homo sapiens
actcaaagactttataatatctagaatctgctacttctcaccatgtctactgaggtgtgaattactactgttttcctcttggataaagtcaatatctaaagaggggacttttcctaaaagtgtccccttacagtcagttaccaacacaatatccacagtcatcctttttacataaaggagcgtrtcacttctcttcttaggacctgtagtgaccctctctttcattgatggtaaaattctaaggcaatgtgagttttaaaat

SEQ ID NO: 242376 - DNA, 471 bp, Homo sapiens
tggctacttttaggatcctgctgattggtgcattttacagagcgctgattggtgcattttacagagcgctgattggtgcatttcacaatcctcttgctagctacagagcactgattggtgcattttacaatcctcttgcyagacaaaaaagttctccaagtccccactccacctaggaagtccagcgggcttcacctctcagtatgttctgaataaattgggctattaaatatgtgatatgaattaatcaagcagagaaaaagttactagtgacagggaaaaggagaaaatatgtattcaatattattttgtaaacaatttataaatatgctgcacctatgagtttcttctcagtaccttagaaactataacaccatggaaaattttggatagtttagggaagtgcattatttggtaatgtgaaaaataagatggtcgtgataaagcaacttgggaaaaaagaaatggcat

SEQ ID NO: 242377 - DNA, 471 bp, Homo sapiens
tggctacttttaggatcctgctgattggtgcattttacagagcgctgattggtgcattttacagagcgctgattggtgcatttcacaatcctcttgctagctacagagcactgattggtgcattttacaatcctcttgctagacaawaaagttctccaagtccccactccacctaggaagtccagcgggcttcacctctcagtatgttctgaataaattgggctattaaatatgtgatatgaattaatcaagcagagaaaaagttactagtgacagggaaaaggagaaaatatgtattcaatattattttgtaaacaatttataaatatgctgcacctatgagtttcttctcagtaccttagaaactataacaccatggaaaattttggatagtttagggaagtgcattatttggtaatgtgaaaaataagatggtcgtgataaagcaacttgggaaaaaagaaatggcat

SEQ ID NO: 242378 - DNA, 471 bp, Homo sapiens
tggctacttttaggatcctgctgattggtgcattttacagagcgctgattggtgcattttacagagcgctgattggtgcatttcacaatcctcttgctagctacagagcactgattggtgcattttacaatcctcttgctagacaaawaagttctccaagtccccactccacctaggaagtccagcgggcttcacctctcagtatgttctgaataaattgggctattaaatatgtgatatgaattaatcaagcagagaaaaagttactagtgacagggaaaaggagaaaatatgtattcaatattattttgtaaacaatttataaatatgctgcacctatgagtttcttctcagtaccttagaaactataacaccatggaaaattttggatagtttagggaagtgcattatttggtaatgtgaaaaataagatggtcgtgataaagcaacttgggaaaaaagaaatggcat

SEQ ID NO: 242379 - DNA, 471 bp, Homo sapiens
tggctacttttaggatcctgctgattggtgcattttacagagcgctgattggtgcattttacagagcgctgattggtgcatttcacaatcctcttgctagctacagagcactgattggtgcattttacaatcctcttgctagacaaaaaagttctccaagtccccactccacctaggaagtccagcgggcttcacctctcagtatgttctgaataaattgggctattaaatatgtgatatgaattaatcaagcagagaaaaagttactagtgacagggaaaaggagaaaatatgtattcaatattattttgtaaacaatttataaatatgctgcacctatgagtttcttctcagtaccttagaaactataacamcatggaaaattttggatagtttagggaagtgcattatttggtaatgtgaaaaataagatggtcgtgataaagcaacttgggaaaaaagaaatggcat

SEQ ID NO: 242380 - DNA, 279 bp, Homo sapiens
ttaaaacctattcattttatatttgtctgagagctatgattttaagcttctaaaaattatattttaatagaaatcagggactagttacctttaatctgggggagatactacrtattttaaagcctgaagtcaatgtctagacaaaagtttctgcttaacatcaaagggtatgcaacatttgctgtggctctcaaatattaagaaaggaaaacataactgggaatttgtcactagcactttattctttactcaggattgaagtagaattttataacacca

SEQ ID NO: 242381 - DNA, 279 bp, Homo sapiens
ttaaaacctattcattttatatttgtctgagagctatgattttaagcttctaaaaattatattttaatagaaatcagggactagttacctttaatctgggggagatactacgtattttaaagcctgaagtcaatgtctagacaaaagtttctgcttaacatcaaagggtatgcaacatttgctgtggctctcaaatattaagaaaggaaaacayaactgggaatttgtcactagcactttattctttactcaggattgaagtagaattttataacacca

SEQ ID NO: 242382 - DNA, 529 bp, Homo sapiens
ctacatgtttaatccctcaccacctttaaatttttgcataaatgctatcttttcaatgatgttttctacggcctccctacttagcatctcaacctgtttcttggaccagcattagaaaatgaatatagagagatgaacacaatatatatggcyctgccctcatagtcctagcaatctacagggacacaaaataatatgcaaaaaagtatttgaattatcttcagcacctttctaaagaaaaaaagctacttaaaactcacacttagaagtgctcaatatgagtcaatacattatgtcaccacctaaagtaacaagatgttaggctgcaactgctgtatgttttgaaagagactcattacactacgaagtcacatacttgtttaatattataataagacagaactaaatttaaatcatagttataccaaacactagctactctgaatctctacatctcaatgttctcaccagcaaaatcaagctaataataatactagcttcttaaagttatttaaaagataaatgagct

SEQ ID NO: 242383 - DNA, 467 bp, Homo sapiens
gattaaactctgccttttttttttctgggaaagaacacatagattaatcactttgtataaccccaacctctcccttcttgggagtggggayaggggaaacagttttcatcatctatgatcttaagtttcctcatgctctttctcattgttaagacaataccacttattttagcttattgttacaatagtatttcatttttttctaacaacttagtattagtcaagatgggatataataacaaatgactcttgaaatcttcatgggtgccatgggaagtttcaagaacacaacttgaaagtgaattgcatgactttgttctgtatttcattgaccactactcattcagtgagcctgaaagtaactgtgtatatcactgttagtatactatgcatgccagatacccaagactcaaacttttcctttcctttagataccacctacttagtcatcaattttggttcaacct

SEQ ID NO: 242384 - DNA, 626 bp, Homo sapiens
aacctctcccttcttgggagtggggataggggaaacagttttcatcatctatgatcttaagtttcctcatgctctttctcattgttaagacaataccacttattttagcttattgttacaatagtatttcatttttttctaacaacttrgtattagtcaagatgggatataataacaaatgactcttgaaatcttcatgggtgccatgggaagtttcaagaacacaacttgaaagtgaattgcatgactttgttctgtatttcattgaccactactcattcagtgagcctgaaagtaactgtgtatatcactgttagtatactatgcatgccagatacccaagactcaaacttttcctttcctttagataccacctacttagtcatcaattttggttcaacctactccactaaatagctttgacttccattcacttaccactttagattagtgctatagactcctattttacctccttcatatcaatccccttaaaactcccaatagcttccattgtttcaaccaaaagctcaaattcctttaatataaagtgttatatgaactggcaccctatatactttatatcctaatctctcatctttcatttatttctttaactcctgact

SEQ ID NO: 242385 - DNA, 626 bp, Homo sapiens
aacctctcccttcttgggagtggggataggggaaacagttttcatcatctatgatcttaagtttcctcatgctctttctcattgttaagacaataccacttattttagcttattgttacaatagtatttcatttttttctaacaacttagtattagtcaagatgggatataataacaaatgactcttgaaatcttcatgggtgccatgggaagtttcaagaacacaacttgaaagtgaattgcatgactttgttctgtrtttcattgaccactactcattcagtgagcctgaaagtaactgtgtatatcactgttagtatactatgcatgccagatacccaagactcaaacttttcctttcctttagataccacctacttagtcatcaattttggttcaacctactccactaaatagctttgacttccattcacttaccactttagattagtgctatagactcctattttacctccttcatatcaatccccttaaaactcccaatagcttccattgtttcaaccaaaagctcaaattcctttaatataaagtgttatatgaactggcaccctatatactttatatcctaatctctcatctttcatttatttctttaactcctgact

SEQ ID NO: 242386 - DNA, 650 bp, Homo sapiens
aataaaaacattgtaggaaaataagtagcatttttacgaaccaaaatcattgcagctaataaccaaatcaagaacacaatccaatttacaatagccacaaagaaaatgaaatacctaggaattcatccaaccaagggggtcaaagaccactacaaggagaagtacaagacactgttgaaagaaatcagagatgacacataaatggaaaaatatccatgcgcatggattggaagaatcaatattgttaaaatggatatactgcctaaagcaatttacagattcaatgctattcctatcaaaataccaatgtcattttttaaataattagaatgaaacctattataaaattcatctggaaccacaaaagagcttgaatagccaaagcaatcctaagcaaaaagaaaagccagaggtatcgcattgccagacttcaaactgtactataaggctacagtgatcaaaacagcrtggtactgatacaaaaacagacacacaggccagtggaagagaatacagcacccagaactaaatttgcccacctacaactatgtgacctttgaagaagctgacaaacacaagcaatggaaaaaaaatccctattcaaaaaattgtgctgtggtaattggctagccatatacagaagattgaaa

SEQ ID NO: 242387 - DNA, 557 bp, Homo sapiens
aaaaaatccctattcaaaaaattgtgctgtggtaattggctarccatatacagaagattgaaattggacccctgcctctcaacatagatgaaaattaactcaagatagattaaagatttatgagtaagacctaaaactctaataatactggaagaaaatctaagaagtaccctttttgatataggctttggcaaatggatgactgagttcccaaaagcacttgcaacaaaaacaaaaattgacaggtgggatctaattaaactaaagagcttctgcctaccaaaggaaactatcaacagagtaaacagacaacttaaagaatgggagaaaatatttacaaactatgcttctgataaaggtctaatatccagcatctgtaaggaatttaaacaaatctacaagcaaaaaacccaaaaaatccacctaaaaaatgggcaaaggacatgaacagatatttatgaaaaggtgacgaagcaagcagacaagaaacattaaaaatcgctgaactacactaatcatcacataaattcaaatgcataaaccacaatgaaataccg

SEQ ID NO: 242388 - DNA, 557 bp, Homo sapiens
aaaaaatccctattcaaaaaattgtgctgtggtaattggctagccatatacagaagattgaaattggacccctgcctctcaacatagatgaaaattaactcaagatagattaaagatttatgagtaagacctaaaactctaataatactggaagaaaatctaagaagtaccctttttgatataggctttggcaaatggatgactgagttcccaaaagcacttgcaacaaaaacaaaaattgacaggtgggatctaattaaactaaagagcttctgcctaccaaaggaaactatcaacagagtaaacagacaacttaaagaatgggagaaaatatttrcaaactatgcttctgataaaggtctaatatccagcatctgtaaggaatttaaacaaatctacaagcaaaaaacccaaaaaatccacctaaaaaatgggcaaaggacatgaacagatatttatgaaaaggtgacgaagcaagcagacaagaaacattaaaaatcgctgaactacactaatcatcacataaattcaaatgcataaaccacaatgaaataccg

SEQ ID NO: 242389 - DNA, 621 bp, Homo sapiens
tttaaaatcatattatcgcatgtttatttccaaattaacagggcaataaaaatcatctcttaaaaatcaggggtatcagtattcatctcttttcatgtaaaaatattaaaaaattagaagtgaaatatcacagaagatattttaaatatgaagacaaataatgaaataaggagaattttaaaagccaaatattttggatcagagtaagaagttagtggtaaaagataaaggttatccaacaacctttygcaaatgaagccaaaaaagtaggtttgcgcaacactgaataactaaaattacaactcttttatatttcattaaaaaacatgccctttttcaaaaagtcagatcggtttaatcacaccataaaattatttacccaaagttaaggaaaaatagcatgctttcatataagtagaaaatttaaatacacaattgatatttaacgttctctaagcaatgtaaagattgcttttaagccatctaacagagttgtatttattattagggatcaaaaagtgtgtaaattagcacaatatattttatataaaatgaatctgttttctcttataagagtatacaattataattctgaattttgaatttattcttaaacaaata

SEQ ID NO: 242390 - DNA, 621 bp, Homo sapiens
tttaaaatcatattatcgcatgtttatttccaaattaacagggcaataaaaatcatctcttaaaaatcaggggtatcagtattcatctcttttcatgtaaaaatattaaaaaattagaagtgaaatatcacagaagatattttaaatatgaagacaaataatgaaataaggagaattttaaaagccaaatattttggatcagagtaagaagttagtggtaaaagataaaggttatccaacaacctttcgcaaatgaagccaaaaaagtaggtttgcgcaacactgaataactaaaattacaactcttttatatttcattaaraaacatgccctttttcaaaaagtcagatcggtttaatcacaccataaaattatttacccaaagttaaggaaaaatagcatgctttcatataagtagaaaatttaaatacacaattgatatttaacgttctctaagcaatgtaaagattgcttttaagccatctaacagagttgtatttattattagggatcaaaaagtgtgtaaattagcacaatatattttatataaaatgaatctgttttctcttataagagtatacaattataattctgaattttgaatttattcttaaacaaata

SEQ ID NO: 242391 - DNA, 564 bp, Homo sapiens
tgtgcaggtttgttatataaatacatttgcatcatgggggtttgttttacagattaattcattacccaggcattaagcctatgactcattagttatttttccagatggtctccctcccccgaccttctgccctcttgtagggcccagtgtctgttgttcccttctttgtgtgcatgtgttctcatcatttagcttgcacttacaagtgagagaatgtggcatttgttttttcgttcctacattgatttgctaaggataatggccttcaattccatccatattccttcaaaacacatgatctcgttcctttttatggctacatcttattccctggtgtatatgttcaacattttatttatccagtctttactattgatggccatttaggtctattccatgtctttgttaatgtgaatagtgctkcagtgaacatatgtgtgcgtgtgtctttataatagaacaatttatattcctttggatatatacccagtaatgggattgctgggtctaatggtagttctgtttttaggtctttgaggaataaccacactgttttccacaatg

SEQ ID NO: 242392 - DNA, 583 bp, Homo sapiens
actttttaataatagccattctgactggtgtgcttactggttcttaatctcacccacatcttagaataatgtggaacattcaaactacccacacctgtttctaaaaactgaagttctgttttaattggactttagtagagccaagaaatgagtattacttaaaatcttgccatgtgattctactaggaagccagagttcagagccatggattacatttttaatataaatacatattattwgttgaagcagttttaagttaggatagctgtaacgttgattgaaaggggaatacttaaaacagaaccctgccttgggtcgtcaagacttaaaaaattcttctgtttttattcgattaaatataatcatgcattcatttactttagcatttgtaattctaaaacacattgcaaatttcacaaaactatcattttctaaatgtcaacactctaaatacaccatttattttttaaagtagtatattcacttcaaattccattgctgtgtcaagagttagttgaacttaaaatataattaatagttactcagcaaaaatagaaagatgttagctgactgtgtcaaaag

SEQ ID NO: 242393 - DNA, 583 bp, Homo sapiens
actttttaataatagccattctgactggtgtgcttactggttcttaatctcacccacatcttagaataatgtggaacattcaaactacccacacctgtttctaaaaactgaagttctgttttaattggactttagtagagccaagaaatgagtattacttaaaatcttgccatgtgattctactaggaagccagagttcagagccatggattacatttttaatataaatacatattattagttgaagcagttttaagttaggatagctgtaacgttgattgaaaggggaatacttaaaacagaaccctgccttgggtcgtcaagacttaaaaaattcttctgtttttattckattaaatataatcatgcattcatttactttagcatttgtaattctaaaacacattgcaaatttcacaaaactatcattttctaaatgtcaacactctaaatacaccatttattttttaaagtagtatattcacttcaaattccattgctgtgtcaagagttagttgaacttaaaatataattaatagttactcagcaaaaatagaaagatgttagctgactgtgtcaaaag

SEQ ID NO: 242394 - DNA, 312 bp, Homo sapiens
taattaaaataattctgatagaaaatcctaacaatgtacattattgtctagatttataattccgtaaattaaatatacatccccctgcaagtggmaatacttcaaaaattaattctagtttacaatttagtataaaataatgtattagaagtgtccctgaaagatggagtttaatggagaaaaatgaggaatattatgagtatcaggacatggagaagagtaaaaagtcaatattgtgggacaaattaaatgacataaaaaatcaccttttttcatttgatataatgtaatggttataaaatatcttctcaa

SEQ ID NO: 242395 - DNA, 586 bp, Homo sapiens
tggttaagtgtatttcaattttttttctgctgctattgtaaaagaaattgagttcttgatttgattctcagcttgatcattgttggtgctatgcagtagtactaatttgtgtacattcatttgtaaccctaagatttatgaattcattcatcaatagaagagtctttttggtggaattcttaggcttatctaagtatatgcttaaatcatcagcaaacagagataatttgacttcctcttttccagytcggatgccctttatttcttcctcttgcttgattgctctgggtaggacttccagtactatgttaagtagaagtggtgaaaatgggcatccttaacttgttctagccctcagtgggaatactttcaacttttcccccattcaatatgatgttggccatgggtttgtcatatatagcttttattattttgagatatgtttattctatgtctagtttgtttagggtttttatcataaagcaatgctggattttactgaatgtttttatgcatctattgagatgatcatatgtatttggtttttaattctgtttatgaaatacatcacatttattaccttgtg

SEQ ID NO: 242396 - DNA, 586 bp, Homo sapiens
tggttaagtgtatttcaattttttttctgctgctattgtaaaagaaattgagttcttgatttgattctcagcttgatcattgttggtgctatgcagtagtactaatttgtgtacattcatttgtaaccctaagatttatgaattcattcatcaatagaagagtctttttggtggaattcttaggcttatctaagtatatgcttaaatcatcagcaaacagagataatttgacttcctcttttccagttcggatgccctttatttcttcctcttgcttgattgctctgggtaggacttccagtactatgttaagtagaagtggtgaaaatgggcatccttaacttgttctagccctcagtgggaakactttcaacttttcccccattcaatatgatgttggccatgggtttgtcatatatagcttttattattttgagatatgtttattctatgtctagtttgtttagggtttttatcataaagcaatgctggattttactgaatgtttttatgcatctattgagatgatcatatgtatttggtttttaattctgtttatgaaatacatcacatttattaccttgtg

SEQ ID NO: 242397 - DNA, 588 bp, Homo sapiens
tgaatataaatcaagttcatctgcatcccctatatcagaaaaaatgtgtttgtttctcagtattctgctatattccgtgtattaattttaatagaatcaaaactgagatatggaagaggatgttatatattgaacaccttttcttccayctagcatacccaatatttgccgcatgggccagaaatataagaattagaaatgcgtctttatttggggtccttacttcattcacaattctagatagtcttttagttatgacaaagtctaagaattttatttttaaataaattattatcatatttttctgttaccattttttggttggttttccatgcagtttgtgcctacttccaggaggaagacacctacacacatttactcttctctactttctttacaaatttgaatatgaaaaagagagccaggaattgccaaaagctggttactccaagaccctaggcattctgtcaaaatctaacttggatgatcatgtaaaatactcatcattttattaatatcagtatgttcattcaaatggtaacaagattttcacttgatttctaaatcactgatcttaagtgaaaaata

SEQ ID NO: 242398 - DNA, 581 bp, Homo sapiens
tgtttgtttctcagtattctgctatattccgtgtattaattttaatagaatcaaaactgagatatggaagaggatgttatatattgaacaccttttcttccatctagcatacccaatatttgccgcatgggccagaaatataagaattagaaatgcgtctttatttggggtccttacttcaytcacaattctagatagtcttttagttatgacaaagtctaagaattttatttttaaataaattattatcatatttttctgttaccattttttggttggttttccatgcagtttgtgcctacttccaggaggaagacacctacacacatttactcttctctactttctttacaaatttgaatatgaaaaagagagccaggaattgccaaaagctggttactccaagaccctaggcattctgtcaaaatctaacttggatgatcatgtaaaatactcatcattttattaatatcagtatgttcattcaaatggtaacaagattttcacttgatttctaaatcactgatcttaagtgaaaaatatcaaaatagaggacttcacaaatattatcgtttagaaca

SEQ ID NO: 242399 - DNA, 520 bp, Homo sapiens
tggtaacaagattttcacttgatttctaaatcactgatcttaagtgaaaaatatcaaaatagaggacttcacaaatattatygtttagaacatcctcactttaaacaatctaaagttatttttaatgttgaatcaatcatactctgaccttctccataggaaaggaaaatgtaaatatcccagacagcagagagcaaactgtcataaaaataaaactgtactttcaaatagctgtagtccacagcacagctctaacccaaattgtcatttcagctgcttcacattattagaaaatacttaccttctagctttgaacatgaaagaaaagtactcttagtctatcagcttccctaactaggagattcatgtatttgttggggtcatataaagaaactgatagtgcaatttaataaggataatgcagagagggtttggagattctttgcaaagctgttgaagggatgagaaagaacacaagagactgcagtaacctttggttagagtgatttttatcacccct

SEQ ID NO: 242400 - DNA, 520 bp, Homo sapiens
tggtaacaagattttcacttgatttctaaatcactgatcttaagtgaaaaatatcaaaatagaggacttcacaaatattatcgtttagaacatcctcactttaaacaatcwaaagttatttttaatgttgaatcaatcatactctgaccttctccataggaaaggaaaatgtaaatatcccagacagcagagagcaaactgtcataaaaataaaactgtactttcaaatagctgtagtccacagcacagctctaacccaaattgtcatttcagctgcttcacattattagaaaatacttaccttctagctttgaacatgaaagaaaagtactcttagtctatcagcttccctaactaggagattcatgtatttgttggggtcatataaagaaactgatagtgcaatttaataaggataatgcagagagggtttggagattctttgcaaagctgttgaagggatgagaaagaacacaagagactgcagtaacctttggttagagtgatttttatcacccct

SEQ ID NO: 242401 - DNA, 547 bp, Homo sapiens
aaactgtcataaaaataaaactgtactttcaaatagctgtagtccacagcacagctctaacccaaattgtcatttcagctgcttcacattattagaaaatacttaccttctagctttgaacatgaaagaaaagtactcttagtctatcagyttccctaactaggagattcatgtatttgttggggtcatataaagaaactgatagtgcaatttaataaggataatgcagagagggtttggagattctttgcaaagctgttgaagggatgagaaagaacacaagagactgcagtaacctttggttagagtgatttttatcacccctagtttgaaagggccagtggcaaagcaagtttactaactttaggataaagtagactcatcaggaaaagagcaaccacctaagcttaagggacaaagccaatcacccgtgggaagccagtgttaaaaatacttgatcttgctctctgctttcctgagaatacaaatcattcactttaactcattgaattcactcagcagtcagaagaaaaggaagcctcttgtt

SEQ ID NO: 242402 - DNA, 547 bp, Homo sapiens
aaactgtcataaaaataaaactgtactttcaaatagctgtagtccacagcacagctctaacccaaattgtcatttcagctgcttcacattattagaaaatacttaccttctagctttgaacatgaaagaaaagtactcttagtctatcagcttccctaactaggagattcatgtatttgttggggtcatataaagaaactgatagtgcaatttaataaggataatgcagagagggtttggagaytctttgcaaagctgttgaagggatgagaaagaacacaagagactgcagtaacctttggttagagtgatttttatcacccctagtttgaaagggccagtggcaaagcaagtttactaactttaggataaagtagactcatcaggaaaagagcaaccacctaagcttaagggacaaagccaatcacccgtgggaagccagtgttaaaaatacttgatcttgctctctgctttcctgagaatacaaatcattcactttaactcattgaattcactcagcagtcagaagaaaaggaagcctcttgtt

SEQ ID NO: 242403 - DNA, 547 bp, Homo sapiens
aaactgtcataaaaataaaactgtactttcaaatagctgtagtccacagcacagctctaacccaaattgtcatttcagctgcttcacattattagaaaatacttaccttctagctttgaacatgaaagaaaagtactcttagtctatcagcttccctaactaggagattcatgtatttgttggggtcatataaagaaactgatagtgcaatttaataaggataatgcagagagggtttggagattctttgcaaagctgttgaagggatgagaaagaacacaagagactgcagtaacctttggttagagtgatttttatcacccctagtttgaaagggccagtggcaaagcaagtttactaactttaggataaagtagactcatcaggaaaagagcaaccacctaagcttaagggacaaagccaatcacccstgggaagccagtgttaaaaatacttgatcttgctctctgctttcctgagaatacaaatcattcactttaactcattgaattcactcagcagtcagaagaaaaggaagcctcttgtt

SEQ ID NO: 242404 - DNA, 531 bp, Homo sapiens
ggcctgctactccagatgatgagcaaatgaaggaagccacttccatccttaactgtggaaaatgagtaggggaaggtggtgcattctgggtcccatgattccagactgaccattggccctatttgagtkcagctgctgttaggcagaaactctggactccaaactctcagtaaaacttctgaagacacttctgttgctattgcagctgtcagcaccattgattcagctgagaagcagcccagaatatcacactgacacccatgctgttggttgtgtttttttgaaccagattgaaattaatatctattgtatggttcaatttctatgaagttcaatgtcaagcaaatgtaatttataaagataaaagtaagaacagtggttgcctatagtaatgattggaggttcacaacagagactcctggattctagtaatactcaattcatattcatgtaggttgtgatgacattagtattttacattctaaaaatgtttaatgctatatgctcaagatctgtgtcttttgcatgtgc

SEQ ID NO: 242405 - DNA, 531 bp, Homo sapiens
ggcctgctactccagatgatgagcaaatgaaggaagccacttccatccttaactgtggaaaatgagtaggggaaggtggtgcattctgggtcccatgattccagactgaccattggccctatttgagttcagctgctgttaggcagaaactctggactccaaactctcagtaaaacttctgaagacacttctgttgctattgcagctgtcagcaccattgattcagctgagaagcagmccagaatatcacactgacacccatgctgttggttgtgtttttttgaaccagattgaaattaatatctattgtatggttcaatttctatgaagttcaatgtcaagcaaatgtaatttataaagataaaagtaagaacagtggttgcctatagtaatgattggaggttcacaacagagactcctggattctagtaatactcaattcatattcatgtaggttgtgatgacattagtattttacattctaaaaatgtttaatgctatatgctcaagatctgtgtcttttgcatgtgc

SEQ ID NO: 242406 - DNA, 547 bp, Homo sapiens
ttaaaaatgctttttagtgatacataaaaaattaattaatgacacagtctatgaaaaacaaatagagcagcttgaaataattcacatatttttcatgtaaaacttttaggagaagtccagtgatgtcacgatagctctacgatgttgatttattttgttgcttttatatgcttattttatatataaartagctgaaagcagctatgaattctaaagcatggtaacaggggtaaaaggtcacacacatttcttttagatgctgcaaatattgcttctgttcacacgttatcgtccaaaaattagttacattgcctcatcaaagtgcaaggaggctggtaaatgtactttaatttgctaaatgccttgcaagatatagggatgtatattgagaagacaaagaatggaagtgagaattacttgttattttgacttccaactatcggagaacattcccaaagaaatatcatactaaatttctgcctgaataattatttcagcatctctttcatggtctttgcttaagggcagtgcttccagctgaggctgc

SEQ ID NO: 242407 - DNA, 547 bp, Homo sapiens
ttaaaaatgctttttagtgatacataaaaaattaattaatgacacagtctatgaaaaacaaatagagcagcttgaaataattcacatatttttcatgtaaaacttttaggagaagtccagtgatgtcacgatagctctacgatgttgatttattttgttgcttttatatgcttattttatatataaaatagctgaaagcagctatgaattctaaagcatggtaacaggggtaaaaggtcacacacatttcttttagatgctgcaawtattgcttctgttcacacgttatcgtccaaaaattagttacattgcctcatcaaagtgcaaggaggctggtaaatgtactttaatttgctaaatgccttgcaagatatagggatgtatattgagaagacaaagaatggaagtgagaattacttgttattttgacttccaactatcggagaacattcccaaagaaatatcatactaaatttctgcctgaataattatttcagcatctctttcatggtctttgcttaagggcagtgcttccagctgaggctgc

SEQ ID NO: 242408 - DNA, 547 bp, Homo sapiens
ttaaaaatgctttttagtgatacataaaaaattaattaatgacacagtctatgaaaaacaaatagagcagcttgaaataattcacatatttttcatgtaaaacttttaggagaagtccagtgatgtcacgatagctctacgatgttgatttattttgttgcttttatatgcttattttatatataaaatagctgaaagcagctatgaattctaaagcatggtaacaggggtaaaaggtcacacacatttcttttagatgctgcaaatattgcttctgttcacacgttatcgtccaaaaattagttacattgcctcatcaaagtgcaaggaggctggtaaatgtactttaatttgctaaatgccttgcaagatatagggatgtatatygagaagacaaagaatggaagtgagaattacttgttattttgacttccaactatcggagaacattcccaaagaaatatcatactaaatttctgcctgaataattatttcagcatctctttcatggtctttgcttaagggcagtgcttccagctgaggctgc

SEQ ID NO: 242409 - DNA, 543 bp, Homo sapiens
tattaggttttagaaacaaagaaaattgtgggattcccttaatggctttcttacacttgagttctaaaatatttatcaatctcaaatatatttgcattatgttgaaaaatgactattaatagtttctgctaaaaggaattatcaactttttatgcatcaccatttcagagtgggctataaaaatatcagtatctgtcctacatatataccaatgtttttcaatttttagtcaattaagtatgtttcattgattttctgctgtgtgcgtaaaactgtgcatgatgatattatagaaggtactgtgaaaaggcttaaagcagtatatttaaccactgcctaccagaatagtacatagagaagcaaacctaatctataagcaacaatgagagmgtgctacagataacttttaatattgtaaatatatatgatacagattataaaatctttatgaaataatctatagaagaggtgaaatgggtctctgccaggagaatgcaaaggcagtaaaaaattaaaaaccaaaatattgagaattattttgag

SEQ ID NO: 242410 - DNA, 529 bp, Homo sapiens
aacagtaatgctgaaaaaattaaacctccaactcttaaaacaataaaagttattgcttgcttaaataataggaatgctatctgtgatttcctgcagggtcattcaaagatttattattttcccatctgtggttttgccatcctcaatacatagctcttgggggttttctgtggattgttttaatgttagccaaccagagagaataaaaagagtgttaaaaattattaattstgggtctatgtgaccctgtaagaaggctacatcactactatatacttagaacctaaatttctatgccaaaatataggcgaatatagcaaatattgtccaaatttacaaggaaagagaaaatgaattgtgtattcatcttacagtttctaataaaatccccaacattgaacttaaatgactctccagttgttcattaggagcatatgctgttggttgactgccagcatacattatctcaccttttctttctaagatagaacatattcaatatatccaaggcttccaaggcttcagtact

SEQ ID NO: 242411 - DNA, 529 bp, Homo sapiens
aacagtaatgctgaaaaaattaaacctccaactcttaaaacaataaaagttattgcttgcttaaataataggaatgctatctgtgatttcctgcagggtcattcaaagatttattattttcccatctgtggttttgccatcctcaatacatagctcttgggggttttctgtggattgttttaatgttagccaaccagagagaataaaaagagtgttaaaaattattaattgtgggtctatgtgaccctgtaagaaggctacatcactactatatacttagaacctaaatttctatgccaaaatataggcgaatatagcaaatattgtccaaatttacaaggaaagagaaaatgaattgtgtrttcatcttacagtttctaataaaatccccaacattgaacttaaatgactctccagttgttcattaggagcatatgctgttggttgactgccagcatacattatctcaccttttctttctaagatagaacatattcaatatatccaaggcttccaaggcttcagtact

SEQ ID NO: 242412 - DNA, 529 bp, Homo sapiens
aacagtaatgctgaaaaaattaaacctccaactcttaaaacaataaaagttattgcttgcttaaataataggaatgctatctgtgatttcctgcagggtcattcaaagatttattattttcccatctgtggttttgccatcctcaatacatagctcttgggggttttctgtggattgttttaatgttagccaaccagagagaataaaaagagtgttaaaaattattaattgtgggtctatgtgaccctgtaagaaggctacatcactactatatacttagaacctaaatttctatgccaaaatataggcgaatatagcaaatattgtccaaatttacaaggaaagagaaaatgaattgtgtattcatcttacagtttctaataaaatccccaacattgaacttaaatgactctccagttgttcattaggagcatatgctgttggttgactgccagcatacattatctcaccttttctttctaaratagaacatattcaatatatccaaggcttccaaggcttcagtact

SEQ ID NO: 242413 - DNA, 512 bp, Homo sapiens
aatcagggcaaattaccttaagagtttttaagataaatgtttctcttggtgtctctttcttggtcttctgggtaaggttgtatctgaatatgwtgaccctaaatgtctgcagacatttttgcagaaatgttaagggtaaaagtgacacagccaatagcaaagaagtgccagaaaatacgtaagcaaactgtgacctctttttacctcttgattgacttttatgttaaataatgaatttaccttatgcttgaaagaatttgaaatagtatttggcagtgaagaatttactcctcccatattttcattcaagagaaatttccaggaggagggttgttggtgggttacctccaactcaaccacttcagagctactacagtggtaatgcatgttgaagaaaagagtcaaactctgtgaaatatttgaagagatttattctgaggcaaatatgagtgacctcggcctgtcacacagcccaggagatcctgagaacatgtgccaaggttgttgggcta

SEQ ID NO: 242414 - DNA, 512 bp, Homo sapiens
aatcagggcaaattaccttaagagtttttaagataaatgtttctcttggtgtctctttcttggtcttctgggtaaggttgtatctgaatatgttgaccctaaatgtctgcagacatttttgcagaaatgttaagggtaaaagtgacacagccaatagcaaagaagtgccagaaaatacgtaagcaaactgtgacctctttttacctcttgattgacttttatgttaaataatgaatttaccttatgcttgaaagaatttgaaatagtatttggcagtgaagaatttactcctcccatattttcattcaagagaaatttccakgaggagggttgttggtgggttacctccaactcaaccacttcagagctactacagtggtaatgcatgttgaagaaaagagtcaaactctgtgaaatatttgaagagatttattctgaggcaaatatgagtgacctcggcctgtcacacagcccaggagatcctgagaacatgtgccaaggttgttgggcta

SEQ ID NO: 242415 - DNA, 385 bp, Homo sapiens
tatttggcagtgaagaatttactcctcccatattttcattcaagagaaatttccaggaggagggttgttggtgggttacctccaactcaaccacttcagagctactacagtggtaatgcatgttgaagaaaagagtcaaactctgtgaaatatttgaagagatttattctgaggcaaatatgagtgacctcggcctgtcacacagcccaggagatcctragaacatgtgccaaggttgttgggctacagcttggatttatacatgtgagggagacataagacatcaatcagtacacctaagatatacattggtaaaatcgggaaaggctagacaactcaaagcaggtgggggtggggtgggtgaaggcttccaggttaaaggtga

SEQ ID NO: 242416 - DNA, 385 bp, Homo sapiens
tatttggcagtgaagaatttactcctcccatattttcattcaagagaaatttccaggaggagggttgttggtgggttacctccaactcaaccacttcagagctactacagtggtaatgcatgttgaagaaaagagtcaaactctgtgaaatatttgaagagatttattctgaggcaaatatgagtgacctcggcctgtcacacagcccaggagatcctgagaacatgtgccaaggttgttggrctacagcttggatttatacatgtgagggagacataagacatcaatcagtacacctaagatatacattggtaaaatcgggaaaggctagacaactcaaagcaggtgggggtggggtgggtgaaggcttccaggttaaaggtga

SEQ ID NO: 242417 - DNA, 385 bp, Homo sapiens
tatttggcagtgaagaatttactcctcccatattttcattcaagagaaatttccaggaggagggttgttggtgggttacctccaactcaaccacttcagagctactacagtggtaatgcatgttgaagaaaagagtcaaactctgtgaaatatttgaagagatttattctgaggcaaatatgagtgacctcggcctgtcacacagcccaggagatcctgagaacatgtgccaaggttgttgggctacagcttggatttatacatgtgagggagacataagacatcaatcagtacacctaagatatacattggtaaaatygggaaaggctagacaactcaaagcaggtgggggtggggtgggtgaaggcttccaggttaaaggtga

SEQ ID NO: 242418 - DNA, 431 bp, Homo sapiens
gaattcaaagattttctgattggcatttgacaactggctaaaataatttatctaaagactggaatcaatagacaggagtgtatgggttaagataaggtgttttagagaccgaggttcttatgcagatgaagcttgcaggtagcaggcttcactgagaatagattgtaaatgatttttatcagacataaaaaggaaaaaggacttggaatcaggaaaaatcaggaaaaagacttggaaagagaaggggattctctacaaaatggagattttccccacagaaacagccttgtagggccatttcaaaatatgtcaaagaaatgtatttttgtrgtgaaatactttgatttctttcaaggcctgctatctgtcatgttgacatcttattgctatgaagggtctgttttgtcattcttaagtctctactttactgt

SEQ ID NO: 242419 - DNA, 431 bp, Homo sapiens
gaattcaaagattttctgattggcatttgacaactggctaaaataatttatctaaagactggaatcaatagacaggagtgtatgggttaagataaggtgttttagagaccgaggttcttatgcagatgaagcttgcaggtagcaggcttcactgagaatagattgtaaatgatttttatcagacataaaaaggaaaaaggacttggaatcaggaaaaatcaggaaaaagacttggaaagagaaggggattctctacaaaatggagattttccccacagaaacagccttgtagggccatttcaaaatatgtcaaagaaatgtatttttgtagtgaaatactttgatttctttcaaggcctgctatctgtcatgttgayatcttattgctatgaagggtctgttttgtcattcttaagtctctactttactgt

SEQ ID NO: 242420 - DNA, 463 bp, Homo sapiens
gaaatactttgatttctttcaaggcctgctatctgtcatgttgacatcttattgctatgaagggtctgttttgtcattcttaagtctctactttactgttaacactgttcagctatgcatgaattccaaaaggatgaaagtaaataacgaagcatgttcaaccacccatttccatcatggcctccattactgtttcaggtttagtttaaaatgcccttggccaagataaagggcccatttagttggttaacggacrttgaattttatttttggcttacatgcaggtgccatgctctccttaggttgctccctgccaatgctgagcaaggaagatattatagggcttttcattcttgtcccacatggactcatctaaaggtcaaagttcactttggtgctcttccagtgtggctgacaatttctcagatatgcactcttctctgaggctcctcctttccaatta

SEQ ID NO: 242421 - DNA, 337 bp, Homo sapiens
aatttattttggctgaaggtgttttttgttttttttttttgtttgtttgtttttttagcagtcctcaccataatgatccatacacgtaagtgtctaatataatctttctagctttcctttttggttgtgtttagtcatactgttgctgattcagctttgtataaaatgtcagagcaaaatggctatcaataatatagagatctgcaagaattcccacacaggtgaaatatgcatggtggaaagaggcaattcttaaggcaaagagccaagcatgtaccaaacaccaatgcccttgyataccaaagctaaagattctacaatttgccaaagataagaa

SEQ ID NO: 242422 - DNA, 485 bp, Homo sapiens
tggctatcaataatatagagatctgcaagaattcccacacaggtgaaatatgcatggtggaaagaggcaattcttaaggcaaagagccaagcatgtaccaaacaccaatgcccttgtataccaaagctaaagattctacaatttgccaaagataagaatgtacctttcacaacagcaaggacctcatatattgtcttattatatatccctaaaatctagcacagtgttgaataagaggaagtagaaataattttgagaaggaattaaacatgtatttgtagaagtcaagtcttacccattgaaaaaatatctcccccatatttgtaattcattaaattgtttggaagggaaaagaaacyaaagggaatactccatagagaaagttgtttcagaaattatgtaaatttattctaataactaagaaatagtgaaaatgtattagaaaggttaggtagaggcacatttcagatttagactaaggtgca

SEQ ID NO: 242423 - DNA, 609 bp, Homo sapiens
tattctgtattttgttaatgaaagaaaaccagggtaataactgcttgaattttcatcactagcatgtttcctacatacataaacatagtgagtagtgagtatattcacatataaagtaacaaagaattatagtaaaccccaacatccaatcgggaaaaatgttgtaactctatatattcattaaattgttcacaaactgacatcttttagcatatattatggtttcctttagcttgttaaagagcatggactcatgactaaaacataagaacacccaatgaagttcaactaaatcaattcaactatgaaaaataaaatgactagtgatcatctctttattattattgaaagaataacttacaagtaaaaacattcaatttttgaaaacagctttgtatttattgaatttatgcatataacrttagttgcatttcaaaataaaatggctgccttaaaagtgatgcaaaattacatatttatacattctctgaattaagcaggattaattgaaaagtggttatgaaggcatgactgcaagctacaaattgagcctatttttagtaacttgctctagctgagatgttatatgttcagatttgttgacacgaa

SEQ ID NO: 242424 - DNA, 609 bp, Homo sapiens
tattctgtattttgttaatgaaagaaaaccagggtaataactgcttgaattttcatcactagcatgtttcctacatacataaacatagtgagtagtgagtatattcacatataaagtaacaaagaattatagtaaaccccaacatccaatcgggaaaaatgttgtaactctatatattcattaaattgttcacaaactgacatcttttagcatatattatggtttcctttagcttgttaaagagcatggactcatgactaaaacataagaacacccaatgaagttcaactaaatcaattcaactatgaaaaataaaatgactagtgatcatctctttattattattgaaagaataacttacaagtaaaaacattcaatttttgaaaacagctttgtatttattgaatttatgcatataacgttagttgcatttcaaaataaaatggctgccttaaaagtgatgcaaaattacatatttatacattctctgaattaagcaggattaattgaaaagtggttatgaaggcatgactgcaagmtacaaattgagcctatttttagtaacttgctctagctgagatgttatatgttcagatttgttgacacgaa

SEQ ID NO: 242425 - DNA, 456 bp, Homo sapiens
ctttcttcaaagtatatatcaaatgcattcactctttccatcgccattgctactattactgttttagtcaattctgactgctatcacaaagacctatagactaggtggcttagaaataacaaawatcaattttttcacagttctaaaggctagaagtctgagaccatggtaccagagtgaccaggtttcagtgatatctctcttctaagttgcagactaccattttcttcttgtatcctcacatgccagagagtgagagaactctcttgggtctattgtataggggaactagttccatttagaagggctccaacctcatgatgtaaccacctcctgaaagtcccacctcctaataccatcatattaagggttaggatttccacctataagtttcagagacagggtggcaacagacatgcagtccattgcaatcagtatccaagacattaccatcat

SEQ ID NO: 242426 - DNA, 352 bp, Homo sapiens
attaacaagccaaactatgaagcttcaaagacaagatgttaccttgtgcaaaaccctgacatggggaaaaactgtgtttcaagagtggaaagagccctgtctcrttaggagtgagggtcttgaatggtgcctttgattgtagacagcagagcagagctttagcatcctggagatttgtaattgtactccacaagtaactaaaggatttaaggcaaaggagggaaagaatcttgcttacattacaaaaaataaaaaagaaaaagaagaaataaaaaagaaaaaaatgtaatatatattattattattacattggtttataataattggtttatatctaatttgtttccctgtg

SEQ ID NO: 242427 - DNA, 352 bp, Homo sapiens
attaacaagccaaactatgaagcttcaaagacaagatgttaccttgtgcaaaaccctgacatggggaaaaactgtgtttcaagagtggaaagagccctgtctcgttaggagtgagggtcttgaatggtgcctttgattgtagacagcagagcagagctttagcatcctgragatttgtaattgtactccacaagtaactaaaggatttaaggcaaaggagggaaagaatcttgcttacattacaaaaaataaaaaagaaaaagaagaaataaaaaagaaaaaaatgtaatatatattattattattacattggtttataataattggtttatatctaatttgtttccctgtg

SEQ ID NO: 242428 - DNA, 352 bp, Homo sapiens
attaacaagccaaactatgaagcttcaaagacaagatgttaccttgtgcaaaaccctgacatggggaaaaactgtgtttcaagagtggaaagagccctgtctcgttaggagtgagggtcttgaatggtgcctttgattgtagacagcagagcagagctttagcatcctggagatttgtaattgtactccacaagyaactaaaggatttaaggcaaaggagggaaagaatcttgcttacattacaaaaaataaaaaagaaaaagaagaaataaaaaagaaaaaaatgtaatatatattattattattacattggtttataataattggtttatatctaatttgtttccctgtg

SEQ ID NO: 242429 - DNA, 352 bp, Homo sapiens
attaacaagccaaactatgaagcttcaaagacaagatgttaccttgtgcaaaaccctgacatggggaaaaactgtgtttcaagagtggaaagagccctgtctcgttaggagtgagggtcttgaatggtgcctttgattgtagacagcagagcagagctttagcatcctggagatttgtaattgtactccacaagtaactaaaggatttaaggcaaaggagggaaagaatcttgcttacattacaaaaaataaaaaagaaaaagaagaaataaaaaagaaaaaaatgtaatatatattattattattacattggtttatartaattggtttatatctaatttgtttccctgtg

SEQ ID NO: 242430 - DNA, 523 bp, Homo sapiens
cagatatttttcaggaaagtggcatgcatatatgtgaattttttagaggagttgaaaaacaaaacaaaacacttgtttggcaatgttcattcctcacagaatcagtgctattcattttggaaaatatcttagtatcctgcttgttgccttattagttgtttttctctcattgcaatcagctgttgccatgtaccttttgcatttrgtggtcagggtcttcggaattgtatgaatctgatatcaaatcctagttgtattgctgactagctgtgaaaaaagattttaaacttattattttcagtttactcatttattaagtaccaatattaatattgaaactagagaaatagattaaatggcatacttgtatagtaattgttacataggaaaactctcaataaatcaatgctgttattattaccattaatattccctagatgtgaagattgccttcagaggaaacatactggaaaaaaaaatgagttttacagaagtttttcagcagaagttgattggttttaca

SEQ ID NO: 242431 - DNA, 523 bp, Homo sapiens
cagatatttttcaggaaagtggcatgcatatatgtgaattttttagaggagttgaaaaacaaaacaaaacacttgtttggcaatgttcattcctcacagaatcagtgctattcattttggaaaatatcttagtatcctgcttgttgccttattagttgtttttctctcattgcaatcagctgttgccatgtaccttttgcatttagtggtcagggtcttcggaatygtatgaatctgatatcaaatcctagttgtattgctgactagctgtgaaaaaagattttaaacttattattttcagtttactcatttattaagtaccaatattaatattgaaactagagaaatagattaaatggcatacttgtatagtaattgttacataggaaaactctcaataaatcaatgctgttattattaccattaatattccctagatgtgaagattgccttcagaggaaacatactggaaaaaaaaatgagttttacagaagtttttcagcagaagttgattggttttaca

SEQ ID NO: 242432 - DNA, 523 bp, Homo sapiens
cagatatttttcaggaaagtggcatgcatatatgtgaattttttagaggagttgaaaaacaaaacaaaacacttgtttggcaatgttcattcctcacagaatcagtgctattcattttggaaaatatcttagtatcctgcttgttgccttattagttgtttttctctcattgcaatcagctgttgccatgtaccttttgcatttagtggtcagggtcttcggaattgtatgaatctgatatcaaatccyagttgtattgctgactagctgtgaaaaaagattttaaacttattattttcagtttactcatttattaagtaccaatattaatattgaaactagagaaatagattaaatggcatacttgtatagtaattgttacataggaaaactctcaataaatcaatgctgttattattaccattaatattccctagatgtgaagattgccttcagaggaaacatactggaaaaaaaaatgagttttacagaagtttttcagcagaagttgattggttttaca

SEQ ID NO: 242433 - DNA, 578 bp, Homo sapiens
ttagtatcctgcttgttgccttattagttgtttttctctcattgcaatcagctgttgccatgtaccttttgcatttagtggtcagggtcttcggaattgtatgaatctgatatcaaatcctakttgtattgctgactagctgtgaaaaaagattttaaacttattattttcagtttactcatttattaagtaccaatattaatattgaaactagagaaatagattaaatggcatacttgtatagtaattgttacataggaaaactctcaataaatcaatgctgttattattaccattaatattccctagatgtgaagattgccttcagaggaaacatactggaaaaaaaaatgagttttacagaagtttttcagcagaagttgattggttttacacacacacacacacacatacacgcacacatatttacacacatataaatatgtatattttatatatatatgcacacacatttgtttctatttaaaatgaataaagtacgttagtcatgtgtgcccaattttctgatacactaaaaaatggaaatatcttggcagacactattgataggctatgca

SEQ ID NO: 242434 - DNA, 567 bp, Homo sapiens
tattattaccattaatattccctagatgtgaagattgycttcagaggaaacatactggaaaaaaaaatgagttttacagaagtttttcagcagaagttgattggttttacacacacacacacacacatacacgcacacatatttacacacatataaatatgtatattttatatatatatgcacacacatttgtttctatttaaaatgaataaagtacgttagtcatgtgtgcccaattttctgatacactaaaaaatggaaatatcttggcagacactattgataggctatgcaaatgtaaacttctcttgcctagttttttatttggaaagtaaaatatccatgtttcttggtgtggccatgtgaattttgtgacattgaaatggatatcataagataggttcctaggaaagcctttaaaaaagcacaaacttggcctgcatggctttggccttttgcccctttgccctttgctgcttcagcctttcctatttttcttggctgcaatatgagcaatcatgactcagggtgctacaggcatcatgctatcttatatcatacctcttt

SEQ ID NO: 242435 - DNA, 567 bp, Homo sapiens
tattattaccattaatattccctagatgtgaagattgccttcagaggaaacatactggaaaaaaaaatgagttttacagaagtttttcagcagaagttgattggttttacacacacacacacacacatacacgcacacatatttacacacatataaatatgtatattttatatatatatgcacacacatttgtttctatttaaaatgaawaaagtacgttagtcatgtgtgcccaattttctgatacactaaaaaatggaaatatcttggcagacactattgataggctatgcaaatgtaaacttctcttgcctagttttttatttggaaagtaaaatatccatgtttcttggtgtggccatgtgaattttgtgacattgaaatggatatcataagataggttcctaggaaagcctttaaaaaagcacaaacttggcctgcatggctttggccttttgcccctttgccctttgctgcttcagcctttcctatttttcttggctgcaatatgagcaatcatgactcagggtgctacaggcatcatgctatcttatatcatacctcttt

SEQ ID NO: 242436 - DNA, 548 bp, Homo sapiens
tggagaccttgttcaaaataatgaaatacatatttaagatatgtgcaagtttgaagaaaacagctactgatagggttttggtgtattagataagataaaatcaatgggaacaccagctgaagtaaacaaacaaacatacacacacaaactgggaagcagagaaaataacaaaactctacttaaaacattatgaatttcagttgtctataaaacaatccacatttgatattaagtaagtagatgactatgcaaagctctamctcagagaagataccaaaattggaaatattctgagatgctatcatgtaactggcctttaaacccatgaaaatgcttgagaacacgcgggaaaaagtgagtaagtagagaaaaaagaaagtactcagctaagtgggttgaagacagtacaggaaatattgaaggagactgtctattgtttgattgatttctttcaaagaaagaatacaaagtaagttgataactgaaggacaacggtaggtcaatgtaaacttttaacaaaaagggaattattcattaatgagaatgat

SEQ ID NO: 242437 - DNA, 548 bp, Homo sapiens
tggagaccttgttcaaaataatgaaatacatatttaagatatgtgcaagtttgaagaaaacagctactgatagggttttggtgtattagataagataaaatcaatgggaacaccagctgaagtaaacaaacaaacatacacacacaaactgggaagcagagaaaataacaaaactctacttaaaacattatgaatttcagttgtctataaaacaatccacatttgatattaagtaagtagatgactatgcaaagctctacctcagagaagataccaaaattggwaatattctgagatgctatcatgtaactggcctttaaacccatgaaaatgcttgagaacacgcgggaaaaagtgagtaagtagagaaaaaagaaagtactcagctaagtgggttgaagacagtacaggaaatattgaaggagactgtctattgtttgattgatttctttcaaagaaagaatacaaagtaagttgataactgaaggacaacggtaggtcaatgtaaacttttaacaaaaagggaattattcattaatgagaatgat

SEQ ID NO: 242438 - DNA, 593 bp, Homo sapiens
cagttgtcaatttatgtctatctccacagacacacacaattatattatattatatatatttgtatattatatatatagtattggtatatattaagattacatattaaacattttctttaacctaaatttttagttaatcataagaataactaaaaattggccgggcgcggtggctcacgcctgtaatcccagcactttgggaggccgagacgggcggatcacgaggtcaggagatcgagaccatcttggctaacacggtgaaaccccgtttctactaaaaatacaaaaaattagccggacgtgttggcgggcgcctgtagtcccagctacttgggaggctgaggcaggagaatggcatgaaccygggaggcggagcttgcagtgagccgagatcgcgccaccgcactccagcctgggagacacagcgagactccgtctcaaaaaaaaaaaaaaagagtaactaaaaattaaaaagaaatgttttaaagaaattaaaacgtttttggggccctagagagtattagagagtattatgggcccttggcactgtgcctaatgggtaatttagccctgtctatctctaagcatttgtt

SEQ ID NO: 242439 - DNA, 593 bp, Homo sapiens
cagttgtcaatttatgtctatctccacagacacacacaattatattatattatatatatttgtatattatatatatagtattggtatatattaagattacatattaaacattttctttaacctaaatttttagttaatcataagaataactaaaaattggccgggcgcggtggctcacgcctgtaatcccagcactttgggaggccgagacgggcggatcacgaggtcaggagatcgagaccatcttggctaacacggtgaaaccccgtttctactaaaaatacaaaaaattagccggacgtgttggcgggcgcctgtagtcccagctacttgggaggctgaggcaggagaatggcatgaacccgggaggcrgagcttgcagtgagccgagatcgcgccaccgcactccagcctgggagacacagcgagactccgtctcaaaaaaaaaaaaaaagagtaactaaaaattaaaaagaaatgttttaaagaaattaaaacgtttttggggccctagagagtattagagagtattatgggcccttggcactgtgcctaatgggtaatttagccctgtctatctctaagcatttgtt

SEQ ID NO: 242440 - DNA, 662 bp, Homo sapiens
tacttaatttaccacataatttaataacactgttctcatttttttagggcattcgaaagttgttaccttaagccaaaaaactattgaatttactctgcctactgtgaccaatacarttggaaaacctacctataaaggtaaaagaatcactacaatacagacatatgaaataaaactttatgctatattctcatcgtctctatttaccaacctcaaacctctgggcttccttcttcaaacaaccaaccttatgggtgaggcatggtttcccaaacctttcttcaaacaagtaaaaatatatatgtaaacagtggtttgtggttctgaataaccacaggcttatatgcttatatcctcctcacttttgacccaggtaaattgatagaaatttctttcatctgtcacatttttaagctactgcatgatattctatgatgtgaatgcatcctaatttattcaacgattcctctacagaataacattttatcatcgttttttgccactacaagcaatggtgcaataaataccattgttcatatatatttatgtcacagtgattgcatttctataaaaaagaacatgtaagtgaggttggtgcattaaaggtatatatcattttaattttaatagatattagcaaacgtttcaaattactatggcta

SEQ ID NO: 242441 - DNA, 596 bp, Homo sapiens
taaatcatttttctttgatttattctgtgctctaaaataaatatccatggcactttctatccataaaggttctaagtaaaaaatcaataggaaatgcagaaagttgactattacttttacttatttttttactacatgcaatataaaaggaaaaagaaaacagtaaaaagatatttgggcttgcttctggaaaagcaaatgaatgtaagcaaagaaagtgaaatccatgttctttcccagtgagctagaagaaaaaatggttagaaattatatatgayaaaagaggaaagtttaaaataataagcaaaatcctgggcttcagtggatacaaaataaagttgacaagataggctaggactcaaaaggagggttttgttggttggaactcctagctttttatagcttctcaagctgggttagtcattgttcattatattttagataaatgtaattgatttggggttcacttgttacttcatatcacctacaacactgcttttcattaatgtagctcctggtttttcctataatttgggtttttttttctaagcccaagacttttatttgaagaatatactaattataagcagtaataa

SEQ ID NO: 242442 - DNA, 569 bp, Homo sapiens
atttgcactacaatttccagaatttttttccctgtacgtgactggtggaggcactagctagtctttgctacaagaacattatgagatttacatatgcacaactctaaactaaattagttcctccaggacaatttactgagctttttaacaccaccgtcaagcactgttgcaaggacagataataggggctcagataatatctgataaatgaataaatgggtccttttgctctcccrggactgggctagagcacttgactaaactgatgtgtgaggtagcaatttgtgtacagaagtcatgagttttgaggaaaaagaaattaaagaaacatgttctctaaaaactgcagtcattggtcaagaatacgagtctacttgtgatttcatacaaataatgggtggacagtgagctatgaaatttatgaatactctaagcaaaggttggtcagcatacgtgctaaacaggaaatcctgataagtaggaatagtgcaagccacactgcaacttttatcatattaggttggtgcaaggtctaccagatgtgtcttgccttcccatgtgtaaggtca

SEQ ID NO: 242443 - DNA, 507 bp, Homo sapiens
gtgtgcaccaccacacccagctaatattttttaattttttgtagagacagggtatcmctgtgttgcccctgctgcttttgaactgcgagactcaaccaatcctctcaccttggcctctcaaagtgctgggattacagggataaaccaccacgcccagcccacaagacatttcccagtggattttttccccaaggtttcccacggaaactgtgtccagaattggtgggttcttggtctcactgacttcaagaatgaagttgctgaccctcgcggtgagtgttacagctcttagggggggacgtctggagttgttcgttcctcctggtgggctcgtagtcttgctgggctcaggagtgaagctgcaaatcttcacggtgagtgttacagctcataaaagcagcatggactcaaagagtgagcagtagcaaaacatattgcaaagagcgaaagaacaaagcttccgcagtggggaaggagacccgagtgggttgccaatgccggctccga

SEQ ID NO: 242444 - DNA, 520 bp, Homo sapiens
aattgactcatatgaatgacaataatattccctcaccaagcacagctatttattacgtggttctgtaagtgtggttttcttcccatcttgattttgcatcaactcctgttctgttttgcaacaagtcttcagcattatatcatcttgttttttttcaacctgtggagctctgaagctcggaaagtagaatcatctcatagaatccaacaatctttatttgaatcaatgcggtttctgaagtttagctaccagagcatagtggcaaggcgcaaatccatttttgtccactaggtgacagacaagaactactttctctgcatcccgctggaaaaatgagagccacaatatggaaaaactaagcactgtggctcatacatttctatttgtcttctgaacttagaaaaggaaacaccaattggtatgcccaatatcgctctgtagtccactgaaaaatgccrgaagggttttcagactactgagttggggtacgggtacttttgctttttgtgtggtttttttg

SEQ ID NO: 242445 - DNA, 577 bp, Homo sapiens
atagctttataataatttctaatgactagatcagtattacgtgagctgtaatgtgaacaaatcccaaaatcatcttgctatcttgcttctcttgattctgctttatatccatcaatttgatttattgactctttaaatagcaaggattgccaaatagatcagttttataaatagtttataatagactagtgcttcaaagtctcagtttgtagtgtacttgggagtgaagcagagacaagaccactatcactactgagcctgataaaacattctagcttaatactatcttttctatttttgacacacagtctcactctgtcgcccaggctggtgtgcagtggcacgatcttggctcactgcaacctrattttaaaaatggctctgtcgactgtataaagcactttgtcttttccatcattaatttgatcagaaagcagaccactgaaaacctttcctccaaaacaagagtcagcaaactttctgtaaaggactagggagtaaattttaaattttgcaaggcagacagtctgttgcaattactcagctctgcccttatagggagaaaataaccatagtc

SEQ ID NO: 242446 - DNA, 520 bp, Homo sapiens
gggttggagatataaatttgaaagtcattaatactatgggcaggtcataaagccatggactggatgaggtaggtcacctagggagaaaatgtatgtagaaaagaggacacaggcatagccaagagcactgcagcattgggaagaaaatttccaaggaaaaccaaaaaagagagatgtcacgaaagcctggagacttttttctagaaggaaggcatagttaattgtgtcagaagccattgaaagattgagtaaatggggattgagaccattcactggtctcaatggctttggcaaccactggctttggcaaaaagtgggccttgagaattgccatttcagtcaagtgctaggaataaatacccatttggagaatttgaaggagagatgaggaggtagggaccacacatayagacatgtctttacatcttttagggagttttgctgttaagggaagcagagaaattcggtgataactgaaggtagaagtggggtcaagtaaggatttttttaaaatttgagt

SEQ ID NO: 242447 - DNA, 602 bp, Homo sapiens
tcaaactgatcacactgattgaaaacttcctcaatgaaattttcaatcaacaacatgcttcaaataaaagtcaaacagtgttccaaccacttgatttcaaaccaagtagattttaggtttagaaacactaaaaaaaggtgtttcatttataaatacggaaggaacaaaaacatcactgcatcaatccagaaattatcaaaatatttagaggacaagaaatataaaatttagtcaactttgctgttttctcagttccttaaaatcccagagaatctgcaaatatagctaaaaggtaccaactcttgaaagcctatatwactagtcatttcccattgagtattttggaattttattattctatttattcatattctacttatttataatgtattctgctttatgatgtttatctgaataatctggacaaattctcattctgggcagtcattcatttcatcctatgaatgccatggtaagggaaacaccgtagttaagaggaacagatgaagtcggaacactcacatgcatcacagtcacagaactttaagtcacgagatggaaaagacattgattctgctttggatcaaagtttatagaacact

SEQ ID NO: 242448 - DNA, 386 bp, Homo sapiens
aatataactacaatcggccaaactttgcagtcatgtatgagaacagaaacagctctttatagccactcatgcacacacacaatccttatatatttatttgccattttctcattagaactgtttacatgaagtactaatttgtcatccatgtcaaaaccattacacttactgaaagaatcctacaaagcataccacagaactgttaaggtaatattatataattaaaattatttttgaaatccctccagaaaataacccctacagaattttgaattcaattttagtaattattgtaattatggaaaaaytgtcacttgcattttagggcaatatgcaaatattattcagcaataagtctagagaagaagaaaaataattaagatata

SEQ ID NO: 242449 - DNA, 580 bp, Homo sapiens
caatctctcaatgttattatggaatcagttacactattctttgagagtagcttgcaagaaaaataagaagaaaagataattaaaatcaacagtagttgcttggcaaattgagttaaaaaaaaaagtgaaactccaggtaaaacttaaaccctactcacccttctctttgcctcctgatatttgtagatacygtaaaataccaggacattaaaaggacaactgtctggcatataagagaaaggaaagcgtaaataataatgtccccagacttcaagacactcagaaggcttattttgctccttctgagtgacagtaccccatagattgatagagttaacccatcctctgctgtccctcagaacctactagtaagcttatagaagatgattaggaactggatttttgaatggacacttgtgtgactttctctaccattttcttagaggatgtatctctgcctgtcgcctctaattctatttatgctgtaggagtttcttggaaacctacttcattgtcaacatctcagggccaccccagtatccttaggctctcttaactctcatcatgcatttctaatttc

SEQ ID NO: 242450 - DNA, 580 bp, Homo sapiens
caatctctcaatgttattatggaatcagttacactattctttgagagtagcttgcaagaaaaataagaagaaaagataattaaaatcaacagtagttgcttggcaaattgagttaaaaaaaaaagtgaaactccaggtaaaacttaaaccctactcacccttctctttgcctcctgatatttgtagatactgtaaaataccaggacattaaaaggacaactgtctggcatataagagaaaggaaagcrtaaataataatgtccccagacttcaagacactcagaaggcttattttgctccttctgagtgacagtaccccatagattgatagagttaacccatcctctgctgtccctcagaacctactagtaagcttatagaagatgattaggaactggatttttgaatggacacttgtgtgactttctctaccattttcttagaggatgtatctctgcctgtcgcctctaattctatttatgctgtaggagtttcttggaaacctacttcattgtcaacatctcagggccaccccagtatccttaggctctcttaactctcatcatgcatttctaatttc

SEQ ID NO: 242451 - DNA, 579 bp, Homo sapiens
gtaacccaaattgaacaacacattaaaaagattatacccaaggggtaagtgagatttattcttgggttgcaagaattgttcaatatatgcaaatcaatacatgtgattcagcacattaacagaatgaaggatacaaataatattgtcatctcaatagatgcaagaaaaaattctgacaggttcaacatcttctgatgatacatgtaaagatgctcaagaaagtagacatagaagtaatgcacctcaatgtaataaaggccatgcatgacaagcccacagctaacatcatactcaatgataaaaagctaaaagcttttcctacaagatcaggaayaagacaagacactctgcatttctcgtcatcatagtacttgaagtcccagcaagaagaattggacaaaagtataataaatagaagacattgaaatgagaatggacagagaaattattgctatttacatatgagttgatcttatacataggaatccctaaagacacacctctacacacacacatacaaaaactgttagaactaacaaacacattttgtaaagttgcaagatacaacaccaacataca

SEQ ID NO: 242452 - DNA, 507 bp, Homo sapiens
attgtataatttgacactatccttgttttgccaagtcttctctaagtttgaaattatttccaaatataaatatttttgtaaagtaaaaaataaattgaccattaatgagttaggagaacgaatcattaatcagaaactttccaacaaataaaagcccaggacctgatggcttcattagttaattctactaaacatttgaataattaacacaaataattctcaaagttttcataaaattgagaagtaaggaacatctctaaattcattttttgaggcctatattaaaaatacaaaagttaagagactataggaacaagagaaaccaaacmaaacaaaaaaaattacaggccattatttttggtaagcatagcctattttaatatgtcccatttccttgtttttattatttagtgtaatatgccctagaattctaaatcacccctcagcatccaaggtacacaaggctctttggtcttctccctattccttcctaactactaagccatt

SEQ ID NO: 242453 - DNA, 617 bp, Homo sapiens
caatcttgacgtagactatttttcttttttttttttcttttttttgagatggagtctcactctgttgcccagtctggagtgcaatggcgctaaacctctgcctcctgggttcaagcaattctcccacctcagcctcccgagtagctgggattacaggwgcatgccatcatgcccacctaatttttgtatttttaggacagatcgggtttcaccatgttggccacgctggtctccagctactgacctcaagagatccgcccacctcaggctaccaaagtgctgggattacaggcatgagccactgcacttggcctatttttttataattccaactttgttacaggaaatacttctccttccaattctctcctgtccatgattccctaattggaattcaatcagtcatttctaaggttgaagatggaaatttccaaggcttttataattgctcaatatagatattttgagcaagctcctgcctgacgggaataaataatttattgagtttttttattcttagaatatggaaaaatattttacctggagaaggtcaaaaagaacaccttgtcacaagaaaaggcaaaatgtaccatttaaagtttaaatcaggataacag

SEQ ID NO: 242454 - DNA, 459 bp, Homo sapiens
ataaatatcaatacttacaacaatcactgtaatatatagacaatacaattcttatcttttaaattatttcactaatgattttctatagaagaaaaaatatagtctacctgaaattctactaaaagaaatattacattttaacctggaaatagaaggcaatggaattatgcatactatcaatttttacccttcactcaatattaattttagcttgtagtaagtaagtaaagttggcacataaaactatattattgccatagcaaaccttcacagataaaatagtaagtcattagctataattatagtcaaaattgagcatttttgataaatwtaataggggattattatatttaggtaaacataattagtatattcagagatttaaaatacaataacagtaatttttagagcaccagcatgtattattttgtataaggcactataccgaatgcatatagg

SEQ ID NO: 242455 - DNA, 590 bp, Homo sapiens
ccctcccttgacacatgaggattaaaattcaagaggagatttgggtggggacacagaaccaaaccatatcattcctcccctggcccctcccaaatctcatgtcttcacatttcaaaatgcaatcattccttcccaatagtcttcaaagtcttaactcattttagcattaacccaaaagtccaaagtctcatctgagacgaagcaagtcccttctgcccatgagcctgtaaaatcaaaagcaagttagttacttccaagatacaatgcrggtacaggcattgggtgctccaaatgggagaagttggctaaaacgaaggagctactggccctacgcaagtctgaaattcagcagggcagtcattaaatcttaaagctccaaaatagtctcctttgacttcatgtctcacatccagggcacactgatgcaaagggtgctccatgggcatgttagaatttcagaaagaataaaaataattctctttaagttttagcttctgatccattctaagtagatgataaagagtaaccagcaagtacaaaatatcatcctatttgctgaatatatttttttacatgcagaaaagaggctt

SEQ ID NO: 242456 - DNA, 512 bp, Homo sapiens
aactgaagacaatactttgtcaatttcctgatggtatttaatgggagacccattagctgtgaggaaatatctttctttccagatattgacatrggtacagaggaataggacagcatatgtagaatcagtataaatattaagtgatttccctttacttaattcaaacacccttgtgagagtgatcagctcagctagttgagcacttgtgcctggggagagaatcacaccctcaataatgtcactcatggtgactactgcatatcctgttttatggattcttttttctacaaaataacttttgtccataaatagaatccatttgagaggtgaagctggttgggcttctgggtcatatggggacctggagaacttttctgtctagctaaaggattgtaaatgcaccaatcagcgctctgtgtctagctaaaggtttgtaaacacaccaatcagcattctgtaaaaacacaccaatcagtgctctgtgtctagctaattggatggggacctggaga

SEQ ID NO: 242457 - DNA, 605 bp, Homo sapiens
tagttcactacagtttgacagaactgagtcttatattttgaaaccttatatccactgtcagctagaaatttgagaagagccttagtgccctcctgagagggttccttggttggggcacagaggagaatgtcatctacatattgcaaaactttaacctgaggatgaaaaaactcagagatctcttaacaagrcctgcccaagcaagtacgagctgtctcagaatccctgaggcagcaccatccaggttaactgaatggcttggtgggagatatcctcaaatgcaaacaggtattgggagtcagagtgtaatggtatgtggaaaaagacctccttcaagtccaggactgtgaaccatttagtttcctcaggtatttgagttagcaaactatagggtttgggaaccacaagatgaattggaaccataggctaattaatgaagcagaggtcttggactagtccccattccctgctgcgttcctgtaaccccaacaaaaaacaaaaaacccaaataaaaaacactttttttttttctttctgctgtgaccctctctgtatcctctgggtcccagtgaccttcataggtgccaccaatggatggaagcatt

SEQ ID NO: 242458 - DNA, 635 bp, Homo sapiens
gaaacccatggtaggtggggctaacaatcacaaygttcatgtcatattaataatattttaatgagttgggtcaagttaagaacatttaggctgacttattgtacctgtgcctaagttgggatcaccccttctgagcaaatcctgacataaggaaaaatttttaacccatttcttcctgttagctacaggggcagtgcaggtgtggtcccatgggtatttttccactcccaagaccttccttatttgcctaaccaacatctaactgcttcctctctcaattatattaacagttgttagaattacctcacagttgttagaatgactattgtaaataagccacaggtaagttttggcaagggtgtgatgtaaagggaactcttgcaccggttggttgtgatagaaattagtataagcattatagaaagtagtatggagcttcctcaaaaaaataatagaatgactatatgatgcagcaagcctactactatgtacccaaaggaaataaaatcagtacatcaaagatatatttgtactctcatgttcattgcagcattatttacaaatgccaagatatggaatcaatttatgaataaagcaaacctattatatatacataatagaacactattcagcca

SEQ ID NO: 242459 - DNA, 635 bp, Homo sapiens
gaaacccatggtaggtggggctaacaatcacaacgttcatgtcatattaataatattttaatgagttgggtcaagttaagaacatttaggctgacttattgtacctgygcctaagttgggatcaccccttctgagcaaatcctgacataaggaaaaatttttaacccatttcttcctgttagctacaggggcagtgcaggtgtggtcccatgggtatttttccactcccaagaccttccttatttgcctaaccaacatctaactgcttcctctctcaattatattaacagttgttagaattacctcacagttgttagaatgactattgtaaataagccacaggtaagttttggcaagggtgtgatgtaaagggaactcttgcaccggttggttgtgatagaaattagtataagcattatagaaagtagtatggagcttcctcaaaaaaataatagaatgactatatgatgcagcaagcctactactatgtacccaaaggaaataaaatcagtacatcaaagatatatttgtactctcatgttcattgcagcattatttacaaatgccaagatatggaatcaatttatgaataaagcaaacctattatatatacataatagaacactattcagcca

SEQ ID NO: 242460 - DNA, 599 bp, Homo sapiens
gaatattaatgtatattaaatacaaatatatgtgtgtatacttaagactaaagcatgaatttaataaatccagaaataatagtaatgaaattattctttacctttaatattatctttatttataaagttattatatgcaatatatatatttacagtacaccaaagttttaacatttttaatgttcggttcagttaaatttaactaataatggtaatgccaatcaaagtaaaattatgggcyacacagcatgcaagagcatgaaatataatttctttgctaaaggtaaaaattcaaagagatttggcataattgtaaagcttgtgtaaagcttatgtccaatcccctctattcccatgaaattggcagacattatgaatttaattttcattgctcccttcggtgctttgttggagatatgaacaagttatgaatttagtaaaactagtgtgagcagcaggaacttaatcaatttactgtatacatttttctctctgtgctcatttcttttcctactctcagctttaaatacagacatttcacacattccattttgttgttaagctatttaacctaacagtctcaccatttaagaaaataa

SEQ ID NO: 242461 - DNA, 669 bp, Homo sapiens
cagcatacctccatgggcacccaaataagggaattcatcagcactaggcttgtttttgcttccaasgtggtcaccgtgctccagttacttccccttcctggactgcctgtcccctccacctgagccctgcccagctccaatctcacacctcctccacagccccctggaaaccaagccgtcaagtatcccctctccctgctaaatctcaactgctctaaccaggcagcccccagggttggacgctgcccacggtcctcagggtcttggatttgcagtccttcccccactgccatcctccccactagtgcttcagctcctggaaagcaggaagcacaggccctgagaagagtaggtacccaagagaaagcctatgggtaaggctgaatcaggattcccattggatgtgactttaccagtgtgcctgggatccaggcagggccacattcaagctagctgggtgctccgctcactaaggacaggagccaggagtgggaatctaaattgccacatccctagggatgggccaggcactcctagcttgaacactatttgccaactcaaagtacacttgagattagcgaggccgggggcaggggggcacacagcgaccacaggggaaagacaagaactgctgttgtgggctggctgctcctgagggtatcccctctg

SEQ ID NO: 242462 - DNA, 567 bp, Homo sapiens
ttggctactgggcattaatccctgagccactcatttttgttttttccttccttcctttcttttttttttttttttttttttttttcagagacaaggtcttgctctctcacttacactcgagcacagtggcacattcatagcttactgcagccttgaattcctggaatccagcaaccctcccacctcagcctcctgtaactaggactacaggtgctcgccaccatgcatggctaatcccagagccatttgtcccagggtgttagagagggggctgcttgctgctcctaggccaccttctcccacctytgacaactttggaggggttgtttttaattagatttaggaaggtaatctcatcactctccatgagattttcataaggggagggaggagttccaagaatccttttttcctctgacccatccttcctcagctctgtactcaatgggtggtagggatgagggaaaaagactgatggtatagctcaaagttgctgactgcctagaggcctacaaatgtgctagtaatgaatctggggtaggcctgagtacgtggagtgtatatgta

SEQ ID NO: 242463 - DNA, 503 bp, Homo sapiens
attgcccaaggaaactaaactcaatgtacttttccccttcaacctttttgtttgtttgtttgtttgtttgtttgtttgagatggagtctcgctctgtcaccaggctggagtacagtggtgcgatctcagctcactgcaacctccgcctcccacgttcaaccgattctcctgcctcagcctgccgagtagctgggactacaggcgcctgccgccacacccagctaatttttgtattttcagtagagacrtggtttcaccatgtgggacaggatggtctcgatctttgacctcgtgatccacctgcctcagcctcccgaagtgctgggattacaggcatgagccactgcacccagccttcccctccacccttcttggttcactgtgtataggaagatttcctcagctgtgtaagtgactcatctgttaaagccaaataacccccaaagctgcaggttagaataggcaggaagtcactagaaaatgaggtattctggaaagaattc

SEQ ID NO: 242464 - DNA, 487 bp, Homo sapiens
atggaattctgtaaaatctagtaaccagattgcccaaggaaactaaactcaatgtacttttccccttcaacctttttgtttgtttgtttgtttgtttgtttgtttgagatggagtctcgctctgtcaccaggctggagtacagtggtgcgatctcagctcactgcaacctccgcctcccacgttcaaccgattctcctgcctcagcctgccgagtagctgggactacaggcgcctgccgccacacccagctaatttttgtattttcagtagagacatggtttcaccatgtgggacaggatggtctcratctttgacctcgtgatccacctgcctcagcctcccgaagtgctgggattacaggcatgagccactgcacccagccttcccctccacccttcttggttcactgtgtataggaagatttcctcagctgtgtaagtgactcatctgttaaagccaaataacccccaaagctgcaggttagaa

SEQ ID NO: 242465 - DNA, 533 bp, Homo sapiens
tgtaacttgtctaaggtgtccagccggtctacgtgaggaggtgtactggggagataagcagggggccatccctgctgtctcctgtaggagacccaaggctcttggtccagtgcccttgccaaacatagtgcttggcctcccagccatgatacgcagaccaacccatatatatccgcctggcctcctgcctcctcctccctctccaaacctggaggctttccattcttaaaacaaataaaagaaaccacctaccctgttagggccagggagggagacacaatcctaaaccyttttgcaagtcctcagtttcaattgcaagtaaagtagctttcaaatagccagtcctggttcctgcagtcctcttagcactaactagtggaatactgtctgaaccccagtttactcattcacaaaatgagaataaaaatagcccctaccttactgggttgttaagatgattaaaagagaaaatacatggagagcacttagcctagcacacaatcagtccttaatagatgttaaccaaagacatt

SEQ ID NO: 242466 - DNA, 533 bp, Homo sapiens
tgtaacttgtctaaggtgtccagccggtctacgtgaggaggtgtactggggagataagcagggggccatccctgctgtctcctgtaggagacccaaggctcttggtccagtgcccttgccaaacatagtgcttggcctcccagccatgatacgcagaccaacccatatatatccgcctggcctcctgcctcctcctccctctccaaacctggaggctttccattcttaaaacaaataaaagaaaccacctaccctgttagggccagggagggagacacaatcctaaacctttttgcaagtcctcagtttcaattgcaagtaaagtagctttcaaatagccagtcctggttcctgcagtcctcttagcactaactagtggaatactgtctgaaccccagtttmctcattcacaaaatgagaataaaaatagcccctaccttactgggttgttaagatgattaaaagagaaaatacatggagagcacttagcctagcacacaatcagtccttaatagatgttaaccaaagacatt

SEQ ID NO: 242467 - DNA, 379 bp, Homo sapiens
atgagcacacagactagtccatgaggagctcagggagtttttccaaggwtagcttctcatctctgcaaatgaatttacatttcgatgttataaaaatatttaaacaaattatttcacttgtccaaaagctctttttctgtctcacatttatcctgccttccaagtcctatttgagtcctacttttactcccaaacattctcttattacagtggctttaagattaagcctcctctttgaagttctaaagaactaggagatgatagccatgcttttttccaatatgttgtatgatttgctgttgtttccagtatatttagtagatatctcaattagatttaggcgaggaattaccctgtgaatgggtaaaacaagagataa

SEQ ID NO: 242468 - DNA, 504 bp, Homo sapiens
tttgtcttgaggtttgggtgccagctcagcagcagtggaatagagtaccargtaaattcctaaggttcccaactccaggccctggctcccagacaacacctctggacctacctggggctggggggtagttcgccaccctgaatgcaaggaaacaagcctggctggcttcaccactgctgactgtagaccccttaggtggcagccaggcacttatgaccatgaactgtcaccgagacccaatgctatgctggtttcaggtctgactcagtgcagtcccaggggtggtgaacatagtggtgcttaagtcacctctcccctatctcaaggcagctcagcacagagagacacagactgtttccatttgtttgcaggcaaagtaagggaaggaaacaagagtctctgcctaatccagtgaattctcctggatcttacccaagactcccaaggcagtacctctatgacactgcatgagccacactgttacttggcttggggtgccccctc

SEQ ID NO: 242469 - DNA, 504 bp, Homo sapiens
tttgtcttgaggtttgggtgccagctcagcagcagtggaatagagtaccaagtaaattcctaaggttcccaactccaggccctggctcccagacaacacctctggacctacctggggctggggggtagttcgccaccctgaatgcaaggaaacaagcctggctggcttcaccactgctgactgtagaccccttaggtggcagccaggcasttatgaccatgaactgtcaccgagacccaatgctatgctggtttcaggtctgactcagtgcagtcccaggggtggtgaacatagtggtgcttaagtcacctctcccctatctcaaggcagctcagcacagagagacacagactgtttccatttgtttgcaggcaaagtaagggaaggaaacaagagtctctgcctaatccagtgaattctcctggatcttacccaagactcccaaggcagtacctctatgacactgcatgagccacactgttacttggcttggggtgccccctc

SEQ ID NO: 242470 - DNA, 504 bp, Homo sapiens
tttgtcttgaggtttgggtgccagctcagcagcagtggaatagagtaccaagtaaattcctaaggttcccaactccaggccctggctcccagacaacacctctggacctacctggggctggggggtagttcgccaccctgaatgcaaggaaacaagcctggctggcttcaccactgctgactgtagaccccttaggtggcagccaggcacttatgaccatgmactgtcaccgagacccaatgctatgctggtttcaggtctgactcagtgcagtcccaggggtggtgaacatagtggtgcttaagtcacctctcccctatctcaaggcagctcagcacagagagacacagactgtttccatttgtttgcaggcaaagtaagggaaggaaacaagagtctctgcctaatccagtgaattctcctggatcttacccaagactcccaaggcagtacctctatgacactgcatgagccacactgttacttggcttggggtgccccctc

SEQ ID NO: 242471 - DNA, 576 bp, Homo sapiens
atagcttgccacagtatcttatcagctaattgcattcttggatgtgctgggagtcagcttgcacaagttaagtccttgaggaaggggctgccagtgaaagagccaagatggagtctgtctggctctcttagctaagggagagtcaattcaggtggaaacaaggctaggtgattaaaggaaaagggagagtctaaaaacagagttagtaaaaaccaggttgggcattacaaagtcaataaatgtgatgcatcacataaacagaattaaaaacaaaaatcatatgatcatctcaatagatacagaaaaagcagytgaggaaatccagcatccctttatgattaaaacaccctcagcaaaatcaacatagaaggcacatacctcaatgtaataaaagccatctatgacaaactcacagtgaacatcatactgaacagggaaaacacaaccactatggaaaacagtatgaagattccttaaagaactaaaagcagaactaccatttgatccagcaatcccactattgggtatctacccagaggaaaggaagtcattatttgaaaaacacacttgcacatg

SEQ ID NO: 242472 - DNA, 429 bp, Homo sapiens
gtggaaatcagccgagcatttttagaacctctccttgacacagtctggcctctagggcccaatgtggaaattgctgctttaatctacagtgatattagagctactgataagcacagtagtctgaagaagacttctcagttttattagtagttttctcattgctcttagaattctgatgcagctactttataactggatgtaggaagcctgtccaagtgtcagaatgccctacccgttctagacctaattagccttctctgtgggcagccattgtcttcatttaatatctagggcagagattctcaaacttcagattgcatctgaatcactgggaggkgaatcacccagcacagattgtcgggccaccccagagtttctaatttagtaggcctagagttgaaccagagaatttgcatttttcacttgttc

SEQ ID NO: 242473 - DNA, 330 bp, Homo sapiens
ttactgaacattaactctatgccaactcccttttatgtccgttataaattttcttatttaatacttgcaacaaacctatgaggcagttacttttattacttgcatttacaacccagaaaacaggcatgggagattagggaacttcctaagggtcactcagatagagtgtgacataagcaaattcactccacagcaggggctttactttgcaattcgcagttcccctctttatggaagaycttcagaaagcatgagcaaaagcagcttccacattgcaaatcaaaagaagcccactctccccaaacttaagccctcaggcccctcattaat

SEQ ID NO: 242474 - DNA, 338 bp, Homo sapiens
tactgaacattaactctatgccaactcccttttatgtccgttataaattttcttatttaatacttgcaacaaacctatgaggcagttacttttattacttgcatttacaacccagaaaacaggcatgggagattagggaacttcctaagggtcactcagatagagtgtgacataagcaaattcactccacagcaggggctttactttgcaattcgcagttcccctctttatggaagatcttcagaaagcatgagcaaaagcagcttccacattgcaaatcaaaasaagcccactctccccaaacttaagccctcaggcccctcattaataatttttcc

SEQ ID NO: 242475 - DNA, 623 bp, Homo sapiens
  misc_feature (1)...(623): n = A,T,C or G
tagagatttaatgtcacagaaatattcccaaatacgcctaggttttatgaccatcaaccccatggtatgatggacattatagtccattagtaagattatgcctgtaactacatagcagtaacgtgtgtgttctttaaaaaatcttactttgactcctccccaaaacagcactttggtcaaggacttgagggcaggaagtttatttgcgagctgatcctaggatgcagaaatgaggagcatagccaatgagatagggaaggaatatgtattanaagaacgcaggaatgagtttcttaccactgtgtattgagtggggggctcacccctgttagggacactctaagaaacgattgtagtatgtgccccgaaagtgttctccttcgggacaatgagggtcggagtttacccggaaaccatccccatcattccactggttgaggsctgtccttaggtagagtatattattctctcttaattctgagttgcccctgcctgctgaacggtctttcagattctcttccctctccttctttcccacatgcacttgaaggaagcgggccactagcgataggcaattacctgtctacagcacttgtgctgaatcacagcgacccaaagaaatg

SEQ ID NO: 242476 - DNA, 579 bp, Homo sapiens
tatttcccattcccacatgagtgcatggagggagaatgtgaatgttcttatgtggtctcagtaagaggagggctctttccttattttgagaggtacaggacagggaagggtcctcactgatgaagtgctcaaaatgtcagaggccatgagtaaagtggcactttttggttgccagatccagtggttgccctcagcaagactccatgtttcttgatctctggttcattcctagatcagagaacatgtggtgaaacaaaggatcaattctcaaaggaaaaygccttagatggttgtttgaaaattgctgttgtacttctttcattttatatttgaaagggcaatagaggctggatggcagaactgcccagtgttgattggaaagggcttcatcatgcccagccactctctgcttatatctggtcatctgaaggtaaatgtatgattttccaggtcacagacaaggaagtcagggtatagaactcataagggcaagtagtccagcaaatcaccaccacatacaacaccctatcatgaaagtcacttgagattacaataaagccattaaaacctggcccatga

SEQ ID NO: 242477 - DNA, 534 bp, Homo sapiens
gtcataagccccagagatgaagccatgggaaagatcactggttcattttttaccatcaacttattagcgttcagggagtgacttcagctcaagtattacaaatatgctctaattatactcaatgagctatatatcattacagattgctgatagccctttgtgggacattttataaagttcagactacatatttttagcaatgtggagatttaaaagtaaaaatataagagatattgtatatgccctgaggcatattttgtcttaaatattatccttggccaagtatactatataaatacagtaaatatgaatagaactggccaggtgccaatctcctaggatgaattttagtcaagaatgtatttatgggatataaataatactgtgtcaacatttaaagaargggtctgattagttttgaatttattcatattgatcttttcacgtgccgttagtttaagactctaagagtagttatgctaaggtttaccgatagtttgcccactgggaattagtggacctctagtagtttaa

SEQ ID NO: 242478 - DNA, 572 bp, Homo sapiens
aacgtttcattttctttcttttctctccctttttcattgtaaccaatcagcacatgttgtggttctaaccctggtgattttgtactccccccaacacccrcacccctactcccactggaacgtttggcaatgtccagagacactttgggttgtcatgactggaggtggaggggtgctaccggtatttagtgggtcagccagggatgtttctaaccatcctataataaatagggcaaccccccattcccaacatcaaagaattatcctgaccacaatgtcagtaatgcctctgttgaggagccctggtatttgttgggggttactgaattctgttaacagtaccatttagaaaataataacaaaaataaaatatctttatgatcaaagcatattcaaatgagaatactgattaggaggatagtcagacagttatcttaattaaatggagtgtggattagaccattgtatacagtatgtactttattttttgtggtcttaaagcccctaaattagagacatcaaaacttcccatttatttagcttaagtgatggtgttgacctatccattacta

SEQ ID NO: 242479 - DNA, 572 bp, Homo sapiens
aacgtttcattttctttcttttctctccctttttcattgtaaccaatcagcacatgttgtggttctaaccctggtgattttgtactccccccaacacccgcacccctactcccactggaacgtttggcaatgtccagagacactttgggttgtcatgactggaggtggaggggtgctacyggtatttagtgggtcagccagggatgtttctaaccatcctataataaatagggcaaccccccattcccaacatcaaagaattatcctgaccacaatgtcagtaatgcctctgttgaggagccctggtatttgttgggggttactgaattctgttaacagtaccatttagaaaataataacaaaaataaaatatctttatgatcaaagcatattcaaatgagaatactgattaggaggatagtcagacagttatcttaattaaatggagtgtggattagaccattgtatacagtatgtactttattttttgtggtcttaaagcccctaaattagagacatcaaaacttcccatttatttagcttaagtgatggtgttgacctatccattacta

SEQ ID NO: 242480 - DNA, 579 bp, Homo sapiens
gtcctctttgtaataacaataggattttacaaaaatattgattaaaccaaggtagagaaacttttcttaactcaataaagattctgagttttagttagaaccctaaatccttgctaaaatgaaaacattttacttcaattttctatgtatctataacattcctccttttcctaacataaaaatttgttaacgtctgacttggttagtaatgatgcttggaagatgaagaccactgaactcgaacccatcttttctgtgaaacaaaaaaaaraaaagacaagtggacccaggtagcttatgtcataataatgaaagaaacacaaagcacaagtagggcaaatgttattaaaaaaaaaatgcatttgtagtgcaagtcaaactataggggctttactcaaaagtactggccagctaaaagaaacatacatttgtgagtgatcattaaaaagagcccaaatttaagtcaatctaaatcatagttgacattattacagaatataaaaaatatggtaaaaatttacacattacacataaagtagttaatgttttgatttaatagtttgcaaaagagatctgcag

SEQ ID NO: 242481 - DNA, 605 bp, Homo sapiens
atagacctgatttattgctgataatgatagtaagtagattagcctctgaatattcaaaatttaaaacacatcttttttaattgttaaaagtctcctaagaattaatgcttgactttgaaaagcaagaaaacatattttggtaagtgcaagttttcaaaaacattaatggagactagtcagaagtattccctactgttataattttctctgcttcaaaatttcagaaactctctgaccccaaatatacatgcacggtgatttcagataatttcacctatgtgtaaagtgtgatagatagctgtgaatttaggtacattattttaaaattcctcttttgtgatattctctttagggtaatgcattaagaatgcatgcgtattcatgtagattacattgtatatttgtctaacataaatgtggatgatagagtcattagagccttattcatttcaactcacattaaaatctttgaaatttgaaacattcagggatgagacagaaggtgagtgtgaggacagaaatgtatgaggatgtatctcctgtttcygttgcagctttaactttagcagcgtcacagtgcccagggaacagaaaggaagattaaa

SEQ ID NO: 242482 - DNA, 593 bp, Homo sapiens
tgtaagaattctctactacagtttttaatcaacaccagagttaattcactccttggactcagaaggcattttgttctttagaaggctttctttctttctccactggctttattgaggtgtagttgagaaattaaaaaaartatactcagagtgtacaatgtgatgctttgatatacctatacattgtataatgatttccacaaactaatcaacacattcatcaccatgcatactccttttttgggggtgtatttgtggttaggacacttaagatctactccttcagcaaatttcaagtaaataacacaatattaatcagtcaccatggctaaccattagatttgcagaacttatctattatacctgaaagttcgtgccttttgaccaacatttccccacattccccctacaacaacatggatgaacctggaggacgttctgctaagtgaaataagccagacacagaaagactaatactgtacaatttcatttatatgtggaccctaaaaagtcaagctcgtagagagtaaaacggttgctggtggggcttctgaagagggggattcttctctggtgtggcagatcttgcctgt

SEQ ID NO: 242483 - DNA, 593 bp, Homo sapiens
tgtaagaattctctactacagtttttaatcaacaccagagttaattcactccttggactcagaaggcattttgttctttagaaggctttctttctttctccactggctttattgaggtgtagttgagaaattaaaaaaagtatactcagagtgtacaatgtgatgctttgatatacctatacattgtataatgatttccacaaactaatcaacacattcatcaccatgcatactccttttttgggggtgtatttgtggttaggacacttaagatctactccttcagcaaatttcaagtaaataacacaatattaatcagtcaccatggctaaccattagatttgcagaacttatctattatacctgaaagttcgtgccttttgaccaacatttccccacattccccctacaacaacatggatgaacctggaggacgttctgctaagtgaaataagccagacacagaaagactaatactgtacaatttcatttatatgtggaccctaaaaagtcaagctcgtagagagtaaaayggttgctggtggggcttctgaagagggggattcttctctggtgtggcagatcttgcctgt

SEQ ID NO: 242484 - DNA, 593 bp, Homo sapiens
tgtaagaattctctactacagtttttaatcaacaccagagttaattcactccttggactcagaaggcattttgttctttagaaggctttctttctttctccactggctttattgaggtgtagttgagaaattaaaaaaagtatactcagagtgtacaatgtgatgctttgatatacctatacattgtataatgatttccacaaactaatcaacacattcatcaccatgcatactccttttttgggggtgtatttgtggttaggacacttaagatctactccttcagcaaatttcaagtaaataacacaatattaatcagtcaccatggctaaccattagatttgcagaacttatctattatacctgaaagttcgtgccttttgaccaacatttccccacattccccctacaacaacatggatgaacctggaggacgttctgctaagtgaaataagccagacacagaaagactaatactgtacaatttcatttatatgtggaccctaaaaagtcaagctcgtagagagtaaaacggttgctggtggggcttctgaagagggggatycttctctggtgtggcagatcttgcctgt

SEQ ID NO: 242485 - DNA, 670 bp, Homo sapiens
ctaaaataagagtcaaaatgaatttgtttggattcagattttgagtatattttggttcagaattttctgcttgaagtaaatagagacagtttaaaactgattaacataatcgagccaccaaaatactttaaattctgtcactaaactggaatttaatctgtgtttcctgaagtaagataaagcaatccaacttttgataattagactggtacttcttggaggagtaaataagccaaggataagtaattcccacctctgctctaagagtcttagcatgtggaatactgaggggagaakaccaggccctggtggacaagagagagtgggagatgggaactctactgagtcttggtcaccaggaacaatgctgcctttaatctactacctgagttggctgtataatttctggtacccaatgcaaaatgaaaattttgggccccttaatgaaaaacaggaaaaaaagtgcttttaaggttctaaagtataaagctttgtttctgtattccatgggccctctctctaatctctcatgggggtttttgttatttaatgtcctaaatgaaataaattattagcataaatttttaccattcatctttataatgtacaatgcccgttttaaatgcaaatacaaaagtatttaacttggatgcagaatcactgaactcac

SEQ ID NO: 242486 - DNA, 574 bp, Homo sapiens
aaatgggggaatagggagagatttgttaaaggatacaaaattacaactaaataggagaaataattgctactgttctataccactgtaggatgactatagttattgaatgttctcaacaaaaagaattaatatgctaattacccccatctgatcactatacattgtatgtatcaaaacagcactatgtactacataaatatgtacaattattgaatgtcaatttttaaaaattaaattaagctttagaaaaagtacttggtgataccacttcacactaagaaggctcttttctaaaaagcagtgggaagtaacaagtgctagtaagkatatggagaaattagaactctcatacattgctaatgggaatgtagaatggtactgttactttgaaaagcagttcagcagttcctcaataagttaaaaacaaaactaccatatgaccttgcaactctacacctaggtatatacctgaaagaacttaaaacaggtgttcaaacaggaacttgtacatgaatgtttatagcagcattattcacaggaaccaaaaggtggaaataatccaaacatccacaaa

SEQ ID NO: 242487 - DNA, 311 bp, Homo sapiens
atttagcttttctatatcatataaaaataagatgtcaaaatatataaacataaacttatgtttaataattaatgtttcagtattttaacttacaaatgactctgaacttttatgattatctattatttaacataccgtgactttaagattttaaattactgaaaataattttgaaactgtgacacagtgatatggtttgactgtgtccccacccaaatctcaccttgaattgtagctcccataattcccgtgtgtcatgagagggacccagtggraggtaattgaatcatgggggtaggtttttccagtgc

SEQ ID NO: 242488 - DNA, 524 bp, Homo sapiens
acacttactggggcctgttcgggaagggcagtgtgaggagagcattagggaaaagagttgatgcatgcttggcttaatacctaggtgatgggttgacaggtgcagcaaaccaccatggcacacatttacctatgtaacaaacctgcacttcctgcacatgtaccccgaaacttaaaaaataattaaaaaaaagaaaagtggtgctatttraatttccattcctttatacatgggcttctgtttgctttctgcaggtttttaggatattctgtgcttcatatactgagtctttaattttattatcttttaaaattttctgtttgtatttttattcagcttcctgggagatttgttggaattatcttttgattcttctactatattttaaagaatgattaccttttttctatctataagagctctatcttattctgattggtgaaacttgttttattgacacgcagtagtttcttatgttattgcattgtagtgtgtggttaagaggtagacctgcagtcagacca

SEQ ID NO: 242489 - DNA, 519 bp, Homo sapiens
aaagtgtaagggggagccatttgctactgtgactcactatttgtttctcatatgtgtaggattgattattgccttgttctgttcaggttgctttaacaaaatatcataaactgggtggcttataaacaacaaaaggctgcaaaagtccaaggtcgaggcagattcgttgtctggtgagctcctgttttctggcttatagaaggtaccttcttgctgtgtcttcatgagctggaagggcctcttataaaacactaatcccatttgtgaggggtcctcccccatgacctaatcacctcccataggccccacttcctataccattagcttagggaacatatgaatttaggggaacacaaacattccaaccatggtatacataccaactcatagaggtatgttatatattctctctctctttatctgtctatctatctatatatatatrtatgtatacaatctaaatgtattttttcagttttcagcctggatcctggagctcaccataatgaaatttacatc

SEQ ID NO: 242490 - DNA, 446 bp, Homo sapiens
acagggcaacaaatccagagactgaacaaagcagcaaggccctgggcccagcctaggaaaccatttatcccttcttggcctctatgcctatgatggaaggggctgccatcaagacctctgacatgtccttgagacattttccccattgtcttggtgattaacatttggctcctggatacttatgcaaatttctgcagctggcttgaatttcttcttaraaaatgtttttttcttttctatcacatagtgagacagcaaattttccaaaattttatgctctgcttcccttttaaacataggttttaattccaaaccatctctttgtgaatgcataaaactgaatgctgttgacagcacccaactcacttcttaaatgctttgctgcttagaaatttcatttgccagataccctaaaacatctctctctagttcaaagtttcacagat

SEQ ID NO: 242491 - DNA, 461 bp, Homo sapiens
ccaaagtcctcagtaaaggaactgtgtttatttgaagatcatggagcaattcagacctaagcatggtgtggaaaatgataagtgttttgttgataagtaattaaaaggaggcttatagcaacatgagatttggaagctaaaccttaaactgtttagacacttamcagagacaagcagggaaagaaatagatgagaagagccctgctgtcatctgaaagagaatagacctaatgtttatctctgcaaagaggattgcatttaattggatcagcctgttgggcaatttatttccccagagtattattattattattaaaaacaatagaacaatcaactgaaaattagttatggctatcagttgggtgtgatagcaacaagagagacaccgctacaaataaatcagacaaacaacccaaaagagttctgctaaaaccactgtcatcccaaggaaatgtgtgcat

SEQ ID NO: 242492 - DNA, 531 bp, Homo sapiens
gacgtggtcactcatgaacagtttaaaggtattcacaaaagatcaaatcaacaagaatcttttcaatagatattttggtgaatttccaaaatgcctgtatcattatttatgttttattagataactctcagaatatatttttaaaaatcaatgaaactaaatatttgacataaacaaaaaatgatagactatactgtaaccattaccttgtctatagtttctttggattttagtgttgtacggcagatatattttttttaattaacttgaaaagattggtaaagtttcagtaacttacttctttctggcttcataccctttgagatgtgctttcagaaccaatcgttctctcagctctggatacctgttctgagttgcatcmattttaatttctcttcctattaacccagaagggatacagttctcttagttcaacaccatctctacacgaagaacagttctacatgcacttcagagagctccttgcacgacgttcatagtcggtattcagaggaaggggtaaaggaagat

SEQ ID NO: 242493 - DNA, 664 bp, Homo sapiens
aataaaacatggtttcaacaagtcacaagaagtacatttatctatttaccattcatccttgcttgttagaaacagattggaaattaaggaatataaatagtatattttrttaaagcagattttttttaaatttcatggaggacatagatcttgaaaattcccagacagacatcagaattgaccaagttactgtgtaatctcccagtgatgggaaatcagaggagatttttccacctctctacaaagccactcgatcctcatcctaatgctacataagcacataattttgtctcttatgcaaattgccagtgctctatattaaatcttcaggtttttcttttccagccatttcaagatgtaggtatttgagaatgccacacatagtgagctggagggttccagaaatgaaagatattttttcctgaaacagtttatctttgaagtgatatgtgtacaagctgatttattctttgaattcttagctgtggtttctaggtcagagattttaagatatgcatataacagagaatttccagaaaagacaccatttaaaaaaatacagaatctaaatgaatgtaataaaacctatgcaaatgtaacattgttttgtttggtaaatttacaaataagttaatcatttacatatttctatatactgtatagt

SEQ ID NO: 242494 - DNA, 517 bp, Homo sapiens
aaaattttttcatggacctctggctaggggatagtargagatgatttaagtgcattacatttactgtgcacgttatttctattattattacattgtaattaattacacaattcaccataatctagaatcagtgggaggcctgggcctgttcaagccttagattctcataaggagtgtgtgcaacctagatccctcacattcacagttaacaacaggatttgtattcctttgagaatctaatgccactgctgaactgagaggaggtgaagcccaggtggtagtttgagcaatggggagccactgcaaatacagatgaaacttcccttgctttcctgttcttcacctcctgcagtgtggccctgttaataacaggccaaggactgcgacctgtctgtggcctaggggcttgggactcctgctttacagaatatattgggagagggagaatccatggtttcccatctgtgcatttctgatatctgagtatggtgatccaaaatgtgcatatttgaaactt

SEQ ID NO: 242495 - DNA, 593 bp, Homo sapiens
ctgggcctgttcaagccttagattctcataaggagtgtgtgcaacctagatccctcacattcacagttaacaacaggatttgtattcctttgagaatctaatgccactgctgaactgagaggaggtgaagcccaggtggtagtttgagcaatggggagccactgcaaatacagatgaaacttcccttgctttcctgttcttcacctcctgcagtgtggccctgttaataacaggccaaggactgcgacctgtctgtggcctaggggcttgggactcctgctttacagaatatattgggagagggagaatccatggtttcccatctgtgcatttctgatatctgagtatggtgatccaaaatgtgcatatttgaaacttaatcatcaatgtgataagattaagaggtggaacccytaggaggactatagccctcatgaatgggattagttcccatataaaagaggtgtgaggaagctgttctccactcctgcccctttacccttctgtctcttctgacccatgaagatgtaacaagaggtgccaccctggaagcacagatggagctctcaccagacattgaacctgccagtaac

SEQ ID NO: 242496 - DNA, 495 bp, Homo sapiens
ctaagcgtagtgcattggttgctatccagccttgagagtgagggcattttaatgagattttgtgaaactttggatttattcactatttaccctccaaaagaccaccagactattctgstgatggagaaaaactaattattttagacttctttcaataagggaaaacaacaccttagtagagtcttagtagtgcatcagatgggagaagttgtggaaagttatttatttggtgtagagccttgagtcagttgtagagggtatttagtggggattggttagagtttatgaaggaaagcttcgtattggtggcacaatatactgagaatctttaaagtgagtctttatgtgcaaactgttagtttttgtaaataacttattttagttggttcacagtcttatgttccagaagcaagtatttcatagagtaaatagtaacttagtcttgctttttctcagtattttgaaacttatgatggaaaatcaggtttattttag

SEQ ID NO: 242497 - DNA, 495 bp, Homo sapiens
ctaagcgtagtgcattggttgctatccagccttgagagtgagggcattttaatgagattttgtgaaactttggatttattcactatttaccctccaaaagaccaccagactattctggtgatggagaaaaactaattattttagacttctttcaataagggaaaacaacaccttagtagagtcttagtagtgcatcagatgggagaagttgtggaaagttatttatttggtgtagagccttgagtcagttgtagagggtatttagtggggattggttagagtttatgaaggaaagcttcgtattggtggcacaatatactgagaatctttaaagtgagtcttkatgtgcaaactgttagtttttgtaaataacttattttagttggttcacagtcttatgttccagaagcaagtatttcatagagtaaatagtaacttagtcttgctttttctcagtattttgaaacttatgatggaaaatcaggtttattttag

SEQ ID NO: 242498 - DNA, 424 bp, Homo sapiens
gcttggacagagaaagagtaaatcaggtgttagcttgtactttagggattgtcttaggcagaatattgactccttctgcttccctaacacttattaacgagtcaatttagctattcctaatgtgtgcatgcgtgtgtgtatttcagaacaatgtattatatatacaatttatatttgtcaattaaaaaatgagaatattaaaaatagtgaattagagaaaatattgtgcaaattccagcaaaattcctacagataagtttttaaatgaacatttaatttgattacctgtataatgactccattacactattaaaaaatagctttatgtgtaaaatttctatgtattttttaaacagctatattgagatataattcacgaactatacacyttaccatttaaagtatgcaattcagtgattttagt

SEQ ID NO: 242499 - DNA, 425 bp, Homo sapiens
gctagtcaaggctcctgaatcagactgggcaggctccaaagcagtggagtctggcgctactcccaccgccacctcgtggatctcagaaaggctccaaacaccgcacyctcagctggccctgcttggggctggcattgggggacagcgtgttccgggcgcctcttctcctctgtgctagggccttcgcctttgctggctgcccactcatagatgtcagagccgcaggaaggctccgcagaagccctgtgcgggccctgcctggggctggctttggtgcacatgcgacaggccagcgtggtccccatgggacacctctgttcttctccagcagcttgggccttcgcttgcccccacgcctgcagagctgagcacctgccacctctccccaggaaaggcaaccaaatgccaccaactgaaggcaccca

SEQ ID NO: 242500 - DNA, 409 bp, Homo sapiens
ttgaattatgacccccatgtgtggaaggagggacttgtggggaggtgattggatcatgggggccgttcccccatgctgttcttgtgatagtgagagagttctcatgacatatggtagtttaataastgtctggcatttcctcttcgctctctatctcctgctgccatgtaagatgtgccttgcttctccttcaccctctgtgatgattgtaagtttcctgaggacccccagccatgcataatcatgagtcaattaaaacttcctttataaattacccagtctcaggtagtttctttataacagtgtgaaaatgtactaatatactcatgttgagatacaatccccaatgttggaggtggggccttgcgggaggtgtttgggtcatggggacagatccctcataacttgg

SEQ ID NO: 242501 - DNA, 537 bp, Homo sapiens
caaggcaagggaattgcttgagcrcaggatgtcaagaccagcctgggcaacatggttgttataaaagtgagctcagcttgctcttgctgcctttttcatgcctgcttacttgctttctgcttttccaccatgttatgacacagtatgaaagccctcctcagaagcttccaccatgtccttggactttccaacctccagaaccatgaaccaaatagacttattttccttataaattacccactgtctggtattctgctatagcaacagaaaaaagactaagacagattaatacttatttgcagcttaattaagaaagagcttacctggcccagaatatcagtttttctggaaaattatcaaactataaaaaactctttaaaatttcattcttaaagtaccaatactgaagtcttcaatacttaacagacgtcttttacaaattatttgtcttgggggatagtgcctgggagaggcaagaaagtgaatgcagagggaggctttgagctccattttcagaagcaataataagtaagaatt

SEQ ID NO: 242502 - DNA, 545 bp, Homo sapiens
aattccaaaaggactttgagaggacaaggcaagggaattgcttgagcgcaggatgtcaagaccagcctgggcaacatggttgttataaaagtgagctcagcttgctcttgctgcctttttcatgcctgcttacttgctttctgcttttccaccatgttatgacacagtatgaaagccctcctcagaagcttccaccatgtccttggactttccaacctccagaaccatgaaccaaatagacttattttccttataaattacccactgtctggtattctgctatagcaacagaaaaaagactaagacagattaatacttatttgcagcttaattaagaaagagcttacctggcccagaatatcagtttttctggaaaattatcaaactrtaaaaaactctttaaaatttcattcttaaagtaccaatactgaagtcttcaatacttaacagacgtcttttacaaattatttgtcttgggggatagtgcctgggagaggcaagaaagtgaatgcagagggaggctttgagctccattttcagaagca

SEQ ID NO: 242503 - DNA, 569 bp, Homo sapiens
cagccttactcacatgaaggagtgtcacttcctaatggtgggtgttgtaagcaaaaaatgcccccctccagaagctacccacatgaagtccctggaacctgggcctgttaccttatttggaggatttttgtgatgtgattaaattaaggatcttgaaagaaggtgataatcttgagttatttttaggtcggtcttacatgccattacaagcatcattatgagagggaagaggaraaaacacagggggggaaagcaatgtaatgatgaaaatacagattggaagtatgcaaccttaagtcaaggaatgccagcaaccagaggaaactggaagaggcaaggaaggactctctcctagagcctccaaggggagtatagcactgctgacaccttgatttcagacttgtggcctccagaattatgagagaatacatttctgttgtttccatccaccaagttcgtggtaatttgttatggcagccacggaaactaatgtagcgggaaaagagaagttctccttttcaatgcttaaggaaatggagtccagggtagggatgagggaatgcaaaggg

SEQ ID NO: 242504 - DNA, 581 bp, Homo sapiens
ctaaaatgggtctcactgagctaaaatcaaaatgctggcagggtacatacactctttttctggagctcttggagaaaattcatttccttgcctttttcagcttctaaaggcctcccacatttcttggctcattgcccacttcctatgtcttcacagccagccacattgcatctctctaaacattcgtctatagtcatatctctctcttctacttaaaaaaaaaaccttgtgattacaccaaacccaatcaggtaatccggacaaatatttaatatctcttttaaagtcagctgattagcaaccttaattctgtcagcaaactaattcaccatagcaacattatctaacatattcacaggttccagggattagaaatggaggtctctgggggtctttgttgcccaccattaatggttcaacatgaatgcaggaaaacagaaatatgtgattgccacgtccctgtcggggcagggggtaggtaggaccatgataaatttctcctacaatgcctgtatggtaacaaaacaaaaaccactaaataaaaactagactttgggrtcagaaataactagtctgaattc

SEQ ID NO: 242505 - DNA, 630 bp, Homo sapiens
tggccagaactctaaggcaaagatagtgaagtggaggaaattttgcactctatattgttagacctttcttgtccctactcttctccttcgtctcttgatctctactgattttagaatgaatctctacaaaaccagttatttcatcctaattttttctgacttggaaaaaaagatgaaaaactctttcatatagtgctagggaaagaagaacaatgattctcaggaatattttcgtcttaaagrattatcgaggtccattccaagatggctgaataggaacagctccggtctgcagcttccagagtgactgacacagaagatgggtgatttctgcatttccaactgaagtacctggttcatctcactgggaatggtcagaaagtgggtacagcacatggagggcaagcctaagcaaggtagggcatcacctcacccgggaagcacctcacccggggtcaggggatttccctttcctagccaaggggagccgtgacagactatactgggaagatcggctaatcgggacactgccacctaaacactatgcttttccaacggatttagcaaatggaacaccaggagattatatcctgcgcctggctcagcgggtccgactcccacagagccttg

SEQ ID NO: 242506 - DNA, 630 bp, Homo sapiens
tggccagaactctaaggcaaagatagtgaagtggaggaaattttgcactctatattgttagacctttcttgtccctactcttctccttcgtctcttgatctctactgattttagaatgaatctctacaaaaccagttatttcatcctaattttttctgacttggaaaaaaagatgaaaaactctttcatatagtgctagggaaagaagaacaatgattctcaggaatattttcgtcttaaagaattatcgaggtccattccaagatggctgaataggaacagctccggtctgcagcttccagagtgactgacacagaagatgggtgatttctgcatttccaactgargtacctggttcatctcactgggaatggtcagaaagtgggtacagcacatggagggcaagcctaagcaaggtagggcatcacctcacccgggaagcacctcacccggggtcaggggatttccctttcctagccaaggggagccgtgacagactatactgggaagatcggctaatcgggacactgccacctaaacactatgcttttccaacggatttagcaaatggaacaccaggagattatatcctgcgcctggctcagcgggtccgactcccacagagccttg

SEQ ID NO: 242507 - DNA, 630 bp, Homo sapiens
tggccagaactctaaggcaaagatagtgaagtggaggaaattttgcactctatattgttagacctttcttgtccctactcttctccttcgtctcttgatctctactgattttagaatgaatctctacaaaaccagttatttcatcctaattttttctgacttggaaaaaaagatgaaaaactctttcatatagtgctagggaaagaagaacaatgattctcaggaatattttcgtcttaaagaattatcgaggtccattccaagatggctgaataggaacagctccggtctgcagcttccagagtgactgacacagaagatgggtgatttctgcatttccaactgaagtacctggttcatctcactgggaatggtcagaaagtgggtacagcacatggagggcaagcctaagcaaggtagggcatcacctcacccgggaagcacctcacccggggtcaggggatttccctytcctagccaaggggagccgtgacagactatactgggaagatcggctaatcgggacactgccacctaaacactatgcttttccaacggatttagcaaatggaacaccaggagattatatcctgcgcctggctcagcgggtccgactcccacagagccttg

SEQ ID NO: 242508 - DNA, 630 bp, Homo sapiens
tggccagaactctaaggcaaagatagtgaagtggaggaaattttgcactctatattgttagacctttcttgtccctactcttctccttcgtctcttgatctctactgattttagaatgaatctctacaaaaccagttatttcatcctaattttttctgacttggaaaaaaagatgaaaaactctttcatatagtgctagggaaagaagaacaatgattctcaggaatattttcgtcttaaagaattatcgaggtccattccaagatggctgaataggaacagctccggtctgcagcttccagagtgactgacacagaagatgggtgatttctgcatttccaactgaagtacctggttcatctcactgggaatggtcagaaagtgggtacagcacatggagggcaagcctaagcaaggtagggcatcacctcacccgggaagcacctcacccggggtcaggggatttccctttcctagccaaggggagcygtgacagactatactgggaagatcggctaatcgggacactgccacctaaacactatgcttttccaacggatttagcaaatggaacaccaggagattatatcctgcgcctggctcagcgggtccgactcccacagagccttg

SEQ ID NO: 242509 - DNA, 636 bp, Homo sapiens
aacttaatctctatgtcttcagaggacactgaatgaggctatttttaaccttctttttttaaaattgcacttgaaatgatcaaatctgagacactgaatattcacattcaacaattactatttgacaacttcatttgtttttccttctcttaactacattatatcttttgtctcaatgggtcacaagtattctctattttaatgaaaagcttgatgttatcaagaaaaaacaacaacatattttgaagcaaatctgagcaaattaaatgtcattcaacacaaaatttaacaccacagtttcacaaaaaaaaatgtataaagctaaaattaacgaaactaagtaataaaatctgggtagaggaaaaaagacaaaataactttacttttcactttccgtctcacatcctacaataatgacccaaatggatgctcttgagatttttcccattgaytcattttggtgtgagactgtgcagaggatatgcaagaaataagagatgtcagataaagaagataaagcctagtaaggtaggtgagtttgagtgggcccttgggctttagtgtttagacttagagagtatgtgaacctttgggaacaaatgcacatattcatctattagcctaagggaaatagtc

SEQ ID NO: 242510 - DNA, 543 bp, Homo sapiens
cttccctttccctgtctgttcaacgcacctgtcacctgtctctcctgagagtactctcaatagtgattatatgctctggccgcttgtgtgcttctagggaaattaatctaacacaagcctcttcttttgtttctttgaagcctttcattgccctacttactcactctgccttttcttccatcatattagacttttttcttggcacaaggctccctaaacagttacatttcccaggctcccttgcagcatgataaggctgtggaactgagttttgtctaagaagaaataaatggtatcctttggtaggttcagggaattaactatctcgtgtgcacagtttgacccttgtgtcttcattcatttaaccgtcatggtgcttagaatgagaccccatcatcttgggtcatgaggatggataccacacctcagagacagcaaagtggtgygataaatgaaatctagttctacatggactttgtaaaacagagcaacacatcacctttgaactgaacacctccagaattttatctgagagaaaataaa

SEQ ID NO: 242511 - DNA, 591 bp, Homo sapiens
taaatacagcatttataaaggtatctactcatacctctgacagcaggaggatgggtttaagataatttaattcactaggttctctgttatcaaaaatagaacatttcaggaaatgcgtatgtcaaagcaaatacttgtcaattatttaatcaaataatagttcaactagaagattgcacttattcatgttaaaatctaaaatataataaatacaaatttgtggtccccaggctttcttttattattttccagagtgaacaagcttgaacacaaaatggctctcagggatcagccagtttcacttcaaccttcatggctcagaaggaagaagtcccagaagctgtgtgacccaaagtgataatcggagtaaagtttttcttgttaatgatacatggcttctggtttttcctawgtcttctgcctactggcagttatgcaaaacacaccacacacacacccacacacgtgaaagtcacagttcccacgtgttctttcatcaggagtatggaaactacagctgaaattctatctgaaacttcaaagaatttagttaatgaaatgtttctcttctctgacttggcattgtctata

SEQ ID NO: 242512 - DNA, 633 bp, Homo sapiens
aagccacataattacctatcataggtaaaaaaatattctgtttatttgcaggagagaaagatggcaacatcctgccaaggcacttctgccagtttgggatttgaccaaaaaggctggaggtggtgattgttgggcaatgctctctgtgaactgcctcatgagcatagaagctgattttattcttgaccttttcttcatataaatatgttttcagtggacagtaaagtgatgacttgtgtttcctgaaggatgagagtgtctgtgcatccacagacagtaatgcagagagaggggcactggagatagtgacggagcattcactaactcagttctgctcagtctgtgtgttcattggcatgccctgtcttgtcttttgattgctacattcattctctcctttgtagctgaggaaaacagcagtggctgttcaggtgccttctcccaggggctattcacctgtaggtatgggaagtttacttttacttctcttcctccccargtgtccagaacaaacttggtatggcaatgaatttggttgtatgagttacagattcccctgtgtgggttagatactccatagcagtctctaattcctgaaacatagcacttacagtattttattccttctacttc

SEQ ID NO: 242513 - DNA, 633 bp, Homo sapiens
aagccacataattacctatcataggtaaaaaaatattctgtttatttgcaggagagaaagatggcaacatcctgccaaggcacttctgccagtttgggatttgaccaaaaaggctggaggtggtgattgttgggcaatgctctctgtgaactgcctcatgagcatagaagctgattttattcttgaccttttcttcatataaatatgttttcagtggacagtaaagtgatgacttgtgtttcctgaaggatgagagtgtctgtgcatccacagacagtaatgcagagagaggggcactggagatagtgacggagcattcactaactcagttctgctcagtctgtgtgttcattggcatgccctgtcttgtcttttgattgctacattcattctctcctttgtagctgaggaaaacagcagtggctgttcaggtgccttctcccaggggctattcacctgtaggtatgggaagtttacttttacttctcttcctccccaggtgtcyagaacaaacttggtatggcaatgaatttggttgtatgagttacagattcccctgtgtgggttagatactccatagcagtctctaattcctgaaacatagcacttacagtattttattccttctacttc

SEQ ID NO: 242514 - DNA, 560 bp, Homo sapiens
taccttgtaccatgttaggggtctccgttaaaactctctccctaactatattcttgtatgttaattcatggagttcgcagtaacagtttcaatgttttcccatatgtttaaatattatatatgcaattcatattcaccacacacagctgttattatgtgttctttagcttaaggggggagctaatatttaaatgaaggtttttggacctggaatggggaaaaaagatgaaagggaagagaaagcatgtagaaacagagaatctgaaagaagtgcggtgaaaacaggaaaagtgcagtatrggggagtgaaaagactgaactctgaaacctgacatttcccctgcagtagaataaaggtgaatgatactttggtaccctgaagtaattaaactgactcttcaaacactagacaaccctctgcctatgactttgttttttccattttaactctttaagatagtccaagcaaatatttcatcacttctctagggacttccgctgaaaatttcagaacgtcgctctgtacgcagagtcctgggccctttctagtactcagctca

SEQ ID NO: 242515 - DNA, 644 bp, Homo sapiens
gtttttccaggcagttccctcttcaaaggacaaaaatcttgccagcgacccccacaaaattgcttaggaccctgtgtacaaggactgatactacctatcacttgtagactgccrcttgaaattcaccatctctttgagacctcgtggtcacagacaatctgctttaaatctagttggagatgagtctatctcgtaggcactattttgtatccagcctgctgaaattgcaatgtttttttgaaacttccctcccactctcctggtcagaaggtccggtttgtgtcaggctaaatccggatgggtgctatatgggtgaatgcactgtctgggaaactagagcacggaagaatgaagtggtgtcctggaatgttgtcaaaggttggttacttgggcatcaatccaagggctttaatggagaatcagacccaacagatggaagcaaaatgggagccagggaatcagggaatggtggtaataggactagtggaactgccaaatgagagacaactaggaggaattgtggaagggttggtgagcagacgggcactgcagatttatcctgggatggctcagactcatgaggcatgtggaatttagttaaaggggatgtaatgaaatgaccactgacctgacctaataggcat

SEQ ID NO: 242516 - DNA, 599 bp, Homo sapiens
gcataaaaagtgaatccaaaacaaaagcactatcaagcatactcaaaaggcatttgttaatggtatttattctagcaaccacaacattgttacaaaagcacaattttaataggcttatctgctaagatgcttttataagcagctgtcacctatacagagttatgaatcatctttggtgctcaaggaacctgtagaagtaagagacatcatcatacagagaaatgtagttaagttgaagcttggaaaagatcacatgaaaaaaatctagctcttgccttatctcttcctaagttaagcataaattagccgtctgcaatagccgcctgtaagacaaatgataacagaagacaatcacacatggtgaatggtttccagtggagtttttcttctaaagagacagtaaacaggtcrcaactcattctttgagaaaggattcctattaaatacccagaaacagctatcaaataaacagccaaagctattacttgttttcatcacatctctgtatcttcagaattggaagaagaatgtgaggctgtactgtgggcctgtgtataagaaaacaaagaatttacaaatggtagagtaatgaaagaggg

SEQ ID NO: 242517 - DNA, 599 bp, Homo sapiens
gcataaaaagtgaatccaaaacaaaagcactatcaagcatactcaaaaggcatttgttaatggtatttattctagcaaccacaacattgttacaaaagcacaattttaataggcttatctgctaagatgcttttataagcagctgtcacctatacagagttatgaatcatctttggtgctcaaggaacctgtagaagtaagagacatcatcatacagagaaatgtagttaagttgaagcttggaaaagatcacatgaaaaaaatctagctcttgccttatctcttcctaagttaagcataaattagccgtctgcaatagccgcctgtaagacaaatgataacagaagacaatcacacatggtgaatggtttccagtggagtttttcttctaaagagacagtaaacaggtcgcaactcattcyttgagaaaggattcctattaaatacccagaaacagctatcaaataaacagccaaagctattacttgttttcatcacatctctgtatcttcagaattggaagaagaatgtgaggctgtactgtgggcctgtgtataagaaaacaaagaatttacaaatggtagagtaatgaaagaggg

SEQ ID NO: 242518 - DNA, 195 bp, Homo sapiens
tttcttctaaagagacagtaaacaggtcgcaactcattctttgagaaaggattcctattaaatacccagaaacagctatcaaataaacagccaaagctattacttgttttcatcacatctctgtatcttcagaattggaagaagaatgtgaggctgtactgtgggcctgwgtataagaaaacaaagaatttacaa

SEQ ID NO: 242519 - DNA, 383 bp, Homo sapiens
cagcaccttacctactgctttcccttccccagtccttctgtctgatacagatctgccttcagatccatcttgrtgcacattcctaaccaagtcacttcctggtgcaacagaatgagcatgggctttggaactaaacaactatttgaccttacataattactgtatcttctccaagccctcaatttcagcagttcttcttgcgtaattgttaggagtaattgagatgtgcaaagcccccaagacattataggctggtttttgttcttctcccttatactgctcaaaaaacaactccccattgtctgataagccaagttcaaactcatcagtcttgcatagaagtacccttgtcacttctctccaacctacctttccaacgaatt

SEQ ID NO: 242520 - DNA, 383 bp, Homo sapiens
cagcaccttacctactgctttcccttccccagtccttctgtctgatacagatctgccttcagatccatcttgatgcacattcctaaccaagtcacttcctggtgcaacagaatgagcatgggctttggaactaaacaactatttgaccttacataattactgtatcttctccaagccctcaatttcagcagttcttcttgcrtaattgttaggagtaattgagatgtgcaaagcccccaagacattataggctggtttttgttcttctcccttatactgctcaaaaaacaactccccattgtctgataagccaagttcaaactcatcagtcttgcatagaagtacccttgtcacttctctccaacctacctttccaacgaatt

SEQ ID NO: 242521 - DNA, 418 bp, Homo sapiens
aaggtatgtaagctcgggagggaggaaagaaaggggaagggggctagaggagattcggacatgagatgcattcaccctatgagttaaaccccagtstccagcatgggagttgacaattccattactgaaccatcagtgttccatgtagtataacctctcatgggtttaaaaaaaaaaaaaaaactctagtgttataagcaggcatgaaggggcaggggggatgggggtgggaatgttctataataggcttacacagatgtctttggaaaacagagctaacaaagcaacaggcacttagagaaaaggcttgtcctaaaccttctgttgtttgccaagggaagaaatcttggagtgaaattttcactttctctcttgtgcagatctctgtaagacacaaaagtttggaagacagtcattt

SEQ ID NO: 242522 - DNA, 422 bp, Homo sapiens
tttgaaatactctctttagtgaaatgaaatccacaggtaatacagcttttctacatatatgtgtgtgtgtgtgtgtgtatatatatatatatatatatatatatatatatatatatatatttttttttttttttttttgtgagacagaatctctgtcaaccaggctgcagtgcagtggcgtgatcttggctcactgtatcctctgcctcctgggtgcttcaagcgatgctcgtgcctcagctttccaagtagctgagattgcaagcgtgcatcaccacgcctggctaatttttttgkattattatttattctttgtagagacagggtttcaccatgttggccaggctggtctcgaactcctggcctcaagtgcgcccgcctcggcctcccaaagtgctggggttatgggcgtgagccaccac

SEQ ID NO: 242523 - DNA, 638 bp, Homo sapiens
atactaccattttcaactgactgctggctcctaacccaagactacagatctttcaagtgaaggtgaagtgcagacctttctggagaagcagcacatgctaactaagggaaatgcraaaatgtgaaatatccccggggaatgtggaaagggaacgaaggaacgcagggcgatgtgtaggtttaatgtgtggctcagtcaaatagtacgttttactaatccaatgatcataatgatgtccatgtgacttaaaatatatggtgccttaaaattaatgagagtaacttgagaatcacaaggagggtaaatggaattaagatgttccagacttctagcattgtgtaggaagagtaaaaaggtctaatttactccaaactttattatacagattttacagtatgtatataagtaaaaaatatatctcagggttaaaccaatactaaaacaagtattcattttgggattttggcagtttaaaaataattaacattatttttatattaaaaatgtaaatgtaaaaagtgtaccatgaagcttaataaatgtatagacccttgtaagtatcaactagaccaagccacatagaacatttccatcaacccaggaagttttccatcaaagtacctcaaagagggagccac

SEQ ID NO: 242524 - DNA, 638 bp, Homo sapiens
atactaccattttcaactgactgctggctcctaacccaagactacagatctttcaagtgaaggtgaagtgcagacctttctggagaagcagcacatgctaactaagggaaatgcgaaaatgtgaaatatccccggggaatgtggaaagggaacgaaggaacgcagggcgatgtgtaggtttaatgtgtggctcagtcaaatagtacgttttactaatccaatgatcataatgatgtccatgtgacttaaaatatatggtgccttaaaattaatgagagtaacttgagaatcacaaggagggtaaatggaattaagatgttccagacttctagcattgtgtaggaagagtaaaaaggtctaatttactccaaactttattatacagattttacagtatgtatataagtaaaaaatatatctcagggttaaaccaatactaaaacaagtattcattttgggatttyggcagtttaaaaataattaacattatttttatattaaaaatgtaaatgtaaaaagtgtaccatgaagcttaataaatgtatagacccttgtaagtatcaactagaccaagccacatagaacatttccatcaacccaggaagttttccatcaaagtacctcaaagagggagccac

SEQ ID NO: 242525 - DNA, 430 bp, Homo sapiens
gtatttcaaatgctgggatgtatttttaaatgatacttggcaattatgtaaggagagcaagaaatgcttcacttgtgaaaattccagagttgttgatggaatacatatacatgcctgtaaaactgtaatctgcatgcagaagttacatttatcttgtggggctgcaggagcatcacatgaaatccagctctgggtcttcacttagggacagcagtgtattgctgcacacatgtgaacttagctactcccaacatycccccttctattgtttcttaagcaatcacctatctagagaactggctgcaggataaaatgcctctattttaaatgactcattcttgaggcatcctggactataagaaacactttagacttcagtcattccttgcaagacatgcaagaaactgagtttaaagataagagtatattt

SEQ ID NO: 242526 - DNA, 346 bp, Homo sapiens
atgtgatagaaagagagaaaacaacaggaaaaagagaaaagagaattctagggagtascaacagcctgaactggacttcctgttaagagggggaaatggatgactgtgtccactgattacaatgattactagattactgtgcacattggtaggaagtaaatacatgtgatagccattcagttagagaactctctgttcagtatgcctattaggcattgcttgtaattttatatctctacacaataaaagtaaacattatttaatactataatcagaagacatatactgtgttgaagacactttaaagagataactgtataaaacagaagtttggtgtctctaaaac

SEQ ID NO: 242527 - DNA, 346 bp, Homo sapiens
atgtgatagaaagagagaaaacaacaggaaaaagagaaaagagaattctagggagtaccaacagcctgaactggacttcctgttaagagggggaaatggatgactgtgtccactgattacaatgattactagattactgtgcacattggtaggaagtaaatacatgtgatagccattcagttagagaactctctgttcagtatgcctattaggcattgcttgtaattttatatctctacacaataaaagtaaacattatttaatactayaatcagaagacatatactgtgttgaagacactttaaagagataactgtataaaacagaagtttggtgtctctaaaac

SEQ ID NO: 242528 - DNA, 451 bp, Homo sapiens
attcctctttgacttgatgctcttcctgcaagcccaagccagtggcaacatacctcccacagcccaagactgcagccttgccccctcagttctgggcagaggtcttgctcttggggcactgggcagatatggcttggcctgctaaaaccaagtaggaggtcccaccctatgaaactgagacttgccctccaggagtgtagtgagagttgtcagctctgataaccactggagattcccgttgtggttgaacgataaagccatgttggagcccaatagctctattgtccagtactgtggaatctcagaagcctgaaagcctttatttatttcwtctttttatcttcccttcagtccaaactggcagtgtctcagctaatgtaattccacctctattgctggtgctgcttagatggctgattaactccatggataatctccctatggactgatt

SEQ ID NO: 242529 - DNA, 517 bp, Homo sapiens
atatgttactaaaatggtttgactgtgtttccacccaaaatctcatcttgaattgcaatccccataatctccataatccccatgtttcaagggtgggaccaggtggaggaaattgggtcatgggggcagtttccctcatgctgttctcatggtagtaactgagttctcacaagatctgctggttttataagtgtctgtaatttcccctgcttgtactcactccattcctccacactgtgaaraaggtacctgcttcccctttgccttccaccatgattgtaagtttcctgagccctcttcaacaattcagaactgtgagtcaattaaacttctttcctttataagttaaccagtctctagtatttcttcgtagcagtgtgagaactgactaatacagttgctaattgatatcatttaatatttggaaactatgtggtgcgaatggattttaagagtcaccactcttaaataaagaaggagactaaagaaggaaaaacacttacatctgattgaattt

SEQ ID NO: 242530 - DNA, 517 bp, Homo sapiens
atatgttactaaaatggtttgactgtgtttccacccaaaatctcatcttgaattgcaatccccataatctccataatccccatgtttcaagggtgggaccaggtggaggaaattgggtcatgggggcagtttccctcatgctgttctcatggtagtaactgagttctcacaagatctgctggttttataagtgtctgtaatttcccctgcttgtactcactccattcctccacactgtgaagaargtacctgcttcccctttgccttccaccatgattgtaagtttcctgagccctcttcaacaattcagaactgtgagtcaattaaacttctttcctttataagttaaccagtctctagtatttcttcgtagcagtgtgagaactgactaatacagttgctaattgatatcatttaatatttggaaactatgtggtgcgaatggattttaagagtcaccactcttaaataaagaaggagactaaagaaggaaaaacacttacatctgattgaattt

SEQ ID NO: 242531 - DNA, 614 bp, Homo sapiens
cctaatacccaacatgatctacaaattcaataaaatttctctcaaaatgctagtgtcatttttttcacagaaatagaaaaaaaaatctaaaattgggttaaaaccagaaaagatcgtgaatagctaaagaaatcttgagctaaaagaacaaaactggaggcatcacattttcttatttcataatatattataaagctattgtaatcaaaacagcattgcaccrgcataaaagcagactaatggaaaagacatagactaatggaaaggaaaggaagcccagaaataaacttaattattcacagtcaattgatttttattaaaggtttcaaaaacatacaatgggggaatggcagtcttttcaataaatagtgttgtgaaaacatgatattcacatgaataaaaataaaactggacctttatttcacaacatatacaaaaataaacttaaaacagataacatatttacatttaagacctgaaattgtaaaactactagaagagaacatacacacacaaaaaaactccatgacattggtcttgtagagtgattatgttgacagggttctaaaagcaaaggcaacgtcagcaatgtcagtctgatgggattacatcat

SEQ ID NO: 242532 - DNA, 614 bp, Homo sapiens
cctaatacccaacatgatctacaaattcaataaaatttctctcaaaatgctagtgtcatttttttcacagaaatagaaaaaaaaatctaaaattgggttaaaaccagaaaagatcgtgaatagctaaagaaatcttgagctaaaagaacaaaactggaggcatcacattttcttatttcataatatattataaagctattgtaatcaaaacagcattgcaccggcataaaagcagactaatggaaaagacatagactaatggaaaggaaaggaagcccagaaataaacttaattattcacagtcaattgatttttattaaaggtttcaaaaacatacaatgggggaatggcagtcttttcaataaatagtgttgtgaaaacatgatattcrcatgaataaaaataaaactggacctttatttcacaacatatacaaaaataaacttaaaacagataacatatttacatttaagacctgaaattgtaaaactactagaagagaacatacacacacaaaaaaactccatgacattggtcttgtagagtgattatgttgacagggttctaaaagcaaaggcaacgtcagcaatgtcagtctgatgggattacatcat

SEQ ID NO: 242533 - DNA, 508 bp, Homo sapiens
aagaaaggtcatgagctctgtggcagaagtaaggggctcaaatctataattttttaaattcatatttgcatttacaatggcataatgcatatctccattaagattatttattggcttctgaactactgagtgcatcaggctgaattaattaatttccctctcctatgatatattgattaacggcattaaaatctattagtcattcacacacactctaaaatctgtttatctttaattcttctcctttatccttcacactcartgactcacagaggatgattctacctatgaaattgtttttcctgtgaaatttgtcttttgtcagagaaaagtgaatgtatcatttagttaagtttttgtaactttgcattttctatctcctaagcatctataattctaacctctattacccaattagccaatgggctatgagccatatttcatcttgacactttgtatctagcatataacatacatctattaataggtaccaaatggtaaatatata

SEQ ID NO: 242534 - DNA, 402 bp, Homo sapiens
aatgaagctgtcagatccttgctggcccttctgtcatggcggtgcaggctgcgcctgttcaatctgcatttctgaccagtccgggaaactgagtttgtgactacacagacacatttattaatattactttaaagtgtttagtgttactcttagggtgtctttctgggyaataagagctactcaatatgattatattttggacttaaaggaatagtttttaaatggagctgcttcaattacagatttattaaggttcaaagtagaaccttgagaaagaagagtatagagtcatcaggatgtcaagttcgttcacttcacgataaatctatgtaacataatgaaaagattcatcatgtggaggtagtagcagaggtaatcatacaaagacaagccacagagcag

SEQ ID NO: 242535 - DNA, 402 bp, Homo sapiens
aatgaagctgtcagatccttgctggcccttctgtcatggcggtgcaggctgcgcctgttcaatctgcatttctgaccagtccgggaaactgagtttgtgactacacagacacatttattaatattactttaaagtgtttagtgttactcttagggtgtctttctgggtaataagagctactcaatatgattatattttggacttaaaggaatagtttttaaatggagctgcttcaattacagatttattaaggttcaaagtagaaccttgagaaagaagagtatagagtcatcaggatgtcaagttcgttcacttcacgataaatctatgtaacataatgaaaagattcatcatgtggaggtagtagcagaggtaatcayacaaagacaagccacagagcag

SEQ ID NO: 242536 - DNA, 519 bp, Homo sapiens
taatgatttcacacttctgtaagtatacataccatccatgtgctttaactgtgaactttctgtactatttctaaaacaaccatatgcatttgaagcatatgttaatttaaaaagattagcaatatgtatattatgcattaaacaaccaaattccattactgctctgtcactgtttcttcatgaagccaaacacacagttgattcaatatattatacacatataaacgtttacctatacaagtggctggtattacctaggccttttttggattgtttcattagtttggtatgttaatagaataaaaacagaacttttttcactttatcactttaggcaaaacatgctctcagattgttacrgttcactgaatgaattattatatttttctttccctaggacatccatagtgcaacaatgaaagcagatattctgaaagaagtcacagctgaaggtaggctggttaggaatgggaaaggagtagctgggaggttggagggataacagagaaagttccaaag

SEQ ID NO: 242537 - DNA, 512 bp, Homo sapiens
gaattcagcaaatgaaatgaacaaaatattacagaaaaggaacattaagtgaccctaacataggaaaagatgtttaaaacattaaagttatgagatatattttgaatctgtcagattaaaaaagatcaaaacatctgataacacyttgtgttagtaaggatgtgtactcacaggtaatcttatacagtgctagtgaaaaacttgaattgctatttctgaaacgggtgtggtttgcttcttcagtgccccgctgctcaaacctctaggggagcttacagacgggcaggctgtggggctccaagcccatggtagtgtctaggggtgaatgtttaggcctcttgaagccccagtgggcgtgtgttacagggcgctatcttagtttgcagtctataggcggcttgtgttaaccagctcaattagactctttaccttgttgcaagtacagagggctttccgtatcctgggatttcttcgctgtgctcttttgccggcgctcgtcaaaaagtcctctc

SEQ ID NO: 242538 - DNA, 523 bp, Homo sapiens
ggttggaaagatggctttagaagagaggcaaagggccaggtgcgggggctcacgcctataatcccagcactttgggaggctgtggtgggcagatcacttgaggtcaggagttcgagaccagcctggccaacatggtaaaaccctgtctctactaaacatacaaarattagctgggtgtggtgatgtgtgcctgtagtcccagatagtcaggaggctaaggtgggagaatcgcttgaaccctggaggtggaggttacaatgagccaagatcacacaactgcactgcagcctgggtgacagagcaagactgtctcaaaaaaaaaaaaaaaaaaaaaagaagaagaagagggggaaaagcaattaagaattatcatagtattttcaagaacgtcttctcatatatttcttgtaatcaccctgtgagcttgtgagcacagatatcactagttgccatattacacattaataaaagaaacctggactctaagttatacacgatcattgatttcaaatatcttcttaac

SEQ ID NO: 242539 - DNA, 543 bp, Homo sapiens
gcagggaatagggttggaaagatggctttagaagagaggcaaagggccaggtgcgggggctcacgcctataatcccagcactttgggaggctgtggtgggcagatcacttgaggtcaggagttcgagaccagcctggccaacatggtaaaaccctgtctctactaaacatacaaagattagctgggtgtggtgatgtgtgcctgtagtcccagatagtcaggaggctaaggtgggagaatcgcttgaaccctggaggtggaggttacaatgagccaagatcacacaactgcactgcagcctgggtgacagagcaagactgtctcaaaaaaaaaaaaaaaaaaaraagaagaagaagagggggaaaagcaattaagaattatcatagtattttcaagaacgtcttctcatatatttcttgtaatcaccctgtgagcttgtgagcacagatatcactagttgccatattacacattaataaaagaaacctggactctaagttatacacgatcattgatttcaaatatcttcttaactttctgttt

SEQ ID NO: 242540 - DNA, 502 bp, Homo sapiens
tcattcaaagatggcttttaaattttaacttaattaattttccacgcaaaaagcctaatcttaccaaggatgattttgaattacattggtaacaatgtaaacctgatagcaaacatttcttgctattaatagagatctgtcaatttgcaaatgaatagacttatccgagaaatggcctgtttctgaatgacactcgagatgttcatgtgtattacacacaaaataaggttacacacaaaataaagacccttagccattttgaaagtgctgagagatagtatactccagtttagagagaactgaactacattattccagctctaaggacagtttaatttaatttgggaagaggaagcaacatttgcagctaaaacaatgttaatgatggaaaccggggacacagaatcaaagtgcccaggctttatcttaagtcctctccccyttttccaaattgtccccttcatatcttctgatcttcacctgatttataaaccttgaattc

SEQ ID NO: 242541 - DNA, 591 bp, Homo sapiens
taatatattctcattattgatgtccagcagaacagagctgtaaaaacaatggcttatggcagaaaaatggtcactatccctctgcccccacgaccctacacctttctgagtttggcacatatagaagcccagatatgaagagaaatcactcagtagcgcagttctagagagagcaaaggacttggagcataagaatccacaggagatccactaggggtgaatgtgctctgattgtcttgcagataccacacatgcaatatccaaggtcatttcccccaaactcgattcagaaagggtgagggagtggaattcttctctacaggcagcagaggtcacaggggctaggagaaataacagagaggagacagaaggttcaagaagaaatcagaatgtctaaatagaaaggggtgtgcaagaatgggrccctggctctaagggccgagccgaaggaccagccctcatttaggagctgggagacaaggtgaacagtgtataggagccacctctaaccactagcccccatctccactcagcttcctccttgggctctgaaatgattgaaagacaaagctcaaacctgaagttgagtac

SEQ ID NO: 242542 - DNA, 563 bp, Homo sapiens
atttttgtataggtcagggttggtccctgtggctatttctctgaatgccagatgcagacatsagtactaccgtgatgttttccagtgtgcttcaaatctagctttctcaatgtgataaaataagcagtgggcaaaggggcccgaaagactggattcaagctctggctttattcttttttttttgtttttagatggagtctcgctctgtcgcccaggctggcacaatctcggctcactgcaacctctgcctcccaggttcaagtgattctttcacctctgcctcccaggtagctgagaatgcaggcacgcaccactatgctcagctaatttttgtatttttagcagagacggggtttcaccacattggccaagctggtctcgaactcctgacctcaggtgatccacctgccttggcctcccaaattgctggaaatacaggcgtgagccactgcgcctggcttaagctctggctttattctaatcttttacttctctgggccccagtttcttcatctatataatgatgttattgcaccagattactaagaggtaaggttggaatt

SEQ ID NO: 242543 - DNA, 563 bp, Homo sapiens
atttttgtataggtcagggttggtccctgtggctatttctctgaatgccagatgcagacatcagtactaccgtgatgttttccagtgtgcttcaaatctagctttctcaatgtgataaaataagcagtgggcaaaggggcccgaaagactggattcaagctctggctttattcttttttttttgtttttagatggagtctcgctctgtcgcccaggctggcacaatctcggctcactgcaacctctgcctcccaggttcaagtgattctttcacctctgcctcccaggtagctgagaatgcaggcacgcaccactatgctcagctaatttttgtatttttagcagagacggggtttcaccacattggccaagctggtctcgaactcctgacctcaggtgatccacctgccttggcctcccaaattgctggaaatacaggcgtgagccactgcrcctggcttaagctctggctttattctaatcttttacttctctgggccccagtttcttcatctatataatgatgttattgcaccagattactaagaggtaaggttggaatt

SEQ ID NO: 242544 - DNA, 405 bp, Homo sapiens
gaattctttgttttattttcatttcaamagcagtggagacttttttgaaaatcgaagtgggacgggggcagtggataacagggagctgctcttgtggtagctgggagaagggctaggaacctgcctctacttccctcacagcagccctggaatctcctcttcagctgaccccaggatggctcctaagaacacactttgcaaccattaaactaggtccaagtttcctaagcttcaggcattcacatgctaccttgtgatgtttgccggaatcagcatatattgtgtgctatttattcattcattcagccattcaacaaggatttactgaggacctactctgggatgaagatccagctaaaccaaagtccctctgttgggggtgtggctacattcttaggaagccgt

SEQ ID NO: 242545 - DNA, 540 bp, Homo sapiens
cctttgggaatgtctccattgtggaatgtctccattgtggaatgtctccactgggaacattcaatgggctgaaatgataaacaatgtgagctggcttccttggaagtcasttaggtagtgaggtgttgtggccaatctcgtgaagtaaccttataagttacttcctcatgaagtaaccttaaaagagagcaccttctggaagctcccctaggcctcccctccagtatcgtctcatttgcctgacttgaatgaagtgccttttccagaaccaatcacaagcaagggactgaaatacccctgagacctgcaggacctggacctggaagtgttggcttcccctgaggcacagacaccgcccaggggcaggggagtggcagggacccaaataaaatgagggttctataaggaaggaaaaaggaatgaatagactttggtctaggtggggcagaaaatggtgtccatgtaattactgactcaaatgttcccaaacagttttgttaagagaaacaggcttctaccttgttacctccatattttatt

SEQ ID NO: 242546 - DNA, 487 bp, Homo sapiens
ctttaaattcattactcctcccaaagttgttacaacagttaagtgttttgtaaatctatgttaactagatgaattaatatatatgtatatttatcaaaagttatgtttggttaaataaatgtaccatattatataatggtagctaacactgattgaattcttactatgttgtaaaaactgtgctaaacagctatgggttttgcatggattacttcgtttaagcttcacaacaaccataggtactactrctgttccttttttaaaaaatgagaagattaaagaaaaaggttaaattagccaatgtcctccacagataaactggacctttcttgattttacataattttggctaaattaccaatacaattatcaaagttataaactataaatggtaggaacccactcattctaaagcagggccaatatacacatctctgtaaaactttttggaaggtatatcagtcttaccatctttattagtccgttt

SEQ ID NO: 242547 - DNA, 492 bp, Homo sapiens
gaccataagattaccaagactgtatatgaaggtacagtaaaacatctccataaatgcgaaataatgaccatcattgactgagctatgccagtctagtaaaaaagtactgtgttttactttttaattctcacaacaaactcatgaggtaggttcattattattcctattttacagaagaggaaactgaggcatgaagagattaagaaaattgttatcagctagtaggtggcagacaggatttagtctatggttcctcttatatttatgtaaatgagacgtcttaagtggcaaaacaaaactagcccaaattcttcaaaagttgagatgaaattataagagagttactcccttgtgtttccttaagagcccaagactcctaatgccagaggtgtcagttttgaaamatttcctctgcccaaagttgattataacattattataaaattctcaatgcctgtctcttctgggttttcaaacacagtatggtgggca

SEQ ID NO: 242548 - DNA, 550 bp, Homo sapiens
tatatttataaagtatgtttgtatgttgttatcatttatgagtttggactggaatggaagaagattttatgttcaatccgtgatattgaactggatgcatgccatagtctccttaggcccagatttattttttgtttctcatggtcctgagtcaatttacttactaaasagctcattgaattcaggaatactgtaaatgaagtgccaaagtacttaggggaatgagctatccagtgtactcaaaggataatcctggaaagttcccaggagccgacgccttggggtttcatttatttgtctgctttttcagaagcagaaacactgtatgatgtagtggggaaaacacaggagaagaaggaagcatggattctaggcctggcttaaactatgtctaataaacatttattgaaacttaccatgtgcaatgcaatgcattaagctctggattatgcagtgtgaggatgtagagaatgaaagacagtgatgaataatatattcaaaatcctggctctggcttgcaaactccggacactgtggaccactttcactg

SEQ ID NO: 242549 - DNA, 550 bp, Homo sapiens
tatatttataaagtatgtttgtatgttgttatcatttatgagtttggactggaatggaagaagattttatgttcaatccgtgatattgaactggatgcatgccatagtctccttaggcccagatttattttttgtttctcatggtcctgagtcaatttacttactaaagwgctcattgaattcaggaatactgtaaatgaagtgccaaagtacttaggggaatgagctatccagtgtactcaaaggataatcctggaaagttcccaggagccgacgccttggggtttcatttatttgtctgctttttcagaagcagaaacactgtatgatgtagtggggaaaacacaggagaagaaggaagcatggattctaggcctggcttaaactatgtctaataaacatttattgaaacttaccatgtgcaatgcaatgcattaagctctggattatgcagtgtgaggatgtagagaatgaaagacagtgatgaataatatattcaaaatcctggctctggcttgcaaactccggacactgtggaccactttcactg

SEQ ID NO: 242550 - DNA, 550 bp, Homo sapiens
tatatttataaagtatgtttgtatgttgttatcatttatgagtttggactggaatggaagaagattttatgttcaatccgtgatattgaactggatgcatgccatagtctccttaggcccagatttattttttgtttctcatggtcctgagtcaatttacttactaaagagctcattgaattcaggaatactgtaaatgaagtgccaaagtacttaggggaatgagctatccagtgtactcaaaggataatcctggaaagttcccaggagccgaygccttggggtttcatttatttgtctgctttttcagaagcagaaacactgtatgatgtagtggggaaaacacaggagaagaaggaagcatggattctaggcctggcttaaactatgtctaataaacatttattgaaacttaccatgtgcaatgcaatgcattaagctctggattatgcagtgtgaggatgtagagaatgaaagacagtgatgaataatatattcaaaatcctggctctggcttgcaaactccggacactgtggaccactttcactg

SEQ ID NO: 242551 - DNA, 660 bp, Homo sapiens
cccagtaatggtttcattgagctggaagttgactctgccggctgggcttcaaggctccttttgagttaaacaatagaccaatagacatgggagtggacaggggtgtcgggtttttgtactgattgggtgattgctactaattgtcaagtacacggttgctggggccaggataactgtttagaattcaagggcttttctggagcacctctgttgtggcttgaatggtgctccccacccccaatcccgaaaagatgtggctttctagacctgtgaatgtaatattatttggaaaaagggttttttcttttttgcacttttaattaaagtaaggatcttgaaatgagatcatcctgaattatcagggtgagccctawatctgatgacaggtgtctttgaagaagacatggatcagaagaggagaaatgcagaggagtagtccatgagaaggtggaggcatagattagggtgatacatctacaagtcaagaatgttaaagatccaaagaatgccaaaggtcaccggcagccaaagagtcttggagagaagcatgggacagattttccctaagagcttcaaaaaggaatcaactatgccaataccgtgatgtctgatttctggcctccagaaccgtgagaggataaagtttcattgtttgaagcc

SEQ ID NO: 242552 - DNA, 528 bp, Homo sapiens
actttttattgcttttaaaacttttggtctgggcgggscatggtggctcacgcctataatcctagcacttttggaggccaaagcaggtggatcacctgaggtcaggagttcgagaccagcctggccaacatggtaaaactaaaaatgcaaaaactagctaggtctggtggtgcacacctgtaatcccagctactggggaggctgaggcaggagaatcacttgaacctggaaggcagaggttgcagcaagccgagatcgcgccactgcactccagcctgggcaacagagtgacaatctgtctcaagaaaagtaagcaaaacttttggtctgctcgaaaatcttatttttaaaaattgactgataaaattatatgtatttattgtatataacatgatgttttgtggaatgactaaatctacctaatgaacatatgtattacctcacatggctatcatttgtgtggtgagtacactgaacattcactctcctagcatttttcaaaaatacaacacattgttattaactata

SEQ ID NO: 242553 - DNA, 528 bp, Homo sapiens
actttttattgcttttaaaacttttggtctgggcgggccatggtggctcacgcctataatcctagcacttttggaggccaaagcaggtggatcacctgaggtcaggagttcgagaccagcctggccaacatggtaaaactaaaaatgcaaaaactagctaggtctggtggtgcacacctgtaatcccagctactggggaggctgaggcaggagaatcacytgaacctggaaggcagaggttgcagcaagccgagatcgcgccactgcactccagcctgggcaacagagtgacaatctgtctcaagaaaagtaagcaaaacttttggtctgctcgaaaatcttatttttaaaaattgactgataaaattatatgtatttattgtatataacatgatgttttgtggaatgactaaatctacctaatgaacatatgtattacctcacatggctatcatttgtgtggtgagtacactgaacattcactctcctagcatttttcaaaaatacaacacattgttattaactata

SEQ ID NO: 242554 - DNA, 362 bp, Homo sapiens
ctgctctcctcctgcattccctgtgactctaaagtgaggcctaaggctctgatgggatcacccagcttccaccacacactccatgctttcctctgccccaccctgatgagatgaggtgattctttccctggtgagggagcgtctggcagctgttgcctggttcctcctccctgttggttctgtcctggttgctgaggaccataagaccttgcastgtatgcctgtttgtgattggaacaaaacgaggtgactggggcttgttaggccccagtcctagtgaaagtagtaggcaagttatctaaacacgatctcagacagagggtcctcaagatagaagcccattggcaatcctggggtacaag

SEQ ID NO: 242555 - DNA, 574 bp, Homo sapiens
aaaaacataactactgtaaaggagaaaagcctgaaactgctgggtgtgtgctttttcaactgttatcaaaatgaccaaggacctctcctttgaagtgaaggagctccaataggcatccctggaggcttttgtgagatagcattatgtttcygaaagttcccagaaaaagccgtcattgagattcacagattctgagaatggttagagctggggaagctgggggagtgcgggggtgagtttagagattatgcagtgctcccctgccctagcctatttctctgatagatacattgagttccagattcccaagagacgtacacgcaaaatatgttagaatcatccaccaggcaggtaaatatcactcagcaatctgcccactcaagagccagtctatcaatgtgtgaccattgccataggaaaaaaaaatcaccagataaacagttacagctacttggatgtctaaaaagcatagaaagggcaactttaaaaataaaactttaaaaaagtcaccttcaaatcggggacagtggattgggtgaatcctgaagattttttcaaggtagatgagacaagg

SEQ ID NO: 242556 - DNA, 574 bp, Homo sapiens
aaaaacataactactgtaaaggagaaaagcctgaaactgctgggtgtgtgctttttcaactgttatcaaaatgaccaaggacctctcctttgaagtgaaggagctccaataggcatccctggaggcttttgtgagatagcattatgtttctgaaagttcccagaaaaagccgtcattgagattcacagattctgagaatggttagagctggggaagctgggggagtgygggggtgagtttagagattatgcagtgctcccctgccctagcctatttctctgatagatacattgagttccagattcccaagagacgtacacgcaaaatatgttagaatcatccaccaggcaggtaaatatcactcagcaatctgcccactcaagagccagtctatcaatgtgtgaccattgccataggaaaaaaaaatcaccagataaacagttacagctacttggatgtctaaaaagcatagaaagggcaactttaaaaataaaactttaaaaaagtcaccttcaaatcggggacagtggattgggtgaatcctgaagattttttcaaggtagatgagacaagg

SEQ ID NO: 242557 - DNA, 607 bp, Homo sapiens
tcatgtgggaaggagatgtatgcaactgaagtgggtgggtgatggggatattcctgcccagaaaaggggagtggaggctggggagagcagcttcctggtctataaatgagggattgttctagactaggtttctgagagcctcgcagagtctgcagagatgcrttgaggctgaggctcttctgccattacctcaggctttaaccgtagctattccctctttctgtttgagggggaaggaggccacctctgctactttaaaaaggaggggaaggagagaacctcagacaaatcccaactgaggaacatcatacaaaatacttggccagcacgccccgaaactgtcaaggtcatccaaaacaaggaaagcctgagaaagcaccacagtctagaggagcctaatgagacatgatgcctaagtgtggtccttagtcaataatgtatcaaaatttgttcattaattatgataaatataccagtgtaagacggtaatcataggagaagctgagcgttggggatatgggaactctgtactctctttgcaatttttatgtgaatgtaaatcaattttaaaatttagaactattaaaagaagggggtgctactgact

SEQ ID NO: 242558 - DNA, 607 bp, Homo sapiens
tcatgtgggaaggagatgtatgcaactgaagtgggtgggtgatggggatattcctgcccagaaaaggggagtggaggctggggagagcagcttcctggtctataaatgagggattgttctagactaggtttctgagagcctcgcagagtctgcagagatgcgttgaggctgaggctcttctgccattacctcaggctttaaccgtagctattccctctttctgtttgagggggaaggaggccacctctgctactttaaaaaggaggggaaggagagaacctcagacaaatcccaactgaggaacatcatacaaaatacttggccagcacgccccgaaactgtcaaggtcatccaaaacaaggaaagcctgagaaagcaccacagtctagaggagcctaatgagacatgatgcctaagtgtggtccttagtcaataatgtatcaaaatttgttcattaattatgataaatataccagtgtaagayggtaatcataggagaagctgagcgttggggatatgggaactctgtactctctttgcaatttttatgtgaatgtaaatcaattttaaaatttagaactattaaaagaagggggtgctactgact

SEQ ID NO: 242559 - DNA, 600 bp, Homo sapiens
ctacaatagtctccacaatgtttatacatgaaaaatattactgaatttttaaaaatgtatttataagtggcattcctcaagacagccttcagtcttttttttttttttttttttttttttttgagacagtttcactctgttgcccaggcagtatgcaggtacaagcatggctcactgcagcctcgacctgcctgggttcaagtgatcctcccactttagcctcccaagtagctgggaatacaggcacacaccaccatgcccagttaccttttattgtatttttttgtagagatggrgttccgccatgtagcccaggctggtcttgaactcctgggctcaagcaatccacttgccttggcctcccaaagtgatttcaggcgtgagccaccacatctggcctttcaatcttattctagtgtaaaatgtgttgggagagggaacttggactaaatacttacaagttacgaataccctgctctggaaattctcatatatcacacttcaccctgccttctttagcttatttatctacatcagaaaatctgaactcaaacttttaacatactgcctctttttcatgagaagatggcacataagcat

SEQ ID NO: 242560 - DNA, 581 bp, Homo sapiens
acatacacatacacacaccctcctgtgtcttcctccaaggaatccatatttatgtgctttagtaacaaatataaaagattgtaaaatgcttcactgaaattcagaaaccctgatccataatgtcaaacacaataactattgtatatcaaagctgaagtgcattttcacttcaaacccaggatgatcaacttcttttttctagaactgttgtttcaatattcctataaatacatttaatttcactgtacgttttcatggcctggcttgccttagacaattttttgaattctaaycaattgttaaacaatttttatgctgaacttaaatattcagtaaagattctatttggtttgaatatgtatgattcattaaacccatggtcttcattacagtaatatttagaagactaattatctctgagtaatcatagagtatgaagcaatttaaatgtcattcgcagcacaggttagaagcaaatttacttattaaattattaatgttttactttaaactggctgttgaataattaaaaatgaacatgacactattttaaagatgttaaaaaaagaaatacaatggca

SEQ ID NO: 242561 - DNA, 545 bp, Homo sapiens
gattttcaacgtagatgaaacagctttaagttggaaaaagataccatctaagactttcatagttagagagaagaagtcaatgcctggcttcaggtcttcaaaggacagtctgaatctcctgttaggtgctcaagcaactggtgactttaaggtgaagccaatactcatttacccttctgaaaatcctagagcccttaagagttacgctacatttactctccctgcactccataaatggaaaaacaaagcctggatgatggaatatctgttcataacatggtttactaaatattttaagctcgctgttgagacctactgctaaaaaaaaaaaaaaaaagattcttttcaaaatattactgctcattgtcaatgcacctagttacccaggaactstgatggagatgtacaagaagatgaatgttatttccatgcctgctaacacagtatccattccatagcccatgggttaaggagtaatttggccttccagctcttattatttaagaaatacactttgtaagcctgtggctaccataggtagcaat

SEQ ID NO: 242562 - DNA, 578 bp, Homo sapiens
taactttgtataaggaaaacctccagttattacaactgtccaaatatagaatggtctgggtgctagagatgagatttctatattgggaggggtttrgtctaggacaggaatcagcaatctatgatccaaagctggcccaccatctgtttttataaataaagttttattgaaatacaattatactcattattgtctatggctacgtttgcactacaaagcagagctgaatagttgcaacaaagaacatatggcctgcaaagcctaaaatatctgttttctgtctctttacaagaagagtttgttgatccttgatctggaagactcctctggttcttcctcccttccagagttcctagaattccatatgtaattgttcacttgacatttttatgttatctttgttccatgtgggtagtaaagacttcacagatgggaagcttgctttctacttcttaagtaggtctttctattgcctaattgtgaacatttggcagtttctttaaactacactcttaattgggaggtcaagtatagaggtcattatcactttgtaaagaaaaaaaattgttccaagtttc

SEQ ID NO: 242563 - DNA, 625 bp, Homo sapiens
ttgcctttcctaaacaaaaaaagtgtgactcacagggaagaatcaagaaccacagaacatttttttctccaaggccttgaaatccaatggagtttgcccggctggggtttttaattgcttagaaccagtgattccttttattctcccatctttctccctttttgaatgtgaatatctgtaagtgttatcctgtgcctatcccactgttgtatgtttggagcagataacttttttttttttttttttttagttttacagggcccaaagattgagaggaactgtgcttcagggaagattatacccagattctacctacatataatttaaattatttgggtgattagatttggggttttagagytcatggaatttagacgagattttgaacttaaattgatgctgtaatgggatgagaactttggtgattttgggatgaaataaatgtattttgtgtatgaaatagacatgaatctttaagggccataaggtggactgtggtaagcagaataattaccaccaccaccaccctttccaaagacttccatatcctaatttccagaaaaacagttagtttagattgtaaaagggaagggactttgccaatgtgattacagttatggacatt

SEQ ID NO: 242564 - DNA, 570 bp, Homo sapiens
ttgtgcttatgctgaaagctggcattccctctattatttgctgctcctttttagaataatcaattcacaaatttaagatttaaaatgtgcttctccaagattggccaaatcacaagacagcagtactcttatgagtttctcccttgagtcataagtggtgagttcgtgtcccagaagatcaaaatggcgtactgaaaaagagctcttggctaaatcaaaaggcctgaattctagtcctaactctgacatgaaagagcaaggatgcctctttggaggaaattaattaacctctatggatctcattttcttcctttttagaataaagcagttggagattcagggtggcttccatgatgaagtaytgtttgtttgaaatctgaagtcttggtagcattaatgagacaattaggtggagaagcagtccagaagactcagcaaaccctgttttatatgccacttgctacaacattagtctcccgatgaatttagtgaccaaaaacagagcaaaaataaagatctataaataggcctagaagaatgtatgccacttggcagtgttaacctctgagg

SEQ ID NO: 242565 - DNA, 570 bp, Homo sapiens
ttgtgcttatgctgaaagctggcattccctctattatttgctgctcctttttagaataatcaattcacaaatttaagatttaaaatgtgcttctccaagattggccaaatcacaagacagcagtactcttatgagtttctcccttgagtcataagtggtgagttcgtgtcccagaagatcaaaatggcgtactgaaaaagagctcttggctaaatcaaaaggcctgaattctagtcctaactctgacatgaaagagcaaggatgcctctttggaggaaattaattaacctctatggatctcattttcttcctttttagaataaagcagttggagattcagggtggcttccatgatgaagtattgtttgtttgaaatctgaagtcttggtagcattaatgagacaaktaggtggagaagcagtccagaagactcagcaaaccctgttttatatgccacttgctacaacattagtctcccgatgaatttagtgaccaaaaacagagcaaaaataaagatctataaataggcctagaagaatgtatgccacttggcagtgttaacctctgagg

SEQ ID NO: 242566 - DNA, 398 bp, Homo sapiens
tatttgttgtttcctatttgtccacagctaattttttgcaatagaggcacctcagactttaagggtttgaagctccttatcagcactactgcttcagctaatctgttaccagctttcctgacagggacagcttttcagattttatcaaggttggttgagaaagagcccaggactgttcatcttttgttgagaactgaactctaagggaatctagaattatctaattaygccattgggcagtatgtagataaatcttatttcttctcatttcaataaaacagctgatggtaaagactcgttaaagttttgtgtcagaatctggtagcatgaatttgtaaacttttagccatgacttccataggttcacaggttggcaaactgggtaacaccacatccct

SEQ ID NO: 242567 - DNA, 398 bp, Homo sapiens
tatttgttgtttcctatttgtccacagctaattttttgcaatagaggcacctcagactttaagggtttgaagctccttatcagcactactgcttcagctaatctgttaccagctttcctgacagggacagcttttcagattttatcaaggttggttgagaaagagcccaggactgttcatcttttgttgagaactgaactctaagggaatctagaattatctaattatgccattgggcagtatgtagataaatcttatttcttctcatttcaataaaacagctgatggtaaagactcrttaaagttttgtgtcagaatctggtagcatgaatttgtaaacttttagccatgacttccataggttcacaggttggcaaactgggtaacaccacatccct

SEQ ID NO: 242568 - DNA, 483 bp, Homo sapiens
tcttgccaatgcagattcgattctcagggaccatcaggcttcctgtctccccactgcctgaaatattttgatgtgtaaagtcttaatagtaattttaataatattatgatctgtgcatatgatgtatattcaataaatctttacactaattagaagaaaagtcggggcctttatgaaacctatttttaaagctgagttttatggccggagaataatcgcttgaaacgacttaaaaagcagcaaaaactctctggaggtcrtatgaccaaggcaagaggcctcgcgaagcatcgagaattcaacagaagggtctgccccaaatgtcagcaaaatgcacacgcccaggccagtgagtaccagcagctgcccatttaaataaaggggcaatgtgttttcaaacatggctgctgttttcccaaatggccaacatatgggcagggcaccaccgctggcaccactgacaaaatgtaaaggccccagcac

SEQ ID NO: 242569 - DNA, 483 bp, Homo sapiens
tcttgccaatgcagattcgattctcagggaccatcaggcttcctgtctccccactgcctgaaatattttgatgtgtaaagtcttaatagtaattttaataatattatgatctgtgcatatgatgtatattcaataaatctttacactaattagaagaaaagtcggggcctttatgaaacctatttttaaagctgagttttatggccggagaataatcgcttgaaacgacttaaaaagcagcaaaaactctctggaggtcatatgaccaaggcaagaggcctcgcgaagcatcgagaattcaacagaagggtctgccccaaatgtcagcaaaatgcayacgcccaggccagtgagtaccagcagctgcccatttaaataaaggggcaatgtgttttcaaacatggctgctgttttcccaaatggccaacatatgggcagggcaccaccgctggcaccactgacaaaatgtaaaggccccagcac

SEQ ID NO: 242570 - DNA, 591 bp, Homo sapiens
gtgccaagggcgactcaatggtgaactaaaaaatgagagcgaaagatgcccttcattttaaaagatgaagggagctgtgtaggcttcccggggagtgctcgcacctacttccccacccggctgcaggtgccagctccagaaccctccctgctgcttctgggtctccgggctcttccctttgctggtggctggagactcacagtgaagcatgctgaaccactccgcaaatccctcatcagacactcgggctaagccaggccccacgtagtgcacgattgagagtggtgaaataaatgagatttcaaacacgaccaggcctcgatgagcccgcatagcacagtcacgttggagcagagccagcctgttctatgcatttcctccctgcagtattagaatcggtctttggaaggcactgggggccaccctggggcagggatasggaagggctcaccgcaaccccacaggagtgagacccccaggccctggaggcagtgagggggtaggaaagcttggatcgagggagaggacctgccgagcacccctgcaatcccaggcaagctcgcttctctgcactgggcaggcaagagcaag

SEQ ID NO: 242571 - DNA, 437 bp, Homo sapiens
ctcaactgaatgcaccgatggaacttatccctggcaggtgtaagcagaaawgaggatctactggtgaacggagctgaaaacatgcggtgctcaacagtgcccagattgccttctcactctccctctccacgacctccaggcacaggcagagacctccaaggtggcagctcattggaaagcgaccttctctgtcccatctttctagaaaaagccccatggcttggatcccatcacagctgccaggggaatgagccctttattagaccacgtctgcagtcaagctggaagataagaagtgtgtcagtgtgccagtgcctgagtgtgcatgagtgtgagcagttgtgatggtgcatgatcatgtgtgggtgtgaacatgtgtgggtgcccgaggagggtcctgaagtcagggtgtgggtttcttttatgaggctctgcag

SEQ ID NO: 242572 - DNA, 551 bp, Homo sapiens
aagcttcactcgtcaaattaaggttaagctctctccgctggaataactcaattataagtagtcattatctgtttaacttgattcctaccagaataacagaaacaccacacttcctgtttcctcttcacacaggcctcctcacygtggtcttgtagtttcaaagtactctgcgtacagagagaaatgtcactgtgccctcgtttcagtgcctgtcagccttagctcttgcctccatatgtgcaaaattatttgtaagatataaaacatctctttcttcctgagactctacaccttcagaagaacgagtggaagaaaacagtgagaaggggacccacacaggcgcaggagaagcaatgcgactacagcccctagaggagggtcagagaggacccagcatgctcaggtgcttgggagattctctgcaatgcttccctgaaccagccctgggctgggctgcacacgtaagtcaacgggcacttggaaaatgagtccacacaatgtctgagctggtccagattcacccaggggcatgtgactcttggccccccacg

SEQ ID NO: 242573 - DNA, 575 bp, Homo sapiens
ttccattgatgtctatccctcctgggaactaatgattatactatctgttattgtcaacgatgaaaccgaagtgaatgaaacatatgcatgagttacttgctcattcccaaactccttatagtcagctgtttttcaggaagagctgggacaattgggagtgctgctttcaacaaaatcaatttcagtacccttgcaggtgaatattctggtcttctgattaagtatttggagatcatagaggtggcttgtgagccaatgtcaacttcttgtgtgcaccattcagcaatcttggtgttcacttctgccagttcagctcagagccagccttggaatgttttctctcatggtactccggggaactgctgccagtccytaagtgtcagtgcataagttgaaactgatctgccatctttgataagtgtcaaacactaattcgaaaaattagaatgtattaaattaacattaaagccccccttttttctcttaattcttaaacccttatagaatcatggaatgtcaggtgttcattgtgagaacaaattttgattgcatcatagaaatacaggagtaatgtg

SEQ ID NO: 242574 - DNA, 631 bp, Homo sapiens
ctctctcctacattctcagtgccttctccattctctcttatttagttctayttatttcttatttcttttctagtaatagcctgagctagtgagagttgggctgacaatgtactcaccccaactgggctattagccctgtgacacggccattcatttatttagctccataaaccctcaaattggggaagtgtggatagaagcaattcttaactgagctgtgctgcatcagtgctgggctctcattcctccatcatttttctgagttctccttgctaacccttttttgctgccatatttctttaggttctcatcttcatacatggttctctattccagtcactggcgcaacttcgtcttgctgagagccttctccaactgcttccatcctttctgcttcagaaactgaactcttccttagctagtttaaaaattttgttgcttattctgcatgtagttattactatactaaattggtgtatttgattctgtactaaaagttgtatgtagaacaaatattgaatatcctcaaaagctatattgtaaaactggtttccacttttggcaacccagcttcccctcaaaggatctggataatcctaagttctatcaaaggcttcaaacgaacttccat

SEQ ID NO: 242575 - DNA, 548 bp, Homo sapiens
aaatagctaaggaactaatggcccacaaaatttcttatcttagcttgaaactgtgtttaagttagaagccactagttttccctttacccttctataacttaaaatatccaaagttgaattatactgttttacaatataatatgtagattattgtattcataagtagaaaacattaacaacttttaactttaaaagaaatttagcaaatgtggccaaattataaatctttgaagcagagagttctccaagactctggtgaattctaatgtagatattatagtcatttagaatatattcaagatttcactgaatggtagtgtattttctaacatgtgattaacaaatagcaaccctgggctccagtgttatttcaaacattcacactgtataagctcattttaaagatataatgtttaaaggttctaggtctaggacaaaagtatgaaatatgtgtcctgagtgaagagccatggtccctggctgcttgaatytgtaccaaaatgtctgcaaaattttggatatttagatttggatcatatatatcaaat

SEQ ID NO: 242576 - DNA, 539 bp, Homo sapiens
ccctaacatacagagagacctctggctagaaaacgagtaagcttcacacatcaaatctcttttcaaatatattttaaatggccctgctcaaagaatcctggaaasaagttacaaattgaagtattcaacaaggctgaggacaggtaatagggagaatacagttatttcagcaagtacaacagtcatccattttgtcatgatggagtcattctttcatttttaatcattcaaaaaatactggttgaaacacagagtatcacaatgcttaaaaatttaggcctgaagtcagaaggttggattccaatctactgtgatggtgagttttatgtgacaagttatttaggccaagttattcaattaagcatgaatctagggtgttgtgaaggcatttttgtagatgtgcttaacatctacagtcaattgactttaagtaaaggagattatttcgataatctgagtgggccttatctaatcagttgaaaggccttagaagcaaaacaggtttcgccaaggaaaaagaaatccctcctgtggaatgc

SEQ ID NO: 242577 - DNA, 442 bp, Homo sapiens
  misc_feature (1)...(442): n = A,T,C or G
ggagcagactcactgccacctgaaccctgggactgacagtagtcaggatggttatccagaggaaatccaggataccaccagcaaaggaaaaggagtgaacagattagcaagatgtccgttacagagtagaagcaaagtgctgcctacccgcacctctgatcccattccgaaccatgttcttgtctcctggtctttttgtcccatgtgccagatacacagaaatgttatgtncactatgtaccagacacacagatggaacattacctagaacaaagcccttgccctcagagagcttatgttctaatgaaggtagtgacacacaaaatataaatatgtaatattcatcggtgctctgaatataaagcagagcaaggggctaagaatgacagcagaaggaagaaagagtgccrttctatatagaatggtcagcggaagcctctta

SEQ ID NO: 242578 - DNA, 594 bp, Homo sapiens
ttacccagcaggggctttgccatgtaaattcttcaaaaaattgccaaaccccattctcttccaatggtgagacatggaatcattcaggtaaaatttttcaattctctaattttcttctgtcatgtctcctttttaaaaataaactgctagctgttttgttattcccttaaatattctctttaatattcttgaatctatgcctgagtagagaagtaaaggtgtatgtatatgtgaatcctcgggatttctctgtccatgctacatgcattctaatgttttcttgggctggatagtccagttgcatagacatgtacctratgaaactgagtatatggtttcgatcctacctaatgaactagccagattttcacagagaaaaatgcccttcattaggcaaaagctatggcttcaatttgctaatatgttctgttgattccaagtgagagagtatgcttccattgctgagaagacaactcagggtattctatggaagcaaggatagaattagcatctacaacatcatggttggttaaaaaaggaggggacagtgaataatactctagtgtatgttttaataatcttactggtagctcg

SEQ ID NO: 242579 - DNA, 589 bp, Homo sapiens
ggagttgttaaatttttttaattgacagatgaaattgtatgcatttattgtgtccaataggatgttttgaagtataggtacattgtggaatagttaattctaggtaattagcaaatgtattgcctcacataggtattacttttgtaatgagaaaacttacattcattctctttgcattttttaagaataaaatatatcatcattaactataatcgccatgctttcataatagagctccatggccttatttctcctacttcgctgtaattagccatcctatgaccgacttctctccattgtctccttcccgccaaaccaccccagcatgtggtacattccatacaattttcctacttttatgagatgaactttttaagactctgtgtataagtgagatcatgtggtatttgtctttctgagcctggcttatttcacttaacgtaataccctccagattcttccatattgttgtaaatgactggactttattcttttttaaggctgaatagcattccaktctgtacacataccacattttctttactcatctgttgatggacatttaggttgattccctatcttagccatg

SEQ ID NO: 242580 - DNA, 533 bp, Homo sapiens
ctactaaatgaaaacattagagaagcactctggaaaaacggtctaggcaacaatttcttgaataagacttcaaaagcacaggcaacagaagcaaaattagaagtatgggatcacatcaacctaaaaaacttctgtgagcaaagagaacaatcagccaagtgaagagacaacccatggaatcagataaaatatttaccaactacccaattgacaatggattaaaagtcaaaatatatacagatgtcaaacaactcaatagggaaaaacaaataatctgatttttaaaatgggcaccacgatatgaatagacacttctcaaaaraagacatacaaatgacaaacaggcatatgaaaaggtgctcaacatcactggtcatcggagaaatgcaaatcaaaaccacaaatgagacatcatcccatcctagttataatggcttttatcgaaaagatagtcaaggggccagggaagatgttgcatcttgtgttatggtggctatgctttgacctatgcagcctcttggatcaggcagacg

SEQ ID NO: 242581 - DNA, 581 bp, Homo sapiens
tatgaaagtacagttacacaaggcaaatccgttttggtgttctattacacgataaggtgaccatagtaaatagtaatatagtgtgtatttcaaggcaactagaagaaatggatttgaatgttattttcacaaataaatgatgaatatttaaagtgatggacatagtaataaccccaatttgatcattatacaatgtatacatgcattgaaacatcatattgtaccctataaatatgtatagttatgtgcccattatgaataaaattaaataaaaactgaaactagaagtaaytttttaaagtcaaccctattttgaagtgatatttttgacaggcaactttctaccaaattgtctatataagttacaattcttttttaataaaaatatctcttattaactttttaaattagggtaattttgagcaaaggaaaaaatatgcaatttttgtaacatgaccatatgggcttaatccttctcaaaatatctatttagaatcagcaggatttttaactgcatgatggtaattatttcattgatttgacagaggttcccacagctacataccttgtccctgtgttga

SEQ ID NO: 242582 - DNA, 557 bp, Homo sapiens
gtttgactttaggattttgagtaacctcttggacccccagaaaatctcactggaaaaagagtgatacattaactatcttacagtaatatgatgaagcgtagtgaaacaacatatgtaaaatgttatttacartggcaagtacttgagatacattcagtaatgaaggctatcatcattgttaatggcaggaattttcaagtgagtcattatgtttacatgccacaaactataaagatgatattgacaaatattattgaaaattatataacaggtagatgataaaactattataatgttccttaaagacaaatataatgacttttccaatttctttcctgctgcacactacatttcttcagtttattatgtgtttagtccttagggtttggagaagggaaataatttagcactacataatagggaacttatattaaaaagagggtgcatatctaaatttcagcaattatgggtatgctgaatatatcagcaaatgtgtgtactaaagctacctaaggaaaatatagtttactgaacaactactactattgcttattatg

SEQ ID NO: 242583 - DNA, 605 bp, Homo sapiens
  misc_feature (1)...(605): n = A,T,C or G
nnnnnntaatctatgaaaaaggaatggttacaggttgtaaagtgcaaatgctgttagaatagcaatatcagctgaatggactaattccatcattttctagctatgttaaagaagctaaattttttatgtttgtccatcagtttgattttggctaaagaccatagtacattaattactaatgatgtaaattgactggcagatgataacaaaatttcacatcctgtgctgaagtctttggagcaaagctttgtaaacagaatcgatagttttattagtaaaaaaaatgagatattggcatatgaacataacactactaccaagttggctggagggtggagggaatgaatcttyacatgaatcataatatagttgaggatagagacactgtattatattatttttgcaactaatgggaaaatctgggtttagagtaaagccggtggtcaggagaaagagcaatgttaatgatgacctacagcaaggttatattaatagaagtaatgggctatgtagactgacctagccagtcacagataattgaataaatatattcatatattatacatatataatatatagcccaataaatatttaagtgcaatgaa

SEQ ID NO: 242584 - DNA, 605 bp, Homo sapiens
  misc_feature (1)...(605): n = A,T,C or G
nnnnnntaatctatgaaaaaggaatggttacaggttgtaaagtgcaaatgctgttagaatagcaatatcagctgaatggactaattccatcattttctagctatgttaaagaagctaaattttttatgtttgtccatcagtttgattttggctaaagaccatagtacattaattactaatgatgtaaattgactggcagatgataacaaaatttcacatcctgtgctgaagtctttggagcaaagctttgtaaacagaatcgatagttttattagtaaaaaaaatgagatattggcatatgaacataacactactaccaagttggctggagggtggagggaatgaatcttcacatgaatcataatatagttgaggatagagacactgtattatattatttttgcaactaatgggaaaatctgggtttagagtaaagccsgtggtcaggagaaagagcaatgttaatgatgacctacagcaaggttatattaatagaagtaatgggctatgtagactgacctagccagtcacagataattgaataaatatattcatatattatacatatataatatatagcccaataaatatttaagtgcaatgaa

SEQ ID NO: 242585 - DNA, 521 bp, Homo sapiens
gccatacttcaaccactcatcaattgctgagtgttcagactaggttcaaataatgcaggtgctgaggtgtaaccaatccagctgttctacacctcacttccaatttctgtatgtcatttctcttttttgtctataaatcttcttctgctatgtggctgcaatggaatctctgagaatttcctgtgattcagggggctgcccaattcacaaatcattcattgatcaattaaactcctttaaatttaattcagctgaagtttctattttatcattctttgcctaaagattgcctcacaatcaaagaaggagggtgagggagtgaaaaacacaataaaatatatgctatctttattgctgcatrgtcttaagttatcacctataatgaagatgcttagagttgtgccctgaactgaagagagagtctacctgtattagcctgttttcacattgctgataaagacacacgtgaaactgggcaatttacaaaagaaagaggtttattggacttatacttcaacatg

SEQ ID NO: 242586 - DNA, 573 bp, Homo sapiens
tgttttcaagtatgtagcatcaacaaataaaattacaccaaggtgtttataagaatttttcaaaagcttagaaaagactttgatagttacctaaagtatagtaaaaatgcctccttagatagaggaaggagaattgctgtgttaagaataataacactgcatagtgatacataaaaagggaaggcaacaaaatttcataggaggtaaaccaattaactgagaatttcttattttctgctaatggcagtctgcacagcaaggaaagccaacaaattatatagggacccgagaactaaatctaatatagctgctactctagtttttggttaaggaaaatatgctttgtcagtgtccatccagtgtctgactagtgtattaatggtgaaaaggaaaaggatacgtaataattagccaatcctaaagttggtagtggttgaccatcggcataatttaacttaccaaagacactttaatgtttttttttccctagagaagattcaagaattaattatacaaatgatatgcaaacycagaaaaaaaaattgcacacagtacctgtaatatccagctagt

SEQ ID NO: 242587 - DNA, 578 bp, Homo sapiens
gaaagtagaactgaatttacctcttttctcttccgtctctagggagtcttttagggaagcacaaatgcagttcagatggtatttgaaagctttckcataccagttaagaaatgcagacaatttaacagtcagaattttatttttgtatgttttgaggttcctctcaaatgtatattcctgttcatatttaaaagttccaaaaattttccattacaatttgaaactttctccaaagtgaaattaccttatttagtgacaggtatgcataaattagtaaaatagaagtcacagtaatactaatggaggcataggcaaaatagaagaaagctcttataaggttttgaaagtggctcaagggctgtttgtttacagtgcaccagtctaatgagatcttctgaacttggagctggctctaatatgagcttacaggccatatgtctgtcttctcattgttgacttccttttatagacaaacaagactcaagaaactgtacaaacagatgatagaagaaatgccaaaagtcaaattttataaggtaaaacatataatgtggttaaaaagtcaaaagcctagacat

SEQ ID NO: 242588 - DNA, 588 bp, Homo sapiens
tagactgcagtgaggatataccaattgacaaactatctatgattatgtctataaaacaagagatcatttgaatgaggtatacaaaaggcaaaagtaaatgacttttagatatgcagctcatttcttctcaagccttatagttagaacctctttcattagagaagcatttaaagaggtctcttcccaggaacacacgtacattttgtttacccttatttgactacactagtgctaggcagccagaccatgagtataaactttgtttgtagctactttaaacacatctttctgacatggcaataatgtataccagaggttgattaaaatactctcgaggcaattccaattayttaaattactgcaataaaaggcactgttttgatagatacaaatttaatatttattcagaatcacacaattatttaaatttggtgcattccctgatttagaattaccaagtatttattaattccatgtaaaactttttaatgtaatattcgccattcttaataaagtttacatttgtggcatgtatcaaatttctgctgatgaactcaattataaactgctgatatgtaaaacaatatg

SEQ ID NO: 242589 - DNA, 382 bp, Homo sapiens
aatgtaacaaagtgatcaatcaatcaattaatcaatcaacttgctttttctgataatcatggtagcagatagcaattagaaacatacgcccttaaatttgaggctgttcttgatggctgaggattatgtgacattttacattcagaaaacactttaaaaacattcatatcagtgtttgctttaagccagattttgaggagttatttttttgccatttttagaggagcagactggcttaggagggttaaataacttgctcaaatatagttagcacttggtggcaaaagtggagctagsaatctagtctgtagcccatctattttagcataggtcactataacagatgtgctatcttaatttctcattttctccagaacagaaa

SEQ ID NO: 242590 - DNA, 623 bp, Homo sapiens
agtcccagctacatttgatgctgaggtgggaggatctcttgagcccaggaattgcagtcctgcctgggcaacatagcaagaccctgtctctaaatagctagacagctatataggtaatagatagatagatagatagatagatagatagatagatagataaatagatgatagatagatatcatttagtgtcgtgatgacactaacatgaaccatagttactctctagattgtagaagaatgtgtgttctaaattcatatacaaaaataattttgatgcttatataggccttttcagatatgtaatatgatgactgttgtgataatcgaaaaaatatgggctgggagactccaaaatcatgagaatgtatatacctttatgatagtagaacagatgatccccattgtttcattaatcaatgaacaaatatttcaggacacatagtgttccataactatgctatatgctgattataagtttgttttcacacagaagatgcacatatctatacatatgatagtattatgatatatgtagcatatagaatrtctgaaccgaggccaaacttagacgaaagaatgctttggcaggcctaacgtttggcacacattccaacatgattgta

SEQ ID NO: 242591 - DNA, 554 bp, Homo sapiens
tttgtctttatttcaaacccaaccttggatgaatcaaaaatccatctgacctgtgcctcatcttctactctatgaaaataaaagtagaagccaccagatggaatcttccagattattcctgcatatccataaatcccattctactagtgctgttgctctccatgctccgtctcaagaaaatctcccaacctctctgtggattccatctatgcctgtactcataggctctttatccttctcagataagcttatsctttctttctgttgtatattccacttctctttctcatcttcccagagatcctaaaaatagccaaattcatatagttaaacaaacaaaaaacaaaaacccaaatgcaaactttattctccctttccttcctctccagttagtctcatctctcttcttccttttacagccagacaattaggtagtggcctattccgcagtctcgatttcctttgctcctacttactgtttgacccatgctaacatggatttcatcatcataatcccatgaaataatttcaccaatgttaccaacgacttcatg

SEQ ID NO: 242592 - DNA, 573 bp, Homo sapiens
ctttttctcctatagctctaatcatcaaacacatcttatttttttatatagttcactttgatcttatacccaacaaagaaaatgtctaagaagtgtgttagttgtaatttccaattaagttgaacacatagtaaagtctagagacaatatgcacctttaatttctcattcagagctcctgttcagtcctgaactagcaataccaattctacaaaaacaagacgctcatccagctttatgttttttcagctgttattatccatttggctccatggagttctgctttacccaatcctgttgtctagcaaaatgactacatagagcaatagctttactatmttcagtgattgtttctgatgacaagcaaggaggtcattggagtgtttctaaggtactgctaatcattcaatgaaacaggcagaagatatcaaaaatgccaacctaataacaaacatttacagagtcctacagcttgacaatgtgaaaaaagacagcagagttggagtcagatatatcaggttttaagttcttacttcacctttccatgaatgtttgactttaggattttgagtaa

SEQ ID NO: 242593 - DNA, 585 bp, Homo sapiens
gttataatcttgggcatggtttttctttacatcatagtttccttattgtatataaagcaaaataataatgccacctcatagaatcccatgggttttaaatgagttaactggataaaatatttaacttatggtgcatggcccatcgtaaataaccaataaatgtattattgttattaaaggtatgaaaaggcatatcagtttaaaatataaacttatataagtaagtgcaaaagaatggtttggtaattaatagaacttttctttatattacaaatccaaataactcataaatatctaaatcaagagcacgttaattaaacctccattaaaacttgatttctttacaaaaaattgaaagggaattgagtaacttgaagtataaatcttgcaatattataacccaagagacaaaattaagatggtaagatgtccaaattatctgatttatgaactgtaatgactttaaaatacagtaacaattttagttagtataaccagatatgtggacactaattagcaagttgaatgttgcatcaatsgtctagtctaagaagtagttttatccatttaatagaagtgatcata

SEQ ID NO: 242594 - DNA, 459 bp, Homo sapiens
atctactctttcaagataacttctttcaggttttattgaaccactgcacaagagggaaagaaaaggcagattaagtaatgtttcaaattcattgctttgtattctttcaattctaatagcrttaaactgattaaacaagtgcttttatagggattgttcaccaaacttttctctagaaaaagagacatagttatggcctcaaaaaccaatgcttgcttgcatatgcactattctaaagattatcaacataatcaacatatgcttattgcaataatttataattgcattataattatcagatctaagtatgcactgcccttaagtaatgaccattttctgtaagttggatttgttaatacattcacccatatattcattcaacaaatatttataaagcacaggctcagttaggttttgtggatgtatcacaaacatttatatattatataaaattaaacg

SEQ ID NO: 242595 - DNA, 421 bp, Homo sapiens
cttctgctatcagaatgagaaaaatccctgcttctgatggtgcttctgattatrttaaacccatccacatagtccacatagcccatccacatagcataatctttctaatttaaggtcatttgattggtaaccttaattacaactgcaaagccctttagccatgtaatatatttatgaaagtatcgccaaggagcaaattacaaaagccaaaattttgtctaccacacatgtagactgaaacatctttatatgtatcttcatggttttcaagaacaaaaatctggaaacaactctaaaacttatcttaaaaaatacaagtaaactgttataaattggcaagctgaaagtttaccagaatttaaaatgaatgagatataactacaaactatacgatgcatcttaataatagattgacttaaat

SEQ ID NO: 242596 - DNA, 565 bp, Homo sapiens
actaaagtccctgttttcttgccacttcatctttaagccaacaagtacacactggatttttcttgtgcttcaaatctctgacttcctcttctgctatcagaatgagaaaaatccctgcttctgatggtgcttctgattatattaaacccatccacatagtccacatagcccatccacatagcataatctttctaatttaaggtcatttgattggtaaccttaattacaactgcaaagccctttagccatgtaatatatttatgaaagtatcgccaaggagcaaattacaaaagccaaaattttgtctaccacacatgtagactgaaacatctttatatgtatcttcatggtkttcaagaacaaaaatctggaaacaactctaaaacttatcttaaaaaatacaagtaaactgttataaattggcaagctgaaagtttaccagaatttaaaatgaatgagatataactacaaactatacgatgcatcttaataatagattgacttaaatcaaaagtaaacaaaactaaaagtgggaatcttaagaaatagaaatgacaaataacat

SEQ ID NO: 242597 - DNA, 565 bp, Homo sapiens
actaaagtccctgttttcttgccacttcatctttaagccaacaagtacacactggatttttcttgtgcttcaaatctctgacttcctcttctgctatcagaatgagaaaaatccctgcttctgatggtgcttctgattatattaaacccatccacatagtccacatagcccatccacatagcataatctttctaatttaaggtcatttgattggtaaccttaattacaactgcaaagccctttagccatgtaatatatttatgaaagtatcgccaaggagcaaattacaaaagccaaaattttgtctaccacacatgtagactgaaacatctttatatgtatcttcatggttttcaagaacaaaaatctggaaacaactctaaaacttatcttaaaaaatacaagtaaactgttataaattggcaagctgaaagwttaccagaatttaaaatgaatgagatataactacaaactatacgatgcatcttaataatagattgacttaaatcaaaagtaaacaaaactaaaagtgggaatcttaagaaatagaaatgacaaataacat

SEQ ID NO: 242598 - DNA, 632 bp, Homo sapiens
atttgtgaatttttagaatatatgtagtacttaaaagtcatgattccagctgaggatgtatggaatcaatgtaacctgagtagtcctgggactccccaacatggataaaactaatatatatatagatactcatatagtgagatatatatacatatawaaacatgaatatatatgtacacatatatatactcatagtgagatatatatacatatataaacatgaataaatatatatacatatatactcatatagagagatatatatataaacatgaatatatattcacatgtactcatatagtgagagttaaattaaattatattaattatgtataatatataatacatgaagaaaatgtataatataaaaatgaaaaatcatatgcttgtatatacagtgggtatgtagtaaaaatataaaaattatgaacaggaaataattcacaaaatatcaggataatggttgcctctgagaatggtggagaaagaatgaaattgggaaaagtatacaaatggctttcaatttgggctttaaagttttatttctaagaaaaacaatttgaaacattggaaagttgattacatggcaggtaagaaattagacaaaatgacatagtgcatttaaagaattc

SEQ ID NO: 242599 - DNA, 632 bp, Homo sapiens
atttgtgaatttttagaatatatgtagtacttaaaagtcatgattccagctgaggatgtatggaatcaatgtaacctgagtagtcctgggactccccaacatggataaaactaatatatatatagatactcatatagtgagatatatatacatatataaacatgaatatatatgtacacatatatatactcatagtgagatatatatacatatataaacatgaataaatatatatacatatatactcatatagagagatatatatataaacatgaatatatattcacatrtactcatatagtgagagttaaattaaattatattaattatgtataatatataatacatgaagaaaatgtataatataaaaatgaaaaatcatatgcttgtatatacagtgggtatgtagtaaaaatataaaaattatgaacaggaaataattcacaaaatatcaggataatggttgcctctgagaatggtggagaaagaatgaaattgggaaaagtatacaaatggctttcaatttgggctttaaagttttatttctaagaaaaacaatttgaaacattggaaagttgattacatggcaggtaagaaattagacaaaatgacatagtgcatttaaagaattc

SEQ ID NO: 242600 - DNA, 465 bp, Homo sapiens
ccttccctgaatccccaaaacctgattaggacacccatctattaattgtcttttcatagcacttgccgtattttagttgtcttttacttgtctacgtccaccactatgttatagccattggatcttactgtgatattctcagagtttagcttagagcttgrcttacatagtagacaatacatttttccagaagggggaaagaagggaggaagaaaggaagggagggagggaaggaggaggaaaggaaggaaaaaaagaagaatggaacagaggaatgagagaaaaaaaagagaaatggaggaaggaaggaggcgagtgagggaaggaggcaagaaggtaggcagcgagggagtgaggaagaaagaaacaaaaaagtaaaggaagaaacatgctaggaatacattaaggcagtagttgacaatctttctctaaatgtttagagtaaatattgtagatttggtgagc

SEQ ID NO: 242601 - DNA, 392 bp, Homo sapiens
actagatcttggatgtaatcatgctttgcakgaaggaaagatactgtattttcccaactaacctacagacaaccgaaatttatattcacatgtgacaggatttccagcagtggcctgggaaaatgagaaagaaatcctgttcaggaaatgggattggcaagaactatctcactcaaataatccaggctcactctctggatttggagcaatgtgtatttggacaacatttgttgagttataccccagaaggttttttaaaaactatgtacctccccacccattttaaaattgacatataaacaactaaattaagagctaaagatttaaatgttgcagtgtcaatgctcttgatgtcacagaggacaacattgaattgaaaaatatcaatttaa

SEQ ID NO: 242602 - DNA, 553 bp, Homo sapiens
ggcttctgcaaagggttgggggaagagtgttttaggcagagggaactaccagtcattgcacctttactgtgactttattgactcccaagatgacactggatagcactgggatattccctactctgcctccagcctcctccaaagggagccttgacatgtaagcaagcctggagctgctccctgagacaaagcaactgaagagtgggtttyctgcaacacaaagtcccaccccccaaccccaagcatggtgggaccccgcttctaggaaggtggtcatctgtgcctgacatcttgctgtcactcactcagatgccaaggggcaacatggcccctgtcctggaatagaaacagaaccacatcgagcaggagtccctacggtccagcaatctcattgctggttatatatccaaagaaaataatatcaatctgtcaaagagttatctccacttccatgtttattgcagcattattcacaatagccaagatatagaatcaacctaagtgtccaccaatgaatgaatgaagaaaatgtggtatatttacacaatggaat

SEQ ID NO: 242603 - DNA, 553 bp, Homo sapiens
ggcttctgcaaagggttgggggaagagtgttttaggcagagggaactaccagtcattgcacctttactgtgactttattgactcccaagatgacactggatagcactgggatattccctactctgcctccagcctcctccaaagggagccttgacatgtaagcaagcctggagctgctccctgagacaaagcaactgaagagtgggtttcctgcaacacaaagtcccaccccccaaccccaagcatggtgggaccccgcttctaggaaggtggtcatctgtgcctgacatcttgctgtcactcactcagatgccaaggggcaacrtggcccctgtcctggaatagaaacagaaccacatcgagcaggagtccctacggtccagcaatctcattgctggttatatatccaaagaaaataatatcaatctgtcaaagagttatctccacttccatgtttattgcagcattattcacaatagccaagatatagaatcaacctaagtgtccaccaatgaatgaatgaagaaaatgtggtatatttacacaatggaat

SEQ ID NO: 242604 - DNA, 440 bp, Homo sapiens
aaagggtctgtgtgctttcaggagaatgtggtctggaaataaaggtggagaggggaagcagggtaggaaggagtgctggtccagcatggtgccctctcaggcacagccccaatatcagcagatcatacaaggaagtttggagtggaagttatacctcaagaggttgttacagctcaagatgagggaactgggcaggtctccctctccagctgttggccattggaatagggccaccctggggaacatgtccttccyggtgtctcaggcttctacacctgggcaaggggctcccagggcccaggtggagaggagagcccagggccggtacatggggccagggacacccacactagaacagtgagggtatctgagggccctgggatgagcagactctgcctcccctacccagctgggctgactgggacctgctctacaggggt

SEQ ID NO: 242605 - DNA, 609 bp, Homo sapiens
ccaggtgccagcagagctggtgcctgggcccacttcctggtttgcagacaactgttttctttttagatcctcacatggctaagagcagaaagtaagaacaagctctcatgtctcctcttataagggcactaatcccattcagaaggactccaccttaatgacctaattagtttcctaagacaccaccatcagataaatagcaatcccccatgaaatgtttcaaaaaaattagaagtgcatgctttgaaataattttatgagtccaacataacactgcaactaaaatcagaaaaaaaggtatttaaaaatgaataaaactgtagatcattttgcacttatccccatgtatacaatactttttaaatactggcatattatatacaagaagaaagataaattaccaaatgaagtatattcaagaaatgaaatatatgctggtaagcaggctctctggctttcagacttgtctttatttactatctaatcatgttcagtttytcagtatctttctccaaaacatcaataaccccaataataataatccaatttcttagccttcatgtttattatgtcccccgtgcctctcaaacatcaaagacattgtaccta

SEQ ID NO: 242606 - DNA, 644 bp, Homo sapiens
gtgtccctcatcctctctaagaaccctcaattccaaaagtacaagagagaatgattagcctctagctgctgtctgtgtcccagcagcagcttggtggatagaataccaagatgggmgtggagactgtgcaaagcaatgaggtcttaacctcagacttacatcacacacttgacccactcagtatgttccagactgctcagccattttgtgtactagatttggttttaagggactttgtgtcacttgaaaacaagccctctttctaaaagtgaaaatttgccactgtgtgagattttcaaaaatactgcgtcctactgaccttgaaattttttccaggggcaaagttacagcattgttgctggaatgtatgctattctccaaggaaactcatttatttggggtatcacttctaaagggatggcttgtcacacaaaaccaaacaaaaacagtcatctttctttgggcgtaatctctcccctctaccttcagtggatcaagtgggcaccaggggcctcctgtattcctatgacttcctaatattgtgtgcccaagatggaggtgctgatgctagcaaaacattggctctagccctggaagaatttgttaaggactctgtgaccaatttcctctacccatagggtccc

SEQ ID NO: 242607 - DNA, 644 bp, Homo sapiens
gtgtccctcatcctctctaagaaccctcaattccaaaagtacaagagagaatgattagcctctagctgctgtctgtgtcccagcagcagcttggtggatagaataccaagatgggagtggagactgtgcaaagcaatgaggtcttaacctcagacttacatcacacacttgacccactcagtatgttccagactgctcagccattttgtgtactagatttggttttaagggactttgtgtcacttgaaaacaagccctctttctaaaagtgaaaatttgccactgtgtgagattttcaaaaatactgygtcctactgaccttgaaattttttccaggggcaaagttacagcattgttgctggaatgtatgctattctccaaggaaactcatttatttggggtatcacttctaaagggatggcttgtcacacaaaaccaaacaaaaacagtcatctttctttgggcgtaatctctcccctctaccttcagtggatcaagtgggcaccaggggcctcctgtattcctatgacttcctaatattgtgtgcccaagatggaggtgctgatgctagcaaaacattggctctagccctggaagaatttgttaaggactctgtgaccaatttcctctacccatagggtccc

SEQ ID NO: 242608 - DNA, 644 bp, Homo sapiens
gtgtccctcatcctctctaagaaccctcaattccaaaagtacaagagagaatgattagcctctagctgctgtctgtgtcccagcagcagcttggtggatagaataccaagatgggagtggagactgtgcaaagcaatgaggtcttaacctcagacttacatcacacacttgacccactcagtatgttccagactgctcagccattttgtgtactagatttggttttaagggactttgtgtcacttgaaaacaagccctctttctaaaagtgaaaatttgccactgtgtgagattttcaaaaatactgcgtcctactgaccttgaaattttttccagrggcaaagttacagcattgttgctggaatgtatgctattctccaaggaaactcatttatttggggtatcacttctaaagggatggcttgtcacacaaaaccaaacaaaaacagtcatctttctttgggcgtaatctctcccctctaccttcagtggatcaagtgggcaccaggggcctcctgtattcctatgacttcctaatattgtgtgcccaagatggaggtgctgatgctagcaaaacattggctctagccctggaagaatttgttaaggactctgtgaccaatttcctctacccatagggtccc

SEQ ID NO: 242609 - DNA, 644 bp, Homo sapiens
gtgtccctcatcctctctaagaaccctcaattccaaaagtacaagagagaatgattagcctctagctgctgtctgtgtcccagcagcagcttggtggatagaataccaagatgggagtggagactgtgcaaagcaatgaggtcttaacctcagacttacatcacacacttgacccactcagtatgttccagactgctcagccattttgtgtactagatttggttttaagggactttgtgtcacttgaaaacaagccctctttctaaaagtgaaaatttgccactgtgtgagattttcaaaaatactgcgtcctactgaccttgaaattttttccaggggcaaagttacagcattgttgctggaatgtatgctattctccaaggaaactcatttatttggggtatcacttctaaagggatggcttgtcacacaaaacyaaacaaaaacagtcatctttctttgggcgtaatctctcccctctaccttcagtggatcaagtgggcaccaggggcctcctgtattcctatgacttcctaatattgtgtgcccaagatggaggtgctgatgctagcaaaacattggctctagccctggaagaatttgttaaggactctgtgaccaatttcctctacccatagggtccc

SEQ ID NO: 242610 - DNA, 474 bp, Homo sapiens
ctgcttcatagatggtacacttcttcctgttacctcacatggaagaagggacagggcagctccctacaacctcttttgtaacagcacttcccaaaaagccccacctactaataccaccacaatgggaattagatttcaatatgaattttggagggacacattcagactgtgtcaaggtctgaggtcagactacccacacagagtaattataggactttctcacttgagactttgtacttctgttaatgcaatttaaaattttattttagatgataagttcatagcagtgattcataccaacttaaagtaaactaaagtgcttaaggtgctttgtttgtttctttgcttttcacatgaacacttattaaacctgattttcaccttgtccttgtaaakttaggctcttaggacctgagtaaatccattgcccctactcaatctcatattgttagatttcactcacccagcccatta

SEQ ID NO: 242611 - DNA, 633 bp, Homo sapiens
ccttactcccctcttagctcccatctttcttccccaaagaaagcctcttttctttctttctctcatcttttgagtccatacctcaggggggctgtaactgggaccccaggcctgagacagatcaatggcaattgattaattcagagggagagagtggcgtgtatgtgcgtaggtgagagaaagagaaatagagacagacacagagacagagacagagacagactgaaagagagacagacagacacagagactgtttgcatgcatcctgcaatcatgccctgctattttagacttaagcttcactcttgaccatttattttttttaaaaagmcagaataatagatcatgataacattataatagcaacctgatgataacgaatgcaacataggtcattaaggaacgtactcagggcaagacttgctaacacaataaagctcactatgtgccaggaactgttctgagcacttcgcatacatgaactcatatcaagtaaataacctcgccacagtcgtatgatgtagcatctatgaggttagtgctgttaccagttaccctattttacattgaagaaaccccactccattgagaaaaaaaatagcagagggagccttccaagtttctaggaagctg

SEQ ID NO: 242612 - DNA, 633 bp, Homo sapiens
ccttactcccctcttagctcccatctttcttccccaaagaaagcctcttttctttctttctctcatcttttgagtccatacctcaggggggctgtaactgggaccccaggcctgagacagatcaatggcaattgattaattcagagggagagagtggcgtgtatgtgcgtaggtgagagaaagagaaatagagacagacacagagacagagacagagacagactgaaagagagacagacagacacagagactgtttgcatgcatcctgcaatcatgccctgctattttagacttaagcttcactcttgaccatttattttttttaaaaagccagaataatagatcatgataacattataatagcaacctgatgataaygaatgcaacataggtcattaaggaacgtactcagggcaagacttgctaacacaataaagctcactatgtgccaggaactgttctgagcacttcgcatacatgaactcatatcaagtaaataacctcgccacagtcgtatgatgtagcatctatgaggttagtgctgttaccagttaccctattttacattgaagaaaccccactccattgagaaaaaaaatagcagagggagccttccaagtttctaggaagctg

SEQ ID NO: 242613 - DNA, 633 bp, Homo sapiens
ccttactcccctcttagctcccatctttcttccccaaagaaagcctcttttctttctttctctcatcttttgagtccatacctcaggggggctgtaactgggaccccaggcctgagacagatcaatggcaattgattaattcagagggagagagtggcgtgtatgtgcgtaggtgagagaaagagaaatagagacagacacagagacagagacagagacagactgaaagagagacagacagacacagagactgtttgcatgcatcctgcaatcatgccctgctattttagacttaagcttcactcttgaccatttattttttttaaaaagccagaataatagatcatgataacattataatagcaacctgatgataacgaatgcaacataggtcattaaggaacgtaytcagggcaagacttgctaacacaataaagctcactatgtgccaggaactgttctgagcacttcgcatacatgaactcatatcaagtaaataacctcgccacagtcgtatgatgtagcatctatgaggttagtgctgttaccagttaccctattttacattgaagaaaccccactccattgagaaaaaaaatagcagagggagccttccaagtttctaggaagctg

SEQ ID NO: 242614 - DNA, 468 bp, Homo sapiens
tacaacataccagaatctctgggacacagctaaggcagtgtttggagggaagtttacagcactaaattmccacatcaaaaagttataaagatcccaaattaacaactaaacatcaaaactagaacaactagagaagcaagagcaaaccaaacccaaagctagcataagacaagaaataaccaaaagcaaagctgaactgaaggaaattaagacaaaaaaaaattatacaaaagataaatccaggagttgcttttttgaaaaaattaaaaagatagacaattagctagactaataaagaaaaaaagagaagactcaaataaacataattagaaatgacaaagaaaacattactaccaaccccacagaaatacaaataactgtcagagaccactatgaaaacctctatgcacacaaactagaaaatctggaagaaattggtaaattcctggacacataaaacctcccaag

SEQ ID NO: 242615 - DNA, 468 bp, Homo sapiens
tacaacataccagaatctctgggacacagctaaggcagtgtttggagggaagtttacagcactaaattaccacatcaaaaagttataaagatcccaaattaacaactaaacatcaaaactagaacaactagagaagcaagagcaaaccaaacccaaagctagcataagacaagaaataaccaaaagcaaagctgaactgaaggaaattaagacaaaaaaaaattatacaaaagataaatccaggagttgcttttttgaaaaaattaaaaagatagacaattagctagactaataaagaaaaaaagagaagactcaaataaacataattagaaatgacaaagaaaacattactaccaacyccacagaaatacaaataactgtcagagaccactatgaaaacctctatgcacacaaactagaaaatctggaagaaattggtaaattcctggacacataaaacctcccaag

SEQ ID NO: 242616 - DNA, 623 bp, Homo sapiens
caacacatgtatgttgtgtatttgcatggaactatactcttctaaagtaacttaaattgtttgttaacaaatttttttagactcttagcctgtattcctggatatgtttgttatttccaattttttaccactataatattgcaatgagtaacctcgtacataaatttggcaaagccatttcagaaatattttctaggcacacttagggcatgttgtgagtgtttacaacgtgccagtgtgcactattttattagcattatcagctcaatccttgcccacatcccatggtgtatctttgattactattgccttttacagataggaaaactgagcaraagaaagattaatccacttgccttaattcctacaaaatttacagagccagggtttgaatagtctatctccagagcctagacttttactaagaacattgccacaattgccttgtctcctgatattcagatgaaaggggatttcccttcacatcagatgtagcgtatagaagcctcccaattagagagtccagctgggataacctggaaacactctggaatctggagttatccttgggttgccctaggtccacaatgaccacaaagcctatgatgtgcaccaaagtccac

SEQ ID NO: 242617 - DNA, 472 bp, Homo sapiens
taagttcccatctccttgactcaagagatctgtgactgtgctgaataaagtttacttcctttactgaaattaccagaagacatctgcaaagaggtcaagtcactgtaggtcataatcataatatattcacttttggaggcaaaatgcaaaaatgctgctcagaattaagacattttttacacatcctggagcaagaagcaaacaagtgctttaaattctgtgatgactttattttaaattgtgtcacttttacactgcacttattaaaataaatgtgttgaaaattctggagagaagaccagtgtgagaattccacccttgaattaatgtaactgttttctcctagagaaatatgcccagtaggacctggcattaaaatgagaataacttcagccctgcagacaacctcttcaacgttagtgtcaccaaagcagggargggacacaatgaaaacaaatataccatattcact

SEQ ID NO: 242618 - DNA, 635 bp, Homo sapiens
ccaagctctaattatgatcccttcatgtctagcatatcctggacatgctttcctcttggataagaaaataccaaagtgtacaaagaacatcttggaacagggatcccaaaatggattcttggctcrggctccttataacttcctgttcaggtagccatgtttcttgccttgtaaccagatccagtggcagagtcctgtaggaatctcaccaagactgggtgcgaatcatcaatcttactcttgtcaagaaacaatgctgacaagctgttaaaaccaccctgaaacttgccttgaattcatggttacaaagcaacactttgtacataaaatgtgcttcagcacatttggtgcctggaccgtgagtcagtgctgtgtagatacatctcttacttcagcaaaacagctcaggccaattccaggttttttgaattaatacttagatgtggtctgactagttcagaatatgatgagataatgtctctcatgttctggacactattgtccagcactcattttaaaatattctctgtgatctcctctctcagcaaaaatctctgacacctcttcctattggttcacactaaggatgaaccaatcttattgaagaaggaagttcaaccaaagtattattttgc

SEQ ID NO: 242619 - DNA, 481 bp, Homo sapiens
aaaataatcactctgtgttgggctgtcattgtgttctatttttctggsattttaattttttaaaaattgcctttcgctaacttgaaaacaatgtgttttcaggctccaggttgtctgctcactagtgagtggggtcttgggtcaggtcattcagattcccacaggattcattactcacctacattgtggtctgccaatgcacaccatataccaattgcaagtaactatatagcaggcttttgtctctaataaaggagcaggaaatcagaggcaacaactacttcctgacaaattcagttctctctctttcactgagtagatgttcttttgattacttaaacatagaggggaaaaacaagttccaacctctgtgggcaagctttggctagaacgccatccaaaccctgcggggccgctcgtgaggccttgtttttctccgagtctattgctgtgtaatagaaaccttctataggaaattaat

SEQ ID NO: 242620 - DNA, 555 bp, Homo sapiens
gtgttcaaggactccacagatagtttccctcacaacatacccaggcagtaacacarctgatgccaagaatatcctcaaggttgtcgatctttattctgtgggtggatcactagcccaaggtccttgcatcgtgggaggagagactgggatcaaaccatagccctggtctcaagtaactgtatacaaataactgtcagcagatgtcctaaaacatatggacagctagccgatgcaagacattcttacaataaagaaggaagaaggcagccatacagctaggtacttttatttgtgcaaagagtgcccaaggaaagagattagcctgttggacactggagacccaaatcttgaactgactctgttgctagctgctctggttctggacaagtcatttagttgttctgtgtctatgtctactcattcaaaaatgatcttggcaatgtttgatctatctaaataggattattttgaggataaaggatgatgtgaaaagtgaagcattatataaacatgtaatatttggcgttggcattatattaaacaaaggcaacataa

SEQ ID NO: 242621 - DNA, 555 bp, Homo sapiens
gtgttcaaggactccacagatagtttccctcacaacatacccaggcagtaacacagctgatgccaagaatatcctcaaggttgtcgatctttattctgtgggtggatcactagcccaaggtccttgcatygtgggaggagagactgggatcaaaccatagccctggtctcaagtaactgtatacaaataactgtcagcagatgtcctaaaacatatggacagctagccgatgcaagacattcttacaataaagaaggaagaaggcagccatacagctaggtacttttatttgtgcaaagagtgcccaaggaaagagattagcctgttggacactggagacccaaatcttgaactgactctgttgctagctgctctggttctggacaagtcatttagttgttctgtgtctatgtctactcattcaaaaatgatcttggcaatgtttgatctatctaaataggattattttgaggataaaggatgatgtgaaaagtgaagcattatataaacatgtaatatttggcgttggcattatattaaacaaaggcaacataa

SEQ ID NO: 242622 - DNA, 555 bp, Homo sapiens
gtgttcaaggactccacagatagtttccctcacaacatacccaggcagtaacacagctgatgccaagaatatcctcaaggttgtcgatctttattctgtgggtggatcactagcccaaggtccttgcatcgtgggaggagaractgggatcaaaccatagccctggtctcaagtaactgtatacaaataactgtcagcagatgtcctaaaacatatggacagctagccgatgcaagacattcttacaataaagaaggaagaaggcagccatacagctaggtacttttatttgtgcaaagagtgcccaaggaaagagattagcctgttggacactggagacccaaatcttgaactgactctgttgctagctgctctggttctggacaagtcatttagttgttctgtgtctatgtctactcattcaaaaatgatcttggcaatgtttgatctatctaaataggattattttgaggataaaggatgatgtgaaaagtgaagcattatataaacatgtaatatttggcgttggcattatattaaacaaaggcaacataa

SEQ ID NO: 242623 - DNA, 555 bp, Homo sapiens
gtgttcaaggactccacagatagtttccctcacaacatacccaggcagtaacacagctgatgccaagaatatcctcaaggttgtcgatctttattctgtgggtggatcactagcccaaggtccttgcatcgtgggaggagagactgggatcaaaccatagccctggtctcaagtaactgtatacaaataactgtcagcagatgtcctaaaacatatggacagctagcygatgcaagacattcttacaataaagaaggaagaaggcagccatacagctaggtacttttatttgtgcaaagagtgcccaaggaaagagattagcctgttggacactggagacccaaatcttgaactgactctgttgctagctgctctggttctggacaagtcatttagttgttctgtgtctatgtctactcattcaaaaatgatcttggcaatgtttgatctatctaaataggattattttgaggataaaggatgatgtgaaaagtgaagcattatataaacatgtaatatttggcgttggcattatattaaacaaaggcaacataa

SEQ ID NO: 242624 - DNA, 573 bp, Homo sapiens
caacctacaagagacaatctgcaaatctctttgaagaacaaaagtttatgtcgttagtctcattaaacatattgccccacacattagttgctcctgagaatcacaggctgtggaataatgaacaagtgtaaccactgattgctttctctggaaagtaagttatagaagtgatttgaagaagttttggaaggaggagactacacagttctcagtgaggctgtgttctaaaaatattgcagaataagattgctatagaatttgttgtttgtcggaaagcttctaattgtgggttgatgtttcagtgttatcaggggatactcttgaatcattatgcacagtgtattcatttattcmttttttttaatgtggaagaagtttaagtgtgaagattttaatatcagtttaagtcccattacgttagatattttcttagaccctagccaacagaaacagaaaacatattgaactaaacaagttagcattcagatggataccccatatcctgtaccatatttaaataatttaagaaaaagtcttgatgcttgctttctcctctcctataccttttcccat

SEQ ID NO: 242625 - DNA, 396 bp, Homo sapiens
  misc_feature (1)...(396): n = A,T,C or G
cctgtcacatgcagtgtggtttgcacaggaaaagccaacaaagacatattagggaatccttcctgttcattaaagcccttctattttgtaraaggtatttctctttagttaggtaggatctgaatcaaaagagtggatttgaatgctccctggtctaattccagttctttcaataggccatgtggttgctcagtccattctatcaggtagtgtttctgattcctcctnttacctatgactccaaaacattatcatgagatcttctacctgaagcagtttcacagttggttgtaataaccaaggtccgaggctgttagagacaggaattttatgcgcctggaaataaaagacaacccccacgctcttgtctgtgataactgagagaaacaagatggc

SEQ ID NO: 242626 - DNA, 579 bp, Homo sapiens
ttgccccacacatgcatagcttctcccattattaacatcccccatcagagtggcacattcgtcacckttgatgaacctacattgagataacataagcaccccaaatccaccatagtttacattagagttcactcttggtattgtgaactgaggccactagcctcatgactggagctgtcatagtacttgggaaagttcagttcaattgagtgcctaatgtgcgccaagcatactttgcagagtggtatgtcaaatatggatataaacagcacaagtcctcctttaagaaacttaccatttcagaccccatcgtcttagcccaaaatctccttaaactgataagtaacttcagcaaagtctcaggatgcaaaatcaatgtgcaaaaatcacatgcattcttatataccaagaacggagaaattatgagtgaactcccattcacaattgcttcaaattggtattgtatattctatgggtttggagaaatgtatcatgagatgtgctcaccattataagatgatataaaatagtttcactgccctagaaatcctgtgttctacctattaattcctttcttac

SEQ ID NO: 242627 - DNA, 527 bp, Homo sapiens
ggtattgtgaactgaggccactagcctcatgactggagctgtcatagtacttgggaaagttcagttcaattgagtgcctaatgtgcgccaagcatactttgcagagtggtatgtcaaatatggatataaacagcacaagtcctcctttaagaaacttaccatttcagaccccatcgtcttagcccaaaatctccttaaactgataagtaacttcagcaaagtctcaggatgcaaaatcaatgtgcaaaaatcacawgcattcttatataccaagaacggagaaattatgagtgaactcccattcacaattgcttcaaattggtattgtatattctatgggtttggagaaatgtatcatgagatgtgctcaccattataagatgatataaaatagtttcactgccctagaaatcctgtgttctacctattaattcctttcttacctataacccctgaccaaaaaaagtatttttactatctacttagttttaccttttccagaatgtcatataattggaatcatgcaa

SEQ ID NO: 242628 - DNA, 644 bp, Homo sapiens
actccaggcgccgcactgcctcatagcagatagaatgaagtaaaataatagaagctttcctgctattctcaacattaggttgaattccggtcagcccttacaggtgaatttctggagggtttttttttttttttggtttctgttcaccccccatgctgtaggccataattcacgggaaggggctccagtgaaaggctggccccaagttcaggcaggatggtgccaagggagccctcctgcaggaagacagattaaggggcatgtggaccattyggtggttgagtgcaaaatttagtgcctacattgggctcccagagaattactgcctggctgatttagacctgacaaccacacataaacatgaatacttagatttgcacatactcctttgcacagtgactaactgcatctgcttaaattcagtggggaaggaaagaaaggcagcaatggccatctcccccacccaccggggagcctatgtcctggcaagataagctctcagcctgtctggtttgagctaggctcattctttcccccatatgatttctatttgaggtcccccaaaattcagatgacctcactgggatatgaatcagcagcctgaaaactttccctttttggtataatgataaaatgcagttgtt

SEQ ID NO: 242629 - DNA, 574 bp, Homo sapiens
aaaacttatttgagggaataatcgaagaaaatttccctgtccttgctagagatctagacatccaaatacaagaagttcaaagaacacctgggaaattcatcacaaaaagatcttcacttaggtacatagccatcagattatctaaagtcaagacaaatgaaagaatattaagagctttgagaaaaaagcatcagataacctataaaggaaaacctaycaattaacagcagacttcttggcagaaaccttacaggccagaaaggattggggtcccatctttagcctcctgaaacaaaataattgttagccaagaattttgtattcagcaaaactaagcttcataaatgagggaaagataaagtgttttttggacaaacaaatgctgaaagaattaatcactactaagccagcactacaacatgcctaaagaagttctaaatctttaaggaaaacctcaaaatacaccaaagtagaacctccttaaagcataaatctcacagggcctataaaacagtaacacaatggaaaaaaacccaggtattaaggcaacaactaacatgatgaatagaacagt

SEQ ID NO: 242630 - DNA, 621 bp, Homo sapiens
ttatagacatactaactcctacatgtaaacggagatgtaaggagatattcgacttacgattccgaagctgtggggagagatcaggctggataacaatttgtcagtcaccagcttatagctaggtacttataggtgagaggtgggtaagcccaattgtgaaggtttatagaccaaatctwtacttatagagatgaaggagagctgaggggagggcacagcataaagggagggagcctttctgggtggtagtgatacgagcatgcttttaggctgaggaaagtgagcctacttagagaatgaaatgtttgaagagttagggttgagatgggatttctcagggaaaaaatggtaggaacaaggtggaggactgggtcagcattaggtagagttctggctgataggacaaagaaccttttctctgaaaccaaaggagaggaaggagataaaattttaagatgtatgcaaatgtatgtatgtgtgagtgtatgtgctttaattttttcaagaagtagtagtcaatgtggttgtcagcaattagaaatatgaactggcttgaaatattaaaaagttagagcaaaatggagaatagtcagtgtatattgatgtgaagtaaaacatata

SEQ ID NO: 242631 - DNA, 384 bp, Homo sapiens
acatcagagtctgatgggcaatattttcctgagtgacatgtgcctagagaggtattggaggatgtagagagacatctgttttgatttgtgacttataatatgcaaagaactgcagagagaaaagagaaagagagagagagagagaaggagaggagaaaaagaaaagagagatccagtagagggaaaacataagtccttgttttctccttctctgtgccaagtaggtatatgctgctgctaggaccatttggccagactggcagtcaacaatgacagcagtctagctgtggsttggggccagtgggaggcaggctgcgtggcagactgagcatgggtgaggggcaggtggaagtgggaagtactagaaggaaattgttgcagcca

SEQ ID NO: 242632 - DNA, 619 bp, Homo sapiens
ggttcctattccctcacacttaagctcctgcccctgggcccctgtaggcgcctgaccgggaagcaaatagaaagaacaaatctttccaacmctgttttccatttttgcatcgaaaagaagttggtctaggtcagtgcatttaaagcctttttgtaatagggaagctcttcaaatacgatctcctgtaagctcacgcacagaactggccaatgctgattgaacagtcctaattgaattgtgaggcagggaaaggtgggtagctgagccttacccactttgtctcatctctgtctctcctttctgtgggcctggatgagctatcaaaatcccttctgtcatagctaagggcagagcagtgtgagacccagcaggctgggacacactgaagagggccaggacctggaaataaactacatggggcaggtcttcctagctcatgtcagtattgcaccaagggagctgggccaaacttagcatacaagccctgtaggtatgagtataggtggagatggggggtcaagttggcctcagctgagaagagagaggccctctgtgttaggaacccaggaagggccagagaccatgagcagtttgatgtgaccaaaatggaactaaatgg

SEQ ID NO: 242633 - DNA, 418 bp, Homo sapiens
cgagtccttggctggaatggtcatttgtgtggaatgggcattcactgagcatgatttgtatgctgggaagggtctatttacttaatttgttgaattggagaatataagagctraaaagatcatttaaggtgaactaatcgaaggtgcacactttatagaggaggagacagacactaaagacttgcctctggctatacaaaaattgtggcaagaccaggctatgaacccagatcttccatggagcagttcacttcatctgagttcagtttcttcatttgtttagtgggaatgatcatgtctccccagctcccagggttgttgggaggttcaaatgaggacatgcttatggaatctttataaattgcaaaaagccatgcaaatggaagttacttctgcttcttctgttcccaactgcttc

SEQ ID NO: 242634 - DNA, 575 bp, Homo sapiens
aagcttttaaaatctgattccaacagaaaaagtcattttgcattccagtatgaatgccatttcctccaagtacagccctggccacacgcttgaaggtcctctcccctgcacagggcccatgtagtggcagaatgtgccctcagccagtataaatggcagggaaggagagttcctgaagtgtctagtgtttgaagtgggtgcctaagtgtccccagcagcaaggaggagaggagagtttgaatgcttccttgcttcagggatgcgagtccttggctggaatggtcatttgtgtggaatgggcattcactgagcatgatttgtatgctgggaagggtctatttacttaatttgttgaattggagaatataagagctgaaaagatcatttaaggygaactaatcgaaggtgcacactttatagaggaggagacagacactaaagacttgcctctggctatacaaaaattgtggcaagaccaggctatgaacccagatcttccatggagcagttcacttcatctgagttcagtttcttcatttgtttagtgggaatgatcatgtctccccagctcccag

SEQ ID NO: 242635 - DNA, 418 bp, Homo sapiens
cgagtccttggctggaatggtcatttgtgtggaatgggcattcactgagcatgatttgtatgctgggaagggtctatttacttaatttgttgaattggagaatataagagctgaaaagatcatttaaggtgaactaatcgaaggtgcacactttatagaggaggagacagacactaaagacttgcctctggctatacaaaaattgtggcaagaccaggctatgaacccagatcttccatggagcagktcacttcatctgagttcagtttcttcatttgtttagtgggaatgatcatgtctccccagctcccagggttgttgggaggttcaaatgaggacatgcttatggaatctttataaattgcaaaaagccatgcaaatggaagttacttctgcttcttctgttcccaactgcttc

SEQ ID NO: 242636 - DNA, 418 bp, Homo sapiens
cgagtccttggctggaatggtcatttgtgtggaatgggcattcactgagcatgatttgtatgctgggaagggtctatttacttaatttgttgaattggagaatataagagctgaaaagatcatttaaggtgaactaatcgaaggtgcacactttatagaggaggagacagacactaaagacttgcctctggctatacaaaaattgtggcaagaccaggctatgaacccagatcttccatggagcagttcacttcatctgagttcagtttcttcatttgtttagtgggaatgatcatgtctccccagctcccagggttgttgggaggktcaaatgaggacatgcttatggaatctttataaattgcaaaaagccatgcaaatggaagttacttctgcttcttctgttcccaactgcttc

SEQ ID NO: 242637 - DNA, 485 bp, Homo sapiens
tacatgtcccctcacccctagctgaatcccatttacctttcaaaacttaacccagtcattgcctcctccagccctccctcytccctcaagctgagcctcttcagctcctgtgatggcccccgggacacttactcgtctcccagtgcttgctgccttgtgttgtaatcctctgcctgtctgtgttctcccaggagggactgtttgaaaatggagactgtcttttcttctgtatcaccagagcctggcccagagtaggtgtttaatacatcttagttgagtgaatgaaggaggggctgacaggcactgttgtttcctacccaatagaaaaccaattccctgtttcttgcctgcctcccattggcagggtgaaaaagccaggtatcactttcttaatctcctctgcagttagttctggtaggtgaggtatggggagaatctaaagtagagggaatgctccagaaaaggtttttctaccccccagtaaa

SEQ ID NO: 242638 - DNA, 524 bp, Homo sapiens
gggctgtcatgaggactaacgagtatgtgaaaagcacatagaatggttgggaacatggaggtactgtagatgtggctgcaaaataataatacaatacaatacaatacaatgcaatacaatacaatrcaatgcaatgcaatgcaatgcaatgcaatgcaatgcaatgcaatgcaatgcaatgcaatgcaatgcaatacaatacaatacacaacctcctccctgcctgtacttgccatggctgtaccaaagtcctgtgatggaatttagcatgtgaaaccaatagcaagccctgcttctccaaaacagagatgagtttcacactgtgactttgcccctacatcccagcctctctacaagagcaggggacacctaggaacaccttattatctccatccaggaggtagccagttaaagaacccataaagtctcagctgggagatagtctgaaagtgggaaaggtttagtggaatgtacactcctagatcactgggctgccagaggagagatgatctcgggcaggcctg

SEQ ID NO: 242639 - DNA, 528 bp, Homo sapiens
acagggatttatcactcatacagyaaatttgaaatgtagattcttacctaacatgaagattcccttctcaggggatagaccaaattcccttctcgggggatagaccaaagcccgccagctttagacagatgccttctctttgcatcttcatagcctctttgagagaggtgaacttggagtcaggagatctgagatggaattttaaccttgtccatttgttgttttgtgatctcaggcaagtcaataagcctcaactttgttgtcataataagaattaagaatggtcataataagatggtcttcacaaatttgttctttggacaccaaacaccttagttattgtcatatgctctgggatagaggtgagatcttaggaaggaggcagagacagcacagaagtccctccattcacaaacagggtctgcccaccatcctttaaggagcctctgcagcttgtttataaaggagatcttgtcctgagagcattatgctcctgagctggccagctcagcccttccctggctccag

SEQ ID NO: 242640 - DNA, 486 bp, Homo sapiens
acctgtttgcagagagagggagagttgccatattaattattaagcagacctatctgagccaaagagagtcatggaaacttcattattatgsgtggtatgtggctgtctttggaatattctgcttgcttggtttctaatttccttttcttacatgagtctttctccctcataaatctttgcatctcaatgttctgttctctcctcccttgtgttctgaactaggagttcccacaaaccctctgtggttaaatctactcctctaaacaccacaggctccaggcagcattgttcatgaaagcgggtgacaccctttggcctccgccctctagaagggcctgctgagtgaaggcccagtcagggaggggagggatggaggggtgttgaggagattgaggtgggcagggagtccccccacctctcccagctgcccaaggaaacactctccaactgtttttctagaacaaaccaaccaacaagcaccaggag

SEQ ID NO: 242641 - DNA, 635 bp, Homo sapiens
tcctcttgcacaagttatttaaactgtttcaacttcctcctctgtaaaatgaggataatagtacctacctcacagtatttccaggattaaataagctgatgtaggtaaagctctgagcacagcagctgcttgtaaaaagagcttgataaatgtcagctgctgttatttggtgacaatggagccaatcattgtggtttacacttagaaaccagagtttcttagcaagggaatcggcccrtagataactatatgtaagctacgaaggacgcatctgcagttgaacttgtggtcctgtgcaaagatcacagcaggactggatgtccgtgtctctcctctactactctgctactgtgtgacttctatttaattagtgcagaaacccctgcccagcctaccttcccagagtgtacccctcaggctggaaaagggtaccatgaacatgaatgtatatcctgagaagttaagagccttctatgcaaacagttatttgttgttatttttaggaaaactgtatagggagggtgccctgaagttgggattctgctctgtcctccctccgcaacccttaggatcttttgcactgttctttggtgtccagaaaaaaacccagcctagctttctttgaacagttagtg

SEQ ID NO: 242642 - DNA, 635 bp, Homo sapiens
tcctcttgcacaagttatttaaactgtttcaacttcctcctctgtaaaatgaggataatagtacctacctcacagtatttccaggattaaataagctgatgtaggtaaagctctgagcacagcagctgcttgtaaaaagagcttgataaatgtcagctgctgttatttggtgacaatggagccaatcattgtggtttacacttagaaaccagagtttcttagcaagggaatcggcccgtagataactatatgtaagctacgaaggacgcatctgcagttgaacttgtggtcctgtgcaaagatcacagcaggactggatgtccgtgtctctcctctactactctgctactgtgtgacttctatttaattagtgcagaaacccctgcccagcctaccttcccagagtgtacccctcagkctggaaaagggtaccatgaacatgaatgtatatcctgagaagttaagagccttctatgcaaacagttatttgttgttatttttaggaaaactgtatagggagggtgccctgaagttgggattctgctctgtcctccctccgcaacccttaggatcttttgcactgttctttggtgtccagaaaaaaacccagcctagctttctttgaacagttagtg

SEQ ID NO: 242643 - DNA, 576 bp, Homo sapiens
ttttgcccaggctggagtgcaatggtgcaatcacagytcactgcagtctctacctcaagtgattctcctgcctcaggctcccaagtagctgggaccacaagtgtgtgccactatgcctgactaattttttaaatttttttgtggagacaaagactcactgtgtctcccaggctgtcttgaactcctgaccttaagcgatcctcttcagcttcccaaagtgctgggattacaggcatgggagccaccttgcttggtcacaatgaatgtttgctcattcttctgtctgtatagaatcctaaatgtgatgctgtgtggcaatggggaagatcatacaagatacagtttctgtccttgtggagatgacagtctactctggaaaacagaaagttgtacacaaacgtgacccagcaacatggcagcaaatgcaaaaatctcaaggctgcaaaccaactccagagggcaaaaatgatccgagttcagagggataaatccaaggaagcagggtggagtgggggaagttctgagctgagtttttgaggccagttggctggtgatggtggaagataattacttatt

SEQ ID NO: 242644 - DNA, 646 bp, Homo sapiens
atcagcatctgtacaatactgattggcatctctttattaggtcttaatcaccctcaacactgttttatggtttcaagtgtagaagtcttgtataacttttttwaaaaaattttgaaggtatttgttatactaatactgttataaataatgatttttaattttttccaattgtatgttgatagtatataaaaataaaataaaaattttctatattaactttgtatcttaaaccttgctgagtttacttattagatttagtaggattaaggagtagattcccttcaagtttctacctgcaaaatcatgtcattgtagagaaagataattttacttctttctcagtctttatgacttctatcttttcatacctaatggcaagacctcaagtacaatgttgaatagcagcatgagagtggatccctaccttatttttgaccttagagagaaagtgttccatatcttatcattaaatatgatgttatgtataagcttttatagatgcattttatcaaattgaggaaattctgttctattacttgtttgtctagaggttttatcacggaatagtgttgaaattttcaaaatcttttcctggatctactgagatgtttgtatttttcttttttatactgttaatgggatgaat

SEQ ID NO: 242645 - DNA, 646 bp, Homo sapiens
atcagcatctgtacaatactgattggcatctctttattaggtcttaatcaccctcaacactgttttatggtttcaagtgtagaagtcttgtataacttttttawaaaaattttgaaggtatttgttatactaatactgttataaataatgatttttaattttttccaattgtatgttgatagtatataaaaataaaataaaaattttctatattaactttgtatcttaaaccttgctgagtttacttattagatttagtaggattaaggagtagattcccttcaagtttctacctgcaaaatcatgtcattgtagagaaagataattttacttctttctcagtctttatgacttctatcttttcatacctaatggcaagacctcaagtacaatgttgaatagcagcatgagagtggatccctaccttatttttgaccttagagagaaagtgttccatatcttatcattaaatatgatgttatgtataagcttttatagatgcattttatcaaattgaggaaattctgttctattacttgtttgtctagaggttttatcacggaatagtgttgaaattttcaaaatcttttcctggatctactgagatgtttgtatttttcttttttatactgttaatgggatgaat

SEQ ID NO: 242646 - DNA, 586 bp, Homo sapiens
ataatggtgctgataataatacctaacatttattgagtaattaaggttttgtaggcatggtgctaagcagcttatgctcccagcaaccctacagtgttacgcttaccttatggaggaggaaactgagacttagagaggttagttgacttgcccaagattatgcagttaaaaagtaaagaagtcagggttggaattgtgaaaaaattgaggagtgttccttattcactgagacttgtcttagatgggggcctgggccctgacaggtaagagataggttttacactcatattttgactgtttttccagaagtagagtcagcaagagatttttcaatgtacacaatatactgtcaaataccagtatgtttatgtgttggggtggatcrgggagcagccagttttcaaagggcaaactgaaaattaaagtttgagacagagctaacgtggactgagacgggatggacaagggactgatgagaagagcagaaccaaatggggacacgaccaaggaagaaaccagaaggtgataacagaccaccagtattctgccctgagcatgtgccaggcactgtgcatggcatgtgtag

SEQ ID NO: 242647 - DNA, 534 bp, Homo sapiens
gtgggggacagttaggaaaggaacctagtgactgggactgattccccttgtttagccaggtgccattgcaggctggcttctattgatccatctaaccctttgttgatactgctcccaggacttctaaaaggcacctgtacttttaaggcaaaacataaagggactttaagttatctttggcacaggatgaaaaatatgtccattgcttgagatcaatattgtaaytggcacaatattaacaaatggcagaaaacagattctttcagtatttatgtcccttccgtaattcctatcaaggaaagcaacttcatgttggaaaaggttcccacagatattggtgacagataatggaagcccaagagagaaggttctaaatgaatgcttggtgcccagcggcctggccagacaagttatattgcaggagacttgctgtctgccttgaagcactgagactttgaggaaaggtgctggaagcccagtcatgggaaaaggtggaaatttttgacctttcaaataaaggtcaggcagtttgga

SEQ ID NO: 242648 - DNA, 534 bp, Homo sapiens
gtgggggacagttaggaaaggaacctagtgactgggactgattccccttgtttagccaggtgccattgcaggctggcttctattgatccatctaaccctttgttgatactgctcccaggacttctaaaaggcacctgtacttttaaggcaaaacataaagggactttaagttatctttggcacaggatgaaaaatatgtccattgcttgagatcaatattgtaattggcacaatattaacaaatggcagaaaacagattctttcagtatttatgtcccttccrtaattcctatcaaggaaagcaacttcatgttggaaaaggttcccacagatattggtgacagataatggaagcccaagagagaaggttctaaatgaatgcttggtgcccagcggcctggccagacaagttatattgcaggagacttgctgtctgccttgaagcactgagactttgaggaaaggtgctggaagcccagtcatgggaaaaggtggaaatttttgacctttcaaataaaggtcaggcagtttgga

SEQ ID NO: 242649 - DNA, 560 bp, Homo sapiens
ctgggcatttttaggtataagggaaattcccaggaggttttccatttattgcatttaaacaatgagctttaataacctgctctcttcatagaattgtttatttggtttttaatttttattccttagggatttttgagttatgtgctagcytttacccatataacaaaagcccctagaaagctgcctcagacccactgtggaaggattaaaggaacaaagaagaaaaagaaacaaacacatataatgttttctacttcattgtagtatctgtgtcctctcactgtcaacagatatcatattttgatactgtcaggattttatatatatgtaacagtctttcactccatcctccttatcccaaggctggcctttctaaattagtttttctattctgcagtggtctagtgaaagagagacctataacattaatagttggaattataaggagaagatagtagagtaaattggttaaaagcaaggagctgagaacatattcaatcaggagttactttacgtgatccataatacatggacttcggttcatccactttgattgctga

SEQ ID NO: 242650 - DNA, 541 bp, Homo sapiens
aaatatggaaaagggtattggctgtgcatgctcttaagtyggccctcttctccccttaaattctctccaccccaaacatcagcaagaaaactggtagccagagacagcagtgaggagagttggataaatcacagcatcacagaggctggctctggctactcgccttatcatagtgctctggtgatacgtgttcatggggcagggccactggagggagctcctgcaaacagcattcctgtgggaagcgggtattccctccagagtcccccactcccacccagtctcatttcctccttacccattcctctctcctcagtcggcccttcctttaccatcccatcccatcatacactgcccctcctcttcccctctccctggagaggaaggttgttttgcccaatacttttacccttgttctctggaagtttccgggcagtggtagaagtgagaggaagtccatttgggtggagaaatattcagcacaggcagtcttgtccgctgggccagctggggctaggctttctggggagcagcaatggcc

SEQ ID NO: 242651 - DNA, 432 bp, Homo sapiens
agaattgctagcagataatggcccgtgtttagattgtggctgataagactctgtccatcccatgtcaagagatgactgaaaagtgaaaaattaattccattatccagctgttgctgctgttaagtgccaaaatacccagatatttccaaacatctgagtatttgacagcacgtttttactatagatccagatgtttggtattgtgtagacaaagaccaaacctaaacacggaaaagaaaaataackaactggaaataaggaagccaagaggtggttaagaggacagcaagaaggggaattgagtggtgatgggaaagaaaaggagaaattaaagacaaaaaaatgtaaagaaaggtaaaacataaaaaccagtaaattttttaaaaaagaacaacattctatttcttcatagcccacaccttggcctgattc

SEQ ID NO: 242652 - DNA, 432 bp, Homo sapiens
agaattgctagcagataatggcccgtgtttagattgtggctgataagactctgtccatcccatgtcaagagatgactgaaaagtgaaaaattaattccattatccagctgttgctgctgttaagtgccaaaatacccagatatttccaaacatctgagtatttgacagcacgtttttactatagatccagatgtttggtattgtgtagacaaagaccaaacctaaacacggaaaagaaaaataactaactggraataaggaagccaagaggtggttaagaggacagcaagaaggggaattgagtggtgatgggaaagaaaaggagaaattaaagacaaaaaaatgtaaagaaaggtaaaacataaaaaccagtaaattttttaaaaaagaacaacattctatttcttcatagcccacaccttggcctgattc

SEQ ID NO: 242653 - DNA, 432 bp, Homo sapiens
agaattgctagcagataatggcccgtgtttagattgtggctgataagactctgtccatcccatgtcaagagatgactgaaaagtgaaaaattaattccattatccagctgttgctgctgttaagtgccaaaatacccagatatttccaaacatctgagtatttgacagcacgtttttactatagatccagatgtttggtattgtgtagacaaagaccaaacctaaacacggaaaagaaaaataactaactggaaataaggaagccaagaggtggttaagaggacagcaagaaggggaattgagtggtgatgggaaagaaaaggagaaattaaakacaaaaaaatgtaaagaaaggtaaaacataaaaaccagtaaattttttaaaaaagaacaacattctatttcttcatagcccacaccttggcctgattc

SEQ ID NO: 242654 - DNA, 520 bp, Homo sapiens
agatctattgaacacccccttatgccacgtcacactatgtggtcagcaagtacaaatgatcrcagtaacatttaagttagctagaactcccaggaaacaggacattctgagtcatggacatttccggttgaaaactagtgttcattcctgtctcataatatatgtagaaacaattttcttgctcctattctgttattgttacatattatggcttttataaaatttactggatcgtgggaaacaattttcatgttcccagtagctgaggcagccactatataccattcaacagccagagcctttttgtgagagtgatttctttgtgttttttaatttattattttaaaattaatattattttaatagaaagataattgtatatgtttatggggtataatgtgatgttttgatatacaatgtgggatgattaaatcaatctaattaacatatctattacctgacattatttttcatggtgagacatttgaaatttattctcttagcaagtttgaaataaaca

SEQ ID NO: 242655 - DNA, 386 bp, Homo sapiens
ttctcagcatctctgcttttgcaattagttttcatctcctcaaaggagagggcctctctgcccacaggtgctgcatttggctgttaggtgcttaataattaattgcttagatttataatttttttcttmttaaatccaataggcattctagctcacttataagattgactcagattttaaaagggctatacttttttttccaaaaaaatccataaattataaactaatgtctatataacatcgaaagttatgtttaaaagggaaatataaagtggtttcccataatcactgccagcctaatagaaataggatcagaaattctgtggctttggcaggaaaataataaaggttgttatgttattcagaagtagcttaaaaataaacaa

SEQ ID NO: 242656 - DNA, 661 bp, Homo sapiens
  misc_feature (1)...(661): n = A,T,C or G
nnnnnnnnnnnnnnnnnnnctctaataaatgttggctgttgcatgtctaaatactttattgcagcatcttatatagtatatatttccatgttctggacacaaatatttttctaaatattaagggaaagtggtggctttgtaatatgccaggggaattytttgatagtcaatatattgtttatttgtacttaaatatttcatcaataatctggaaaagagaaatagcctgactacggctagatactgtttagaggctaagatttctatcatgaactgcttttcaattgttatattttatggcacagattcagtgggaatctgatctgctaaaatatttgggctgtgaaaactcccacactgtgacagatgtcaagtccaattaagtgactcatgtccaggtttctgtccaataggatttcccattaaatatcaatttaggggaaaaaaattccatcccccttcctaagcctttatctcttccaccatctccaggctgaatcaattggtaccaggagagcccagaagccacacacgcatctctgcctctttgctctggctctcccaccctcttcccgtctttctctgcttccttgtcactgttactccaggagacgttcacttttcaccaacctttctccaagcatctccaagccactgacta

SEQ ID NO: 242657 - DNA, 567 bp, Homo sapiens
taaaaaaagggcacagtaatcaagacagtgtggtatttgtgaagaaacagacaaaaacatcaatgaaacagaatagagagctcagaaatagatccacataaataaagttaactaatctttaacaaaggagcaaaggcagtacagtggaraacagattgtcttttcaacaaatgaagctggaacaatgaacacccacatgcaaaagaaaaaaaaaagaaaacaaaagaatctagacacagacctacattctttataaaacttaactcaaaatgaataataggcctaattgtaaaatgtaaaaccacaaaaatcctagaagataatataggagaaaatctagatggccttggtgtttggtaacgactttttttttttttttttttttttgagatggagtcttgctctgtcgcccaggctggagtgcagtgatgtgatctccgctcactgcaacctccgcctcccgggttcaagtgattctcctgcctcagcttcccaagtagctgggattacaggcacgtgccatcatgccctgctaatttttctatttttagtagagacgaggtttca

SEQ ID NO: 242658 - DNA, 567 bp, Homo sapiens
taaaaaaagggcacagtaatcaagacagtgtggtatttgtgaagaaacagacaaaaacatcaatgaaacagaatagagagctcagaaatagatccacataaataaagttaactaatctttaacaaaggagcaaaggcagtacagtggagaacagaytgtcttttcaacaaatgaagctggaacaatgaacacccacatgcaaaagaaaaaaaaaagaaaacaaaagaatctagacacagacctacattctttataaaacttaactcaaaatgaataataggcctaattgtaaaatgtaaaaccacaaaaatcctagaagataatataggagaaaatctagatggccttggtgtttggtaacgactttttttttttttttttttttttgagatggagtcttgctctgtcgcccaggctggagtgcagtgatgtgatctccgctcactgcaacctccgcctcccgggttcaagtgattctcctgcctcagcttcccaagtagctgggattacaggcacgtgccatcatgccctgctaatttttctatttttagtagagacgaggtttca

SEQ ID NO: 242659 - DNA, 567 bp, Homo sapiens
taaaaaaagggcacagtaatcaagacagtgtggtatttgtgaagaaacagacaaaaacatcaatgaaacagaatagagagctcagaaatagatccacataaataaagttaactaatctttaacaaaggagcaaaggcagtacagtggagaacagattgtcttttcaacaaatgaagctggaacaatgaacacccacatgcaaaagaaaaaaaaaagaaaacaaaagaatctagacacagacctacattctttataaaacttaactcaaaatgaataataggcctaattgtaaaatgtaaaaccacaaaaatcctagaagataatataggagaaaatctagatggccttggtgtttggtaacgactttttttttttttttttttttttgagatggagtcttgctctgtcgcccaggctggagtgcagtgatgtgatctccgctcactgcaacctccgcctcccgggttcaagtgattctcctgcctcagcttcccaagtagctgggattacaggcrcgtgccatcatgccctgctaatttttctatttttagtagagacgaggtttca

SEQ ID NO: 242660 - DNA, 396 bp, Homo sapiens
caatttatcgagcacctacttattttcaggtgtaaaattatgtactgggaaaactgtgtaaactcctttagcaggtgttgtgggtgcctgcaacccacctcaaggcagccctgcggacaggtctgtgcaagttgctagcatcctacctcagacacacaccagaggacctctttgcttttccacctcagggattcctccagaacttctctgtatactgatgggaattatcccattgagaggcaaaactgatcatgcaggagacagaagagtcaaccagtaggaagggtaatatccattgcacagttgggagggttagccttagacagcagctgggacaagctgaatkgtgatgagtgggaaggagccctgtggataaggttgcacgtgggctggttg

SEQ ID NO: 242661 - DNA, 522 bp, Homo sapiens
gctgggaatacaggcgtgagccactgcacccggccgtctttttattaatttattaaattttcaaggcagtcctctagggtccattcaatttattcttgaaggtcaagaaaagtttcccaagggaaatagtatstaaactgagacctgaagggtaagtagaagttaatcaggtaagggaagctgagggggctttgggtaattgaaaaggaaagtgtttagaaaaacaaaactgcacataccagactgagagacaatgggagcatctgtgaggtgtgtactccatcaagggctctgtaggcaaaaagctaactacctgatttgctagtcagattcttttcagggcctagagccccttaaataagctccattttgtagtaagactttctttggttgctcaaatatctccgaagtaattaaagcctgcagatcttagttgttaaactgcctgatgcgaatttcttataatagaataatttaggtgtctaatggaacagaatataatatgagtagaagacatgagat

SEQ ID NO: 242662 - DNA, 516 bp, Homo sapiens
gtaccatggatgtttgtgcctaggtttcattctcttccttgaggtcagggacattgtctgtgatgttagatcccttatagtacccagacagggctttgtctataataggaaaatggataaacaagaaaatggaggactttgggcatgaggattcactgacctggttctccttgtctttctgtcttgcatgtcatgaacctcactgcatccactctgtttttagatctcactgagttcatgtgttcaaccatacaccttattgkgtgctcttacggacactgtgatgtgctatccagctcctgggggtgctgctgacagcaagccctcagcccttatcacacaatacaattgtctacctaaaaagagccccttctccaaagtcatgccccctttctaggacaacctgcatgaataactggtctatgtgggtttataaaggttcaggcccatacactaatttggaacaacttcagagcctcctatgagattggctggggctatcgtcaagactgcatc

SEQ ID NO: 242663 - DNA, 556 bp, Homo sapiens
ttcttaaggctcattgaggggtagggcagaatccctgtgcctttggttggaattacagaaaccactgctcccactgccctcagcttccccagacccgggaagtgaccattcagcacyggcactgcatagattccagggcatcaccctttacttattctggggaagggaaagcacatagacccgcctctcatttatccctcactgcaacccagtgagacacacattgaagtaaagtgatgttctcaaagccacatgattaattaggaacccaggaattgaacctagctgtttgactctaaaggtctttccactgtgaccttgccctctcctgctgccttattttcaccactcagttctctctgctccatctttactcaatggttgctccacctgcccatacgcaaacactaggaggatgctgctgaaggcctggagcaccttcactgcaaacatagtcagtcagcagcagcagtaagccaggcaaccagtcatgaaactttcccatccaaggtacttctgggggctggaggaaacaataaggagagagagagagaat

SEQ ID NO: 242664 - DNA, 556 bp, Homo sapiens
ttcttaaggctcattgaggggtagggcagaatccctgtgcctttggttggaattacagaaaccactgctcccactgccctcagcttccccagacccgggaagtgaccattcagcactggcactgcatagattccagggcatcaccctttacttattctggggaagggaaagcacatagacccgcctctcatttatccctcactscaacccagtgagacacacattgaagtaaagtgatgttctcaaagccacatgattaattaggaacccaggaattgaacctagctgtttgactctaaaggtctttccactgtgaccttgccctctcctgctgccttattttcaccactcagttctctctgctccatctttactcaatggttgctccacctgcccatacgcaaacactaggaggatgctgctgaaggcctggagcaccttcactgcaaacatagtcagtcagcagcagcagtaagccaggcaaccagtcatgaaactttcccatccaaggtacttctgggggctggaggaaacaataaggagagagagagagaat

SEQ ID NO: 242665 - DNA, 544 bp, Homo sapiens
tcttaaggctcattgaggggtagggcagaatccctgtgcctttggttggaattacagaaaccactgctcccactgccctcagcttccccagacccgggaagtgaccattcagcactggcactgcatagattccagggcatcaccctttacttattctggggaagggaaagcacatagacccgcctctcatttatccctcactgcaacccagtgagacacacattgaagtaaagtgatgttctcaaagccacatgattaattaggaacccaggaattgaacctagctgtttgactctaaaggtctttccactgtgaccttgccctctcctgctgccttattttcaccactcagttctcyctgctccatctttactcaatggttgctccacctgcccatacgcaaacactaggaggatgctgctgaaggcctggagcaccttcactgcaaacatagtcagtcagcagcagcagtaagccaggcaaccagtcatgaaactttcccatccaaggtacttctgggggctggaggaaacaataaggagag

SEQ ID NO: 242666 - DNA, 621 bp, Homo sapiens
ctcatcttgccctccagttccctccagagctttggtgccctgcagcccaccaacagctgggtatcatgagagcaagttgctctctgtctcctgaacacagctgtggctgaggaaactttccttttggattgagtgacaatgaatctttctgtagctttctttcgccagaattgttgtccctttctcggagacctccaccacaaccttgctaagtgaccttgggaagctcaccttttctttctgtgtccacattttctctgcctgtctaatgggatttctggcaggatcaaattaaattactatgtgaaagcactttgaacaagtagactgtacatgtggtggtcacggtggttattggtgtttggtattatgtttcggctctctctgaccatggtcttcctgtgctctgccagctgcagagctctataccctggactatgaagaagagatcttgtgttccagggcccagctgtccckgtgtgagccactcattgttctgatctcctcaagagaggagtgaaaacaaattgaggaatttgaaacttttagaccacacccccaaacacagccctaataaataacatacattcagttttctgaaaagattaaatcttgtccaca

SEQ ID NO: 242667 - DNA, 587 bp, Homo sapiens
gatcttgtttaagaaacctttcctaatccagaattcataaagatattttcctatgttatctgcyagaagctttattgttttactttttccattcaatctataatccacctaagaatgatttttgtatataatgtgaggtaagtttactaaccaacttttgaaggattcttttatcttttggagaagctgaccttctgctgtcctggttttactcctaaatttgaggctaatcaaggtggtaggtctcccaaactcctaacaggtaagtgatctaccagatcatcaaaatatcataaagaatatatacatataatacaatttatacatacagtatgtatgtacattcatacatagtcataattatctaccaagaatagaaagaggtatccctttacaaggagaaagagatataatggttaagtgtgactatgtttttgagacaaggcagaagataagaaatctgaaggactggttatcaacagagaaattagggatctatttatttatttatttattgagaccaagtctctcgctctgttgcccaggctggagtgcaatggcactatctcggctcactgcaacctcca

SEQ ID NO: 242668 - DNA, 549 bp, Homo sapiens
taacaagttgccaggtgatgctgatgcagctagttccgagtccacaccttgagaatcagtactctaaagcagtgattctcagccctggctatatrttataatgccccgggggagatttcagaaagcatttcctggttcccacccccagagatcctgacctaattgaatgggggttgggcctgagcatctggattcttaaaagcttcccagctgatttaatatgataccagggttgagagccacagtatgtctagaagtttcccaggtatacatgctcttcttccattcccagcttggcaactcaggaggaagatgatggatataaacaaggcattattacaagccttgctggatgtaaacaagtcacgtgaaagtcaactgaaaagtaaagaaagaatatctgctctgcttggtatttcctgctggttagggctgatgacagctccagctcacagtgacccagtttggaatgctgggctcctgagcaaaacatctcccccagagtcttctttaattataaaataatcaactccatattccctccttact

SEQ ID NO: 242669 - DNA, 446 bp, Homo sapiens
gaattctaacccgcagcatcgtgggtgggcccaccttgcagcctcatcacggttgagtttgttactcttattgatgaagaaactgagactcagaaggataaaggccccgacccagggttacacagtggtggggcaaggacatgagcccagcttctctcacttagaggaaatctgcaaggacgatcattgtgctgaaagaggagtgggagggggtctgaacttctgaggcagcctcrcttctgcagcgttgtctgtggtaaggacacaccaccctggctgcacattagaatcacctgggcagcttttaaaacttacctcgggccaattaaaacagaatctctggaggggagacccaggcatcggggttttttttccaaaactgcccaaatggttccaatgtgtagcccagattaagaaccactgtttaatggcaaactcagttgcag

SEQ ID NO: 242670 - DNA, 567 bp, Homo sapiens
aagcttgtgcatgcatcacctakttctcatgccatggttttcaactccatcaggtcatttaaggtcttctctgggctgtttattctagttagccattcgtctaatcttttttcaagatttttagcttccttgtggtaggttcaaacatcctcctttagctcagagaagtttgttattactgatcttctgaagcctacttctgtcaacttgtcaaagtcattctccatccagctttgttcccttgctggtgaggagctgtgatcctttgaaggagaagatacgctctggtttttagaattttcggcttttctgttcttgtttctccccatctttgtggttttatctagctttggtctttgatgatggtgacctacagatggggttttggtgtggatgtcctttttgttgatgttgctgctattcctttctgtttgttggttttccttctaacggtcaggactctcagctgcaggtctgttggagtttgctggaggtccactccagaccctgtctgcctcggtatcaccagtggaggctgcagaacagcaaatatcacagaacggcaaa

SEQ ID NO: 242671 - DNA, 551 bp, Homo sapiens
atcagacaaaataaactttaaagcaacagcagttaaaagagacaaagagggacgttatataatggaaaaaggccttgtccaacaggaaaatatcacaatcctaaacatatatgcacctaayactagagctcccaaatttataaaaacaattactaatacacctaagaaatgagatagacagcaacaccataatagtgggggggacttcaatactccactgacagcactagacaggtcatcaagacagaacgtaaacaaagaaacaatggatttaaactataccttggaacaaatgggcttaacagatatacacagaacattccatccaacaactgcagaatacacattctattcaacagcacatggaactttctccaggataaaccatatgataggccacaaaatgagcctcaataaatttaagaaaactgaaattatatcaagcactctctcagaccacagtggaataaaactggaaatcgactctaaaaggaaccttcaaaccatgcaaatacatggaaattaaataaactgcttctgaatgatcattg

SEQ ID NO: 242672 - DNA, 551 bp, Homo sapiens
atcagacaaaataaactttaaagcaacagcagttaaaagagacaaagagggacgttatataatggaaaaaggccttgtccaacaggaaaatatcacaatcctaaacatatatgcacctaacactagagctcccaaatttataaaaacaattactaatacacctaagaaatgagatagacagcaacaccataatagtgggggggacttcaatactccactgacagcactagacaggtcatcaagacagaasgtaaacaaagaaacaatggatttaaactataccttggaacaaatgggcttaacagatatacacagaacattccatccaacaactgcagaatacacattctattcaacagcacatggaactttctccaggataaaccatatgataggccacaaaatgagcctcaataaatttaagaaaactgaaattatatcaagcactctctcagaccacagtggaataaaactggaaatcgactctaaaaggaaccttcaaaccatgcaaatacatggaaattaaataaactgcttctgaatgatcattg

SEQ ID NO: 242673 - DNA, 449 bp, Homo sapiens
ttccttgccttgcttttttctagacaattgtataaacttgaaagmaccaagtagctattacatcttccatttttacttcttggacttagactgttttacttcctatgaagcaaatgcctttgatatatatacactttgataataactggtaacattatctgaccttaaaggttattggtagagatgaacatattataatgttttcttatttctaaaaaaaaaaaaatacatcccgacttcatagcttataattttgcccatatcagatatgaaggtaagaaaagctacacaacctataatttctgtttttgataatagaggattataaaacctgttcagaatttatcctcattctgtaagaatgtgccctattccaacagacatttcagaacatcaattactatgcatgcagtaattttgagatattatttataattccttaaaatgaa

SEQ ID NO: 242674 - DNA, 555 bp, Homo sapiens
ctcttaacactatcttagctgtgtcccagagatattgtatctttgtcctcrttagtttcaaagaacttcttaatttctgccttaatttaattatttacccaaaagtcacccaggaacatgttgtttattttccatgtaatttcatgatttttagtgattttcttcatcttgacttttatttttattgcactgtggtctaagaatgtgtttggtatgattttggttattttgcatttgctgagaattgtttcatgtccaattatgtggtcgattttagggtatgcaccatgtggcgatgagaagaatgtatattctcttgttttagtgtggagagttctgtagaggtctatcagatccatttggtccaatgttgagttcaggtcctgaatatctttgttaattttctgcctcagtgatctgtctaatactgtcaagtggagtgttgaagtctcccactattactgtgtgggagtgtacatctctttgtaggcctctaagaacttgctttatgaatctgggtgcttctgtgttgggtgcatatatatttagaatagt

SEQ ID NO: 242675 - DNA, 555 bp, Homo sapiens
ctcttaacactatcttagctgtgtcccagagatattgtatctttgtcctcgttagtttcaaagaacttcttaatttctgccttaatttaattatttacccaaaagtcacccaggaacatgttgtttattttccatgtaatttcatgatttttagtgattttcttcatcttgacttttatttttattgcactgtggtctaagaatgtgtttggtatgattttggttattttgcatttgctgagaattgtttcatgtccaattatgtggtcgattttagggtatgcaccatgtggcgatgagaagaatgtatattctcttgttttagtgtggagagttctgtagaggtctatcagatccatttggtccaatgttgagttcaggtcctgaatatctttgttaattttctgcctcagtgatctgtctaatactgtcaagtggagtgttgaagtctcccactattactgtgtgggagtstacatctctttgtaggcctctaagaacttgctttatgaatctgggtgcttctgtgttgggtgcatatatatttagaatagt

SEQ ID NO: 242676 - DNA, 445 bp, Homo sapiens
tcctctgaaagcttcctcccagggaaactccaagccattacaagtgggtattcttagctgtgggtggggtgactgttctgtggttaygagccaggaaccctgcctagtgaagagttggggggagtgttgggggttcccaggaaaggggggctggactcctctccatatggggatatggtgtgctagagatgccagtgtaatgactcagccctttgttccttccccagcccaagggctgttagggcaataccactgcaactgtaatgacagcggggttgtgggttgactctgagatttcctccttggagaaatgctgggctgcctctgactgtggtgatcaggcaggggcacgggggttgtgctggagtcccaggtagggtgggcctgcctagtgaggagaagtgaggactgagatctgcatagagaagagtctggccacttttct

SEQ ID NO: 242677 - DNA, 524 bp, Homo sapiens
ataggagaccaaggggaagcatgtcagggtcggtgttctggagcatttctctgcctttttcataaagaaaggcagaaactgtcagtccrctaataatggtttttagaagatttcagtgttccaggaatggtgctgagggacatttgcaaattctgccttcactagctgaagagttgctttttccacaggctttacacacgttccactggtgaagacagcctgtgtctccagttcggtctatttaagagcatctgtgctcattattggcccagtccctctgttcatttccttagccattaacctagctacatgtcctttctcattaaatctctcatcaaaacatttgttggtgctctgggggaaatataaagtttggtcgggcctcaattatccacataaaggctctgtgttgtacattgcccttttattcctcctccattaaatcaaagggtgagggaggaagagtgtatgatataatactggaaagatgtgttggagtcagattacggaaagccccaaatgtt

SEQ ID NO: 242678 - DNA, 524 bp, Homo sapiens
ataggagaccaaggggaagcatgtcagggtcggtgttctggagcatttctctgcctttttcataaagaaaggcagaaactgtcagtccgctaataatggtttttagaagatttcagtgttccaggaatggtgctgagggacatttgcaaattctgccttcactagctgaagagttgctttttccacaggctttacacacgttccactggtgargacagcctgtgtctccagttcggtctatttaagagcatctgtgctcattattggcccagtccctctgttcatttccttagccattaacctagctacatgtcctttctcattaaatctctcatcaaaacatttgttggtgctctgggggaaatataaagtttggtcgggcctcaattatccacataaaggctctgtgttgtacattgcccttttattcctcctccattaaatcaaagggtgagggaggaagagtgtatgatataatactggaaagatgtgttggagtcagattacggaaagccccaaatgtt

SEQ ID NO: 242679 - DNA, 520 bp, Homo sapiens
ctattatgaacaactttacgcacacaaaactagaaaatttagaggaaattcccagaaatatacaaccatcctagattaataaattcccagaaatatacaaccatcctagattaaatcagaaagaaacagaaactctgaacagaccaataacaaacagtgagattgaatcaataattttaaaaaagtgccaaccaaaaaaatgtccacaaccagatggatgcacagctgaattctaccacacattcaaagaagaattggtaccaatcctatggaaactattccaaaagataaaaaggagtcctccctgaatcattctatgaaaccagtaacaccctaataaaaaccaggaaaggacataatgaaaaaacaaactacattccaatatccctgatgaacatagatgcaaaaatcctcaacaaaatackagctaaccaaatccaacagcatatcaaaaagataatacatcatgatcaagtgagtttcatcctagggatgcagggatgctttaacatatgtaagt

SEQ ID NO: 242680 - DNA, 555 bp, Homo sapiens
ggttccatatattggccttacttctctgagatctatcttccccaagatactgacccaacgatacttcactatcttttttatgctttgatgccatcaagatggtttttagtatactttgttcagcttttctagttgtgttcattaggagggtaggtctaaatttctggtcactccattgactctgcagtccattttttctttttctctatgcaaactgctcttgccaaggttactaataatcttttatctttttttttatagtagacagttttaagtccttgccttacttgatcttttgtatgcctaatcccacagatctctcctccattctaaaactttttttcttggctttcattccccagctagctcatttctgaytgccagctccttttctagctaccttgtctgagctttctctttaaatgcctacccttaaatagttagttctttaaaatctcaaccttatatactttctgtggatgagtcatgtttatgacttcaactgccatccatatgctgatgtcttcaagatccttattcttaaacttgagagga

SEQ ID NO: 242681 - DNA, 627 bp, Homo sapiens
gttaagacaaacctgtatgtccaagtttattttcagtcaaaaatccccttagtcttattcaactcagaaaaatgaaaattgatggcctaaaagtgaaaatttgtatatcttcctacttagtctcataagtcattcagttttaattcctttttgaattcatataatcctttgccaatgaattaatgaatagtattcttctgaatgtattcctttgagaatggatttttgtgtgtgtgtataacttattaaatccttgttaatatctatgatttcaccatattaatgacagtttccaacttatgcccttgaaatgtggaggaaaagttacaatattattacctcaatattcaataaccttttctgtaaatcgccacactacagcattcttcctcatgaaaataatgagtgatatgatccactccatcaggctgttaggaaatcggcttgataggcaaagtcacctttgaaattctcataattgtcactgcaytctgacagtccctacattttaagaaatgggactaaaataaaataaagagaaactaccctgaaaggactaggtgacagcctggagcatttcacattgctgtggtatggaatgatagttgaaagtctctgattaatgcg

SEQ ID NO: 242682 - DNA, 599 bp, Homo sapiens
tcgtgcactaggctataataattcatttcatcacagcttccctaggacctcctgtgatgtttatgagcttgctgctatggtgatttkattttcatttataaaagaatgtgttactacctagtcatccccattttctaagaaatcttttttctgaaattagaaaccaggtatgaattttaaccttttgggtctgtgataagtgttttaatggcttcatttaacaaactatactattatttaattgctttgattcatctaattttgtgaaaaacccagggaaatagggttgatgtgaaaactaaattaatactcactgccatgtatgaacttctttcatactcagatggctcctcaatggcacttcagcttcatgagacacaattcccatgctaatccaaaggtctggaatgacaaactattagaagaggaagggatcttagagcttatcaagtataacttcttactggtttggaaatctacctatctatcaatctatctatctatatctatcttgaaatgtgagtagtcagcttctgcatgaattcctgggacaggagaaagctgcaccagagttggaaactcctaagaattacttggaa

SEQ ID NO: 242683 - DNA, 599 bp, Homo sapiens
tcgtgcactaggctataataattcatttcatcacagcttccctaggacctcctgtgatgtttatgagcttgctgctatggtgatttgattttcatttataaaagaatgtgttactacctagtcatccccattttctaagaaatcttttttctgaaattagaaaccaggtatgaattttaaccttttgggtctgtgataagtgttttaatggcttcatttaacaaactatactattatttaattgctttgattcatctaattttgtgaaaaacccagggaaatagggttgatgtgaaaactaaattaatactcactgccatgtatgaacttctttcatactcagatggctcctcaatggcacttcagcttcatgagacacaattcccatgctaatccaaaggtctggaatgacaaactattagaagaggaagggatcttagagcttatcaagtataacttcttactggtttggaaatctacctatmtatcaatctatctatctatatctatcttgaaatgtgagtagtcagcttctgcatgaattcctgggacaggagaaagctgcaccagagttggaaactcctaagaattacttggaa

SEQ ID NO: 242684 - DNA, 563 bp, Homo sapiens
tttggggcacacagtttttgttctctttttgttctgcctgatctaacttccaattttgcatgaggagattaatgccagtctgattttaccttttaaaatacttagttctttctctctgaaagcttgtaagaaagtatttttcattcatttaaaaatattcattgagtgcttactatgtggaaggcactattctgagctcagccgtaaataaaaaagtggtctcagccgtgtgcttactttcagatttaccctattttaggcygtttgggcatgtgtgggacatgatgatcccttataatctgaagaccaatttctcccttcagctgagtgatttttttcctattgtcttctattttttaataatctgtttaatttttgcctctcttctagcttaaatgtcttctttcgttgatgttatttgcatgtttggtctcctatatttatcttacaagttgtttatgttttcacttattatttctgtatttttatatgtttgttttgagctgtgagatatttcttcttgattttcagttcactaacttgtttcaacataggaaccctct

SEQ ID NO: 242685 - DNA, 563 bp, Homo sapiens
tttggggcacacagtttttgttctctttttgttctgcctgatctaacttccaattttgcatgaggagattaatgccagtctgattttaccttttaaaatacttagttctttctctctgaaagcttgtaagaaagtatttttcattcatttaaaaatattcattgagtgcttactatgtggaaggcactattctgagctcagccgtaaataaaaaagtggtctcagccgtgtgcttactttcagatttaccctattttaggctgtttgggcatgtgtgggacatgatgatcccttataatctgaagaccaatttctcccttcagctsagtgatttttttcctattgtcttctattttttaataatctgtttaatttttgcctctcttctagcttaaatgtcttctttcgttgatgttatttgcatgtttggtctcctatatttatcttacaagttgtttatgttttcacttattatttctgtatttttatatgtttgttttgagctgtgagatatttcttcttgattttcagttcactaacttgtttcaacataggaaccctct

SEQ ID NO: 242686 - DNA, 563 bp, Homo sapiens
tttggggcacacagtttttgttctctttttgttctgcctgatctaacttccaattttgcatgaggagattaatgccagtctgattttaccttttaaaatacttagttctttctctctgaaagcttgtaagaaagtatttttcattcatttaaaaatattcattgagtgcttactatgtggaaggcactattctgagctcagccgtaaataaaaaagtggtctcagccgtgtgcttactttcagatttaccctattttaggctgtttgggcatgtgtgggacatgatgatcccttataatctgaagaccaatttctcccttcagctgagtgatttttttcctattgtcttctattttttaataatytgtttaatttttgcctctcttctagcttaaatgtcttctttcgttgatgttatttgcatgtttggtctcctatatttatcttacaagttgtttatgttttcacttattatttctgtatttttatatgtttgttttgagctgtgagatatttcttcttgattttcagttcactaacttgtttcaacataggaaccctct

SEQ ID NO: 242687 - DNA, 431 bp, Homo sapiens
tttgtaagtttggcaaacagagctgtgggtcttctaagtcatacttgtttgagaattcctctaggagcagattctttttactctagcccagtttaaggtaaacttgttccatggaagcagagttttgcagtttcttcaygttttgcaatttaacagtcccttcatgttgtacctcttccttctgctcccttttccccatttggtaactgatctgactcccatggaggctgacttgcggcaacttgcaccccagcaaattaacacaatagtggaaaacattgtcattagtcatttagactaatgatatagcaatgactttcaatgcatggttatctccactaggcattttcttttgaagcatttaatttctaatttgggatcaatatcctatactcattaaagacattttaggcacctgtaagatatttctt

SEQ ID NO: 242688 - DNA, 431 bp, Homo sapiens
tttgtaagtttggcaaacagagctgtgggtcttctaagtcatacttgtttgagaattcctctaggagcagattctttttactctagcccagtttaaggtaaacttgttccatggaagcagagttttgcagtttcttcacgttttgcaatttaacagtcccttcatgttgtacctcttccttctgctcccttttccccatttggtaactgatctgactcccatggaggctgacttgcggcaacttgcaccccagcaaattaacacaatartggaaaacattgtcattagtcatttagactaatgatatagcaatgactttcaatgcatggttatctccactaggcattttcttttgaagcatttaatttctaatttgggatcaatatcctatactcattaaagacattttaggcacctgtaagatatttctt

SEQ ID NO: 242689 - DNA, 557 bp, Homo sapiens
tcttaactttcagcttcaatgaattgagactaatatgttcagcaaaaggagttaagacattctccttattggaaatcaagtgtagaaaatacccatgtagtaaattcacaagaagaatgttacagagtaattgctttcaatctcctaacccttcccctgctccccttggtgcctctgtctgccacgttaacccattagcaaagtggtaaaggctgggacgccaggaccttacaaaggctctggcatgccgaaagtgcttgataaatatttgttgagtgaacattgtatacatttgcatttttaaagaaataggacagtgaagatgaaatacagccatctttccagtgacctgacataaataatggtctttctagttcatcatcaccatccttcattactggtccttyggtcctttgaaatgatgtcttttggggcttctggcttaaccattttcaattacttcaaactgttctaattacctctggcagattagtatttataaggaatagatttaatcacattaccacctgcataaaaaggtactctttaccttggca

SEQ ID NO: 242690 - DNA, 563 bp, Homo sapiens
aaatgtaaatgtactgactgagtcccatctgttaagaataacagtgggattaatagccataggctcttctctgtgtgagagagacaggacaacacagctccctgttctgtagcttttgtctctgactggcattccctttctccttccctacagagcactttggacagagttctgcaagggcctcctcagttaggcccaaccaatcccaagaccatgtgcaggggacagtccactgtcattttgctaagaaatcgctcttcckatggtagtttctaagcctcacaaatatgcagtaaagatgtctttcctcgaatgatgtttgattagtcccttttcttttcctctgcagtagttctttaactttgatagaattcctctagaattgtaccacctcttagataaaatagacatcttgaatatggaatctgagcttcctaatgtttccctaacatcctttatgggagaagcacatatagccttgcagatctgtggaatagaatatatgtaatgcctagcgttgaatttcaagagccctaaatggagtagaatttgtttacaacttt

SEQ ID NO: 242691 - DNA, 563 bp, Homo sapiens
aaatgtaaatgtactgactgagtcccatctgttaagaataacagtgggattaatagccataggctcttctctgtgtgagagagacaggacaacacagctccctgttctgtagcttttgtctctgactggcattccctttctccttccctacagagcactttggacagagttctgcaagggcctcctcagttaggcccaaccaatcccaagaccatgtgcaggggacagtccactgtcattttgctaagaaatcgctcttccgatggtagtttctaarcctcacaaatatgcagtaaagatgtctttcctcgaatgatgtttgattagtcccttttcttttcctctgcagtagttctttaactttgatagaattcctctagaattgtaccacctcttagataaaatagacatcttgaatatggaatctgagcttcctaatgtttccctaacatcctttatgggagaagcacatatagccttgcagatctgtggaatagaatatatgtaatgcctagcgttgaatttcaagagccctaaatggagtagaatttgtttacaacttt

SEQ ID NO: 242692 - DNA, 557 bp, Homo sapiens
tcttaactttcagcttcaatgaattgagactaatatgttcagcaaaaggagttaagacattctccttattggaaatcaagtgtagaaaatacccatgtagtaaattcacaagaagaatgttacagagtaattgctttcaatctcctaacccttcccctgctccccttggtgcctctgtctgccacgttaacccattagcaaagtggtaaaggctgggacgccaggaccttacaaaggctctggcatgccgaaagtgcttgataaatatttgttgagtgaacattgtatacatttgcatttttaaagaaataggacagtgaagatgaaatacagccatctttccagtgacctgacataaataatggtctttctagttcatcatcaccatccttcattactggtcctttggtcctttgaaatgatgtcttttggggcttctggcttaaccattttcaattacttcaaactgttctaattacctctggcagattagtatttataaggaatagatttaakcacattaccacctgcataaaaaggtactctttaccttggca

SEQ ID NO: 242693 - DNA, 570 bp, Homo sapiens
ttcactctcacattaccaactcccctcatcgctccttcctatatcttttcaaatcaagtctctagaattttacaratgaaaatctaaccaaatcccctattgttactgttatgaatgacacctgttatacatcaaagccaacatccactcttttctctggtgcagcagacagacatttgatgtcaaatacaacaggataaaatgaaaagtacatggaagaagaagaaacatacatgttgttcctagttgacagtacaatgtaaaaaggtagggactgaatcacttgattgtcttaattatactcaatttttccagacagcacttggcacaggcttcaatatgctatgtagagaaatttaaaatttaagtccatggggtaaaatcatatggtttagaatgctttgctttcagaatagaagtgtctctctataaagcaacctcctttttttccaaaagaaacactctgaaaagaagagagcatcttctatttttttttaacatttcaatagcatattagtaggcaaagtagaagcgagttttattagataaataataaataactttcatttg

SEQ ID NO: 242694 - DNA, 570 bp, Homo sapiens
ttcactctcacattaccaactcccctcatcgctccttcctatatcttttcaaatcaagtctctagaattttacaaatgaaaatctaaccaaatcccctattgttactgttatgaatgacacctgttatacatcaaagccaacatccactcttttctctggtgcagcagacagacatttgatgtcaaatacaacaggataaaatgaaaagtacatggaagaagaagaaacatacatgttgttcctagttgacagtacaatgtaaaaaggtagggactgaatcacttgattgtcttaattatactcaatttttccagacagcacttggcacaggcttcaatatgctatgtagagaaatttaaaatttaagtccatggggtaaaatcatatggtttagaatgctttgctttcagaatagaartgtctctctataaagcaacctcctttttttccaaaagaaacactctgaaaagaagagagcatcttctatttttttttaacatttcaatagcatattagtaggcaaagtagaagcgagttttattagataaataataaataactttcatttg

SEQ ID NO: 242695 - DNA, 570 bp, Homo sapiens
ttcactctcacattaccaactcccctcatcgctccttcctatatcttttcaaatcaagtctctagaattttacaaatgaaaatctaaccaaatcccctattgttactgttatgaatgacacctgttatacatcaaagccaacatccactcttttctctggtgcagcagacagacatttgatgtcaaatacaacaggataaaatgaaaagtacatggaagaagaagaaacatacatgttgttcctagttgacagtacaatgtaaaaaggtagggactgaatcacttgattgtcttaattatactcaatttttccagacagcacttggcacaggcttcaatatgctatgtagagaaatttaaaatttaagtccatggggtaaaatcatatggtttagaatgctttgctttcagaatagaagtgtctctctataaagcaacctcctttttttccaaaagaaacactctgaaaagaagagagcatcttctatttttttttaacatttcaatagcataytagtaggcaaagtagaagcgagttttattagataaataataaataactttcatttg

SEQ ID NO: 242696 - DNA, 570 bp, Homo sapiens
ttcactctcacattaccaactcccctcatcgctccttcctatatcttttcaaatcaagtctctagaattttacaaatgaaaatctaaccaaatcccctattgttactgttatgaatgacacctgttatacatcaaagccaacatccactcttttctctggtgcagcagacagacatttgatgtcaaatacaacaggataaaatgaaaagtacatggaagaagaagaaacatacatgttgttcctagttgacagtacaatgtaaaaaggtagggactgaatcacttgattgtcttaattatactcaatttttccagacagcacttggcacaggcttcaatatgctatgtagagaaatttaaaatttaagtccatggggtaaaatcatatggtttagaatgctttgctttcagaatagaagtgtctctctataaagcaacctcctttttttccaaaagaaacactctgaaaagaagagagcatcttctatttttttttaacatttcaatagcatattagtaggcaaagtagaagygagttttattagataaataataaataactttcatttg

SEQ ID NO: 242697 - DNA, 554 bp, Homo sapiens
  misc_feature (1)...(554): n = A,T,C or G
nnnncgtttctcccattgtgcaaagcacagacctctcccaaaagccttctctgaacttttccagtccaagtgatcttttaattctttgaaacttttatcaattgttttctatatttatactaggcaatgaatcatatcaagctctgtgtcatctctttgtcctattgaactataatttgtggctttcattgatgtttagcttttcataaataacatcttgttccactaggctgaaactcaagaagcaatactggataacagaaagaaaaggctttagaagctgagagagctgcaatcaaatccaaactctgcagctagctgtgtgaccttgggtatgctacttaacctctctgagtttccatttcctcattaataaatttaggtaataatactccacagattggttattgaggtgaaataagatggcatgtgtaaagtgcccayaatatgttttatgtggaagttgtcagcttataaattgaaattggaacatataaatgatgctttctcagtttgatttagctgtgaacatacagatttccttttaggtgaaa

SEQ ID NO: 242698 - DNA, 619 bp, Homo sapiens
atagtattaaagtctcctgttttatggatatgaactgcttctgatctcatactgactaaagtagggtctaccttccacggcatttgctgggaaatggaattacaacgcttaatcatttgttgttacagagtgccagggctgaaagagtatgcttgtgtgtgtgtgtgtttaggcacacagacacctatattttatacataagtacaaatatccatacatatatatacatgtacatatatacatgtatataaatctttatgactaggggatggaaaaaaacaccctgttttctcttccaggccataaagaactgattgctcctttgggggcaaagtagtcttttgttctgraaaaaaacatctgaatgcttattatactgtacaaatgtagagcaagttttcattttttttgaaagatggaaagtaagttaatctgaatgcaggtgtttttgaacagtgattttccaaccttttcctgctccaacaaacatgagagagatgacacactcctttcgatgactccctatcatggtgactctcaagaggggacagaacacattttacagcccttggaaggcacacccttgaaacattcccagaagtggttcttgggcaagctt

SEQ ID NO: 242699 - DNA, 618 bp, Homo sapiens
aagtgccatttatatataacccatatatgaaataaatatagtgtgaatgcttaacttgggaacaccttagcaatcacattaagttctgttgttytactgtaaagtgaaaacaagtataccactttagattatccacccagacataactaattataaaatgccattttcgaagtacatcagatataatttgaagatctcatatttgagtattttaagtggacatggaaagaattaaaagaagtgtttatgcatagccaacgcaagctgagctcttttcacttgcctctcattttcaatctaagaaaaagtcaatgtacattacaacctcattgacaagttggacacagttctctacagttttatcctcatagaaaactgtgtacctgtacctttagtcaaataacaggaagattttgaattgaattattactctttttttctacaattactgccatccatgtgagttctaattcattttagagataaatcatgcaaaattgcagacatactttcctctagcattgataatgtggaaacagaaaggaaaagaagacccagtctttttcagttcattccagattcctcttcctctgcccttcttttaacgtttacacaccc

SEQ ID NO: 242700 - DNA, 444 bp, Homo sapiens
ttcccttttttgaagtttgtattatgtcagattggttaaggtgaaactgcatatctcagaattccttctgtgggagacacaccttaargtgacccctgcaatgaatcatgcccttgtgtgattctccctccccctgagtgcagtcagggcctatgccttgttgctaactaatagaaaatggcaaaactctaggatgtcactgccataaatatggcagacaccatctcagcagactgaaagtgaaatccttcagctggtctttaagaagtaaactgccatgctatgagagggcctgtgaaggacccctgtggaggggaactaggtggtctctaggacatgagggccaacagccaacaggaagccagggcctccctctcattcccacacaagagaaatgaactctgctaacaacttgaatgagattggaagtaaatgtttctccat

SEQ ID NO: 242701 - DNA, 444 bp, Homo sapiens
ttcccttttttgaagtttgtattatgtcagattggttaaggtgaaactgcatatctcagaattccttctgtgggagacacaccttaaggtgacccctgcaatgaatcatgcccttgtgtgattctccctccccctgagtgcagtcagggcctatgccttgttgctaactaatagaaaatggcaaaactctrggatgtcactgccataaatatggcagacaccatctcagcagactgaaagtgaaatccttcagctggtctttaagaagtaaactgccatgctatgagagggcctgtgaaggacccctgtggaggggaactaggtggtctctaggacatgagggccaacagccaacaggaagccagggcctccctctcattcccacacaagagaaatgaactctgctaacaacttgaatgagattggaagtaaatgtttctccat

SEQ ID NO: 242702 - DNA, 444 bp, Homo sapiens
ttcccttttttgaagtttgtattatgtcagattggttaaggtgaaactgcatatctcagaattccttctgtgggagacacaccttaaggtgacccctgcaatgaatcatgcccttgtgtgattctccctccccctgagtgcagtcagggcctatgccttgttgctaactaatagaaaatggcaaaactctaggatgtcactgccataaatatggcagacaccatctcagmagactgaaagtgaaatccttcagctggtctttaagaagtaaactgccatgctatgagagggcctgtgaaggacccctgtggaggggaactaggtggtctctaggacatgagggccaacagccaacaggaagccagggcctccctctcattcccacacaagagaaatgaactctgctaacaacttgaatgagattggaagtaaatgtttctccat

SEQ ID NO: 242703 - DNA, 444 bp, Homo sapiens
ttcccttttttgaagtttgtattatgtcagattggttaaggtgaaactgcatatctcagaattccttctgtgggagacacaccttaaggtgacccctgcaatgaatcatgcccttgtgtgattctccctccccctgagtgcagtcagggcctatgccttgttgctaactaatagaaaatggcaaaactctaggatgtcactgccataaatatggcagacaccatctcagcakactgaaagtgaaatccttcagctggtctttaagaagtaaactgccatgctatgagagggcctgtgaaggacccctgtggaggggaactaggtggtctctaggacatgagggccaacagccaacaggaagccagggcctccctctcattcccacacaagagaaatgaactctgctaacaacttgaatgagattggaagtaaatgtttctccat

SEQ ID NO: 242704 - DNA, 595 bp, Homo sapiens
attgtaatttcagctgctcttaaatttatttttaacctgctagtaattcatagcttttcttgaagatttcaggaaagtcttggagtgtgctggtggattgtggagattcaaatcaatcttccccatttttaaataggttggagttcaggaaatatgtttagagaaagatgtttttaaattgatctgctattccttacaataaaatgaaattgatctctactttctacagtaaaacatctgttgatttaagatatgtttttgtctctgctgagaaatgaatgggaatgaaatgcaaatatgtggaactttttcctctaaaactattcacaactatatgtggtgtagcaagtagagaaacactgtacaagaagaaaagagagttgacggaaaacaaaactctttacatctcttttattgctagttcaaggatgcgtgtttttgaagataatttggtaatttttaaagtktaatacttcatgtattttgtatatttaaaaattctcatgcttttatgtcaaacagaagacgaattatttatatttttaagaaatttcgtgaagtctaaagactgaatgatttagcactttcatcagtt

SEQ ID NO: 242705 - DNA, 570 bp, Homo sapiens
cgattttccttccttttactcctttgcttcacttttcttccgtttcttcctttatctttcttcttattcaccctttccttcttctctcactccttttcctctatagagattatattaattcaatactcttacttcttcccctttattgccattattatgctctttccttcctttcactcttactaatgatttttttgactacattttttgttgtccctgacttctggcctgccaccttgcacttgcttctgttttgtctttgttcattctatgtccacgtccatattgtacgtaattctacaagcatgtcagctacttttgttaggcagcagatgaagaagatgactcaacaaagaaaaacaggaagaaatattttactaggaataatccattmtttgcaatctaatatcttcaatgggattcagcctcttttttccttctttaactttatatgcatgaaggtcagagtttggatacaaatcagtgcctcattttatgagacataaagacaagactctctggaacactctgtcagttgaggttctgctggcaatttgaactatattttaa

SEQ ID NO: 242706 - DNA, 579 bp, Homo sapiens
actttgttccatattttataaaagcttagtatttcaaatattcctgaggtaaagggctgttaatacaaattacgttacatctatttaactgatactaataagctattaaataggttcaactgttaactctcaactcaatatggatgtttaacatgcatcacaaacctcttaggcttaaaataaaattcttgatcccagcctctacaattctgttcttcttctacttttcttctatttcaggaacagataccactgttcttccaatcgtgaggccaaatatctacagtgatgttgtttaatatgctgaccactaaacacacatggctcttgagcccttgaaatgtgtgtggttcacccgaattaagatgtgttgtaagtgtaaaacacaaaccaggtttcaaagggttagcacaaaaaaaatttaaaagaatgtagcatagcttattaatatttttattaattacatattgraataatattttgagtatgatgaataaagtacatcattaaaattaatttctcttgttccttttacttttttaaactggctactagaaaacaaattacatatgtgcctta

SEQ ID NO: 242707 - DNA, 544 bp, Homo sapiens
aataaaactaagatttcttgattttcatttgggtgctcttctccttactctatacatacatttgaaatgggatttacacaggagaaagagaagcaattgtggctgtgttggctgtcgagttccacatctctgaatgtaatgattactctgacttgtctactccatttgtgaaccattctctttttagttattattttctggctgagtcctgtttttcaaaccagaataaggacagagtattaaatcaacttgaattgccccagtaactgacacaatactttgtacaataaagatgtttaatatgagctttattaattacatttataaaaaggtcattacatatgacattamatttagagtaagttattcaattctgaaaacatgtgtatacagtattttatttaaaatattaaaataattataaagaattatataaaaatcaagagattttgcttaacaaagccatttgtaaaagaattctccctgtgcttgaacatatttctaaatattttttattatttccattgttacaataggaaacaat

SEQ ID NO: 242708 - DNA, 558 bp, Homo sapiens
tggcaataaactaataacactactgcttctatattccagaagtttatgaaattctagtgaatgttaattgtttctaactgaatatgagtgtgaatactagtgtatattaattaaaggtaatatggatagcgcaaatcgaatcaagaacagattatctaaggsaaagatggaaattctgggtgccctagttatgatatttgagagtattccctacactggactggtgccaaggactggtcatttaaggaaagtaagagctgacatctgagattaaatccagtttaattaaggaatggaaggtcataattatattttcgatattaatatgagtgtttggctaactaccacccagcattttcccaaattctttcgtttctctaactttttctaaatctctacatcatctactcattgtagcttttagagataccaacatatcctcgtttattgaaataaaaaatgtaattcgtcttatttttattgagactaaatttatttcactcaaatttcaaggatcacactgtgatctgaatttatttagtccaaattcacattttc

SEQ ID NO: 242709 - DNA, 536 bp, Homo sapiens
tacaaaatataaaaacacaagtaagaaaagcttctcagaattaaaattggagaccaaaggaaaataattcctgttgatgagtaattacacggatgacaatttaacagggaaaagcaagaacaaaagagtctgtcaccaaccaagggtagcatgtgatataaaacagaaaacagattgactagccgttgagagtagaattcttgaccatcccattcaggggctagcaaagtagcttcttaactacttttttagccccttaaagstgaagtctgaagaggctcccctttctaacatgtctaccaagctgagttgttttgtttttttttaacttttcaatatagtcatttaaataaattaatcactaagccctaggatgacataaacgtggtattactattcctaaacaactctcttgtcactgttattaatcttcaaatgatgtcattagtcaattttgctccatattgcatcagttctgggcttactgaaggaagaataatttcttggagaacatttgtacacaactgagggaaagt

SEQ ID NO: 242710 - DNA, 536 bp, Homo sapiens
tacaaaatataaaaacacaagtaagaaaagcttctcagaattaaaattggagaccaaaggaaaataattcctgttgatgagtaattacacggatgacaatttaacagggaaaagcaagaacaaaagagtctgtcaccaaccaagggtagcatgtgatataaaacagaaaacagattgactagccgttgagagtagaattcttgaccatcccattcaggggctagcaaagtagcttcttaactacttttttagccccttaaagctgaagtctgaagaggctcccctttctaacatgtctaccaagctgagttgttttgtttttttttaacttttcaatatagtcatttaaataaattaatcactaagccctaggatgacataaacrtggtattactattcctaaacaactctcttgtcactgttattaatcttcaaatgatgtcattagtcaattttgctccatattgcatcagttctgggcttactgaaggaagaataatttcttggagaacatttgtacacaactgagggaaagt

SEQ ID NO: 242711 - DNA, 473 bp, Homo sapiens
gtctagccatttcactcctaggcatttaccttagagaatatatccatgaaaattcttttaatgaatttatggatgatagccaaaaagtagaaacaatccaatgtccaccaacaggtgaaaggatttttaaaagattgtatatatccaygcaatgagtatttgaaaccagcccaattgtcccataggactgatgtgtaaggttgttttgaatagacatagaaattgaccctcccagtcttgaaacatgagtaagttacatttgttttctctgagttcctttctcatccaaccatcaggcctcccagatagtagcaagaaattgaaacttaccaaatcacagcatctgggcaatgggaggtgaaaccactcttttgtcatgattgcctaacccactacctgcttcctgttgactgactcctcttctttgctcctccctaactcttgttcttccatgcatggttacatttcttctc

SEQ ID NO: 242712 - DNA, 473 bp, Homo sapiens
gtctagccatttcactcctaggcatttaccttagagaatatatccatgaaaattcttttaatgaatttatggatgatagccaaaaagtagaaacaatccaatgtccaccaacaggtgaaaggatttttaaaagattgtatatatccatgcaatgagtatttgaaaccagcccaattgtcccataggactgatgtgtawggttgttttgaatagacatagaaattgaccctcccagtcttgaaacatgagtaagttacatttgttttctctgagttcctttctcatccaaccatcaggcctcccagatagtagcaagaaattgaaacttaccaaatcacagcatctgggcaatgggaggtgaaaccactcttttgtcatgattgcctaacccactacctgcttcctgttgactgactcctcttctttgctcctccctaactcttgttcttccatgcatggttacatttcttctc

SEQ ID NO: 242713 - DNA, 384 bp, Homo sapiens
ccagaaatgtgtgactttaaagcttaacattttawattaaaatattaaaaaatttaatataaaagaagttattaaaaatatttttcagtaccaagaagccatcctaggatataaaacaccactcacattaacactcggtatttctcatttaaacttgcaacaaatgccctgttttcaggcccactcctaagcctgctttctcaataaggggttttgcagtatggcttctagagttctgaagcgtggtttggttttgcaggcatgaccccgtataagcacttggtatttatctttttcagctttgataattcccccacttcctatcttctaaaaatttgttttgattgttgttatctcttctgcaatctttgtctctgtgagttt

SEQ ID NO: 242714 - DNA, 586 bp, Homo sapiens
agatcaaggccatcctggccaacatggtgaaccccatctctagtaaaatacaaaaaataagctgggcgtggtggcgtgtgcctgtagtctcagctacttgggaggctgagacaggggaatcacttgaacccaggaggtggaggttacagtgagtcragatcgctgccactgcactctagcctggcgacagagtgagactccgtctcaaaaaaaaaaaggaaagttgaacacatcccattgtttgtgataactgatgtttgcttatttccctgataccttatagtgagttctatttgttatgtttttttaaaaaaatctagttttggagtcgtatatatttttcttttgctagtagttactcacattttaagcaataacacttaaacttacatttttaaaaattaatgttgagaaaatttcaatatctagaacctatcaccatgcccttatgacttttctccccttaagattccccccacttaccatcatccatgttttgtttagaataatctgaattttacctctggagtgttatgtaaacaaaattatggttattctttattaggaattagtattatcaatatta

SEQ ID NO: 242715 - DNA, 607 bp, Homo sapiens
taaataactctttgaatctgatgctccgtttttctaccacaaacacatgctcaagtgtgtagaaatgggtctcatccttagctttattttttatgcgtttaatatttgcagagacaaaaaaagagaaaatttaatgtgtggactgtccctgagatatttcttaaattatttgcaatcctcacaagagtatcataatctattttgctgaggatgagcaaagcacatttaaatttccaactcaaccaacaacaatctttgagtttctactgtcatttaagtatatgtaacatctccgaaagtgactrgagaatattttctagacacaagggtttgttgttaatttaataaatattcatttaacatctactaatatggatataatcgctaaacaaaataagcctcattacaatttttcaaagtaggaaatgcatgattaccagttatgaccatcagagtctctaataattgctatttagtgaatacatgatacaaatatcagtatatgatgatatatggagaaattattgaatttggtgcctgctggaaagggctagtgacctatgtcatagcttaacaggaaatgatgagctgggttaatcccaagggt

SEQ ID NO: 242716 - DNA, 607 bp, Homo sapiens
taaataactctttgaatctgatgctccgtttttctaccacaaacacatgctcaagtgtgtagaaatgggtctcatccttagctttattttttatgcgtttaatatttgcagagacaaaaaaagagaaaatttaatgtgtggactgtccctgagatatttcttaaattatttgcaatcctcacaagagtatcataatctattttgctgaggatgagcaaagcacatttaaatttccaactcaaccaacaacaatctttgagtttctactgtcatttaagtatatgtaacatctccgaaagtgactagagaatattttctagacacaagggtttgttgttaatttaataaatattcatttaacatctactaatatggatataatygctaaacaaaataagcctcattacaatttttcaaagtaggaaatgcatgattaccagttatgaccatcagagtctctaataattgctatttagtgaatacatgatacaaatatcagtatatgatgatatatggagaaattattgaatttggtgcctgctggaaagggctagtgacctatgtcatagcttaacaggaaatgatgagctgggttaatcccaagggt

SEQ ID NO: 242717 - DNA, 534 bp, Homo sapiens
ctagtgcactgcccagcacacacaaacagctcaggagatgttggatgtagttaaattcaaggagaaaagaggcaccccaggcaggtgtgaagcgtgggaggggtgcctttggaggccctgctggggaggccccggggacagccagggggcagactgagaacagccaggcctgagggaccagaccagctggtgatcgggggtttttagaatttgccaacctcttgactggcctggttgggctagatgctgagaggctgtgagcttccctgtggtgggggtcctgaggyagcagggcctgcagccagcccgctggagttcaaattcaggccccgcccctcgctagcttcctaggcctgggcttacttacccatgcagctaagtgagggtgacgtgactcgctccactgagccttggagatgacgccgtctctgttcattggctgccgtgaagcttctcgtcttggaaggtcatgactgagaggtttcaggggaaatgtttgaagggcaggattagcctaatcttgaatcccttagg

SEQ ID NO: 242718 - DNA, 414 bp, Homo sapiens
tgactggggttgctgaaggggttttagaaatraggctgtcaaaaaacatcacagctgcctactgcttaatttctagctgactctgtgtttctaaccgtctgtagagactccacacagataaagcccctgtgccacggattctagggggacggggcaagaagcccagcgccagggtaggaaggaggccttgggaggggaggctgaagagtgaaaactcaggagcagatgccgggaggcagaagtgacatctgaacacacagcctccgagacagtccctgggtgggagacactgaggtttctgttgtgcgctggatacggcttaagcctaattttacctcaaatttcaaaggccagggtgatccaagctgatatttgagttccattaccaggcatattccttacaacaagaagaat

SEQ ID NO: 242719 - DNA, 414 bp, Homo sapiens
tgactggggttgctgaaggggttttagaaatgargctgtcaaaaaacatcacagctgcctactgcttaatttctagctgactctgtgtttctaaccgtctgtagagactccacacagataaagcccctgtgccacggattctagggggacggggcaagaagcccagcgccagggtaggaaggaggccttgggaggggaggctgaagagtgaaaactcaggagcagatgccgggaggcagaagtgacatctgaacacacagcctccgagacagtccctgggtgggagacactgaggtttctgttgtgcgctggatacggcttaagcctaattttacctcaaatttcaaaggccagggtgatccaagctgatatttgagttccattaccaggcatattccttacaacaagaagaat

SEQ ID NO: 242720 - DNA, 418 bp, Homo sapiens
tccttgactggggttgctgaaggggttttagaaatgaggctgtcaaaaaacatcacagctgcctactgcttaatttctagctgactctgtgtytctaaccgtctgtagagactccacacagataaagcccctgtgccacggattctagggggacggggcaagaagcccagcgccagggtaggaaggaggccttgggaggggaggctgaagagtgaaaactcaggagcagatgccgggaggcagaagtgacatctgaacacacagcctccgagacagtccctgggtgggagacactgaggtttctgttgtgcgctggatacggcttaagcctaattttacctcaaatttcaaaggccagggtgatccaagctgatatttgagttccattaccaggcatattccttacaacaagaagaat

SEQ ID NO: 242721 - DNA, 414 bp, Homo sapiens
tgactggggttgctgaaggggttttagaaatgaggctgtcaaaaaacatcacagctgcctactgcttaatttctagctgactctgtgtttctaaccgtctgtagagactccacacagataaagcccctgtgccacggattctagggggacggggcaagaagcccagygccagggtaggaaggaggccttgggaggggaggctgaagagtgaaaactcaggagcagatgccgggaggcagaagtgacatctgaacacacagcctccgagacagtccctgggtgggagacactgaggtttctgttgtgcgctggatacggcttaagcctaattttacctcaaatttcaaaggccagggtgatccaagctgatatttgagttccattaccaggcatattccttacaacaagaagaat

SEQ ID NO: 242722 - DNA, 414 bp, Homo sapiens
tgactggggttgctgaaggggttttagaaatgaggctgtcaaaaaacatcacagctgcctactgcttaatttctagctgactctgtgtttctaaccgtctgtagagactccacacagataaagcccctgtgccacggattctagggggacggggcaagaagcccagcgccagggtaggaaggaggccttgggaggggaggctgaagagtgaaaactcaggagcagatgccgggaggcagaagtgacatctgaacacacagcctccgagacagtccctgggtgggagacactgaggtttctgttgtgcgctggatacggcttaagcctaattttacctcaaatttcaaaggccagggygatccaagctgatatttgagttccattaccaggcatattccttacaacaagaagaat

SEQ ID NO: 242723 - DNA, 384 bp, Homo sapiens
ttatatgcctgagttggcctcccaaagtgctggaattacagttgtgagacactgcacccagcccatgtctgacttctgacagatgttacagatgttacagctacagaacagtaagctaataaatttgtgttgttttacaccattaaaattgtggtaatttgttagagcagcaatagaaaactaatacatacatccagtattattccagtaaattcaatttctttctgctagaaccaaaagaatctttggttatttaagaatttaagattaaacccatatattctctgaattagaaagaaaatgtgttktcctaaaacctgtgatatgtgcctagatatgctcagtgttatctttcctttgtcagtccatactctacgaagacaa

SEQ ID NO: 242724 - DNA, 531 bp, Homo sapiens
tgtaccagtggggaaccctactgcaaactcaaaggtccccttttaaacaagcctcttgaaggtctcaaatgagcatcagctaaaataataatacttcacttactaaatatttattgagttcccattagggaactcaaggtgctaatggctgacaaggaccttttggacttgcacaagagcctggtgtgtaccaccttctaaggaaagcttgggatgttctctgagaggaacaccaaattcaagaacctgtcccaggggctgatgaatgtggctgcsaagctgacccacaataagtacgtcagaggacctcacagacctcatggagaaggtcattgaaacctgacaccttaaccattggttgctgaatgacatgtgctcttcctgaatcagtactcagcatatgtccacttcctgcgtggcttctggccctctatgactgctatatggtcatcctctgtggctacctcctgtacccctatcatgactgaggcccctctcccaccactctgcccacactgatgagaaagttgc

SEQ ID NO: 242725 - DNA, 565 bp, Homo sapiens
taacttatctgaatgtcagttttcccgcttgtaaaatgcagttggtattagtacttaatttaaagctttgttatgaggattaaatgagataatgcaagtccagcctatagttgactttggcttaagcagcagttgttggaacaatctgttgtggccaagatcataaggtctcaggacacaaggttggccacaaaaccaacccagcaacttatgaagcagaaaccatctgtggtaacttttctcagaaggtggctatgtaaactggcctcatttggctgaaggaagttgggaggtggataggtgggggaaataaaagaaaagagaagagttaaatgagtgtcaatgtctcctaataattaaragcttagaatccctggagtcagacaggcttgtcctcaaattccagctctgtgcttaccatttgtgtgaccacgaatatgttatcaaacttttggaccccagttttctcaagtgcaaaataggctaatgatatctatggtgttgtgataatttgatgaacaatgagtataaagtgcttagcacagtgcctgctacccagtaagaa

SEQ ID NO: 242726 - DNA, 318 bp, Homo sapiens
ctctctctctagttcctaaggcacaacaatctctgttaaatctggataaatttatatatgcttggattcgcatagctaatgcctggaaaagttcttcctgtttattacaactattcctcatttttcctctagtgaactgatggtggggtgagagggagaaragaccttttagtctttactttaagctttttgtacagtttttttataatgagcatgtaataaagcactaataaatatttccttaaattgttacatttcaaaagactttctgaaattaatcctagagcttattctattagcaaaagtctcaatgaggta

SEQ ID NO: 242727 - DNA, 541 bp, Homo sapiens
gaacattacacatactgatttatgtctttgcctgtaacttctgtctccctacaatgtataaaccaagttgtaaccaaaccaccttgcgcatatgttctcaagattccctgaggctgtgtcacagaccatggtctttaagtttggcaaaataaacctctaaattgactgagacctgtctcacatactttttggtttacataagaaatatatatttggtctctkcccccagttcctgacatagagctcctaagacttttgtaatttcctgtgcgataggatcattggacacagtgaaatatagcagggaccccacctctccttttagggacctgcaaacccccaaacatggaaataaaggaaaaccccaaagttcctttaagaaacattccaggcatctagctagccccggaggtaattcagtaacttgttaaacgaaaaggtagcagaacaatagccaaggaagttaaagctccagagatgtttgcttttcctacagaaactaaagataacatcctaacatacatccttgagttgtctttta

SEQ ID NO: 242728 - DNA, 583 bp, Homo sapiens
tgggcatatgttctcaggatctcctggagctatgtcaggggacattggtcactcatatttggctcagaatacatcttttcaaatattttacagagtttgactcttttcgttgacaccatattaatataaaatattgagtcacttatctatttcctattaatgactagaacaggatctactagagagatgcactgaagatctggagttcaacgtgaatagaatgggaacaaatgctacctacacagaatagttcagccccataaatgattcacgtctttttttcccctyggtccagtgtctttttttttttaactagaaaggaaaatcaaaagacaaaagccattcttcgtacattatgtaatcaaatgaatgtcagcaacagatgtgtgtccaaatgaaacatttacaagacagttcacaaaaggagctcatttggattttacttaagccaagggcactataaaactctaattttaaaagaactttaaaatccaattgcattgggaaattgtctttaaagatatatttcctcgctgtatgattctataattattgctgggaaatcttttggaaaatattgata

SEQ ID NO: 242729 - DNA, 574 bp, Homo sapiens
gattgttttcagaatacactatgcactttcatrtatctgtgattttccaaatactgttccctaagcctgaaaattcctcctgtcctccttaatccttctctgctttgagagagtcttcttccctttgagatccagtcaatgccagttttatgaagtcttccacaggcagctggacactcatttctctggacttgcacagcactgtggacatttatcgccttgtaatgtttttattgattcacctgcttttctcctccactagactgggatttgtaataaagagcctgagtctattttttatgtctgactactgaaagttttcttttttaaaaacaggtttcaacttattgtagattaagggtacacatgcagatttgttatatgggtaaactgtgtgacactgaggcttgaggtcccaacgatcctgtcgttcaggtcataggcatagtacccaacatggggtcctttagcccatgcccccctccctccctcatctagtgatccccagtggctattgttcccatctttatgatcatgtgtacttagtgtttagctcccacttataaatgaggac

SEQ ID NO: 242730 - DNA, 383 bp, Homo sapiens
ggatgtccataggttatatataaatactacaccatattatataagggatttgaccaccctcagattttggtatctatcgggtatcctggaaccaatcccccatggatatggagggatgactgcatttttcaygattttgttattactgttctcttttctaacctatgaaatactacagtctgcaatttaaatatttgtatgtatatatttaattagaaataacaaatttgtaggttggggtctttcctcctcaataaaagctattttaatccagaagataagaaatctaagaccactttatttggtcaacaataactaaactaaaatgtcctaaattaggtcatagtacaggagaccctactgactgaaataagccattaggc

SEQ ID NO: 242731 - DNA, 383 bp, Homo sapiens
ggatgtccataggttatatataaatactacaccatattatataagggatttgaccaccctcagattttggtatctatcgggtatcctggaaccaatcccccatggatatggagggatgactgcatttttcacgattttgytattactgttctcttttctaacctatgaaatactacagtctgcaatttaaatatttgtatgtatatatttaattagaaataacaaatttgtaggttggggtctttcctcctcaataaaagctattttaatccagaagataagaaatctaagaccactttatttggtcaacaataactaaactaaaatgtcctaaattaggtcatagtacaggagaccctactgactgaaataagccattaggc

SEQ ID NO: 242732 - DNA, 415 bp, Homo sapiens
ctgctgcacatgcattacttaacagactgttctcaattcctaagtacaaggacataaaggtagtcttgaagtttaagctgcacctctattatcataccttgaattggtgcactaataccagactacatcctcagcattttataggaactctttctgttgctatagagccttcatgcctacatatgtttatgtrtgggaagacatacggctactaccagaaggaagcatttttgaaagcaatctgtaatcatagctaagtcttttatgctaggtcttttaaatgatgtggaagacaagtgtaatgagcaaatctatgtactggctggagtgacaggtgcagataaagtcaagctctgattatcaacaaagaacaggctgaagctcagtgcttaagagaaatgaacagaaatgtgct

SEQ ID NO: 242733 - DNA, 415 bp, Homo sapiens
ctgctgcacatgcattacttaacagactgttctcaattcctaagtacaaggacataaaggtagtcttgaagtttaagctgcacctctattatcataccttgaattggtgcactaataccagactacatcctcagcattttataggaactctttctgttgctatagagccttcatgcctacatatgtttatgtatgggaagacatacggctactaccagaaggaagcatttttgaaagcaatctgtaatcatagctaagtcttttatgctaggtcttttaaatgatgtggaagacaagtgtratgagcaaatctatgtactggctggagtgacaggtgcagataaagtcaagctctgattatcaacaaagaacaggctgaagctcagtgcttaagagaaatgaacagaaatgtgct

SEQ ID NO: 242734 - DNA, 557 bp, Homo sapiens
aaatatcaatatttaatggccaacttagggagagtgagccagtagaggagctagataaggaagagccagagacttttgaagaaaaactaagtgaggggcatcatgggagcaaaggaaggagaatgtttcaaagggaagggagtgatccacggtrgtaagtactgtgtgtggtcaagtacagagaggtcaaataagaaaaacactgaaaatatccagtggattaggtactcagatgccattggggaccttagagtgagatacttcagtgatgtgattgggttacagtggagcaaaattcgattggagaggtttgaagagaaatgaagtcaacagtaagcatggaaaacgaagtttgagtatgcagtagatgagataaggtggtactagaaagagaaatgaagtaaagattctttaaagtagagttgcctccttcagaaaataatgagtcactttgtgataaatgttttaaatgtatgataatgtccaaacacagaaaagtaaaatcttgtgaaagcaaagtaagcaaatagcctatttatgaggtatgaggtagtgaa

SEQ ID NO: 242735 - DNA, 617 bp, Homo sapiens
ctgttacattccaagaactgttttagttacatgaataatagagcatcatgcatgcaacatactagcactcaaaagaagggcatgcatttcatcttatggaatcacaagcaaacagagagtcaattatcaaagggtctgctcatgacttctgaggaatgtccttttcccttagtttccaggcaggcattgatcattgacgatcatcagtggaggctttgctgtgtttcctctctagacagctgtatacctggataacacagtgttaaataaatggaccaagatggctcctgtatattggcctctatttaatataacaggccaggaccattatgtcaaagcccaccaaactcaaattattacacattcaattgctttaaatataggccaaataaacatatttttaaccagttagagtgtgcccaatttggccacctgtgaaactgcacccaacacttgctgaccatagataagacaaactaagtatgtgaaacaacaaaaacaatttgtaacaaactaatcrtaaagaaagattatgtttccaaagcttattataccccacctccctatacacacacacacgaaaccaaaaaatctctaataaaggaccataatcaaaa

SEQ ID NO: 242736 - DNA, 468 bp, Homo sapiens
gaaggcggaaaaataacagggaagactccttctacctcttaagtttgtcattagatttcaggaaaatcttctcacgtcaggaactgcaggaaaacagttgcaatgcccatggctacygacaacaccaaagagataattcctgagggaactctctaaagaggcccatttggaggctgatgcaagtttcccatcttcacatatgaccattaaaggcatatatatgtaaatgtttgaatcagctttacttttaagagccaaaaacttgtaacaatacaaatgtccattaagagtgcaatagataataaaatatggcatggtcatataatggactactacacaagaactaaaaaatgaaatactgccacatacagcaaatggataagtcttacagacaacatactgaacaaaagaagccaaacaatgcaaaaaccatacataactgtgtgagacaatttacatgaattccaa

SEQ ID NO: 242737 - DNA, 503 bp, Homo sapiens
aaatctttgaatgcaccctgtctagcttcaagtccatcaatccaattttatgactttttaaattagcacattttactayagagaaaaatacttgacatgttataaagtgcattgccattaattaataaactaaattgccatgctttttaggtttttcttcaaattaaaaaaaatctgtaattatgcatactacaaaccaatagttcaaggttttatcacaccacattacaatgacaaaacacattacagagaataagggttgcaagtcttacaaaacactataaaagtatctttttaaagatttgttgcctactcttctgcaaattttcatctttaatactatccctactgctataatttgtcctgtatcttccagcatcctgttatggctcagacaatatcatttaacaagcaaggcccatatacttctttttaatttggaagcctccagttgtattcttaacttggtatagatttgtcacatttccttatgaagaagaaca

SEQ ID NO: 242738 - DNA, 434 bp, Homo sapiens
tgtggaagccgaaaaagtgaatctcatgaagatagagagtagattggtgattagtggagagggagagatcaagcggggttggttaataggtacaaaaatataggtagatagagtgaataatatcatgttctgtagcacaatagggtgactatagttaacaataacatattgtgtacttcaaaataactagaaaagtggaattggaaggtttctaacacacgaaatgataaacgcttgwtaggataaatttaaagagtaaatattaaaattttaagttctaatttttattgatagtatatacaaatgcaattgatgtttaaaatagtttcctgatatcctgtgatttactcattactctgccaatttacttatgaattataatagctttttgtagattccttagggttttcattgtgtgtatgaagctgatcatt

SEQ ID NO: 242739 - DNA, 449 bp, Homo sapiens
caaagtgaggtatgttaactgcttagccaggctgagtaccttaaaggtttttgtttttgtttttgttttttgctcttgtccccaaggctggagtgcaatggcatgatcttgactcactgcaacctccgccttccaggttcaagtggttctcctgcctcagcctcttgaatagctgggattacaggcatgtgccaccatgcctggctaatttttgtatttttagtagagacagggtttccccatgttgaccagagtggttctgaactcctgacctcaggtgatccacccaccttggcctcccaaagtgctgggattacaggcgtgagccaccactccaggcctaaagtttctttttaagtgagacattctccaattgaaaaaaacctgctcattatattacatttcttaaatgtagaaaaatwgatggtagaaaataaaaatcaattttg

SEQ ID NO: 242740 - DNA, 495 bp, Homo sapiens
gggaggacttaagctgtcgatcacgatagaataaatggcacccgattattctccactttaaaacagcagtaacaacaaaaaaaaaaatggacaaaatatatgaaacaactgtttttaggtattggacaacaggcagcagaggacctgagagacagaaacacactgacaagccccacattccccctggcttgctgcataagagtactttctatcacagcatagaaaggtgagacytaagtgatacagtttggttctgtgccccacccaaatctcatcttgtagctcctgtagttcccaggtgttgtgagaggaaccccatgggaaatgactgaatcatggggacaggtctttcctttgtcgttcttgtgatagggaatggattgtctcacaagatctggttttaaaaacaggagtttctctgcacaagctctctttgcctgctgccatccacataagatgtgacttgctcctccttgccttctgccatgattgtga

SEQ ID NO: 242741 - DNA, 438 bp, Homo sapiens
cagatgagaaactgggactcaaagaggtgtgaagctagtgtcccaacagttacttagcatttactggrtaagcccaggctctaactgggtctcctgacagaagtccagctctctctctctgctgcctctttgtcagaactcctggcctgccagcgaatttaactgtctatgagtaaattctaacatctaaggttctaagtataaaatatattgaggtttacagtggtgagaaaaagcaagtgtctgcgtattacagacagctgataaatacgtattgagtcatcagaaagtgaaaatagatgtaggactattatgcaaagcataggagaggaagagcatatgcttaagaaaaaatggcattcctagagttaacaagcatgtttcaaagtatctattactgaaatctacacgattttcctttccacaataaagtccaca

SEQ ID NO: 242742 - DNA, 438 bp, Homo sapiens
cagatgagaaactgggactcaaagaggtgtgaagctagtgtcccaacagttacttagcatttactggataagcccaggctctaactgggtctcctgacagaagtccagctctctctctctgctgcctctttgtcagaactcctggcctgccagcgaatttaactgtctatgagtaaattctaacatctaaggttctaagtataaaatatattgaggtttacagtggtgagaaaaagcaagtgtctgcgtattacagacagctgataaatacgtattgagtcatcagaaagtgaaaatagatgtaggactattatgcaaagcatagsagaggaagagcatatgcttaagaaaaaatggcattcctagagttaacaagcatgtttcaaagtatctattactgaaatctacacgattttcctttccacaataaagtccaca

SEQ ID NO: 242743 - DNA, 444 bp, Homo sapiens
gaattcaggagtttgaactggtgacagcctctcctggggcggggatggctctaagcattgtatgtgtctgactcagccactatagcattgtgtacatgctttgggattaatgactgagactttaaatataaaataaaaagctgtaacattgggaggccacagctacagtgacttggracaaacacagctgagactaaccctgggagctgagactttgcttttccctgtacactctgagaagctaccatctgatcagaagagatatcactgttgcagtgaataaagtcagcatctaatcttcctgttttcacagcagcaccatatggcagtgacagcaccttctgcaagaagagaaactctaaaccaattacaacaatatcatttctgtgttgaaccataagtcattggaaacccactgcaaccatgcttccataatagcagctg

SEQ ID NO: 242744 - DNA, 526 bp, Homo sapiens
  misc_feature (1)...(526): n = A,T,C or G
tgtgggaacagaactggatcacagaggctccaacaagctgcatccccctctccacacccctaggtcccaagactcctgaggcacacatcagactcccaaagtcaggaagtggggatgtgaggtagtttgaaaattctcccttggtaattctaatatgccttctttcaccttccamtttctcactccctactccctcctgaaaaatcactgttccaatgccagtaattaagaacataactcttctgtgctgaaaaaggaatgcagttaaaatctttggggatttatgttgggaaaaggtgctgggctggaaaatgtagccttacatatatctgaatatatatattacagattttcattagacctaagggctgttttaaataaaggttatatttttttaggaaaacatcagatgatgggcaaatgcatgtgttttaggttgtcctggnanacctaaatgtgtgcttccactgcaaccacttcagcttcactgaagtagtgcagagctgaatgacttggattccgaaca

SEQ ID NO: 242745 - DNA, 526 bp, Homo sapiens
  misc_feature (1)...(526): n = A,T,C or G
tgtgggaacagaactggatcacagaggctccaacaagctgcatccccctctccacacccctaggtcccaagactcctgaggcacacatcagactcccaaagtcaggaagtggggatgtgaggtagtttgaaaattctcccttggtaattctaatatgccttctttcaccttccaatttctcactccctactccctcctgaaaaatcactgttccaatgccagtaattaagaacataactcttctgtgctgaaaaaggaatgcagttaaaatctttggggatttatgttgggaaaaggtgctgggctggaaaatgtagccttacatatatctgaatatatatattayagattttcattagacctaagggctgttttaaataaaggttatatttttttaggaaaacatcagatgatgggcaaatgcatgtgttttaggttgtcctggnanacctaaatgtgtgcttccactgcaaccacttcagcttcactgaagtagtgcagagctgaatgacttggattccgaaca

SEQ ID NO: 242746 - DNA, 589 bp, Homo sapiens
ttgtagtcgactttttctttgacctgtcttatgaactccagacttttgttttctcttgcctaactccagacctatattttcagttgacttatccaactgacctgctaaattcaacaaaatcatattctaatcatcagacatagatccttctgagttatttccttccatacactgagtagtccattggtcaccaaattaagaaaaatgttcataaccttcacagcccttcaaaccaaattgttatgcagtcaccacaggaaagtggttcaacacatggattttgatgtcagacagagctgggctttaatcaccattttgccactgctggtgtgagagtagactcgttattcagtctctctaaatctaagttttggacagataatggggataagaaaactatcatttagggctgtgtgagaatttatttattattatcattattattattattattattattattattattttgagatggagtctcgctctgtcacctaggctggagtgcagtggcacaatctcagctcactgcagcctctgcttcccaagttcaagagattctccagcytcagtctcccaattagctggg

SEQ ID NO: 242747 - DNA, 631 bp, Homo sapiens
  misc_feature (1)...(631): n = A,T,C or G
nnnnnnnnnnnnnnnnnnnnnnnnnnnnnnnnnnnnnnnnnnnnnnnnnagcaattagtaagaagaaggcttgaaataaaaatgcaatatcatttataatagcgtctaaaaaatacttaggtatatagctaaatcaaaaaaatgcacaaaatctatatgaggaaaactaaaaatatgatgaaaaaaatcaaagaggagctaaataaatggracaccattccatgttcttggataggaagacttaataccatcaacatgtcagttctccctaactttgatccataaattcagttcactttaaatcataatcccagcaagttattctaaagtttatttaaagaggcaaaagacccagaataacaacacaatattgagggagaagacattcaatagtctgacactacctgacttcaagatttactgtaaagatacaataatcaagacagtgtgatagtgacaaaagaataggcaaatagatcaatgcaacagaatggagatcccagaaatagacttacgtaaataaagccaactgatctttgacacaggagcaaaggcaatacaatggagcaaagatagtcttttcaacaaatggtgcacaaataactggactgccacattaaacaagtgagtc

SEQ ID NO: 242748 - DNA, 631 bp, Homo sapiens
  misc_feature (1)...(631): n = A,T,C or G
nnnnnnnnnnnnnnnnnnnnnnnnnnnnnnnnnnnnnnnnnnnnnnnnnagcaattagtaagaagaaggcttgaaataaaaatgcaatatcatttataatagcgtctaaaaaatacttaggtatatagctaaatcaaaaaaatgcacaaaatctatatgaggaaaactaaaaatatgatgaaaaaaatcaaagaggagctaaataaatggaacaccattccatgttcttggataggaagacttaataccatcaacatgtcagttctccctaactttgatccataaattcagttcactttaaatcataatcccagcaagttattctaaagtttatttaaagaggcaaaagacccagaataacaacacaatattgagggagaagacattcaatagtctgacactacctgacttcaagatttactgtaaagatacaataatcaagacagtgtgatagtgacaaaagaataggcaaatagatcaatgcarcagaatggagatcccagaaatagacttacgtaaataaagccaactgatctttgacacaggagcaaaggcaatacaatggagcaaagatagtcttttcaacaaatggtgcacaaataactggactgccacattaaacaagtgagtc

SEQ ID NO: 242749 - DNA, 495 bp, Homo sapiens
agtgcctgtgaaaatgtagagaactgggaactctaacaaactactgatgggagcttaagttgtcacaagcactttggaaaagtttggaagtgtgtgaaagatgtactcaccataattaggggagtcagagatcacctctaaccatctttaagctcttacatgggcccttcagctgaatctataaaccaaactgacaccaggcagattaacaaaacaaaagcatacacattttattagttttgcatgtacatggggacttcacaaaagagtaaagtccaaagaagtggccaaaaaaagatgcttctatactttttagacaaataatgataaattttagaagaaatgacaggacaaaggaaatctggctagggacagtaactatattcagsttcactgtaggccgccagttcccagtctctggcgataagggctattttctagctctggtactgggagggtactcctcccagaggaatctttatggcttgctgcctg

SEQ ID NO: 242750 - DNA, 598 bp, Homo sapiens
tcttgtgtcctttatttttaattaaaatttttattttgaaataattgtggatttgcatgcagttgcaagaaataatacagagaaattttgtgtactctttacctagtttcctccaatggggaaaaccatagtataatatcataactgagatattaacactgacactgctaagacacaaaacatttccatcaccacaaggatccttcatgttggccttttagagccacacccactttcctcccatcccttacccttttcttaatcgctagtaaccactgatctgccttcttatactatgagtctttcattttaaggatgttgtaaaaatggaatcatattgtagaagccttttgagattggctttttttattcagcataattatctgcagattcatctaggcttagttttattactgtagttatataagcagatttggaatgggatagattgcygctttattctttttcaaaagtattttagctatttcagttcctttgcctttccatataagttttagaataattttgtatatatctaccgaaaaatatttatgagattttgatagaagttgtgttaaacctgcatatcaatttgggg

SEQ ID NO: 242751 - DNA, 516 bp, Homo sapiens
agatctttataacttattcatctttaaaaactgaaatcttgtatctattgaacagcagctgccggtttctccttctccctaggccctggmaaacaccattctactttgcttcctatgagtttgattaagtggaatcaacaaatcacaaagaaagacagggagaaaaagagacacaaataattacaaaagacattgaaaactattaataaaatgacaatgagttttaagctatcaataattactataaataaaatggattaaactctctaataaatagatagagtgggtgaatggataaagaaataagatccagcgatatgctgtctacaagagactcactttagaatcaaagacatgcataagctgaaactgaaggtataaaaaaaattattccatgcaaatgatgaccaagagatagtaagaatggctacacttaaattagacaaaatagacttcttgttaagaactgtcacaagatacagagaaggtctacataaccctgtcatatgtataagg

SEQ ID NO: 242752 - DNA, 516 bp, Homo sapiens
agatctttataacttattcatctttaaaaactgaaatcttgtatctattgaacagcagctgccggtttctccttctccctaggccctggcaaacaccattctactttgcttcctatgagtttgattaagtggaatcaacaaatcacaaagaaagacagrgagaaaaagagacacaaataattacaaaagacattgaaaactattaataaaatgacaatgagttttaagctatcaataattactataaataaaatggattaaactctctaataaatagatagagtgggtgaatggataaagaaataagatccagcgatatgctgtctacaagagactcactttagaatcaaagacatgcataagctgaaactgaaggtataaaaaaaattattccatgcaaatgatgaccaagagatagtaagaatggctacacttaaattagacaaaatagacttcttgttaagaactgtcacaagatacagagaaggtctacataaccctgtcatatgtataagg

SEQ ID NO: 242753 - DNA, 547 bp, Homo sapiens
acacacaagttttctgcctcctgggtgctgtgttgttatacctggagatactataatggattgcgttggttggcttccagccaagaggtggcacttgcaaaacagcaccaactatggtagtagtggtgagatttgtgcttgccttatgttacccagggacataagagtaccccgggaaggtactctggtttctcaggcaatgggtggggccatagagctctcaaaagttagttttctttgtgttaagctaccagagtgtgtggaggggcaaagccaggttggggctgggtcagtcaggttcatgctctgtgacaagcagtggttcctgttggagttggggggaggttttctggccgctggggtaatgttccaagagcctagctkcttctgctgcgcagaagagtttgcacagggagttgggagtagcaggtgtcagtaagccctaccatgctcctacacacttggcaaggcaagtctcacacccgcagttttccactagtagcagtgagctaagttccaggttgtctacgctcagaactcacaacta

SEQ ID NO: 242754 - DNA, 547 bp, Homo sapiens
acacacaagttttctgcctcctgggtgctgtgttgttatacctggagatactataatggattgcgttggttggcttccagccaagaggtggcacttgcaaaacagcaccaactatggtagtagtggtgagatttgtgcttgccttatgttacccagggacataagagtaccccgggaaggtactctggtttctcaggcaatgggtggggccatagagctctcaaaagttagttttctttgtgttaagctaccagagtgtgtggaggggcaaagccaggttggggctgggtcagtcaggttcatgctctgtgacaagcagtggttcctgttggagttggggggaggttttctggccgctggggtaatgttccaagagcctagctgcttctgctgcgcagaagagtttgcacagggagttgggagtagcaggtgtcagtaagccctaccatgctcctacacacttggcaaggcaagtctcacacccrcagttttccactagtagcagtgagctaagttccaggttgtctacgctcagaactcacaacta

SEQ ID NO: 242755 - DNA, 646 bp, Homo sapiens
tgtttttcattgaggccttcaatctatttggaatttatttttattatggggagaagatttagtatcaataattgttcactttttcctctaatgtgtcatgctatctttaacaaatctgttatgttctattgatctatttgtctactgctgaccaataatacagcttcataagtttttatatctagaaagtcaagtcccttctgtttgttcttctttatcagaattgtcttgaatatttttggatctttgcttttccatttgaataccagaagtattattccaggtttattaaaaaatcttgttaagattttaatcagtattgcccaactgacaacatctctggctgatactgcctcagagaaaccaaayggctccagcactgtgaatctgagcagaaaaaagcatactcatcaaaagtatggcctccaccttgcttctaccttccaagctccatttgtatctgattgaaggaaaccaaactgcacctggctgcaaggggtaaacttatctgcaagaaattcagaaaatgtacattttagctttaaagcttctgtagtataagaagatagagtagagcagtggatttcaaactatgggttgcaacctattagcgagtcatgatatccatttattgagttataaatgg

SEQ ID NO: 242756 - DNA, 504 bp, Homo sapiens
tggcaatgtagtggacttaaaaatctggaaagaaagagaacaaaataaaaacaatattccttttattaacaaaatatgatcataataactgtaaaagaatttttatgacaggaaaagtcacccttaccccattgtcttaaaactctaacataaccctttcctgcattttttctctgcccactggggctttaaaaaaaatgtattggtagtcagaaatattttgatctgagaagactgggggagtcagtttagggtcagyagcctggcttagagtgtgggtagattattgctgagggatatttggggagagtcctgaagcctagaagtgaaaggtgaggaggctgcaagaggagagggactggctgggttaaagcccagaaccttgtaaagcacctgcttttgggtggtggttctctacctcctgggtcctgccttaaccagatcaaatggctgctctctccttaggcagaaaccacatgccttctgcccgctagctgcctctgg

SEQ ID NO: 242757 - DNA, 504 bp, Homo sapiens
tggcaatgtagtggacttaaaaatctggaaagaaagagaacaaaataaaaacaatattccttttattaacaaaatatgatcataataactgtaaaagaatttttatgacaggaaaagtcacccttaccccattgtcttaaaactctaacataaccctttcctgcattttttctctgcccactggggctttaaaaaaaatgtattggtagtcagaaatattttgatctgagaagactgggggagtcagtttagggtcagtagcctggcttagagtgtgggtagattattgctgagggatatttggggagagtcctraagcctagaagtgaaaggtgaggaggctgcaagaggagagggactggctgggttaaagcccagaaccttgtaaagcacctgcttttgggtggtggttctctacctcctgggtcctgccttaaccagatcaaatggctgctctctccttaggcagaaaccacatgccttctgcccgctagctgcctctgg

SEQ ID NO: 242758 - DNA, 504 bp, Homo sapiens
tggcaatgtagtggacttaaaaatctggaaagaaagagaacaaaataaaaacaatattccttttattaacaaaatatgatcataataactgtaaaagaatttttatgacaggaaaagtcacccttaccccattgtcttaaaactctaacataaccctttcctgcattttttctctgcccactggggctttaaaaaaaatgtattggtagtcagaaatattttgatctgagaagactgggggagtcagtttagggtcagtagcctggcttagagtgtgggtagattattgctgagggatatttggggagagtcctgaagcctagaagtgaaaggtgaggaggctgcaagaggagagggactggctgggttaaagcccagaaccttgtaaagcacctgcttttgggtggtggttctctacytcctgggtcctgccttaaccagatcaaatggctgctctctccttaggcagaaaccacatgccttctgcccgctagctgcctctgg

SEQ ID NO: 242759 - DNA, 476 bp, Homo sapiens
gaggatggttggcctggaaggcagtaggtcagcagcaggtcaacagccataccctgactgctgctgtcaaggccactctgctgcagggagcagagaggagggactgatcagggtagtgaggggaagggggaaaggaaagttaaaatgcatggtaagaaaagggactctgagttccctggatctgagggattgggacagaggagggaattgggaggtaggagtaggacagggtagtgggtggggacctccgctttagccagctccctttccctgggtcagaaactgtaaaaaacaaaacaaacaaaamaaatttatctgtaacaaagatgcctactcccagcagctcctggacaaagcctctagcagctgcaactggaccaaccctcaaatggtccatgaccttacagattaaagacctggtccattatttatgttgcctcatttcttgtatcaccccaaaactcactaaggcagat

SEQ ID NO: 242760 - DNA, 582 bp, Homo sapiens
ttagaggactaatatgagaattaaatggaaatcatctgtgtgaatggcttaggatagtaagtttctttttcttctccttcctattattattacatggacatgaatgaaaggatgcagaaaaagtcccatacaaaccccagacttcctcttctgagcctattctagctgcacaaattctacccccggagaattctttggaataaatgtaaatctgtttggagatagaacaaggtacattatcagctatttatatttcagggagcatacatatgcttctctatacgcattactcttcactttcatatgtgttaacatattcaggacttggacaggcctgaaaaagtaaagctcaggagggatcttctcttcattttacaaagggaaaaatatgagtcacagaatctaaatcattctgtgggagcctrgacagaaaccaagtgctattgcactagggcagtgtttttcaaagtgtgggccaaggttgccctctgctccagaagactttgtcagggtttgtgtcaggatcaagccccagctgaggtctgaggggagtgggtggactgggggcaggaagctggaaga

SEQ ID NO: 242761 - DNA, 582 bp, Homo sapiens
ttagaggactaatatgagaattaaatggaaatcatctgtgtgaatggcttaggatagtaagtttctttttcttctccttcctattattattacatggacatgaatgaaaggatgcagaaaaagtcccatacaaaccccagacttcctcttctgagcctattctagctgcacaaattctacccccggagaattctttggaataaatgtaaatctgtttggagatagaacaaggtacattatcagctatttatatttcagggagcatacatatgcttctctatacgcattactcttcactttcatatgtgttaacatattcaggacttggacaggcctgaaaaagtaaagctcaggagggatcttctcttcattttacaaagggaaaaatatgagtcacagaatctaaatcattctgtgggagcctggacagaaaccaagtgctattgcactagggcagtgtttttcaaagtgtgggccaaggttgccctctgctccagaagactttgtcasggtttgtgtcaggatcaagccccagctgaggtctgaggggagtgggtggactgggggcaggaagctggaaga

SEQ ID NO: 242762 - DNA, 526 bp, Homo sapiens
tacaattaatgcctatttattcactagttacatcagtaataaacctggcatttttatctccatctgcccaaatctaaagtacctttaaaaaaataagcttttaattttttttctgagacaggatcttcctctgccacccacactggagtacagtggcactatcacagctcactgtggccttgatctcccgaactcaagygatcctcccacctcagcctcccaagtagctggaactacaggcctgcaccattatgcctggctaattttttttttttttttttttttttttttttacttttagtagagacaatgtcttgctatgttgcccaggctggtctcaaaatcctgagctcaagcaatccttcagcctcagctgcccaaagaactgggattatagacgtgagccactacacctggccaatgtgcatttttaataggttccaaacatggtggagaatggagtgtcatttattgaccatcctcatagactccagtatccctgagcccttccagtctcttattttgg

SEQ ID NO: 242763 - DNA, 440 bp, Homo sapiens
cttctacctgtcaccatgcatattacaaacctggaggcacctcagtaaaattttcagcttataccctcttgagctacaaagataatgcaaaacccagccacaaattcagtttttttttgtttttttttttttttttagatggtgtctcattcttgttgcccaggctggagtgcagtcacatgatctcagctcactgcaacctctgcctcccgggttcaagtgattcttctgcctcagcctcccgagtatctgggattacaggcaccaaccaccacgcccgggtaattttttgtatttttagtaragacagggtttcgccatgttggccagcctcgtctcgaacttccgacctcaggtgatctgcctgcctcagcctcccaaagtgctgggattacaggcgtaagccaccacgcctggcccacaaattcagttttagggga

SEQ ID NO: 242764 - DNA, 241 bp, Homo sapiens
attttcaaagaaatgagtggttgcatcaaaatcaagcttatatttgtggaaaatcacatgttgccaaattctctcatcaagaaccctttattaactgactaattgtgggccatggtggcaggcacttaacaaagaccatggcagcagacctccctcaactggaaccctcagttaagygggattttgtttttatttttgaactccaccttcagaagggcaaaaatcacaagatgtggtagca

SEQ ID NO: 242765 - DNA, 241 bp, Homo sapiens
attttcaaagaaatgagtggttgcatcaaaatcaagcttatatttgtggaaaatcacatgttgccaaattctctcatcaagaaccctttattaactgactaattgtgggccatggtggcaggcacttaacaaagaccatggcagcagacctccctcaactggaaccctcagttaagtgggattttgtttttattttkgaactccaccttcagaagggcaaaaatcacaagatgtggtagca

SEQ ID NO: 242766 - DNA, 360 bp, Homo sapiens
tccaagcagtcgtcagcccagtctgtatgtcttccgcatctataattatagtagcagaagagaatggtgagcctggggcactgcaagatcctaaatcaaagattaaggcatattaactctaccctscctggaaagtggtcagttgtattttaaaaagctttacaataggctttctaataacgagagttgaagcaaagtttccacctaaccctgtaattaaattcaccagaagaccccatttcccattatccagacgaccaaggctttgccgaacaccacccgtccctgccctctaggagaggtcatccaaggccagcaatgaaacagtcaatcaatttgcaaatggacaggaggacactg

SEQ ID NO: 242767 - DNA, 360 bp, Homo sapiens
tccaagcagtcgtcagcccagtctgtatgtcttccgcatctataattatagtagcagaagagaatggtgagcctggggcactgcaagatcctaaatcaaagattaaggcatattaactctaccctgsctggaaagtggtcagttgtattttaaaaagctttacaataggctttctaataacgagagttgaagcaaagtttccacctaaccctgtaattaaattcaccagaagaccccatttcccattatccagacgaccaaggctttgccgaacaccacccgtccctgccctctaggagaggtcatccaaggccagcaatgaaacagtcaatcaatttgcaaatggacaggaggacactg

SEQ ID NO: 242768 - DNA, 360 bp, Homo sapiens
tccaagcagtcgtcagcccagtctgtatgtcttccgcatctataattatagtagcagaagagaatggtgagcctggggcactgcaagatcctaaatcaaagattaaggcatattaactctaccctgcctggaaagtggtcagttgtattttaaaaagctttacaataggctttctaataaygagagttgaagcaaagtttccacctaaccctgtaattaaattcaccagaagaccccatttcccattatccagacgaccaaggctttgccgaacaccacccgtccctgccctctaggagaggtcatccaaggccagcaatgaaacagtcaatcaatttgcaaatggacaggaggacactg

SEQ ID NO: 242769 - DNA, 360 bp, Homo sapiens
ccaattcccacacacaagcaacatccccagcagtaataaggacgttccacacacccaggacttgggatatttgtgtattttcaagaataaaagtttgccctttagcctcctcagagccccctcccttctcctcgctctccccttatcactgctattcatcatcttactcctacagataccccctcttcstggtggcaccgggcattggtaactcatggctgtaaaggagagctgagaacaaaacaggaagaaaagaggttaagtaatggcaagaaaaaagatgtaccttaggaataaaagagagttccccaatgtcacagtgtatttaattaatccttctatttattaaagattaaaaat

SEQ ID NO: 242770 - DNA, 360 bp, Homo sapiens
ccaattcccacacacaagcaacatccccagcagtaataaggacgttccacacacccaggacttgggatatttgtgtattttcaagaataaaagtttgccctttagcctcctcagagccccctcccttctcctcgctctccccttatcactgctattcatcatcttactcctacagataccccctcttcctggtggcaccgggcattggtaactcatggctgtaaaggagagctgagaacaaaacaggaagaaaagaggttaagtaatggcaagaaaaaagatgtaccttaggaataaaaragagttccccaatgtcacagtgtatttaattaatccttctatttattaaagattaaaaat

SEQ ID NO: 242771 - DNA, 360 bp, Homo sapiens
ccaattcccacacacaagcaacatccccagcagtaataaggacgttccacacacccaggacttgggatatttgtgtattttcaagaataaaagtttgccctttagcctcctcagagccccctcccttctcctcgctctccccttatcactgctattcatcatcttactcctacagataccccctcttcctggtggcaccgggcattggtaactcatggctgtaaaggagagctgagaacaaaacaggaagaaaagaggttaagtaatggcaagaaaaaagatgtaccttaggaataaaagagagttcccsaatgtcacagtgtatttaattaatccttctatttattaaagattaaaaat

SEQ ID NO: 242772 - DNA, 589 bp, Homo sapiens
gtacgggttgcagtgagctgagatcgcaccactgcactccagcctgggcgatgaagtgagactcttcagaagaaaaaaaaacaaatacatgttactaaaaatgcttggtttggtrgtctgtcaataatttggcctttggacaaagatacaggaaatatgaaacatttgataaaataaattaatatgagggttatttaacaggaataaatgctcgaatttaataaagtgttatctaatatctaactgaaggatggaacttttatttgaatgaaaataacatgaaatttttatctgcaggttttagccagtatatctgggaatatttagtagttttggaaagtattctatttatgttaaaacattcaacatcactaaacatttacttatttcagctgtttgaatatttctttctttccggtggacatagcataaccattgtgaatagctggaaatgtatgctttttgtcaaatatgtgagggaaaaagccattttcaacatatggttcttttgccttactttcatgagtgtctccctcaacagtgaagccatctcccactggtctactctacattgtctgaattcagaact

SEQ ID NO: 242773 - DNA, 573 bp, Homo sapiens
cgatgctgtgaatacacttaacatttctgaactgtacatttaaaaatgattatgatggaggtcacttccaagatggccgaataggaacgctctggtctacagctcccrgcaagatcgatgcagaagatgggtgatttctgcatttccaactgaggtacctggttcatctcattgggactggttggacagtgggtgcagcccacagagggcaagctgaagcagggcagggtgtcgcctcacctgggaagtgcaagcggtcaggggatttctctttcctagccaagggaagctgtgagtcactgtacctggaggagtggtatgctcctgcccaaatactgtgcttttcccatgatctttgcaaccggcagaccaggagatcccctcccatgcctggctcagtgggtcccatgcccacggagccttgctcactgctagcacagcagtctgagatcgacctgggatgcgggagcttggcggcgggaggggcgtccaccattgctgaggcttgagtaggcggttctatgctcacagtgtaagcaaagcggcagggaagctcaaactgggcagagtcca

SEQ ID NO: 242774 - DNA, 539 bp, Homo sapiens
tatgtgagctttgcttagacacccagaacaattatgaaattattgtacaatttgcttacttcattgaaaactttccattttatygtttcaaagttttggttttcattttttatttgtggactgtaggagctattgtatttgaaatgcaagtatatttctgagcccactttcagtccaccatccagctaggattaagggataacattttggcaattgtgtaagttcacattcttgggttccaagcaacaatttcaaaaaaggtttcttttcttctttgttatttccaacataaagaaatcctgtcatagaatttctatcatgaatggacagcttctatcacagaatcacagaatcttagaattggatctagtccaccatcccactcaattcaagaatccattagttagcatagtttagtatcccaatgaatgatcatctagtctttgcctaaagtccaccagtgatgggaaaattcatcatcataaacccctattctatttatggtatagtagaaagcccagtggttttggaaacagaca

SEQ ID NO: 242775 - DNA, 509 bp, Homo sapiens
atgcctggcagaggtgggcctaacacagttctcaaaagatgaatcacccaggaactggttggaaatgcagattcctgggtactacctcagacctactgaattagaaatccaggggtggggcccaggcatctgtgtttttccaagacctccaggggattcccgtgcacactcaagtttaaaaacgacgaaactgatggaatccctgacatgacaacccctgccctagcatcctaccgaggtctgggatcagggcaggctgaggcygtaaggctgggcctctgagagccagactgagcagaactcaaggccacgggaagctggagtagtttgcctctgtgagtcacgccctccctgaagggaaaccccacagatgaaaggaagctgtcctgctgggttttgcaacctggcttcttggacctggatggtggaagcagtgcctcatcccctccacagacccacaggcccacagctggctggggcctggggcaaagccgcacgcagggacatcc

SEQ ID NO: 242776 - DNA, 509 bp, Homo sapiens
atgcctggcagaggtgggcctaacacagttctcaaaagatgaatcacccaggaactggttggaaatgcagattcctgggtactacctcagacctactgaattagaaatccaggggtggggcccaggcatctgtgtttttccaagacctccaggggattcccgtgcacactcaagtttaaaaacgacgaaactgatggaatccctgacatgacaacccctgccctagcatcctaccgaggtctgggatcagggcaggctgaggccgtaaggctgggcctctgagagccagactgagcagaactcaaggccacgggaagctggagtagtttgcctctgtgagtcacgccctccctgaagggaaaccccacagatgaaaggaagctgtcctgctgggttttgcarcctggcttcttggacctggatggtggaagcagtgcctcatcccctccacagacccacaggcccacagctggctggggcctggggcaaagccgcacgcagggacatcc

SEQ ID NO: 242777 - DNA, 454 bp, Homo sapiens
tgaattccttaaccttcagcatgttcactcttacatatttttgcttcttctcatcctctgcccagaatgacctctcctaataaacgtaccccaagagcttctattttacagttagtaatcaaactaaatgttacctcttctttgagctttagctgatccaacccatccaactgagttgttctttcatttatgttactggagtattccatacataccactattgtaggtggcatggtttcagatctttaagtccattcattagctcacctatcagttcaatgactrctgcaatgtgtgtaatctcggcatttttttttctataggccttttattgataatatacatatgataactaaagagaaacactttttaattattttgttacccttgtgacctgaaagagattttcaagcatggctatcttttcttgaaagaatgatttatttgattcata

SEQ ID NO: 242778 - DNA, 454 bp, Homo sapiens
tgaattccttaaccttcagcatgttcactcttacatatttttgcttcttctcatcctctgcccagaatgacctctcctaataaacgtaccccaagagcttctattttacagttagtaatcaaactaaatgttacctcttctttgagctttagctgatccaacccatccaactgagttgttctttcatttatgttactggagtattccatacataccactattgtaggtggcatggtttcagatctttaagtccattcattagctcacctatcagttcaatgactgstgcaatgtgtgtaatctcggcatttttttttctataggccttttattgataatatacatatgataactaaagagaaacactttttaattattttgttacccttgtgacctgaaagagattttcaagcatggctatcttttcttgaaagaatgatttatttgattcata

SEQ ID NO: 242779 - DNA, 546 bp, Homo sapiens
gaattcaaatcaagacaagtctgatgccaaagaatgattcagatcatgttctgattcaaatccaggacaaagaaagaactcctaatgactctctcttgcctcacatatgtgagcagatattcctcagtaagagtcatttaataattacattaaagaccacagttctccgaaaatatccaacaaaattagtcaagttttatgtagaagaatcaataaagcttttccatccttctcttggactattgtacccctattaaggtagattctaaacacctgtcacttactaggaaaaaataacattgatctattacaaaaaataaagtaattccgaccttggcagattatataagggggccatccggaagcaggctacaacagcccttttcctctgcttrgacagtagtttatgccatacagcctttttagatctctgaggatgttccacctgaggtagaatgacacaaataaatatttacaccccaaactaccttcaaaaacaaataaatatttacaccccaaactatcttcaaaaatatagtattaaac

SEQ ID NO: 242780 - DNA, 535 bp, Homo sapiens
tcaacattttgaggattatgctaggagctctgggtcttatttttaactctgtttcacctggtttcctctgaccccatccagcaggagaagggcttagggtatcttattgctgccaggtgggaggcgaagtccattttcccactcagccttcttggacatctggaggagggaagggaccctgttactgttgggcagtggtaaaaagttctggttcctcattagacctgtactgatgtgaaccttgctagaaaggtaagagtgtcttgctacttctccttccataacctctactgatactttggaagaaatgggccttgttactactcagcggggataaagtcccagctctgtcctctactgggacaccttgttacagcctggtgagagtggaagtcaaggttccccactcagcctgtgcccagtgtgggtggggaacagttttttctgtggtttttggctkcagtagtgcagttattatctaacacatttctgtcttgctaagctgccccttccctgatcctttatctagaaagag

SEQ ID NO: 242781 - DNA, 360 bp, Homo sapiens
taagcgcactttccaagcccagcaagaattaggtgtaatctgaaacaattggttataaaccggcccctatgtacttacttcacttgtcttgcctctttctgggaccagccattaaggcactgaggtgggagagggagctgttggttgtatatctttttcaacctcttctattaatcaaatgacttaagggataggggaagatgtatttttcaaggaatstgacacaggttcataaaacgtgtaacaatataaaatataaactagttgccttgtaaattcttggtggtaattataaagagaaaaaaatgatgtgtcatccttagataatttgtaagtcctgtgcctagatacacgaatagc

SEQ ID NO: 242782 - DNA, 596 bp, Homo sapiens
aagcttgagaaagataatcaaactgattagtgatagtgataacgtctcctcctagcttatcgctgatttcttctccttagaccaggggttctgaaagtatagtctatgcagtaatggcatctggccaacatagccaaatgagttagtcactaataagaaaacatgattatgttacatyagctgacgttacctaataagaacagaagagaagaaagtcagtgtattggtccattctatttattgtattagttcattctcatgctactaataaagacataccagtgactgggtaatttatgaaggaaagaggtttaatggactcacagtgccatataactggggaggcctcaggaaacttacaatcatggcagaaggggaagcaaacacatccttcttcacatggtggcagacgtgcagagtgaagttggggaaaagcctcttataaaaccatcagatcctgtgagaactcactatcacaacaacagcatggaggtaactgcctccatgattcaattaccttccaccggtctgtcccacaacacctagggattacgggaactacaattcaacatgagatttggatggggacacagcca

SEQ ID NO: 242783 - DNA, 609 bp, Homo sapiens
ccggtttattctttacaggcatttcccccaataaatcgcctgtatgtctgcttttcagagaccaggaactgatacaagtaaatactaagagtggtccaagaaaacagaaggccagctggggttttggaattgggtgactcacggtcctgatggcaaaaaggggctcattccaagaggaatgtgaggtataggacagaccttggtaacaagtggtggcctgaatggtgacgatttcaccagagttaacccagragaagtgacgattatgcaggtgtgagctcacaataagagaggtggtgacagagctgaggtactagaggcaggcggtctccaggggcaggcaggatctagggtaatagaggcaggcggggtctgatagaagctgtcagaagtcattactctaatgactggcagaggtggagagacagcccacggggcctggcccttagagggggcagataggacatagtattccaaaataaataggcagctagggagggttctacataatatctgcaactaggagaaggccaggaaggaggagaggcaagctgcaggtggagatggagcagaagtagccccaattcctatcacttccacggggagaca

SEQ ID NO: 242784 - DNA, 609 bp, Homo sapiens
ccggtttattctttacaggcatttcccccaataaatcgcctgtatgtctgcttttcagagaccaggaactgatacaagtaaatactaagagtggtccaagaaaacagaaggccagctggggttttggaattgggtgactcacggtcctgatggcaaaaaggggctcattccaagaggaatgtgaggtataggacagaccttggtaacaagtggtggcctgaatggtgacgatttcaccagagttaacccagaagaagtgacgattatgcaggtgtgagctcacaataagagaggtggtsacagagctgaggtactagaggcaggcggtctccaggggcaggcaggatctagggtaatagaggcaggcggggtctgatagaagctgtcagaagtcattactctaatgactggcagaggtggagagacagcccacggggcctggcccttagagggggcagataggacatagtattccaaaataaataggcagctagggagggttctacataatatctgcaactaggagaaggccaggaaggaggagaggcaagctgcaggtggagatggagcagaagtagccccaattcctatcacttccacggggagaca

SEQ ID NO: 242785 - DNA, 609 bp, Homo sapiens
ccggtttattctttacaggcatttcccccaataaatcgcctgtatgtctgcttttcagagaccaggaactgatacaagtaaatactaagagtggtccaagaaaacagaaggccagctggggttttggaattgggtgactcacggtcctgatggcaaaaaggggctcattccaagaggaatgtgaggtataggacagaccttggtaacaagtggtggcctgaatggtgacgatttcaccagagttaacccagaagaagtgacgattatgcaggtgtgagctcacaataagagaggtggtgacagagctgaggtactagaggcaggcggtctccaggggcaggcaggatctagggtaatagaggcaggcggggtctgatagaagctgtcagaagtcattactctaatgactggcagaggtggagagacagcccacggggcctggcccttagaggggrcagataggacatagtattccaaaataaataggcagctagggagggttctacataatatctgcaactaggagaaggccaggaaggaggagaggcaagctgcaggtggagatggagcagaagtagccccaattcctatcacttccacggggagaca

SEQ ID NO: 242786 - DNA, 550 bp, Homo sapiens
acctactattgcccactcaccagacacaatagaaatcattgtatctctgggatttcctcacccgtccagaagagtctattgagttttacttcctgtgagttgtattataaaatcactttctttcattttatacaacagagctgyacttacaattttttgaaggtgcttttttcaaaccatacccatgtgagatagctttgagggactgtgatacacccttcccatgagaggcacgtttcctaattgagaattaccgactggatccagtaattatgttgactgactctttgtgccttttgattttacaagtctctactttagcaaaaactgagcctaatgacctacggacactcttgcatctaaccattttaactgttcactctcctatttgtactctttctattctctttattaaggttggggggttttacaaacctagtatttataaacaataaggagaagagaatgatttatatagcactggaagtactggtcatatagtataaatgttatgaagtacagtaatatggcttcctacttttaccaaaac

SEQ ID NO: 242787 - DNA, 665 bp, Homo sapiens
tctgctttccagctgattatcttactacagacataaacagaaattcaacgtgatggtcagcgttgagcagagatgccacggtgttggtgggtactgcttttccccygaagcgctccactccagtctgtcaaagggcagcaagcctccagtagttacagaaatggtaacattgccaagatctgcttcatcctttggctgttgaatgggtggcttatggcccctgagctcacgacaaggaaagagagaaagaaaagtgaaaaagagggcccccaccacctacctacctgctgctgttccagctcatcaaaaacaaaagtctaaaacagtggctggaaagtaccttgcatgatcccttcacagaaacaatagagaggagcagctgcacagggaccacgggacaccaggcagacattctcccattgcttctcctgcctttagcatccttttatcttgcttctcccataatccaagcatcagatcccatttccctctgaattctcctacttctcccagcactttataaaaccgagtcctgtccccagagccccaggtcagtgctcccggcacacccagcaggaaacagcagggtgggggccaggcagtgggtggaaggggcacaggagtgggagaaggcaggcctggggctgaatctcggtgcaaatgcg

SEQ ID NO: 242788 - DNA, 545 bp, Homo sapiens
gttgatctttattaggcaagccagggagagcctatctgtaaaggagggaaaatttaaactgagacctaaatggtaagaagcagtcagccatgaaaagatggagagagagcatttcagaaagaacaaccagttggagaccttgaggcagaacaatagaccatgacttagactgagttcccagagtggaggctatctcagggaattttgtgcaaaaattgggaaggatataagccccttgtgtcaatagatttggagagagcaactccaacctgaatttcagggttatgcctgaaaatcccagaaagtcctggtggtgagtactagtctacaaagagggatgcagttctgagctgaaaagtccattgcactgagctgggttctataatagcctggcccatrtatgactggtggcaagaccacagaggagggagtactgacctggatctcagggcaaggtgaagttcccaggtctcattcaagttctctggtgatgtgagctgacttggggattgagtgtgccctggcattcttccagggtggagaca

SEQ ID NO: 242789 - DNA, 495 bp, Homo sapiens
taaattttaaagtatgattgggcataattttttatatatacatatgtatatgtataaatttttcatttattttatataaaggaacatyttcctatgtcctgatgatcatttttaatgattgtgtaatttttaatctagcaattgtaccataatttactaccgcatttctaaatgtttggccaattgtgttgcaaaaaacatcttcataaatacaggatttttccttcagtgatttttttttccatgaaacaactctccaaagaaatattgttgagtcacaagttaggatctcatgttatatctgaagcagcctgttatcttgcagaaaaggtgttagttcatttattttaatatcatgccaccacactggaactcaccatccacacacattaggcaccaatagttgcaaagaactctgcaagacacctcctaactaaagttcagaatggagcctcagggaatacaggggttaatgctgaaatacaagcctcctgt

SEQ ID NO: 242790 - DNA, 495 bp, Homo sapiens
taaattttaaagtatgattgggcataattttttatatatacatatgtatatgtataaatttttcatttattttatataaaggaacattttcctatgtcctgatgatcatttttaatgattgtgtaatttttaatctagcaattgtaccataatttactaccgcatttctaaatgtttggccaattgtgttgcaaaaaacatcttcataaatacaggatttttccttcagtratttttttttccatgaaacaactctccaaagaaatattgttgagtcacaagttaggatctcatgttatatctgaagcagcctgttatcttgcagaaaaggtgttagttcatttattttaatatcatgccaccacactggaactcaccatccacacacattaggcaccaatagttgcaaagaactctgcaagacacctcctaactaaagttcagaatggagcctcagggaatacaggggttaatgctgaaatacaagcctcctgt

SEQ ID NO: 242791 - DNA, 495 bp, Homo sapiens
taaattttaaagtatgattgggcataattttttatatatacatatgtatatgtataaatttttcatttattttatataaaggaacattttcctatgtcctgatgatcatttttaatgattgtgtaatttttaatctagcaattgtaccataatttactaccgcatttctaaatgtttggccaattgtgttgcaaaaaacatcttcataaatacaggatttttccttcagtgatttttttttccatgaaacaactctccaaagaaatattrttgagtcacaagttaggatctcatgttatatctgaagcagcctgttatcttgcagaaaaggtgttagttcatttattttaatatcatgccaccacactggaactcaccatccacacacattaggcaccaatagttgcaaagaactctgcaagacacctcctaactaaagttcagaatggagcctcagggaatacaggggttaatgctgaaatacaagcctcctgt

SEQ ID NO: 242792 - DNA, 392 bp, Homo sapiens
aaattcagtggtgaaccaagagacaaaggcctttcacgaagctcagagatgctgaacaagctgtcacacatgtgttaaaaattgaggagagctagcagagttccacaggaaaacatcatgggagactaacagagctacattcttaccactcagcaatcctcccaaccctgggccaactcctytttcatttcctcacaatgaatattcctgaccttaattgctacactagactacaagactaaaattcaagatctcatctctccaactccaaagccctagctcattcacattgcatactgcctctctaatgcacaggccacagaatatttacaagtttatgtatcatccctaacattccatcttagtgtatatcaaaagtctaaattggaata

SEQ ID NO: 242793 - DNA, 591 bp, Homo sapiens
aaaatgaaagcttagatataaactgaatcctaaaactataatacaagttcagttgttagatttctttatttttgtgttgttataaagacccttttaaaaagaatataatatagtaggagaagtcctgggttctgtggtttcctctagcagtgtgtcatcttaggtcactttacctctgttagtttaattaccttttatatgaattggagataggtctctttagcctaggctaaggcttggacaaattacacatttttagtccctttcagctctgagatctgtgattttgtagctctgccatggattatattaaatkaaaggttaacttgagggagtgtgacagccttggagaggttcttgctgggagataaaactcttcttgtaacctctgtggcttgactgaaaacctcctctcataagtgttagcaatgtgacctgactgtaatctgagctgctatggagtttcgtgttcacccctgcaggccctgtgcctcagatacgtttttcaaatgcaagataatgagaaggaggttttaataaggtgttttgcttttttaaaaaaaaatctttgttctccttttttaagttgaa

SEQ ID NO: 242794 - DNA, 515 bp, Homo sapiens
aggcatgaaatcattttagcagattgcatgaccagtgtttcttttttaagctaacaaaattaaactagaaaagaaatcagcacaattacatatagtaagtgtgctacacatagcagtgtgaatatgtacactcacatatattgtttcgtgaaactttggtttcaattgtatgtgtgtacacaaggatatgcattgtaaaatgtgttgctgaccatgggtcatggtcaaaatattttgccagattgagctgtttaaaatggtcttggccgggcccagtggctcacacctgtaatcccagcacttagggaggccgaggcaggcggatcacctgaggtcaggagttcragaccagcctgacctatatgaaaccccatctctactaaaaatacaaaaaaaattagccgggtgtggtggcatgtgcctgtaatcccatctacccgggaggctgagagaggagaatcacttgaatctgggaggcagaggttgcagtgagccaacatcacgccattgcactc

SEQ ID NO: 242795 - DNA, 613 bp, Homo sapiens
gagtggagatcacaccactgcactccagcctgggcgacacagtgaaactgtgactcagaaaaaagtataagaccatatggaactactgactaakaaatagttaaactttttgttcaagacagcaaaatgtattttgaaaattctgctacctcttgatgctgacagtgtttttctcccgtgagtgacccaagcatattataaataattgataaagggaatggagctggttgggtggagcaaaaggttgcactagctatgcctagactgaatagaagagtgttatgatgatgagaaagcaaaatctttattttttttctattccaaagattcactctgattcagcctgactagtactgacagtttatggaaaatctcagctgttctctttctagcacctagatacagatatgagcatggccccttctcctcctccagatccccagtaaaacttcacccacagcagcttctttctccccactggagaaagagtggggagcccaaacccctttcttttatctaatcacctggccacaatttatccccctttgttaaaatgatatataagctccaggtctaactgcttctttggctcttcacttcttttctgtgaagc

SEQ ID NO: 242796 - DNA, 613 bp, Homo sapiens
gagtggagatcacaccactgcactccagcctgggcgacacagtgaaactgtgactcagaaaaaagtataagaccatatggaactactgactaataaatagttaarctttttgttcaagacagcaaaatgtattttgaaaattctgctacctcttgatgctgacagtgtttttctcccgtgagtgacccaagcatattataaataattgataaagggaatggagctggttgggtggagcaaaaggttgcactagctatgcctagactgaatagaagagtgttatgatgatgagaaagcaaaatctttattttttttctattccaaagattcactctgattcagcctgactagtactgacagtttatggaaaatctcagctgttctctttctagcacctagatacagatatgagcatggccccttctcctcctccagatccccagtaaaacttcacccacagcagcttctttctccccactggagaaagagtggggagcccaaacccctttcttttatctaatcacctggccacaatttatccccctttgttaaaatgatatataagctccaggtctaactgcttctttggctcttcacttcttttctgtgaagc

SEQ ID NO: 242797 - DNA, 442 bp, Homo sapiens
acaaggttaaaaaaatagatagctatccttaggatttgcaaggtgttcacttaaaacattctttttttttttttttaatgaacattctcataaaacattcttaaaatggttggcttctttgctgatatggcagtaaccaaagattccagtatttgagcrcataaaaaattctgctgctatggtggggtacagtggttcacacctgtaatcccagcactttcaaaggctgaggcagctggattacttgagcccaggagttcgagaccagcctgggcaacatggcaaaagaccatctctacaaaatatacaaaaattagctggtggcaatgcctgtagtcccagctatgagggaggctgaggagggaggtcacctgagcgtgggaaggtcaaggctgcagtgagccttgatcatgccatttcactccagctacatgacagaatg

SEQ ID NO: 242798 - DNA, 606 bp, Homo sapiens
cttttggtggctttgcaggtggccacctgctggagagtgcatgtctccactgccttcctcaacctctgcatgtggagtctgcacttgacaagatcaatggtatgtgattcttgaaattattctaattgcggcagaagccacagccacaccagccgaatgagacctggagtaggtcttaatttcgatatgccaatgtaagcatgaaggtatttgcatgtctggcaagttattttctaccccacctcttgtcctactccactagttcttaagacgagttctgcctcattttccttttgtttaaactggactacctccctaccagctcctaccgggatcttccttgggagatcagccctactccttgtgtcaccaactcctgtctgtatcctgctcttcaagggcagcagtcctgaaaccagggatccattgcctacccaatgtcaagcttcctgatttctactgctataccaaccccagtatggatgggagtggtcattcttcccactatggatgtagctgacctcccctcctctgctatcatgttgagaagatgcccttttgggttagaccctacragactactggcttcagagatgggtacaggga

SEQ ID NO: 242799 - DNA, 597 bp, Homo sapiens
ttctagtacacgccctatttaaaaaagagcagtacatcctgggaggaaatgaaactaaagaacagttagagtaactgtttaacctcagaattttaaaggcagttgtttctttcctaagcacatcaattcgtagtaaatgatgcttcggtttgatggacctttcaacgttatttattgaatatgtatttcggttgcctaccctgtagatatgtggatgaagagtctaactagaataatgacttgtaaacccaccatgagttatttggtttttgacttaaattcctatttgaatcccctttcccggaattttaagkgtctctacaactttgaataaagggaaatgcccccaagatgtcctgatctgactaattagtttaattctttcgggcttgctaagcatttctaaagcattagactaacagattcctgtgaagttctgtgcatatgtcccagccccaacaactatcaaagtctagaaacagatgttttcagtgttgctgagagaaacaaaaaatttcctaatgcatctgagagataagcttcggcagtatcacaagaagattaaagtggcagacaccccttccagcggaagttact

SEQ ID NO: 242800 - DNA, 635 bp, Homo sapiens
gtgggaggagggagatgaatggttggtaaacctttatgatcacagctgaatacctgcccaagaagggctacttagaggacaagactgctggcagtaatattgtagtgggttgataagtgttcttcaacatatatgattaccccgaacctcagaatgtaaccttgtttggaaatagggtttttgcacatgtaattagttaaagtgaagtcatattggattatggtaggccctaaattcaatgtctggtgactttataagaacagagttgaacacacagagtttcacatggtgaagaaagccatgtgataacagagtcagagactggagtgatgcagctacaagcagaggagtgctaaagattgctgggrgccaccagaaactaggaagaagccaggaaggattcttccctggagtcctcaaagggagcatggccctgctaacaccttgaccttggatttctagcctccagaattgtatgagaataaattcctgttgttttaagccacccagtttgtggtactttgttacagcagctttagggaaccaatacaaatataaaaacaagaaaagaaatgtgggaactataaagtgctatataaatacaaagtggtgttttttctttcctatgattattt

SEQ ID NO: 242801 - DNA, 537 bp, Homo sapiens
taatggagacaaagcttcaaaataattcttctgtagatctttatataaacatgtgtgagggcttttaagaggagagttatgacttccagcaagagtttgacctcctttctttccttttcctcccaaggtggatacatcccagataccagacaagtagttagctcatctttggctcatgaaccgcaatggggctagaaaggatgttatgtttatcaacatgacctctatccttaaaatcctgattctgtccccaccaccccccyttttttttggcctggctgttccgttttgagagcatcactattgggtgtggatggggaggtggagaggagaaggactaggttactggcccctgattctctagggctggtctggccatgctcagaggcatgggaagaatcagggacattcagagaaataagggctcaggctaaagagctgacagctgggcttgtgactgatacagcagtagccctgagcgatgcccccatgggaagccactatcctgtagggaaagggccagtcagttctaaaatc

SEQ ID NO: 242802 - DNA, 537 bp, Homo sapiens
taatggagacaaagcttcaaaataattcttctgtagatctttatataaacatgtgtgagggcttttaagaggagagttatgacttccagcaagagtttgacctcctttctttccttttcctcccaaggtggatacatcccagataccagacaagtagttagctcatctttggctcatgaaccgcaatggggctagaaaggatgttatgtttatcaacatgacctctatccttaaaatcctgattctgtccccaccacccccccttttttttggcctggctgttccgttttgagagcatcactattgggtgtggatrgggaggtggagaggagaaggactaggttactggcccctgattctctagggctggtctggccatgctcagaggcatgggaagaatcagggacattcagagaaataagggctcaggctaaagagctgacagctgggcttgtgactgatacagcagtagccctgagcgatgcccccatgggaagccactatcctgtagggaaagggccagtcagttctaaaatc

SEQ ID NO: 242803 - DNA, 550 bp, Homo sapiens
gctggtctggtttgtatggttcccagagcacctaaggagtaatggagaatacgcaggaaagtggagtggagactgcattgtccaagggttcacagcaagcattggtagaaccagaagcagaatgcaagtttcctgactcctggaccataccaggaagcagagtcaataatcagaacagcagtcatggggcatgatgaagaagctgagtcagagactcttcttcatctggttaaatcccagtgacccagggcagatataagctgrgaaccagaaaacacttgtcagttttattggtttgaagagaatgaagtgatctgattcctttgggaacacagggattaggaaatggtttgaccatcaagatgatggtaaatgaccatcttaaatataatggaagaccagaaattaatttactttttctaagccacataggtaggaatttgcctgatttcaaagtcagtgtttttcccacttaatttaaattctcctttgtctggtacccccattctgggtgtatactatactccatacagtctgtgcatagctctgt

SEQ ID NO: 242804 - DNA, 640 bp, Homo sapiens
tacaacgggaatgctgattcctaagcccagggttatttcagggttgaatgtggtgaggtttgctaaggttcagactaatgtgtggtggtcatggttacaggtccccatcccaacacaggcaaagacctagcccaccgtgcgggggctgctgatccaggcacatggggcttccagccctgctgctcctgcacagttccctccccctacataagggtacccagaagacggggtcctcaggcaggtcctcccaggaaggttctctccgcactgggtcgaccaattctctagatgaacttgggtaaattaagttccctctctgggtttctctctccccatctcttaaatgtgggggatggatttgtggttcctaggtactagaccatcagtatccaaaatgcctgtaagctctttagtaatccagattcctagacctccacctcctgggattctgattcagrtgatggttgtagaggctgggaatttgtattttaacaccctccccaatttactcggacatccagccagatttaagaaccactgatttagaagttcataaggtcttctcctgctccaagattcaataaccttagacttaaagaaaaggcctggattaatgcctgagccccagtctccaacctag

SEQ ID NO: 242805 - DNA, 596 bp, Homo sapiens
ctttgtaattattatctattaatgtttatactaatttaatttttgtaatggatatgattcgttggaaaaatatctacataatacattaagcatattttgtttaaagtagttacttcaaaaatcagtgtaaaactactaaaraaaaatacatggtggattaactatattatatgatatctttaaggtgcactacagcctagaaagctgtactatgtcatagtctactttttatcatacacagtcacaagagaatttctagtaaacaggagtcagtttcaatatcccattactctccccacacattttctattttgccaaaggatcttcacataggcataagaaatcctctggtgaattcgactgggggttccctacaagaaaagaattcatgagttcataaatttttcagtcccttcagtttatctggagagttatggatagcatgctgggcagtagtacatagagcagatcatcttgaaaaataatgccatctccataatggggaggttgctatttcccagtgggggtgagctgtttaggctgtatagatacagccctattgcggattgctgctggcagggaaaatcacattcttc

SEQ ID NO: 242806 - DNA, 582 bp, Homo sapiens
ccatgcttcttaaaaagcctgcagaactgtgagccgattaagcccctcctctttataaattactcagtctcaggtatttctttctagcaacacaagaatggcctaatacagaaaattggtactgtaggtgggacaataatgtaaagatacctgaaaacgtggaatgggcagaggttggaagagtttggagggctcagaagaagacaggaagaagggaaaatatggaacttcttagagacttgttacatggttatgaccaaaatgctgatagaaatatggacatgaagaccaagatggtgaggtctcagaaatgaggaagttattgggaactggagtaaaggtcatgtgtgttagccttagcaaagaacttggctgcactgtgcccctgccctagagatctgtggatgtttgaaggtcagagtgatgatttaaagtatctggtgaaagaaatttctagcagtaaagggtttgagatgtgacttggctgcttccaacaacctatgctcaaatgcaggagcaaacaagtgacttaaatttggattttrtatttaaacagaaagcaaagcataaacgtttggaaaa

SEQ ID NO: 242807 - DNA, 273 bp, Homo sapiens
ccttacacctgaaatctggacaggtatgttaatggtggttaggttcactatgtgtccaataaggtatgctgagataatcctacgtgacttcagaagctgaggcaaaaaggtcaaacagtttctgcctggttctcttggaatgcatgctcttgaaaatcttcctagaattcagcttccatgctctaagaaaccataatggraatgttgcatctacacacttacatcaacaatcccagttgttccagacttgagtcattcccaacccaggtgtca

SEQ ID NO: 242808 - DNA, 632 bp, Homo sapiens
agacagggtcttgctatgttgccagggctggtttcaaattcctggcctcaagcaatccttcagcttcagcctcccaaagtgctgggattacaggcatgagccaccacaactggcctttgctaatattttgttgaggatttttgtatttgtgtttatcaggagtattggtctgtaggttctttttttttgtaatatctttgtctggctttggcattagggtaacactggcttcaaaagagttggaaagtgttctcccctcttcaattttttttagaagagattgagaagaattgatgttaaattttctttaaatgtctggtaaaatttaccagtgaagccatctggtcttggacttttctttattgagaggtttttgattattgattcaatctccttactggttataggtctgttcagattttcaatttcttcattattcagtcttgttagggtgtgtgtttctaagaatttatcaatttcttgtaagttatccaatttgttggtgtataattgctcatagtaktctcttattctttttaattctgtggcattagttgtaatgactgctcttccattttttatttaagtcttctctttttgtctcttagcctagccaaaggtttgtcaacttt

SEQ ID NO: 242809 - DNA, 524 bp, Homo sapiens
caatagttttgggtatgacaacagccagaaatcaatggaaggagccaatgtttgttgattatccactaaaggaactatgcaagaccctttacataagctttttcatttgattctcataactactgtctgagagagtgatacctctatatctagcttagaaatgaaaayatagaggctcagaagttgagtgacttgctcacttgcgaagagctgacagaagcaagattggattttagatgtgcatggctccaaagcctatgttgtcccactacatattcaaccagtgcacttggcaaataaagttaaggacatttattaatatctttggttttgaccctctctccccttcacacaaaattatttccacaatttcttgggcaaaaggcttttttcatgttcatatagtctaaaaattaaggcgaaatctagcagtgaagaaggttgccatctgtgttggattgtttctgatggcaccaaagaacacataggaaaccttgttgtaacttacaaaataacacaattta

SEQ ID NO: 242810 - DNA, 591 bp, Homo sapiens
agttccagaatctaatgagcggtttctaatgtctggagggcctcctttatggggagtttgccaggactgggaatgggcctatgatttagccatccgtcttccaggccctacacrgcacgtgttttcaagccagctggtgggagttagtgaggcaatctgaggacttggacagattgctttgtgtgccgagttaactggctcatatagagactgaacctgtgagcctgatttccttagccccatagcttaaccagctgagcttatcatcttgaccacctgaatggattcagagcgtcccaggaaaggaacatagtacaaaagagatgcacagtaagtcatggtgattcaaaactcagcagagagagaatgtttggataacacccttaatacttcacttcctgcccacaagaatggcaagggcttcaaagtgaccacctccttccttgctccacccaaaccctgacccttgatgtatgacagcaaagagcgatgaaggtcatgtccccaagtatcttgcaagattgctggcagggacactaagaagaactcatccagattttttgtcacgatattttttgccacaatagtttg

SEQ ID NO: 242811 - DNA, 591 bp, Homo sapiens
agttccagaatctaatgagcggtttctaatgtctggagggcctcctttatggggagtttgccaggactgggaatgggcctatgatttagccatccgtcttccaggccctacacagcacrtgttttcaagccagctggtgggagttagtgaggcaatctgaggacttggacagattgctttgtgtgccgagttaactggctcatatagagactgaacctgtgagcctgatttccttagccccatagcttaaccagctgagcttatcatcttgaccacctgaatggattcagagcgtcccaggaaaggaacatagtacaaaagagatgcacagtaagtcatggtgattcaaaactcagcagagagagaatgtttggataacacccttaatacttcacttcctgcccacaagaatggcaagggcttcaaagtgaccacctccttccttgctccacccaaaccctgacccttgatgtatgacagcaaagagcgatgaaggtcatgtccccaagtatcttgcaagattgctggcagggacactaagaagaactcatccagattttttgtcacgatattttttgccacaatagtttg

SEQ ID NO: 242812 - DNA, 591 bp, Homo sapiens
agttccagaatctaatgagcggtttctaatgtctggagggcctcctttatggggagtttgccaggactgggaatgggcctatgatttagccatccgtcttccaggccctacacagcacgtgttttcaagmcagctggtgggagttagtgaggcaatctgaggacttggacagattgctttgtgtgccgagttaactggctcatatagagactgaacctgtgagcctgatttccttagccccatagcttaaccagctgagcttatcatcttgaccacctgaatggattcagagcgtcccaggaaaggaacatagtacaaaagagatgcacagtaagtcatggtgattcaaaactcagcagagagagaatgtttggataacacccttaatacttcacttcctgcccacaagaatggcaagggcttcaaagtgaccacctccttccttgctccacccaaaccctgacccttgatgtatgacagcaaagagcgatgaaggtcatgtccccaagtatcttgcaagattgctggcagggacactaagaagaactcatccagattttttgtcacgatattttttgccacaatagtttg

SEQ ID NO: 242813 - DNA, 591 bp, Homo sapiens
agttccagaatctaatgagcggtttctaatgtctggagggcctcctttatggggagtttgccaggactgggaatgggcctatgatttagccatccgtcttccaggccctacacagcacgtgttttcaagccagctggtgggagttagtgaggcaatctgaggacttggacagattgctttgtgtgccgagttaactggctcatatagagactgaacctgtgagcctgatttccttagccccatagcttaaccagctgagcttatcatcttgaccacctgaatggattcagagcgtcccaggaaaggaacatagtacaaaagagatgcacagtaagtcatggtgattcaaaactcagcagagagagaatgtttggataacacccttaatacttcacttcctgcccacaagaatggcaagggcttcaaagtgaccacctccttccttgctccacccaaaccctgacccttgatgtatgacagcaaagagcgatgaaggtcatgtccccaagtatcttgcaagattgctggcagggacactaagaagaactcatccagattttttgycacgatattttttgccacaatagtttg

SEQ ID NO: 242814 - DNA, 646 bp, Homo sapiens
gtgatgagtgacacaaaagtttccttggcagacacgtggatcctatatctttggtttctcrgcacaacagtggactgtctcactttcacttgctccagcccagtctggtgctgggctgtaaattccattttatagtcatattttatgtgcacttagaatacctctacaaaccatacaggaaaaacctatatacatggctaggtgctagcacacatttcaaattaattatggctttcaattcattgatagtgagttattactttttaaaacattttaagttgcctgttttatcaaaggggagataaaattgaaaacaaaagaaaaaaaaccagcaacagtacatttgcatctttatttatcctttctttgcagtcctgcagttttttctttttttaaaataaaagttcacttttttttttctcctttgggaaaggattgcagaggtagctaaaccacatggtgaaaactcatgtgaagactgagcttttgatgtgtttatttttgctggttcagggaggcatggtagttgacagtggaattgcttgcctcccagatggtgcaggcagaagcgttactgaacgtgcatgccctcacctcgttctctcacacttacacatatgcactgccttgtgttacctgcagaacc

SEQ ID NO: 242815 - DNA, 606 bp, Homo sapiens
ctgggggctacattgcatcagtgcaagagatcccagggcccctggcctcataaattagacaccgtgggagggctggaacagcctcattcggctgatccttggtggcttcaagactgaagcagatgtcttctatttaagcagctgtgtcactaactagttccattaaaactttcataagtgtkagtactgattttacagagcctctgaaattcatctgctgtgtaggtctgactaagcatcctggatccctgattcagagaagaggaaaaaaatccacagtcacatttaagcaaaactctacatgtgcttattaagaaatgtcccatataaaacattttatgctgaattgacggtgcctaaaatagcatttttgataacaacaaggattgttgtaattgcaggaattgtttcatttgaggttactaaatggagagaaaccactttcctggctttttttttcttactgttttcatgagagaaggttttttggtccaaatatgtgaaatcacccagagggtacaaatgctacacgctttctctggccccagaatcacttacgtggacctgtttgtgtctattgctcaggggtgggctgggtctaaggca

SEQ ID NO: 242816 - DNA, 404 bp, Homo sapiens
agtgacataacagctatacaacatcataaatgtactaaaagccattgaattgtatactttcaaaatggttaaaatggtgtgttttagggktttttttttaaccataataaaaaagaaaacagcaaggagcgagtatttaaataggaacattaagcacattccagcactttccaggtgctctgtttcccagaaatctattttctggatttttagtacaataagaacttccccatttggaactacttaggcaacttcatctaagcagagcacagctgagaatcaggaagaaaacccagctctaaggttctccttcaatgtctgtgagaagaaggctgaagggtgagctaagtccatccatgtgttataacttggtatgctcctggattatagtgattctctgagtt

SEQ ID NO: 242817 - DNA, 404 bp, Homo sapiens
agtgacataacagctatacaacatcataaatgtactaaaagccattgaattgtatactttcaaaatggttaaaatggtgtgttttagggttttttttttaaccataataaaaaagaaaacagcaaggagcgagtatttaaataggaacattaagcacattccagcactttccaggtgctctgtttcccagaaatctattttctggatttttagtacaataagaacttccccatttggaactacttaggcaacttcatctaagcagagcacagctgagaatcaggaagaaaacccagctctaaggttctccttcaatgtctgtgagaagaagsctgaagggtgagctaagtccatccatgtgttataacttggtatgctcctggattatagtgattctctgagtt

SEQ ID NO: 242818 - DNA, 395 bp, Homo sapiens
acagctatacaacatcataaatgtactaaaagccattgaattgtatactttcaaaatggttaaaatggtgtgttttagggttttttttttaaccataataaaaaagaaaacagcaaggagcgagtatttaaataggaacattaagcacattccagcactttccaggtgctctgtttcccagaaatctattttctggatttttagtacaataagaacttccccatttggaactacttaggcaacttcatctaagcagagcacagctgagaatcaggaagaaaacccagctctaaggttctccttcaatgtctgtgagaagaaggctgaagggkgagctaagtccatccatgtgttataacttggtatgctcctggattatagtgattctctgagtt

SEQ ID NO: 242819 - DNA, 585 bp, Homo sapiens
gcatctggcatgcagtaagtgctcaataagtgtttcttgttccaactaattctggttaatatttaatccaagtgtgctatctgcttaggttgcctctaaaaccttagtcactaggcccatcaacattgtcacagatgtcaaagagctaaggtatgccgtgtgccatctgttctgccatatgcgttagttcgggggcctaaaaactacagcaagttggcccaccatctgttcctataaataaagttttattgaaacacagccaagttcattcacttatatattgtctacrgctgcttttatgttacaatggcaaagtggaatatttgaagcagagaccactggacctgcaaagcttagtacattgcatctggcctttacaaaaaaaatatttgctaacctctgcattagttggatccattcagtaagttaacaaatattagaatatttactatgaggcaattgctgcctttagatgctgggtatagtgtggtgaacaaaacaggcacatccctgaccttcacagagcttataatctagcaagcaaaaaagacaacacactcaggtagtcaaataaataaacaaaga

SEQ ID NO: 242820 - DNA, 479 bp, Homo sapiens
atgacatctagtggtcaaccacagaagtgcaagtgtttaaaacttgttttcagtaaataattaattccatagtctgcaacattttttattaatgtgaacatatacacacacacacagttaatatatatcaacaagaaaccaagtamttttcaaatacatttcctctaaatttgggtaagtgttcaagaatatgaaaacttgtaattaactgtcatcataaactactttaataattatgttagcaatctatcatttcagaagaataagtgtgctcagaaatccaactgtagattatttcaccagatacacatactcaaaagttacattttcaaaacctaatagagcaataaaataacacaaacaagagtaaactttttaaaaataaatctatcacagatttttgtaaaagctcaatctgaaagactcattagttctattagccagtgcaagaagcagacttatatctgttaacatatttg

SEQ ID NO: 242821 - DNA, 492 bp, Homo sapiens
  misc_feature (1)...(492): n = A,T,C or G
gatgttgtatgtaagaaaagatgatttatacaaccaaaaacaaaaattcctagttttcaagaaaaaaagattatgaaggatcaaaatgtctcacattttacaaatccaatggggttcaatgattaatataaaaccaacatatgtcctttccacacatggaaagggaaatgctgaagcaayagaaaagaagaatcccactaaaagaatcctataaacctttaaagacttnagaaaggaaacaagagaacatgctgctttataatccccaggcgaagagacccaggcttcaaggctgctaggaaagtctgccgggaaccctggtccatttgccaggaaggagtattaaccacaagacccttagggactcatctagtgcgggctctggaagggacacaaccgncccttctttgcaagcataggtgtaatgaatgaactagcacttgcaggcaatgaacttattncagactacccaaaccatctacaacaatgagt

SEQ ID NO: 242822 - DNA, 492 bp, Homo sapiens
  misc_feature (1)...(492): n = A,T,C or G
gatgttgtatgtaagaaaagatgatttatacaaccaaaaacaaaaattcctagttttcaagaaaaaaagattatgaaggatcaaaatgtctcacattttacaaatccaatggggttcaatgattaatataaaaccaacatatgtcctttccacacatggaaagggaaatgctgaagcaacagaaaagaagaatcccactaaaagaatcctataaacctttaaagacttnagaaaggaaacaagagaacatgctgctttataatccccaggcgaagagacccaggcttcaaggctgctaggaaagtctgccgggaaccctggtccatttgccaggaaggagyattaaccacaagacccttagggactcatctagtgcgggctctggaagggacacaaccgncccttctttgcaagcataggtgtaatgaatgaactagcacttgcaggcaatgaacttattncagactacccaaaccatctacaacaatgagt

SEQ ID NO: 242823 - DNA, 603 bp, Homo sapiens
tttccttccccttcttctttccagaaataaaatgacaaaacactaataggattctatgtatgtgagtcttcgtataacaggatggttttattatttgtttttgtcgtcgtttgtttcctgagatggagtcttattctgttacccaggctggaaagcagtggagtgatctcagctcacttcaacctccgcctcccaggttcaagtgattctcctgcctcagcctcccaagtgcctaaaattacaggtgtgagctaccacgcctggctaattttttgtgtatttttagtagagatggggtttcaccatgttggctaggctggtctcgaactcctgacytcaagtgatccacccgccttcacttcccaaagtgctgggattacagacgtgagccacggcacctggccaggatgctaagatcagacattaccaatctgtttctacagagcccccaagatgatgatgttagctacttccattttgcaaagtgaggtgccaggacacacagtcagaacttgcaaagcagatatttaaaaacagttttgttaccctttaccgagatcccacctggaagttatgaaatacttgcaggtagagattaaacaa

SEQ ID NO: 242824 - DNA, 399 bp, Homo sapiens
ttttactatgctgttttggatttagctttttggtagccagacttcaagatagcccacatcccttaggtagtcatctcccacactggatccaagttagtctgcatgattaatacaagatggcagaaatgatgacatgtggcttctgaggctacctcataaaagacctgtggcttcgcgtgaacccggggggcggagcttgcagtgagccgagatcgcgccactgcactccagcctgggtgacagagcgagactccrtctcaaaaaaaaccccaaaaaacctgtggcttctgccttgtcgtctgtccctgggattactccctctgggagaaagcaggtgtcatgtcaaggggacacccaaacagctctgtggagagttcagtgccatgagggactaagatc

SEQ ID NO: 242825 - DNA, 401 bp, Homo sapiens
gaattctcactgcagagttcaaatgcatcaaagctttctcagtgctctagtaaggactctgattcagaggtaagtcaaatcctgaaggctttgttttcaaatttatatgtaagraaaaatagattgttgctcaaactgaggaaatttttcctacatgtgaatgacgagctatattattttttcattctaaactctactgtgcagaaagttcacattttattcatttgaaggacttctctgtatctttcacattttaaactgcaatacatttaaattaactctgtatatttcctgaatcactgtatgttcgattggtgagtatctcaaggggtgccacagttaaaaccgaggcagagtgataatctgtgaaatgaaaaattattatcaatttactgtttaaa

SEQ ID NO: 242826 - DNA, 401 bp, Homo sapiens
gaattctcactgcagagttcaaatgcatcaaagctttctcagtgctctagtaaggactctgattcagaggtaagtcaaatcctgaaggctttgttttcaaatttatatgtaagaaaaaatagattgttgctcaaactgaggaaatttttcctacatgtgaatgacgagctatattattttttcattctaaactctactgtgcagaaagttcacattttattcatttgaaggacttctctgtatctttcacattttaaactgcaatacatttaaattaactctgtatatttcctgaatcactgtatgttcrattggtgagtatctcaaggggtgccacagttaaaaccgaggcagagtgataatctgtgaaatgaaaaattattatcaatttactgtttaaa

SEQ ID NO: 242827 - DNA, 517 bp, Homo sapiens
gcccacttcctggtttgcagacagatgccttctcgctgtgtccttacatggtagagggagagaatatctcttttgtacctcttcttaagggcactaatctcattcatgagggctctactctcatgatctaatcacctctcaaaaatcccaccatcacattaggagttaaggggttaggacttcaatatgaatgtgagggagacacaacattcagtccacagcaaattccagtacattaaagatacaaatatgaaatatgtaaatatgagattattttttaaatttttgagcaagaagttttttgcaatcatatctactaacttgaaaagacattcattattagtgaaaaggaaaaatatgttattaacaatatgtatagtgtttttgtttaaatactttaaaatattcatgtacacatttgcatgtttgtggcatcmtattaagaagtctggaaagatacatgcagaattatttacaatgatggatagaactggagatgtagaaagtacttttcctg

SEQ ID NO: 242828 - DNA, 501 bp, Homo sapiens
gtctctattaaaaaattgttttaaaagtagcggggcatggtgacagtccacctgtcgtcctagctagttgggaggctgaggtgggaggaccccttgagcccaggaatttgaggttacagtgagctatgatcccaccacttcactctagcttgggcgaaagagtgagaccctgtctgggggraaaaaaaaaagaaaaaacaacgaaagattaaagtgattagacttggcttatctagataacacagcataatatgcttgtctcaaggttcttaacatgaatcatatctgcaaagtctctttcgccaagtaaagcaatatattcacaagttaggaagtaggagaaaaggatgtggacatctttggtagctgttcttctacctttcacagacagacatgtttttcttcagtgcagaattaagagagaaaagtgtactgctgttcattctatttctaattttaacacttctagagaacagatataaaatgattctttaagctaag

SEQ ID NO: 242829 - DNA, 501 bp, Homo sapiens
gtctctattaaaaaattgttttaaaagtagcggggcatggtgacagtccacctgtcgtcctagctagttgggaggctgaggtgggaggaccccttgagcccaggaatttgaggttacagtgagctatgatcccaccacttcactctagcttgggcgaaagagtgagaccctgtctgggggaaraaaaaaaagaaaaaacaacgaaagattaaagtgattagacttggcttatctagataacacagcataatatgcttgtctcaaggttcttaacatgaatcatatctgcaaagtctctttcgccaagtaaagcaatatattcacaagttaggaagtaggagaaaaggatgtggacatctttggtagctgttcttctacctttcacagacagacatgtttttcttcagtgcagaattaagagagaaaagtgtactgctgttcattctatttctaattttaacacttctagagaacagatataaaatgattctttaagctaag

SEQ ID NO: 242830 - DNA, 654 bp, Homo sapiens
atactaacacttattttgcagtgatttgtaagtcttagagatgatacatttaaaacacttggtacatagaaggctttcaatgaatggaagctaatgtaatcattggctctctccctcttactttttgagtaacaatagtaatttaccctgaagagtatttaaacctttctttgtggctgaaagcatcaccagtaagcaactgacttagcttcattataaaagaagttttttttctatttctkttatcctttatgttagctaccttggtttcaagatgaaaatgtggtgttttaaggttgaactcatatttatcagtgaaaggctgcaaaaataatagtgtgagtggggtggataggggagcagagaagaaggctttgtgaaaactccccgtttggtaaaaatcacctcctaccttgtagcaaggtgtgtgtgcgtatgtgcagctgttggtttcaacactcagttgttgatttaaggttccaaaggtgctgttttgccctggggaactgtttgagttgtgtcaggttgatggttcagggcctgagtatgactcttgtcaaatttgggatccgaagccctgtatgaacccggtttagtattcaggaaacgtatccatagcagccgctgtcagggtaactatcactaagggcagac

SEQ ID NO: 242831 - DNA, 584 bp, Homo sapiens
caactgatgacaaataactgcctttagaaggacaagtaatcaccagttctctctcgtctcacataattgcttaaattacctgtttggcccttgtaggcatcaggatttgccaaacacgacctacacttagcattgcttacccaccaccacctctcctggccacatcttccctctttctgccctgccatccacccacacggataggtttttccagcaggacccatgagctcaggaaaaacaagaactggtttttagacgaaaaacagggtttaccatagcaaaccaatcatattcaaaaccacacaccataatttcagaaatgccagttctgttttttgtttcatttgaggagtgaataatcttattttggaagctaaaactataattagagcattacagtggtaacagtattatggaatcatttaaaaagcactggagatgataaagaaagattggaactaaaaggataaaaaaagacaaatcgggcaaattcccmcaaaaagaaagctagtatacctatattaattcattaaaaaataaaatttaaagcaaaaaatcatttttagggataaggataacatgtt

SEQ ID NO: 242832 - DNA, 610 bp, Homo sapiens
tgttgataaaatccctctttctctgggaaggtctttctttctccttcatgcttgaaggatattttttccagacataatattctagggcaaargggttttttccatcagatttgaaatatgtcataccattctctcctggcatgcagggtttccactgaaagaggtgctgccagatgtactgaagtgccattttatgttatatgtttcttttctctttctgcttttaggatcctttccctatctttgactttggggagtttggttattaaatgccttgaggtagtcttttttgttatatctgccttgttgtactgaaatattgatatctttctctaggtttggggaattctctgatattgttcctttgaatacactttctaccccatctctttctctatctcctcttcatggccaatactcttagatttgcccttttgaggctattttctagatcgtgtaggcatgcttcattcttttctatacttttttcttttgtttcttctgactgtgtattttaatagcctgtctttgagctcattaattctttcttctgctggatcaattctgctattaagaagagactctgatgaattcttcaatatgttgcttg

SEQ ID NO: 242833 - DNA, 610 bp, Homo sapiens
tgttgataaaatccctctttctctgggaaggtctttctttctccttcatgcttgaaggatattttttccagacataatattctagggcaaaggggttttttccatcagatttgaaatatgtcataccattctctcctggcatgcagggtttccactgaaagaggtgctgccagatgtactgragtgccattttatgttatatgtttcttttctctttctgcttttaggatcctttccctatctttgactttggggagtttggttattaaatgccttgaggtagtcttttttgttatatctgccttgttgtactgaaatattgatatctttctctaggtttggggaattctctgatattgttcctttgaatacactttctaccccatctctttctctatctcctcttcatggccaatactcttagatttgcccttttgaggctattttctagatcgtgtaggcatgcttcattcttttctatacttttttcttttgtttcttctgactgtgtattttaatagcctgtctttgagctcattaattctttcttctgctggatcaattctgctattaagaagagactctgatgaattcttcaatatgttgcttg

SEQ ID NO: 242834 - DNA, 610 bp, Homo sapiens
tgttgataaaatccctctttctctgggaaggtctttctttctccttcatgcttgaaggatattttttccagacataatattctagggcaaaggggttttttccatcagatttgaaatatgtcataccattctctcctggcatgcagggtttccactgaaagaggtgctgccagatgtactgaagtgccattttatgttatatgtttcttttctctttctgcttttaggatcctttccctatctttgactttggggagtttggttattaaatgccttgaggtagtcttttttgttatatctgccttgttgtactgaaatattgatatctttctctaggtttggggaattctctgatattgttcctttgaatacactttctaccccatctctttctctatctcctcttcatggccaatactcttagatttgcccttttgaggctattttctagatcgtgtaggcatgcttcattcttttctatacttttttcttttgtttcttctgactgtgtattttaatagcctgtctttgagctcaytaattctttcttctgctggatcaattctgctattaagaagagactctgatgaattcttcaatatgttgcttg

SEQ ID NO: 242835 - DNA, 527 bp, Homo sapiens
agaagttatttgtgtttggagaggatgagggctggatgaaggcactagatggcttctaagattccttaaagtctgagaacttgtgattttgagaaagtggtttgaaaaatttaagctcagcttcaagaagacaggaagtaccacactatagtgacagaacacacatgcacagtgaggaaaaatggaaattccccttcatgttctccccaaattgtgacagcatagtccccctctcaccacattgcaatattcaggtacagacattatgcattatgtgaattaaccattctgaggaatgatcagacaactttgcactgttaccctatttgtatttgaaaatatagttatgtttatagttgtttgtagtctgattcttattctaaayattattttccagcaaagatatgatgtttcataatacagatttgtgactctactaattctacatcaaacttgaatatatgttagaaacgttcgctcttattgtgggaccacaatgccctatctgttgtaccaaagaggacttg

SEQ ID NO: 242836 - DNA, 527 bp, Homo sapiens
tgggaccacaatgccctatctgttgtaccaaagaggacttggacaggagtatccattgttcatggggaattcttaggaatatattcaatggaaataaccaaatgtgtcggtcacatttgattctatcacagtcaggcaggtgtggcagggtcaaaaagggtataacttattttacagaaaaacatttttgatgggacatgtagattcaaattagcatgttgggattagaactagtagacttgactgaaagtcggwggggctgtttatataatttcttcttctcgaatacatggtctttattatactaaattacaatttgcatcattcaaatgcaaatgaattttcaaaagccctgtgtgggcttcacgtaattcttttgggcaagcattgctcaatgtttcacttactcgaaaaggattcagtgattcaactgattccatgaaaaaaaaagtgaatttgaaagtgctgttcatattggaagggatggtataatcatatcaaattcacatctggttttattttgctga

SEQ ID NO: 242837 - DNA, 582 bp, Homo sapiens
gttatataccttgaatatattcaatctttgtcaattaaatrtttttaaatacaataaataaaatgtcttcaaatgtaacgctgtgattcagcattgagatgaaaagtcattgtgtacacacaaaaaaagcatgtaaacagagacacagtgggtacattttatgttgatgaagcaaatattcaccataggacaaatgatcactatgccatattttgttccaaagcaataaatcacatatgtggtttatgaacctaagtagatgatgctgtgctacattttgttttctgaggattatgcaaaagaagcatctcttacatgccaagaaatgcaactaaaggaaaaattattgccaaatccctgaactagatgaaagaaatgtcaaagcgtcaaaaggctggtgtgaccaacaaacatatcatgcaaagttatcattaaagttttgtatcacagtttaattggaaacacttttttctttcctagcagtatgtaaaatagtaagtgccccaaagtcaatgacatctgaaaagctcatttaaaataaatacttctagaagatttgaagaattctttgggtttaagtaa

SEQ ID NO: 242838 - DNA, 494 bp, Homo sapiens
gaggtatgattagcttctttaatgattaatatactcacaatctgtagaaatggggaaagagggaaagaaaggcatattaagcccagagcactgggaagggctggatttcatctgtgtcccattctctcagcacttttcagaagtggtcccctctctaatcatttaagctgcctcacagccacagatgatacacaggccttggatcctggatttgactttcatctttgaggtgacagtcatgtttcctacttggcaggctcccaattaccaatggcaatggggaatacgtgaactaaacaaagccaagcacttcaaatactttacctcattyttcattgcaccttttagcaaaactgattaagaagggacatactagactgttttcaattttacctcttcctcctttaattaccctgcttctaggagaaggatcacatgcagccaactgtgtgtcaaaggaagacaacgtgggctggataatcaaggcctgaatt

SEQ ID NO: 242839 - DNA, 323 bp, Homo sapiens
tgtaccatattctactccactaatttcacttcctatcttctggattccccaaatcccacgtggttcaacattgtttccggyttccaggatgcaaacttagcaagcaggctgacttctggatgactcctcaccacatcttgtggcaggaagcagaatgagccaggactatcttctagctctcatctaccccagatataatacagggaccttgaaaattcctcttagctctctgggcctccttctccccatataaaaactgaaagattaggatgaatgtccctaaaggcccatccagcataaaatttctacttttcatcagctgc

SEQ ID NO: 242840 - DNA, 546 bp, Homo sapiens
ctactccactaatttcacttcctatcttctggattccccaaatcccacgtggttcaacattgtttccggcttccaggatgcaaacttakcaagcaggctgacttctggatgactcctcaccacatcttgtggcaggaagcagaatgagccaggactatcttctagctctcatctaccccagatataatacagggaccttgaaaattcctcttagctctctgggcctccttctccccatataaaaactgaaagattaggatgaatgtccctaaaggcccatccagcataaaatttctacttttcatcagctgctagatccgactgcagcagcaagttctaattgccatgagtgtgaggttactgcaacgtcccactcacaggcaagtgattctcattcagcaggaactggtgaaagctgaaagtcataaatattcaggaaatctaacatactgttttatatcagaatgaacctctcaggcaaaatattcattgcagatgtatatgcaacccaaatatctgtagtatggaaaaccaggagagggggag

SEQ ID NO: 242841 - DNA, 607 bp, Homo sapiens
aattctggatgattttctgtttgatgctgaatcaaaaattaaacagtctaggttctttctgtcaaggattatgactgaagacagacacacttatatggacatacatttataggtattacagaaacagaaaaccaacctgatatcagctagtgtgagtagctgatttaaaagtggattmatgattggagtatcaggaagaaaacctttagaaatcccaaggaaaagcatataacttgcctctctctagttagtatttcagggatacaggacagtagtaggatctatctttgctgagtcttgatgattaagaagagtattgcggggtgtagaactggagtttctatgtgtccagctttagagggaggatgaatgagctgatgattgagttttggtcagctatacttgagatgggtagaaggagtactaccatggaaagaatccaggttaaagagtcaggccagggtctgaataacagccccattaccagctgtgagatctgaggcaaatcatgcaatcagaatttttttcacttctttttattcatctgtaaaataggaatagtaacatcttgcctgatgtgttgaagttccctagcatgtaccacaag

SEQ ID NO: 242842 - DNA, 607 bp, Homo sapiens
aattctggatgattttctgtttgatgctgaatcaaaaattaaacagtctaggttctttctgtcaaggattatgactgaagacagacacacttatatggacatacatttataggtattacagaaacagaaaaccaacctgatatcagctagtgtgagtagctgatttaaaagtggattcatgattggagtatcaggaagaaaacctttagaaatcccaaggaaaagcatataacttgcctctctctagttagtatttcagggatacaggacagtagtaggatctatctttgctgagtcttgatgattaagaagagtattgcggggtgtagaactggagtttctatgtgtccagctttagagggaggatgaatgagctgatgattgagttttggtcagctatacttgagatgggtagaaggagtactaccatggaaagaatccaggttaaagagtcaggccagggtctgaataacagccccattaccagctgtgagatctgaggcaaatcatgcaatcagawtttttttcacttctttttattcatctgtaaaataggaatagtaacatcttgcctgatgtgttgaagttccctagcatgtaccacaag

SEQ ID NO: 242843 - DNA, 491 bp, Homo sapiens
gcacaattacaaccttgtaaatgtgcttaccatcactgaattgtacatgtagaaagtggttaaragggtaaattttatatatattttaccacaatttttaaaaatccttatacaaccatagctctcctgctacccacttactggatcatttaaatccaatatatagggtttttttattctacagattacattttttctgaaaaacctatttttctaaatagtattatcatactaaagctaaccttataaaaattgtatttcatctaacagaaatttgaaaaagtttcatcttaaatttatttgaataatttaatttctgatatttgtatttgattagttatgaaagtcagtaatagaaacataagcttatctcactagaggtttattttaccctgttggcttggattttgtgataagtgttcacataaaatttagcctctgaataaatctacctgcagcatgtaccacccacattcatcactgttcctgat

SEQ ID NO: 242844 - DNA, 496 bp, Homo sapiens
tatatcttgagtttattgagatgtatgagagcacaacttgtgctttttcgagttctttacaattcttgatgtaatgctatatagcactatatagtagatgctcaactgatatttgtgaataaatgcctgtgaaatagagtcctggccgggcatggtagctcaagcctgtaatcccaacactttggggactgaggaggctggatcacctgaggtcaggagttcgagaccagcctgaccaacatggtgaaaccctgtctgtactaaaaatacaaaaattagccgggcgtggtagcaggtgcctgtaatcccagctactcaggaggctgaggcaggagaatcacttgaacctgggaggcggaggttgcagtgagctgaaattgtgccattgcmctctagcctgggtgacagagcaagactccatctcaaaaaagaaaagaaaagaaaagaaataaagagttctagagtggtaagggtaggcttcataaagagggtagta

SEQ ID NO: 242845 - DNA, 626 bp, Homo sapiens
tttcgttttatcggaaaatggtattagaaaacagaatctgggcactaaatgtgcttgttgctgctgaggtattgttgcttctaggcactctcagctgactaagcaaggaaatacgttaaatatatatgtgtatatacacatttccatcagtagcttgctatgtaaccgtctatatctgtattaagttaaacaagagttcatatggatgtctccaactctaacccatcacacacattctagtcycctccccttgcctcactgctgtgtaacctcccactccaatagtgggaaatctggctcctgccacctgccagccatttacttaattgttcagttacagtacatgtgtatagtgatttcagaatcattaacctgttccactatgggaaacaactttttggctgagtaaagtgcttccgtgcagttcctcttgcctttagtcttatagactccacttagttcaaagtcacttcggtcagcaccttttcccctcacccccttcagtgaggttgtttcgtacacttgtaagataattagactcttttgtcatattctgcattctgtcttgggattctttgacctcctaaatgatttttaaaaatttgcatacattaaggttcattctt

SEQ ID NO: 242846 - DNA, 626 bp, Homo sapiens
tttcgttttatcggaaaatggtattagaaaacagaatctgggcactaaatgtgcttgttgctgctgaggtattgttgcttctaggcactctcagctgactaagcaaggaaatacgttaaatatatatgtgtatatacacatttccatcagtagcttgctatgtaaccgtctatatctgtattaagttaaacaagagttcatatggatgtctccaactctaacccatcacacacattctagtctcctccccttgcctcactgctgtgtaacctcccactccaatagtgggaaatctggctcctgccacctgccagccatttacttaattgttcagttacagtacatgtgtatagtgatttcagaatcattaacctgttccactatgggaaacaactttttggctgagtaaagtgcttccgtgcagttcctcttgcctttagtcttatagactccacttagttcaaagtcacttcggtcagcaccttttcccctcacccccttcagtgaggttgtttcgtacacttgtaagataattagactcttttgtcatattctgcattctgtyttgggattctttgacctcctaaatgatttttaaaaatttgcatacattaaggttcattctt

SEQ ID NO: 242847 - DNA, 517 bp, Homo sapiens
caaagtgtgtacatcactcccctgccacccctattagaattggtgctgcttcccactgttgggagtcttgaggataggttacaccaccagatyccttgcagatatttcccagcaccagcctggggtgtggcagccccactgggtggcttgactcagaataataatagcagtcactgtagtctggctgtcaggaactcctagtgccaggagaagggagggagcaccacatcaagggaactcccacgggaccaaataatctggatggcagggcttgggtcccagatcatttcattggtgggaattttcttatagcagagacacagtggcagtgctgggctcagcaaggaaagtctgcacctctaccctagcagtcaggcagccttggtaccatgaagggtcttagagaagggttcgtctttcaccctttgaccactactgcagacacaggagaacccacaggagctcagcatggatgcacttacaggcagccttcctgaaacacttcagggtgagtgct

SEQ ID NO: 242848 - DNA, 618 bp, Homo sapiens
tgttacactgctggtagaagtttaaattagcataacctctatgagaaacagtattgagagtccttaaagaactaaaagtagatctaccgtttaatctagcaaacccactagtaggtatctacccaaaggaaaagaggccttttatgaaaaggacatatgcacacacttgtttatagcagcacaattcacaattgcaaagacatgggacaaacctaagtgcacatcaacaaattgaacaggtaaagaaaatgtgagatagatatatayatatatatatatatataaaatgaaatagtacccagtcataaaaatgaatgaaataatgtccttttcaataacttggatggagctggaggccattattctaagtgaaataactcaggaacggaaaaccaaatattgcatgttctcacttataattgtgagctaaactatgaaaacgcagagacataaagagtgatgtaatgaactccagagacttgggagagagagattgggatgggggtgagaaataaaagcctacacattgggtacagcatacactacttggctagtgggtgcactaaaatctcagaattcggccttataggatccatccatgtaaccaaaagccatttg

SEQ ID NO: 242849 - DNA, 470 bp, Homo sapiens
gctatatgttcaaaagcaaacaaccctttttttaaaaaaaaaatatacagcaccaagttatctttcaaaacatgaattaatttaaaaaagagttaactggtgttccatttattagtttgcattccgaggcctttctcacctttgttcccacctacctttccaacactcagtacaatacaccttggactttagttacasattgactaaaatcagtttagaaagttcatttggttagatatttgctttagacaaaataattagacagtagtatgtaagatgaattaccaacagcaagagcgaaaggatgcagcaaaagctgcaggattgaagagatgaaaccaaggggactggactcataaaaactgcagtggaaaaaaaaaaaagaaataggtatttacaaatgttagcctttattattttaatcgctataacaattcacatatacgtgtattttaaaaataacaactctt

SEQ ID NO: 242850 - DNA, 589 bp, Homo sapiens
tgcacagtcttaattctcctatgccacttatgggatacactatgcccaatcctgtattcccaaagtaattctgttattagaaatttaaaaagtcctggtacagaattatcaaagtgcttctgctgtgcctctgtgttccacatatagtaacaggtttctgaatcatttccccgtggaccttgttctctcatttttcattatgcttctgaaagtttgttttctttatgtatcccttttatttctttgtactttaagtcccacagtagtgtgttattttcataaagtatttttattcgcattttatccactatcttgaaattttttctcaacaatgtcctttattgtatattcagctgtctgaacatcttgccttgtatctttttttttctacataaaccatgttttcttgaatttatctcacaataaaaaggagatgctatgtaagattcatatctggttgatgcaatgagtttttttttccagaaataccttttctctttgtctcttaaatgctctttttycatgaattacatatagaaaataattttaaataaaatatgtttcaaaaaccatgtattaaaatagcaca

SEQ ID NO: 242851 - DNA, 636 bp, Homo sapiens
caacagttagaattgtttaagctaatgtgagagtctgacagaagttaaagtctgtaaaaatcaaacttatatgaacaaaatttatcttaaaccatctgagggcaaagaccctatggaaccaaaatggaacatttattatagagattcttaatgaattatgaaagataaaggtcatctgttccctgggtcttgatcaaatttaagatgacagaaaaatgttagtacatatttttattagaagtagagaggattaaaataaagtcaacaaacaataaaggtgagaaaacatgtcccagggcagtgcataaaagccacctagggatctcattaaagtgcaaattttgactctctagatttgagatagagcctttaattctgtgttccattaaataaataaaaactrcagaccaacatccttgaatattgatgcagaaatcctcaacaaattactagcaaatggaattcaacaggagaggcagcagaggaagatggatacatagaacattccagcaatcatcccccaacaggagcacataattaaacaaatatccacacaagaaagcaccttcataagaaccaaaaacaggtgagcaattacattacaaggaaagaggcactgaagaggataggaaggac

SEQ ID NO: 242852 - DNA, 535 bp, Homo sapiens
ttatcaaactctacttagcagagatgatcagaaaataagttattttgcctcaggcttccctgggaaagacctactttattagaattaaaataagccacttattttaattctaaattcatgaaaacacacactacctctaagcatgtctgttggtaagtttaacgtatttgtctaaattcaatttttattcttccagcttacagataatgaagacaaataggtttcatatgtcaaactctgtcactgcttggagaagacttttaaaaatccatcacctattgcctagkttatttatttaaaatgtacagaaacttctttagtccattaataatatgggaaagacaagatgtctttggattttaatataagcaaatttgtcaccctttcacgtttacatgtgctttctgaattaattaaatttgaaactcttactccaagattatagcctagatgttttctaaatactcattttgaaaagaaaagtgataaatattttgcattacttttaaccctagacattatagagatactcagt

SEQ ID NO: 242853 - DNA, 332 bp, Homo sapiens
ttttttgttttgttttaagaatttgtgtacctgacagccttttgatacaggaatagcgcctccctcaagagcataaggcagattcattggctttccaaaataataaaggtattgactctctctggagcaatgattgagaaggtttgcttctagtatccttaaaagctcctccttaaagcctcttttaaaagaccgtagtttcctaagctttggcttcctcaatggtagcataacccacttcgtgtacattatccattttggccactccacatcacacttgtgggwctttgggggtaagagaaacagatgcaaacatagagctcatgctgcat

SEQ ID NO: 242854 - DNA, 442 bp, Homo sapiens
ccagcctgcaaccctgtctaactgtagaactcaaaaagcagtaccacatggcctggaaatatactctgtggcctggcctgaacagaggcaatcacagtgcccagccagcagcttggccagattgcagaacacatccagtattttcatcagacagtggaagccagcaacaatgccatccaaactcagagccaaggcagtggcccagtaatccagagaatcagaaagcaaactctgcttgcctgrgattggtaccagctggtccatctagaaccacaagctagactatgtaagcgaaggtctaatcctgcccaagaacaggaaaaggtggaaaaggtggctgtctgctcaaatgtgtggagagcaacaaaaagacataaggattatgaagaatcagggaataatgacacctctaaaagaaactaataaagcttcaataatgaat

SEQ ID NO: 242855 - DNA, 658 bp, Homo sapiens
ctaccatcctatttggacttcagaactactttctacttaccctgcagtgagtctgtgaagtgaggcctggagctgcagaacatctccagggggttccatcacagcttcayacagttctcagaccagccagggaattcggaagcagctgtgctagatatttcttcccctcccttctgcaaagatgttcactgtttgagacctcaataaccattatttagcactgatattaacatatagcattggcagcttagaactttccagaaaataaaatctgataaaagacagtgtcctagacacaagataacagacatacaaagagagacatttttatattagtgggataacaaagggtgagatgaagccaactttgttggagcagagcagtggcactcaaagaaaagtgttattgagctccaagtgaacagccaccacaggccactgactggcatgaattgtttacattagtcattcccagcctgccattctgtttcagcttggtcatgcggagtaacccaaaggagtaaataaataggagaataacaaaccatctcaacaaaccattccaaaataattctagaagatactatgccattaacatgccatctacacctgcaatattccagcaacttcccattcacaaataaaaagaacattatag

SEQ ID NO: 242856 - DNA, 658 bp, Homo sapiens
ctaccatcctatttggacttcagaactactttctacttaccctgcagtgagtctgtgaagtgaggcctggagctgcagaacatctccagggggttccatcacagcttcacacagttctcagaccagccagggaattcggaagcagctgtgctagatatttcttcccctcccttctgcaaagatgttcactgtttgagacctcaataaccattatttagcactgatattaacatatagcattggcagcttagaactttccagaaaataaaatctgataaaagacagtgtcctagacacaagataacagacatacaaagagagacatttttatattagtgggataacaaagggtgagatgaagccaactttgttggagcagagcagtggcactcaaagaaaagtgttattgagctccaagtgaacagccaccacaggccactgactggcatgaattgtttacattagtcattcccagcctgccattctgtttcagcttggtcatgyggagtaacccaaaggagtaaataaataggagaataacaaaccatctcaacaaaccattccaaaataattctagaagatactatgccattaacatgccatctacacctgcaatattccagcaacttcccattcacaaataaaaagaacattatag

SEQ ID NO: 242857 - DNA, 638 bp, Homo sapiens
  misc_feature (1)...(638): n = A,T,C or G
ggtgatgtgagttttgatcattcagtcaaggtgtttctaacttctccagtacattaccactgactgtctcttttgcaactaaaaagcagtctgcagagagatactttaagggcatgataatatcctgctccttattaacatttctcccgagaggtagtatcaattaatgattatttcttgatttaatcttgactacacagttgcagaatgttaactttttctattctgaccctccctccccatttactagnnnnnnnnnnnnnnnnnnnnnnnnnnnnnnnnnnnnnnnnnnnnnnnnnnnnnnnnnnnnnnnnnnnnnnnnnnnnnnnnnnnnnnnnnnnnnnnnnnnncttccttccttyctttctcccgttccttccttcctttctctctctttctctttctttctttctttccttctttctttccttctttctttctttctttctttctttctttctttctttctttctttctttctttcttctttctttctttgtttctttctctttctttctttcttcactttgctactctctgcataacaagatgttccaggttcctcttgtatctaactctgcccagtcctagaatcagccaggactgaagagccctagttccaagatctgggtactaag

SEQ ID NO: 242858 - DNA, 579 bp, Homo sapiens
attaatagatgtcttttcattaatcactttgttttgtaatttagcctttgtgtaagaaattgtgaagtagagaagttcacattcattggtgataaaaacatgtagtcagcacagttggatactttcaattctacatctactgataagaaacatatcatttttttccctctaaagagctttagtaaccacctccttgaccctcaacagcactgtggattaaataaagtcaaataatgatggcatttctatttaaaataactaccttttgtaataataaaaaatggyatttcatcaaaccttaactatcttcaagttaatttgttatttatacccactgacagaaaaattaagtgaaccaactctgatcagctttttgctttccatctacatgagagatttttctctatccatattgtctataacccagttcctggtctgttttcaaagttggaattgataaccagtggtatcaataataactcctgaatgtgtaccaccatgaggtgttatacaattcatcatcagtcatttttaaaaattccctgctagtcagagtatatgcagtatgttccccaacca

SEQ ID NO: 242859 - DNA, 442 bp, Homo sapiens
ccattctataataaaaattactaccttattgattgttgtaagaatgtgaacaagtcgtttaatctttctgggcttccatatcgccctaaaaaatgaaagaactaggtgagttggtttctaaaatctcttctagttctaggtttctactcttctgtgatacagagagtaacatgtattagacaatgacaagatccaatttattcaatagttgcctgccaaaattatagtgcagtatactgaccaaattggcttcagtctgttgataaatgatatgaagatatcagaaaaagatagtcaacagcytttaatcaatcttaggaggatgaaaataagccagataaagccattggaagaaagtaagtgaaaaattctatctctttctgagttaaagtcttattaatagaggttagattagttcttctatcagtacaattcagtttcg

SEQ ID NO: 242860 - DNA, 397 bp, Homo sapiens
gattaatcaagtaattttttttgctaccgagttatgttgggttccatatatatatgtatgtgtgtgtgtgtgtgtgtgtgtgtgtgtgtgtatctgtatatacacatagtttctttttgagacagcttctcatcgtccaggctggaatggagtggtgtgatcatggctcactgcagccttgacttcccaggctcaggtgattctcccacctcaaccacctcagtatctaggtctacaggcatgcatcaccacatctggctaattttttatttttwtttttgtagagacctggtctcaaactcctgagctcaagtgatgctcctgcctcggcctctcaagtgctgggattacaggcatgggccactgtgcccagacagttccttatatattttggata

SEQ ID NO: 242861 - DNA, 540 bp, Homo sapiens
tgccctgccttttggatattgttcattgcagcacgttattcatttcttagagtttccattttcatctacatattccataatggaaggcaatattcatggatatttaagggcaaacactaaataatcagtaatgaatacataaaacatatttattgttttatattatctttaaaaataaccctgcctaagtagaagtagaaagttttgaaagcaaaactctgagaacaacaaaaaattggattacttataaagttcatcacaatgttcaggaaagagaagttatccatgagaatgctgtagtattattaaagctcaaaatttgttgctttaataataatctatagtttatatctaaatttcttttgaagtcatctttccactmaaattacagagatgccaattgattttttaaatctgactgatgagcttgtacttattttccataaaacattttacaattgggacagatggtcagttttctgtttccccagcagtataataaaggattgccagcccgaaagtactagcaacagtaaaaac

SEQ ID NO: 242862 - DNA, 550 bp, Homo sapiens
gaatagcctaagttctaatttttgaataaaaattttatttacaggcaaattgtttaaaatggtgaagcaaaaatactaataaagtactgatttaagctagaaacagtcatacaacctctttttaaaagatctgtttaaccagaccagtagttcttagatcaataattcattgatcagattactccgtagttgtttacttgatatacttagataatggaaataattagaatcatgaaaaatacttgagttgtttggtcaattgcaattgtgtgatcattcacttgactgctcagtcaagtccttatgatattagcataagtcaccctattttgattgatttgaagaaattccaagtttttaataacagcactgctttcttcatagaatgtattgtaaactttttgtttttgctttttrttgtctccttaattagactgtaaattccaataatgcagagaccttacctgtttttctaactgctattccccataggacatgcacaataggtattcagttattgttctgtgaataaatatgaatgaattgagca

SEQ ID NO: 242863 - DNA, 658 bp, Homo sapiens
ctccttccttcattgagaaagttgccgccagaaaaataaatgtcagctgagttaagcaacatgcatagtgatatagctgggttaaattctggagcaagctctatatcccacctcagatcagcaacaaaccgtttaaggactggcagcttgtctgtgaatcatatcttaaataattctgcttttcacaacccagttttaatgtataatcatctaaaccaaaagaaagtgcaaaatcagaaaatagacacaaaagcataaattacagaagactagatgttgggggaaaattttaatgaaatataagaacttgagaaggaataggaagaactctattttacacatcccgggtaatgaaatagtacattttatcagtcctcagtgggatgttacttaagaagggcatcttttgtgatttacctaaagaacaggcccagcacaaaacagattctccgttgctaattcctcatggcacatctgctgtcttccctttcctcattgctctccttgcacactaaggctcagctatcycaaacaccatggaacagggggtgaagtccacactgccgccattgttctacacgtgaccagctaaagggtccatgtagaaagtcacaaagaactggataaatatgctgcaaaatctgaaaaaagagtgcta

SEQ ID NO: 242864 - DNA, 658 bp, Homo sapiens
ctccttccttcattgagaaagttgccgccagaaaaataaatgtcagctgagttaagcaacatgcatagtgatatagctgggttaaattctggagcaagctctatatcccacctcagatcagcaacaaaccgtttaaggactggcagcttgtctgtgaatcatatcttaaataattctgcttttcacaacccagttttaatgtataatcatctaaaccaaaagaaagtgcaaaatcagaaaatagacacaaaagcataaattacagaagactagatgttgggggaaaattttaatgaaatataagaacttgagaaggaataggaagaactctattttacacatcccgggtaatgaaatagtacattttatcagtcctcagtgggatgttacttaagaagggcatcttttgtgatttacctaaagaacaggcccagcacaaaacagattctccgttgctaattcctcatggcacatctgctgtcttccctttcctcattgctctccttgcacactaaggctcagctatcccaaacaccatggaacagggggtgaagtccacactgccgccattgttctacacgtgaccagctaaagggtccatgtagaaagtcacaaagaactkgataaatatgctgcaaaatctgaaaaaagagtgcta

SEQ ID NO: 242865 - DNA, 478 bp, Homo sapiens
tgttcagagcagcattatccacaatagccaaaatgtggaaacaccccaaatatctatcaataaagattacaaatggataaacaaaatgtggtatatacatacaatagaatattattgagccttaaaaaggagtaaaattctgaaatatgctaaaacatgtatgtactctgagcacattttgctaagtgaaataagccaaacacaaaaagacaaatgctgtgtgattccacttatatgacgtacctagaataatcaaattcataaagacagtmagtagaatggcggttactaggggctaggagaaagagagaatagagagttgttatttaatggtgacagaatttggatatttgtttctgcccaattctcatgctcaaaggtaatcctcaatgttggaggtggggcctggtgggaggtgtttgagtcttgagggtgtatccctcatggcttggtgctgtcctcgaggtcatgagtgagt

SEQ ID NO: 242866 - DNA, 542 bp, Homo sapiens
atagtataatgcaatgtcactcttctcactaacacattgttttagaaaagttattttcatcaaaaaagttaattatgttaacatgtaggtttgttatttaaatgaattatttaaaaatttcccagttttagtatctattacagaaaatataataaacaacagctctttggtgtcttcaatttttaagagtgtaacaaggtcctgacacaacaatctatgtgaaaaaagaaatcaagaaaacaatcccatttacaatagcaacaaaaaataaaataggaataaatgtaaggaggtgaaagatctatacactgaaagctatagaacattaatgaaagaaactgctggggacacaaataaatggacataaatatggaaaataaatgttcttggactggaagaaytaatattgttaaaatgtccatactacccaaaactatctatagatgtgatgcaatccctaaattgcagaggatccctaatccccaaaattccagtggcattttttacagaaatagaaaaagcaatcctaaaactcatatggt

SEQ ID NO: 242867 - DNA, 591 bp, Homo sapiens
accagccacataaaagaattacccattttcaatgatctcattttcatactacaaaaatctttcatatgtaaatgacctagatttccattacatttaaaaaastggatttagcaaagcttttacatcttaagagttcatttggcatcacttctaaaaataccactagaacagaaagaatgtgtacaggtgccatctttggctcttattgtgtttaaatactttaaactcagttttttatagaaacaccattcaaaggaatataagcaaaatttaatcctaacctgtatttcatttcaggttcaaaatcttttcagtatcgaaaagatactggtaaaaataccactttcaagactgaaatgaaaaaagccttcgatcctttaaatgaaaaaacatacccagttgtctacatctataaaaggaacttaagtctttacatgcatgtcttgactaacatccaaccagaatgttgacagattggcacctatgttaaccttttttaaagtatcaacttcaactatttcattttccttatatcaaggatacttaatggaactgaataaatactttaaaaggaaaaaaaaaagagccaac

SEQ ID NO: 242868 - DNA, 449 bp, Homo sapiens
ggcccagggcttccgacgaggcaggctcaggctgcgttcccaggaaggagaacaaggtctccgwgagagtcaaggtgggtgaggacatcctcactccaccccactggagctgggggaatctcagagggcaaccaacatagctctcaccttccagagggagaaactgagacccaggaaagggagagggtatacgactgagtataggagccagcattaactaagcaattctgttcgctatgatcagatgagatgttatgatcccatttaatccctaaagcaagcgtatgaggtgggtaccattttcactgccatattacagaagaagaaacagaagctcagagaggtcaagcaaggagcccaagatcacacagccaggaagtggtggagcagggcgttgggctcgggcagcctgactctgggaggaaaactccacgaatggtgactttggg

SEQ ID NO: 242869 - DNA, 449 bp, Homo sapiens
ggcccagggcttccgacgaggcaggctcaggctgcgttcccaggaaggagaacaaggtctccgtgagagtcaaggtgggtgaggacatcctcactccaccccacyggagctgggggaatctcagagggcaaccaacatagctctcaccttccagagggagaaactgagacccaggaaagggagagggtatacgactgagtataggagccagcattaactaagcaattctgttcgctatgatcagatgagatgttatgatcccatttaatccctaaagcaagcgtatgaggtgggtaccattttcactgccatattacagaagaagaaacagaagctcagagaggtcaagcaaggagcccaagatcacacagccaggaagtggtggagcagggcgttgggctcgggcagcctgactctgggaggaaaactccacgaatggtgactttggg

SEQ ID NO: 242870 - DNA, 505 bp, Homo sapiens
actccactcaatggatcagctggcaccacccagattgataaactgactcatctgattttttgccccccacccagaaaatgacccagcacaagaggacagcttcaactctctatgatttcatttcagacccaaccaatgagaactcctgactcacttgcccccaacccaccaaattatccttaaaaagtaccatccccgaattcttggggaaactgatttgagtaataataaaacttcagtctcccacacacccagctctgcgtgaattactctttctgcattgcaatttctctgtattgataaattggctctgtttaggccrtgaacaaggtgaaccaattaggcagttacaaatttgggggctcatttgggaccacccttgtggctaccttcctgttgctcaatagatcctctctggtgacatatccagaagccagcccaagtggctgcctagttctcttcgatggggggctgattctggcactgtctctaccagtggggcact

SEQ ID NO: 242871 - DNA, 577 bp, Homo sapiens
gcatgaaactcctcagtaccaaatgtgaagcaaattcctgcattagaaggattcagtacaacatctatatctctagatgctggttggactggttttaaagtatcataataattctagtttgaaagcttttgcttcacattcattatacatgtgaatgttgctgttttagccttatgtgattttattctagactcctgaaaagtttttaatgggaaccctggggctagggcctacttagaaaactattaacaacacatatgacataggagagttcaagggaaaaaaactgcaacagttcttaagtaattattcatattagaatatgatcaaaagagygtagtcatctgcttgcccagcaaagattcgcaagtttagttgcactttcccaacctcctctccaggtcacaaatgtataaacaatccttctatttgaactcaagtatcaattacagttaatctctctggtctttccattcaaattcttcaggctttgtgttttcgactgatttacttgaagaactcttttatcatggcattgctttacataagaattttatggcctagcatatcaaaaaca

SEQ ID NO: 242872 - DNA, 577 bp, Homo sapiens
gcatgaaactcctcagtaccaaatgtgaagcaaattcctgcattagaaggattcagtacaacatctatatctctagatgctggttggactggttttaaagtatcataataattctagtttgaaagcttttgcttcacattcattatacatgtgaatgttgctgttttagccttatgtgattttattctagactcctgaaaagtttttaatgggaaccctggggctagggcctacttagaaaactattaacaacacatatgacataggagagttcaagggaaaaaaactgcaacagttcttaagtaattattcatattagaatatgatcaaaagagtgtagtcatctgcttgcccagcaaagattcgcaagtttagttgcactttcccaacctcctctccaggtcacaaatgtataaacaatccttctatttgaactcaagtatcaattacagttaatctctctrgtctttccattcaaattcttcaggctttgtgttttcgactgatttacttgaagaactcttttatcatggcattgctttacataagaattttatggcctagcatatcaaaaaca

SEQ ID NO: 242873 - DNA, 613 bp, Homo sapiens
catggtgccctcctctgctcgcctcctgcctcaggaggcaaatcctgcacttagagctgctggccacctccagggcacaggaggaggggcctggggggaggaggaaaatgtgatgagcacccaggaatcccccactttacttgggctcaattttatcataagctctctctctctcttttttttttttttggatggagtcttgctctgtcgcccaggcaggagggcagtggcatgatctttgttcactgcagccttcacctcctgggttcaactgattcccctgcctcagcctcccaagtagctgagatcacaggmgtgcaccaacatgcccgactaatttttgtgtttttagtagagatggggtttctccatgttggtcaggctggtcttgaactcctgagcttaggtgatccacctgccttggcctcccaaagtgctgggattacaggtgtgagctaccgtgcctggcctatcataagctctttgaggggaggtcccctgcttctgacacagtgcctggactggcaaagccagggtgtcagtgtttcaggaagggagagcagggcttcaaaatcccaggctcagagtcaaacatgcatgcgcccagagcgag

SEQ ID NO: 242874 - DNA, 507 bp, Homo sapiens
tggttaattccaaataagttaatgatgtcaatattagaaatatgaacatatgcgtacacagaatcttctaacagggcagacggctcagcatagggaaaaaaggatgggaatttcacctccttaggtgagacctgtgaccctgtaatgacacttcccaggagtctctctgctttaattctcgcctgcctctccaccatcattgatccatttaattcatgtcgctggggttggggggaggcatcttttttttttttttgtrtttttatccatctttttaagagtcaagagccaacactcatctcaagccataccagttatccatgaatccagctacccaccagacacctgtagttgacaaggtggcaatggggatggcttctaaggacagtgtacttgacaatggagacaatgggaatggcttctgaggacagtgtaggaggggatgaggctatgctccaatagaaagtgggcacgaagcaccatgaccctcaagctgtggtggacaat

SEQ ID NO: 242875 - DNA, 527 bp, Homo sapiens
tccacctgccccctccgcctcagctcccctctgctcagcgggtgcagtgggactgctgtgagggtgacgtgaggatcggtgtggacagagtgacccttgggcaaatggctgctgaggagcctccttgggtgactttggtttgaccagaacaggttttaaaaaatctgaatgtgaaggccttgaggtgggcaggtgcccggaggcccgcagctgcgtggctgtccctcagatcaccagcctggcctcagtggtatctgcagtggctgcatacgtcccccacggacacagggcattcttatgccaggcrgcagccagtgagagccgctggtcgctgtgtaggtggaaggcggtcttggggatgccaagttctcatgccaggcagcagccagtgagagccgctggttgctgtgtaggtggaaggcggtcttggggatgccaagtgacctgggccctctgggcaaaaccggtttgggaagacaagtggagaggataggaagccacagcgggaggcaggaccccccgagtct

SEQ ID NO: 242876 - DNA, 536 bp, Homo sapiens
ggaggtggccacccctgggcttggctcaaggcctttcacgggcaggtgtgcacacagctcaaggtcgcgggatcagatcagcagccccgcaccctgtgtctccttgcctggtctggtacctgaggaccaggcctgctgaacaataacagctaaataaccaccaggccccctaaatgaatatgcatttcatcagcacaactaaaacagcacctttaaaacgtctttcctcctcgaagttcacaaagctgggaagaagggtttgtaattatatgtgtatcaccagcagtcccagcctggcagggggcttagagccttcatataaattataccaatcagcagcggaggggagaaaacccacaaggctatcaaaagtgatactttcttataactggtgtacacaagtactaaatcatggcaaaacagtgctgggggtgcagtgctgtcatcatgaagcgggtgctgggctgcagcccggccgcctttgtaaatgcatgtgatcatcttaatgaygcatttggggagacgtggaaaatcac

SEQ ID NO: 242877 - DNA, 546 bp, Homo sapiens
gggatcgtcgtcgagcggccgcagcctcccaggtcaatgctgccaagctcctgggcagatctgccagcctcggcccacagtgagggacaggttttccagggcccttcaggtgtctctgaaggcctgggttccaatcctgcccctacttcctagcagtgtgacctggggcaaattgcttgcctttgtgccttgctttgggagggtcacagcgtgaggttcctaagagagtccctggggtggccttaggggcatcaggcctcactgcctacaaagtgggcctttcctgtcccygttccacagatggaggacacacaggttaccatactcagcaggaaggtggggacctgctccccgtactgagcccctccccacgctgcacatgggcccggcacctggggtgggctcctctggcctggatgtgcctggaacaattggtctgcattctcaggaatggggatggcctgggagccagccctgcaccagacacgtatggactcctgctacatattgggctggggagaccctggtgagcaaggtgggccaggg

SEQ ID NO: 242878 - DNA, 532 bp, Homo sapiens
tgaattctgataggcaagaatcagtatgctctacagtagaaatatgtagttattggtgaggagagtatttttttgtattatcaagacttcacagagggagcagagcaaggtggcagagtaggactgtcaagtgattgtaccctgcagaaacatcagtttgaacaactactcatgcacaaatgtacctttaagaagactaagaaaaccaaatgagagatcatagtacctggttgtaggaaagtattaagaaaatatgcatttaagatgggaaaaagaacactttcacattacccacatcacccttcctccaaaaccaagcagtcctgtgtgaaacgggaggctgtctgcttggggaaaagagaagggaaatgagcataggactttgcattgaacccaaatgctggcctgccaaagtaaagcccagcatttgsaaaaacctgatagccccctattccaagccagtaactgtaaactaagtttctgcgccctccctggtgccaggaaagaccaaataatcccaggatgaaggctt

SEQ ID NO: 242879 - DNA, 542 bp, Homo sapiens
ctcctgtccaagaaaagccctaaacctgatggtttcactgttaagtactgtcaaacttttaaagaacaattaatacaaattcttctcaaacaggtcccaaaaattaaagaatagagaataattccaatcacacttaacaaggccagcatcatccttatagcaaatccaggtaaagacactaaggaaaacraaattataggccagtatttctgatgaaaacagatgcaaacattctcaacaagataccagctcacgcctgtaatcccagcactttgggaggtcgaggcaggcagatcatgaggtcaggagttcgagaccagtctggccaataaggtgagacccccatctccactaaaaatacaaaaattggcctggcattgtgggaagctcctgtaattggagctactcaggaggctgagacaggagaatcgcttgaacccaggaggcagaggttgcagtgagccgagatcgtgccattgcactccagcctgggcaacaagagcaagactccaccatgtgaaaaaaaaaaaagataccagcaa

SEQ ID NO: 242880 - DNA, 542 bp, Homo sapiens
ctcctgtccaagaaaagccctaaacctgatggtttcactgttaagtactgtcaaacttttaaagaacaattaatacaaattcttctcaaacaggtcccaaaaattaaagaatagagaataattccaatcacacttaacaaggccagcatcatccttatagcaaatccaggtaaagacactaaggaaaacaaaattataggccagtatttctgatgaaaacagatgcaaacattctcaacaagataccagctcacgcctgtaatcccagcactttgggaggtcgaggcaggcagatcatgaggtcaggagttcgagaccagtctggccaataaggtgagacccccrtctccactaaaaatacaaaaattggcctggcattgtgggaagctcctgtaattggagctactcaggaggctgagacaggagaatcgcttgaacccaggaggcagaggttgcagtgagccgagatcgtgccattgcactccagcctgggcaacaagagcaagactccaccatgtgaaaaaaaaaaaagataccagcaa

SEQ ID NO: 242881 - DNA, 493 bp, Homo sapiens
aggctgagacaggagaatcgcttgaacccaggaggcagaggttgcagtgagccgagatcgtgccattgcactccagcctgggcaacaagagcaagactccaccatgtgaaaaaaaaaaaagataccagcaagccaaacatgacagcacattaataagatcatcattcaccatgattaagtgggatttatcccagggatatgagataatccaaacaatacaaagcaataaatgtgatacaatacatkagctgaacagaaaagaaaaaaaaatgatgttttcaatagatgcagaaggtgcatttgacaaatttcacatcttctctcagctctcaactaataaggtatagaagaagttaccttagtgaaataaaggctatatatgacaatcccacagctagccttgtattccatgggggaaaaattgaaagattttactctaaaaccaagaaaaagacacaaagactcttgcaacttccattcagcgtattactgg

SEQ ID NO: 242882 - DNA, 570 bp, Homo sapiens
aatttggaacttaaaacttcaatgctaacctgcctttaatctgtcattatctttattccccctttgagcagagtcagacatgagttacaaaaacacatttaaataagacctagtagttcccaaataatacctaaaatttgggaattttaaattcccaaatttaatttttttaaacttaaaatttaaattcccaaatttcaatttaaaattaaattgaaattacttacatgaaataccaaaacatctcaactgagaaaagagcatcaaaagatgccaatgagaaggtaatacagttgctagaattatctgacagagattgaaaaagagccatcaaaaacatgcttccttgaaaattatgaacatgcttgaaaataaagaaaaaatgcaaagtctcaatgtgacaagttagaytgattgctaagtcacaggtaacagttctcacagtgtacttctacgctcatttatgacaccaactgcaacttaaggagttttccaaaacccccctcaattttgataatttacttgaaggacccacagacatcactgaaggttatttcacttacagttata

SEQ ID NO: 242883 - DNA, 487 bp, Homo sapiens
aagcttcagtagagatttcaaagacattmaaatggccaacaggtgtatgaaaaaaatgttcaacattgctcatacccagggaaatgcaaatcaaaaccatgagatattgccttgcatcacttagtatgactgttgtcaaaaaaacaaaagataaaaagtcttggcaaggctgtgaagaaaagggaacctttgtatatcaccattgttgagaatataaaataatgcatgccctaagaaaaacagtatggaaattcctcaaaaaatcaaaaatagaactaccatatgatcttatggtaccacttctggatatatatctacaaaaatttaaatcagtattcaaaaagatatctgcacttacctgtcattgcagcactattcacaataaccaattaattgacataacctaatgctcattgacagatgaattaataggtatgatatcgtatatacatacatttatatgtttagtcagcctttaaaaaggggg

SEQ ID NO: 242884 - DNA, 487 bp, Homo sapiens
aagcttcagtagagatttcaaagacattcaaatggccaacaggtgtatgaaaaaaatgttcaacattgctcatacccagggaaatgcaaatcaaaaccatgagatattgccttgcatcacttagtatgactgttgtcaaaaaaacaaaagataaaaagtcttggcaaggctgtgaagaaaagggaacctttgtatatcaccattgttgagaatataaaataatgcatgccctaagaaaaacagtatggaaattcctcaaaaaatcaaaaatagaactaccatatgatcttatggtaccacttctggatatatatcyacaaaaatttaaatcagtattcaaaaagatatctgcacttacctgtcattgcagcactattcacaataaccaattaattgacataacctaatgctcattgacagatgaattaataggtatgatatcgtatatacatacatttatatgtttagtcagcctttaaaaaggggg

SEQ ID NO: 242885 - DNA, 487 bp, Homo sapiens
aagcttcagtagagatttcaaagacattcaaatggccaacaggtgtatgaaaaaaatgttcaacattgctcatacccagggaaatgcaaatcaaaaccatgagatattgccttgcatcacttagtatgactgttgtcaaaaaaacaaaagataaaaagtcttggcaaggctgtgaagaaaagggaacctttgtatatcaccattgttgagaatataaaataatgcatgccctaagaaaaacagtatggaaattcctcaaaaaatcaaaaatagaactaccatatgatcttatggtaccacttctggatatatatctacaaaaatttaaatcagtattcaaaaagatatctgcacttacctgtcattgcagcactattcacaataaccaattaattgacataacctaatgctcattgacagatgaattaataggtatgatrtcgtatatacatacatttatatgtttagtcagcctttaaaaaggggg

SEQ ID NO: 242886 - DNA, 538 bp, Homo sapiens
tgaattaatttttcttaccaaacatcaatttttttcttagataatgtgagatgaggattyttatacataataaatccatttaggctgcctgtaaaacaacaacaacaaaaaagaaaatgtatgaataaataattaaaaattataattggcaattttgataacatattgtcttctatattgtaagaatattataagtagctgtgtgtttctaagtattgacaaaataactataataaaatgccaataattccaacaagaatatctagattataaaaattttaaatttgctttgtaaatagaagaaactaattaagagatggaaattcttgatttcttgttgaaatattataccaatttcctttttttccttgatatatgcaaaaccaagcctcatctagagtatggctaatttaatcaatagtgggtatttctttatccaacatgttcttaaaaataatatacttgcatgaccatatgcacagaatatttgggatcaaatttcaattcaatacagtctcagagtaagtataacagaaaa

SEQ ID NO: 242887 - DNA, 538 bp, Homo sapiens
tgaattaatttttcttaccaaacatcaatttttttcttagataatgtgagatgaggattcttatacataataaatccatttaggctgcctgtaaaacaacaacaacaaaaaagaaaatgtatgaataaataattaaaaattataattggcaattttgataacatattktcttctatattgtaagaatattataagtagctgtgtgtttctaagtattgacaaaataactataataaaatgccaataattccaacaagaatatctagattataaaaattttaaatttgctttgtaaatagaagaaactaattaagagatggaaattcttgatttcttgttgaaatattataccaatttcctttttttccttgatatatgcaaaaccaagcctcatctagagtatggctaatttaatcaatagtgggtatttctttatccaacatgttcttaaaaataatatacttgcatgaccatatgcacagaatatttgggatcaaatttcaattcaatacagtctcagagtaagtataacagaaaa

SEQ ID NO: 242888 - DNA, 526 bp, Homo sapiens
aacttctcataatgtaaaaaaaaaagtaggtcaaaccattgtaagtcagagaccatctgtatatactatgttttctcaatctaataatcaaggctcccaagtgactaagttgaaggtagcatatgaagtatggatatcctggataaagagttgattaatgtccagggccagaggaagcaggacagcacaagattttatcttgctaatcagaatggcagaaaatatctcttctctgtagacagaagacaaggtggcaattctaaagaaaagagggtgttctaataatctttacatgtactttagaccacacaagaggtaatatatcattatgtgcttttggcttctcagatattctattaattatarcattacaataacatccaagtatatttgattaatatataaaactttattcaataactgtggcaatatttgcttaggagagtcaggaacaaatgactcttgatttcaatgtactgatagcattttagacattattatcacatatctggagtaataattattc

SEQ ID NO: 242889 - DNA, 585 bp, Homo sapiens
tctgccacattctattctatttcccttttcattgtactccaactaaagacaggttaaaatattttctgcatcttctaagttaattacttcctcttctgtatttataattcttataactcctgatcttcattctggatttttttttctaactcaaaccactaaatcatttttaagctgtgtctaatctactgctaatccactggattccaatttcacttattgaaatattgagattagaatttctactggggctcattaaaaaagttttaatgttggcttttatctccctgaacatattaattatccttgttttgcagtctgtgtgtgttaatctactacaaaacaagtctatttcttaygctatttcttattcatcttgtcatttattctggcatgtctaaatatctttgatagtgtattagacattaaatttaaaaataaaatctttgcagaataaatttgagagttaaaagttattttttccagaagtatttgcattatttttggatggtacttggcagcataccttcaccttaattaaattttagttcttgagatttattaggcaggaacaatgatttccaa

SEQ ID NO: 242890 - DNA, 520 bp, Homo sapiens
tttttgattactgtagtcttatagtaatgacctgacagaacaataaactaagaaaacaatcactgtatgaaagcttaaaaaaataaaatattcaaaaataaatttaatcaaggagaggaaaatatgtacactgaagactataaagattgatgaaagaaatggaagaatacacaaattaatagaaagatattccatactcatgaatcagaaaattactattaataaaatgtytatgctacacagagtattatacaaattcaacacaattcctatcaaaatgccaatgtcattttttacaaaaattaaaaatatatatagaatctgtatggaaacctgtaagacccccacatagccaaaataattctgagagaaaaacaaatcaaagtgagaagtattatatcttttaatttgaaattatattacaagaaatcatattacaaattatagtaaactaaacagtatggtactgccataaaaacaaacacatagaccaatgacacagattagggagctaaaaaat

SEQ ID NO: 242891 - DNA, 475 bp, Homo sapiens
atgtggtcttctcccaaaaatatagaactgcagtctaattatgacagaaacgtgtattytactgatgttaaatggaatattctataaatttcaataggatcaagttgattggtagtgatgcaaggttaaactgtgtctgtagtgatcttctgcctgcttgatctattactgcaagagaggtgttgaaacctcaaactataatagtagatagtttccttttcaattacataaacttttgccttatatgttttgatgctctattgttagtttgttaaagtttgctatgtcttcttggagaatggttccttttttcattatgtaatgtttatcttcatctctgaacatttttcttgttctgaagcctgtttcttcagcaatgaatatagctacttcagtcttcttttgattgatattagcacagtatatatttttctatcccttttaagttgaatttttatatacgtggacttctttt

SEQ ID NO: 242892 - DNA, 523 bp, Homo sapiens
gcctcacccctgcaacaaacttctgcctggacatccaggcatttccatgtgtattctgaaatctaggcagaggttcccaaaccccaattcttgacttccgtgcattcacaggccgaaaaccatgggaaagctggcaaggcttgattaaggcttgcaccttttgaagccacgttccgaattctatgttggtctatttcaaccayggctggagcagctgggatgcaggacaccaagtccctaggctacacacagcatgtgaccttgggcccagcccatggaaccacagttttctcctaggtttctgggactgcaataggagaggctgccataaagtcctgtgtcatgccctggagacattttccctattttcttggtgattaacatttggttccatgttacttatgcaaattatgcagccagcttgaatttcttcaactaaaatgggattttcttttctatcgtattgtcaggcagcaaattttccaaatttttatgctctcctttcctgataaaattgaatgcc

SEQ ID NO: 242893 - DNA, 523 bp, Homo sapiens
gcctcacccctgcaacaaacttctgcctggacatccaggcatttccatgtgtattctgaaatctaggcagaggttcccaaaccccaattcttgacttccgtgcattcacaggccgaaaaccatgggaaagctggcaaggcttgattaaggcttgcaccttttgaagccacgttccgaattctatgttggtctatttcaaccatggctggagcagctgggatgcaggacaccaagtccctaggctacacacagcatgtgaccttgggcccagcccatggaaccacagttttctcctaggtttctgggactgcaataggagaggctgccataaagtcmtgtgtcatgccctggagacattttccctattttcttggtgattaacatttggttccatgttacttatgcaaattatgcagccagcttgaatttcttcaactaaaatgggattttcttttctatcgtattgtcaggcagcaaattttccaaatttttatgctctcctttcctgataaaattgaatgcc

SEQ ID NO: 242894 - DNA, 407 bp, Homo sapiens
aagacattctttcttaagtaacagtttgtttgcatttagaccattatctttatggccaattttattttgagtatgaaacacatgaaagacattttgcagaaaatttatgagtgtattagaaaatacctacacacaagaaaaggggttttctgtttttgaaatggaaagtacttatctaagcacctttcatgcactgggtacttcatatttccatttctcaataacaacatttaatacataaatgtaagggtttgtaaatttactgcttcattattactgagtatgtgcttgtgagtcatcctggagtgcctgaaactaraaaaataaaataataaaagatcattttataacatgtaagtgtaagaaaaaactaatatcctaatttccatacagtttcatataaaatt

SEQ ID NO: 242895 - DNA, 380 bp, Homo sapiens
tgactgttaatgggaatacaaaatggtacaactactttgaaagacagtttgccagtttcttataaaagtaaacattctcttaccaaacaatccagcatattatgttccttggtatttacccaaattaatggaaaattaagttcacacaaaaactagcacacagatgtttactgcagttttattcataattgccaaaacttagaagcaaccaaaagtccttcagtaggtgaatcggtaattaaactgtgaatatccaagcagttgaatattrgtcagcactaaaaagaagtggactatcaagccttgaaaatacatggagaaaacttaaaatgcacattaataagtaaaataaaccaattggaaagggctacatactgtat

SEQ ID NO: 242896 - DNA, 572 bp, Homo sapiens
cccatagtaaaaatctctttatggaaatctcaagttgtgttagttgcttgacttgtctctgagtctatctgggttaacttatagtttaactttagctttctggctttttgcatgtggcttcatgggaagaatattcatggtttttgcccttataaaggaagaactaagaacctcaggtagagttgagtaaycttaagtagtctgcctactttgtgaactgttttgtgacctgtgagggtctcactgaggatcagcaacactgtcaatcattaagacaattttaaacattttactaaatattttaaaatatatttatctcatttttctggaagttccgaaagataagctgttatatataaaaatggttcagcaattcatgaatgctcacagaacttttattttcttaagcaagcattataaattttgtctgacctactcttctgtaggcattccttctgagatttaatggatgtttgaatataatctctcttttgtggtttcaaagacaagctagagttagaaaatttaggaataggctgggaacttgaaaaaaatttccccagggatttaac

SEQ ID NO: 242897 - DNA, 572 bp, Homo sapiens
cccatagtaaaaatctctttatggaaatctcaagttgtgttagttgcttgacttgtctctgagtctatctgggttaacttatagtttaactttagctttctggctttttgcatgtggcttcatgggaagaatattcatggtttttgcccttataaaggaagaactaagaacctcaggtagagttgagtaaccttaagtagtctgcctactttgtgaactgttttgtgacctgtgagggtctcactgaggatcagmaacactgtcaatcattaagacaattttaaacattttactaaatattttaaaatatatttatctcatttttctggaagttccgaaagataagctgttatatataaaaatggttcagcaattcatgaatgctcacagaacttttattttcttaagcaagcattataaattttgtctgacctactcttctgtaggcattccttctgagatttaatggatgtttgaatataatctctcttttgtggtttcaaagacaagctagagttagaaaatttaggaataggctgggaacttgaaaaaaatttccccagggatttaac

SEQ ID NO: 242898 - DNA, 572 bp, Homo sapiens
cccatagtaaaaatctctttatggaaatctcaagttgtgttagttgcttgacttgtctctgagtctatctgggttaacttatagtttaactttagctttctggctttttgcatgtggcttcatgggaagaatattcatggtttttgcccttataaaggaagaactaagaacctcaggtagagttgagtaaccttaagtagtctgcctactttgtgaactgttttgtgacctgtgagggtctcactgaggatcagcaacactgtcaatcattaagacaattttaaacattttactaaatattttaaaatatatttatctyatttttctggaagttccgaaagataagctgttatatataaaaatggttcagcaattcatgaatgctcacagaacttttattttcttaagcaagcattataaattttgtctgacctactcttctgtaggcattccttctgagatttaatggatgtttgaatataatctctcttttgtggtttcaaagacaagctagagttagaaaatttaggaataggctgggaacttgaaaaaaatttccccagggatttaac

SEQ ID NO: 242899 - DNA, 572 bp, Homo sapiens
cccatagtaaaaatctctttatggaaatctcaagttgtgttagttgcttgacttgtctctgagtctatctgggttaacttatagtttaactttagctttctggctttttgcatgtggcttcatgggaagaatattcatggtttttgcccttataaaggaagaactaagaacctcaggtagagttgagtaaccttaagtagtctgcctactttgtgaactgttttgtgacctgtgagggtctcactgaggatcagcaacactgtcaatcattaagacaattttaaacattttactaaatattttaaaatatatttatctcatttttctggaagttccgaaagataagctgttatatataaaaatggttcagcaattcatgaatgctcacagaacttttattttcttaagcaagcattataaattttgtctgacctactcttctgtaggcattccttctgagatttaatggatgtttgaatataatctctcwtttgtggtttcaaagacaagctagagttagaaaatttaggaataggctgggaacttgaaaaaaatttccccagggatttaac

SEQ ID NO: 242900 - DNA, 490 bp, Homo sapiens
ggtaaaaataaaattgcatgatctgatttataaaatgatagcctacattttaacccatgcttttgggagggatattaaatttgcataatgcgcaaacattaaatatatgagtaataataaagtgtcaacatttggtgtcactgatcctacagagctggaacatgagcttttaggacaaggcaagaaacctccagaggaggctgggaaaagtcagatgagaggtgtatctcagtgcctctttactacaggtttagtgacaaatttagttacctgctgaagtacacatgttatttaaggatgattttagcatctagaatagtaaatgtatatacatcaattagcatcagaagtgtctgccaatgcctggcttgataagactctgacctttcttgaagataatcttyccaagaaacctagatgaattctcctggatgaatcttcacaaagcattactgcatttgtgataacaaatgcatatgggaattaatcc

SEQ ID NO: 242901 - DNA, 575 bp, Homo sapiens
tttgtgtactaaatgagatgattgaaggactgtgatttgagccgtgatatgatcctactttggtgtaatataattacaatgtatttagaagagaccagtagaaatgcaaacacacatgcacacacacacacacacacacacacacacacacacagtggcaaacttatttctaaaatatttgaagagaacagaagatagttgttttcctttggataatactactataaagtctgactaacagactttatagttactataatctaatttataggtactgattttttgggggttgtattaggccattcttgcattattataaatacctgagactgggtaaaatataaagaaaagaggtttaattggctcatggttctgcaggctttacaggaagcatagtactggcaactgctctacttctagggaggcytcaggaagctcacaatcgtggcagaaggcagaacagaagcaggcatgccacatggcgaaagcaggagcaagagaggaatgtgtggggaggagatgccatacacttctacagggccagattccatgacaactcactccattcatgagaa

SEQ ID NO: 242902 - DNA, 621 bp, Homo sapiens
tagaacaaaacatttatttgaaatcatgtttcaaaaataggacactttacttcatttagattcttgatatccccaaattaatgactctaaatttatcttgaagttaataaattcaatagtacttgaaattctgaaaatcaaaaatttattgtgaatacatttcctctasgaacaactcttactgcatcaactattttgatgaccatcacagtgtgacttgactttcaatctctggaatctcaagttgcattttagcaaggtgaatctgtttccaaatgttcactctcagctcaaagaaataaaaatgaaaatgcagaaatagctgatggtcccaggtgcatttcaataataaaagatggttcattttctcttcgtgctctctctctctttttctctctctctctctcactctcactccctctctctcccccaccccgccctgtctttgtggttaatctcaaaatgggaagaaatagcttggaatgaaccaggaccatggactgttctgtaatcctacacagaccttcttttgttctcttcattatgcacattgaaaagctcttcattttgaaaagatataaaatatattcatttgaataaaataacccatttgaaaaaaca

SEQ ID NO: 242903 - DNA, 596 bp, Homo sapiens
ggacactttacttcatttagattcttgatatccccaaattaatgactctaaatttatcttgaagttaataaattcaatagtacttgaaattctgaaaatcaaaaatttattgtgaatacatttcctctaggaacaactcttactgcatcaactattttgatgaccatcacagtgtgacttgmctttcaatctctggaatctcaagttgcattttagcaaggtgaatctgtttccaaatgttcactctcagctcaaagaaataaaaatgaaaatgcagaaatagctgatggtcccaggtgcatttcaataataaaagatggttcattttctcttcgtgctctctctctctttttctctctctctctctcactctcactccctctctctcccccaccccgccctgtctttgtggttaatctcaaaatgggaagaaatagcttggaatgaaccaggaccatggactgttctgtaatcctacacagaccttcttttgttctcttcattatgcacattgaaaagctcttcattttgaaaagatataaaatatattcatttgaataaaataacccatttgaaaaaacataagagcaaaataa

SEQ ID NO: 242904 - DNA, 441 bp, Homo sapiens
gtaatataatgcaagccatacatgtaatctcaaattttcatgtagccactttttgttaaaagcaaaagcaaaagaaaagccagaataaatgttttaatatattttaattaaaccwatatatttaagatataatttcagatgtaatcaataggaaatattattactggggccattatagatatttttgtcccaagtcttggaaatctagtatgtatttatccccatctcaattttgcctttttctttcttttcttttttttttttttttttgagaagcggtcttgctctgtagcctgtagcccaggctagagttcagtggcttgatctcggctcactttaacctccgcctcctggattcaagaaattctcctgcctcagcctcccggactcccgagtagctagtgttacaggcacacaccactgtgcccagctacatttttt

SEQ ID NO: 242905 - DNA, 441 bp, Homo sapiens
gtaatataatgcaagccatacatgtaatctcaaattttcatgtagccactttttgttaaaagcaaaagcaaaagaaaagccagaataaatgttttaatatattttaattaaacctatatatttaagatataatttcagatgtaatcaataggaaatattattactggggccattatagatatttttgtcccaagtcttggaaatctagtatgtatttatccccatctcaattttgcctttttctttcttttcttttttttttttttttttgagaagcggtcttgctctgtagcctgtagcccaggctagagttcagtggcttgatctcggctcactttaacctccgcctcctggattcaagmaattctcctgcctcagcctcccggactcccgagtagctagtgttacaggcacacaccactgtgcccagctacatttttt

SEQ ID NO: 242906 - DNA, 242 bp, Homo sapiens
gatcaacaatgtgtatacttttatcaaaatgtgtctttcattctggaagattgtaagtctttggcactcrtgttctaaaatttcacagcaatgattctgctttggtgtctctgctgtgcacttgaagaacttctgcagtatgcagatattcagaagcatgatattcaagcttgtaagttttcttattttttagttcataactatttcccctcttgtttctcttctttctctctttctgtcat

SEQ ID NO: 242907 - DNA, 566 bp, Homo sapiens
cctgtggtctaatcatctcatctcccaacactgttgcactgaagattaagtttccaactcatgtatgttaggaaacaaattcaaatcatagcataagggcatatgccatatataagtatagagatatttcaaatgacttcagaatcactaaggagtagaaactgaagacaattcagataatatacagtttgtctataaaataagggaagaactcgggcaaagtttgatgcaactatctaaataggggaaatcatttaaatgaaattgtgaaagtgagcatatttagctaacaattaaaagagagygcttaccaatggacagcaaaatacagatttcagcattcacaaaatctaattgtatgggctttgaataattcactggaacttttgcaatgaaaagtctacatagtttttccttttggctgaatgatatggttattcatttaggaaacaatttagaaaacaatcaatattctaattaatagctttagcagtattatgagtagtattaagtagtactaattggtacttggtataactggtattaagtactatctaaatataagt

SEQ ID NO: 242908 - DNA, 478 bp, Homo sapiens
cttggataacttacacctccatagttcattatctctgtgtcataaatgaaagtcaagagcaggaaaaacctcagtcagtacttcacaacatcctatcacacagaaatgagttgttggcaaggaaaagacccccatttgtccctaaagacttgcatcaaagatgggatcccctgcccaaagcaattagggaaattcctactaacagaagagatgtagaaacatctgtttcccactgatgtcaaggccaggggtggaggcgctggcctaaaataacctttyctgggccaaacagcctaatgggacatttaacctctctgagactcaatttcctgatctgtaaaatgacaattgaattagtccatatggcattcccagttcagagactttaagagttaagataatggaatgtggtgatcctgtataaataaaagaaacaagcaatttttttaaaagctatttggaaacccccttcacaatt

SEQ ID NO: 242909 - DNA, 535 bp, Homo sapiens
aagcttaaattttgggtgccttaggatcaccaggaagaaaaacaaacaaaccaataaagatttggataacaagagagaagttgattgaaaactgtcaactccctgaaagttttaaaccaggcatgaagcctcctgtgtccctcattcatcatgtttctgaagacagttgacctgttgacttaaasacatcatttaagagagtcagccagaactaatgacagtgtgaagacctgctaaccatggtgagtattgagaaagagctagctcaataagaaaaagtcaaccttggcctattactcagacatctttggcttaaaaaaaataatttccagatctcacaataatttggaccaggagttagaagatcagaccctagtccaggtttgatgctaatttttcagaaacctttttcctggagctatttggttaatgccccagaatcccttccctactgccttccttggctaaatgttttgatgttttggagagtgctagaatccttgtttcatcacttaccatctatatgccttgtgta

SEQ ID NO: 242910 - DNA, 365 bp, Homo sapiens
actttgctttgtatgcatgctgtcaccagaagttcaccacttgttagagactctggaggccaggatcaagtctacagatataaaaactgcacctcgtcccaccctgttgtgctatctgcttctcaaagtttctggattcttggctagataaatcaggcacataagataagcacatggtgggtttgaatctattttttctttgctcatccatccacgacccatcataactgctgcagcatacaaaacacttggcatagtacaaaacacttagcatagtacaaaacccaggaagagcactcagtcagtgttggcaccttcaaaccctccattccagggagataaragcatcatggttagattctcta

SEQ ID NO: 242911 - DNA, 464 bp, Homo sapiens
tttttatactcttaccttaaagtaaaacatggcaaagcctaacaaaaactaaagttatttaatttcctcaaaaatggtaatgtagtttaaattgaaagaaactgatttgatgttaaaagacttgactttccatactggtagtgtgaccttaaactagacacttttacccttggcctcatttccttgtctgtaaaacgaggtaggttagacaggctgattttataggtttgatcctactctcataatgtacttctctttggmacctacttgattatgccttgtgcattgtcatttgtgtacttgttttctctcttcatagaatacaagctccatccttgaaagcaaagaatgcttcagtcatcacacagtagctagcaaaggaactggcacataactgatgggagagcagtaaatatatgtggaaatgaaagcaggatataggagtattatcttattctagaggt

SEQ ID NO: 242912 - DNA, 574 bp, Homo sapiens
tctgaattatctgaggtagaaaacataatcaccttggctagaaagaagagttagaggattcagtccaagataaagacatccaatctccctcctcacatgtcagaaaaatcatgtcatggatgtgtataacatatctagcatagcagataatgatagacttgggagatgggaagacataggctttgtcagaacaatcctgaacagtgcaagataacaargcgacatatccattccagtgtgtttacaccttcatttccaatggggataatgatcagaaagttaatccttcagacattttgagattattccattctcgcagaaaaatcatggtagtatcctgtatttcaattctggcacatagtttgaacagtaaacttactgagaacaaataaggtgacattattcattaacacccctgactattttttataccttttattttaaataatatcaaaattagattatagttataataactgtacaaagaacttctatttacccttcaatgataatccctaaatgttaagattctaccatatttgcactatactccctctcctctattttttgagct

SEQ ID NO: 242913 - DNA, 574 bp, Homo sapiens
tctgaattatctgaggtagaaaacataatcaccttggctagaaagaagagttagaggattcagtccaagataaagacatccaatctccctcctcacatgtcagaaaaatcatgtcatggatgtgtataacatatctagcatagcagataatgatagacttgggagatgggaagacataggctttgtcagaacaatcctgaacagtgcaagataacaaggcgacatatcyattccagtgtgtttacaccttcatttccaatggggataatgatcagaaagttaatccttcagacattttgagattattccattctcgcagaaaaatcatggtagtatcctgtatttcaattctggcacatagtttgaacagtaaacttactgagaacaaataaggtgacattattcattaacacccctgactattttttataccttttattttaaataatatcaaaattagattatagttataataactgtacaaagaacttctatttacccttcaatgataatccctaaatgttaagattctaccatatttgcactatactccctctcctctattttttgagct

SEQ ID NO: 242914 - DNA, 664 bp, Homo sapiens
aagatttagttgttttctttaaacaatattaaatgtcttgtttataaaaaattacacaaacaaaatcattctggtttggcctgggtttatagttttatagttcttatgtcaaatgttgacacctaataacatctggcagagataaatatgaaaccgcttgatcagtaaatccaagcaaaaatatatattgacaattctaaaggcatttctaatattattttactactaattttagagccatmttatttattaaagattttacttaagtcacatgaacttggaaagcatttgggcttattaatttatgagtactcctttaagccaatttggtaccttgtggccacaacacataacaaaatatataaatgtacctataaacacacacttacatactcatataaagcaggcagaagagaaaacagaggaagatagagcctggccagcctttgtgtaggagccaagtcttacaagcagggtgtgaggaagaaaggaggggaagaaaaaaaggtaacatgattgaaaggaaattccagagccttccagccattgcacagtgcagggagtaccccccaccattctcgcttatcttccatagcaaaggaatcagggctcatacacaaagtcatacattcatatatgcaaacagtgtgcttccaaatgagtc

SEQ ID NO: 242915 - DNA, 664 bp, Homo sapiens
aagatttagttgttttctttaaacaatattaaatgtcttgtttataaaaaattacacaaacaaaatcattctggtttggcctgggtttatagttttatagttcttatgtcaaatgttgacacctaataacatctggcagagataaatatgaaaccgcttgatcagtaaatccaagcaaaaatatatattgacaattctaaaggcatttctaatattattttactactaattttagagccatattatttattaaagattttacttaagtcacatgaacttggaaagcatttgggcttattaatttatgagtactcctttaagccaatttggtaccttgtggccacaacacataacaaaatatataaatgtacctataaacacacacttacatactcatataaagcaggcagaagagaaaacagaggaagatagagcctggccagcctttgtgtaggagccaagtcttacaagcagggtgtgaggaagaaaggaggggaagaaaaaaaggtaacatgattgaaaggaaattccagagccttccagccattrcacagtgcagggagtaccccccaccattctcgcttatcttccatagcaaaggaatcagggctcatacacaaagtcatacattcatatatgcaaacagtgtgcttccaaatgagtc

SEQ ID NO: 242916 - DNA, 466 bp, Homo sapiens
aaaaaaaaaaggaaagaaacaaagaaaatttgcattctagtaataaaaagcaataaataaatcagtcagaaagaaaaagcactgatatgggaaataacagtgaagaaagagcataatgaggtttgctattttctttaaaaagcaacaaacaagacgaagtgcrttcaaacaattcaaacctggaattccagatgatatcactgtggtcagggggaggagaagagatcagaggtagatgacggtaggccaacattgttttcttgttcagatagaatacatacatgggaaaaagcttcacacagtaagaaaagaaaagcgtacttatggctcttaataagtaatgatagcccacagcagcgaagaatagaatactgggctttaaatccaggacagtattctgtcctataataaaagattagcaatgaagggaatgccattcacaagaatggagggttaggtaactatg

SEQ ID NO: 242917 - DNA, 592 bp, Homo sapiens
gtcctgaatcaacgaaggaatccaaattatgatgcttttgtaataaacatgaagtgagccgtttaataggatgacctctgttcatctacaaggcaacagctttttttagatgtaaatagtgagtcatgggtggaactgtgtcccctaaaaagatatgctgaagtcctcatctgtaaaagtgacctcatttggaaataaggtctttgcagatatagtcaagttaagatgaggtcatacccagttagtgtgggccctattccagtgactggtatctttacagaaatgaggagatctggayacagggaagaaaaagaatgtgccagtgaaggttgcaaatgggtctacaaatcaaagaacactaagaattgccagtaaccaccagatgctcgaagacaggcatggaacagagtctctgtcagagacttcagaaagatctaattcttcatttctgacttctggcctctggaattatgagaatagatttctgttgttgtaagccacctcatttgtagtacttcagtatgaataccttaaaaaaactgatacaagtcaaatttattttatttcagttgcgttgagttgagtttaattt

SEQ ID NO: 242918 - DNA, 570 bp, Homo sapiens
gaattctcactgccagacatcctgaaagtaagttaaacagcaggaaatgagctggaacttggattctaggaagtcacgggttcaggaagagtctccctcttgtctatgggagtaaagcaaagttgcacccactcytccaggcatggagatcatgtaaattctcatttgtgtgagatgagccggagcccagtatgtgaaggcctatgcatagtcaggtgatgacttgagagttttgtttggtgtgtgggacagaagaataatccccgctaatagtggtttgaagtcacttttctgttgtacttactttagtatcaacctttataaattcttgacacatgttgctttctggtatgagcagtgctatgaaaaactaggcggaggactggaattgtcaatgtccatggccagggaagaaaactccatctagcagctgacctgaggtaaatggaggagtctggaggcaaaataagaatatgggagcaagtgtagatttgttctggagcatcagtgaagctttccagggaaaccctggaaatatgtagtgcatttttaagaactcctcatttttga

SEQ ID NO: 242919 - DNA, 484 bp, Homo sapiens
tctgctgttgctgtgtgtcattccacagattagtgcagtggatatgttatgccttcgtttcctccccaccgaaacaaaaattgactgtaaactgtttgagggtaaaattgattaacagtcatgctgatgaaaaatggaatgagcagcttcatgaggagatactgaacttcctgttacttgaagcaatgcagatagaaactgagaaccacctgtcagcagggtcccgtaggtgatcactgagatcctttctacctccaaggtgagagggttttgcaaattccctctgatcagaggaaatcagaggccccagacaaccaatgaagcctacagagcaaagattgtgccttctagaacttcaggaatttggaarttatgctgttggcaattaataaataagacctcaaatggtaaatcacatttaacatcagcatatttggtttgatcttcattgtgtaaggtggaccttttttagttcaacaagaca

SEQ ID NO: 242920 - DNA, 551 bp, Homo sapiens
tccttctcagtccccatcagcctaatgctgaccatccttccactataagagagatgagggaggtgtcggcacttgaggaaaaggctcagttggcttgaaaygtccactcctacagtggaaagtccatctatcagcttattgctgatgattttttttttttatcaccatcactctgacccctccctgtcttaggtctgaataattgggtcacccataggaatgcagaacccagggtgggcagagcagagcagcacttgctgggataggcctcgagcctggtttctgagtccttgaggaccacgagctaacaggagctggtctgtaggttgctctccgtaagcagtgatgcaatggacgagggatcgtagacactgtcgaattcctcatctgagctcagcccttcgtttttgagagctgactcagcagctgagcgggaagctttgcgcctgactcagagagaagaataatggttggggaggggaaaatagaaatattaagacagccaccctttttgtacaaaggaaaccccaattcttctaaggcctaaagtt

SEQ ID NO: 242921 - DNA, 437 bp, Homo sapiens
ggttttgtttttttctgaactctaatacacccaacataccgggggatttggagaggccaatagagcaaaacgccatgactatcccgtggtgatggtcagctcacagtttgagaacctgacgaacagcttgaccggccagcctgtggcacccacagcgagtggctctggatgcagctctcggacaggagaagtgggttcttccaaaagcaaacaaactccgacccacggtcttcatctgggcccatcaggtcaaccgttgttttacagaacatcggcgattgtctttctccttgtgtcaggagcctcttgaaacattataygaggataattaagtggtgaataagggtcaatgtggacaaataaatcaaactgatagtttgaacacagactgattgagcaaaaacaaggaattctgccatgcctgttactgcagtgct

SEQ ID NO: 242922 - DNA, 655 bp, Homo sapiens
tatttactcagctgtttttagtaagtagcttttttctctggcaaaaagttgaaaaaatgcaccgcaatatttttctttccacaacagagactgtttttgttttctacccagtcattcaggaatcaagaggataaaaccaatcattttagacacacttttgtttcttctcacttttcttatgccttgagtccccacaagttcattgtcttttctcaggttaattttaggtggcaaagggtaagcarcgaggggtcaagtgggtattggccagttgaaatggcagactttttaaaggtagtgcacatgagaataaatcaagatctatgactgtaatcatgacggcaagcatctccccagactgaaggcccttgaggagatgtcacatctatctcctccccacaaactctctgtccccactgtacccagtgtctaagcagtaaacatatttgctccattaaagaggttcaacaaatgatgtgtggtaggtaattgatgtgggtaagtaatgatggcatctgaccactgcatcagttgactgtatggacttatgtatgggtatcagtctgagcagaaaaagcattgctgagctttcatgccactgtccttgatggtctggcataggatccaccttctcttctaatcccagccccaaatc

SEQ ID NO: 242923 - DNA, 655 bp, Homo sapiens
tatttactcagctgtttttagtaagtagcttttttctctggcaaaaagttgaaaaaatgcaccgcaatatttttctttccacaacagagactgtttttgttttctacccagtcattcaggaatcaagaggataaaaccaatcattttagacacacttttgtttcttctcacttttcttatgccttgagtccccacaagttcattgtcttttctcaggttaattttaggtggcaaagggtaagcagcgaggggtcaagtgggtattggccagttgaaatggcagactttttaaaggtagtgcacatgagaataaatcaagatctatgactgtaatcatgackgcaagcatctccccagactgaaggcccttgaggagatgtcacatctatctcctccccacaaactctctgtccccactgtacccagtgtctaagcagtaaacatatttgctccattaaagaggttcaacaaatgatgtgtggtaggtaattgatgtgggtaagtaatgatggcatctgaccactgcatcagttgactgtatggacttatgtatgggtatcagtctgagcagaaaaagcattgctgagctttcatgccactgtccttgatggtctggcataggatccaccttctcttctaatcccagccccaaatc

SEQ ID NO: 242924 - DNA, 655 bp, Homo sapiens
tatttactcagctgtttttagtaagtagcttttttctctggcaaaaagttgaaaaaatgcaccgcaatatttttctttccacaacagagactgtttttgttttctacccagtcattcaggaatcaagaggataaaaccaatcattttagacacacttttgtttcttctcacttttcttatgccttgagtccccacaagttcattgtcttttctcaggttaattttaggtggcaaagggtaagcagcgaggggtcaagtgggtattggccagttgaaatggcagactttttaaaggtagtgcacatgagaataaatcaagatctatgactgtaatcatgacggcaagcatctccccagactgaaggcccttgaggagatgtcacatctatctcctccccacaaactctctgtccccactgtacccagtgtctaagcagtaaacatatttgctccattaaagaggttcaacaaatgatgtgtggtaggtaattgatgtgggtaagtaatgatggcatytgaccactgcatcagttgactgtatggacttatgtatgggtatcagtctgagcagaaaaagcattgctgagctttcatgccactgtccttgatggtctggcataggatccaccttctcttctaatcccagccccaaatc

SEQ ID NO: 242925 - DNA, 544 bp, Homo sapiens
taatagtaatgtctgtactggtgcagtgttaagttcatgttaacactattaagaacctttctgccaaagcaaagtatctgggctatgttgccaaagatttcaaatgaagaagaattgtttcttaaaaatattatctagttagcaaagatcttttcttttttttttttaactaaatgcagaactaatttgtattttatttatggaagatyatgataatgcagaatacaaatgtgatttattttatgtgtaatttcaatgttattttattagatataacattttatttctagtgctttgggtactacgacatcaaaaacatatgtaggtatattttactgtttaaaaatttcagatttcttattctactttaatgatattaaaataaaagtattttatataagaataaaatcactttattaattcttagatctaacaataaaatgtaaattcataaataaaaaactagtgggtattccattttagtgagaaatctaaattatgttttgagtgtattatcaaaatctaccttcaacaggccttaata

SEQ ID NO: 242926 - DNA, 407 bp, Homo sapiens
gtttgcaactacacggagccaggttagtggtgcggtcagcatggtgataattgggctcatgaacccatgacctcagcttcatcaggagacccactgcaagtactggcccaacaggagggaaaggagctgagtcagatgataccactgaggggcatgagcaaatgaaaaaacaggaacccagccrtgaagctgggcctgagtgttggagatgccactatagagaccctggtcttagcaatccagacttttccccagtagaagggaaaggcaaagattatcctggccgggactgtgtaaggactttgaaggtcggccatccatctcaccctgctgtttccctccttccctgcagaacagccgttcacctgaatgttccaggcttttggttaacaacccctggtcttcta

SEQ ID NO: 242927 - DNA, 407 bp, Homo sapiens
gtttgcaactacacggagccaggttagtggtgcggtcagcatggtgataattgggctcatgaacccatgacctcagcttcatcaggagacccactgcaagtactggcccaacaggagggaaaggagctgagtcagatgataccactgaggggcatgagcaaatgaaaaaacaggaacccagccgtgaagctgggcctgagtgttggagatgccactatagagaccctggtcttagcaatccagacttttccccagtagaagggaraggcaaagattatcctggccgggactgtgtaaggactttgaaggtcggccatccatctcaccctgctgtttccctccttccctgcagaacagccgttcacctgaatgttccaggcttttggttaacaacccctggtcttcta

SEQ ID NO: 242928 - DNA, 407 bp, Homo sapiens
gtttgcaactacacggagccaggttagtggtgcggtcagcatggtgataattgggctcatgaacccatgacctcagcttcatcaggagacccactgcaagtactggcccaacaggagggaaaggagctgagtcagatgataccactgaggggcatgagcaaatgaaaaaacaggaacccagccgtgaagctgggcctgagtgttggagatgccactatagagaccctggtcttagcaatccagacttttccccagtagaagggaaaggcaaagattatcctggccgggactgtgtaaggmctttgaaggtcggccatccatctcaccctgctgtttccctccttccctgcagaacagccgttcacctgaatgttccaggcttttggttaacaacccctggtcttcta

SEQ ID NO: 242929 - DNA, 407 bp, Homo sapiens
gtttgcaactacacggagccaggttagtggtgcggtcagcatggtgataattgggctcatgaacccatgacctcagcttcatcaggagacccactgcaagtactggcccaacaggagggaaaggagctgagtcagatgataccactgaggggcatgagcaaatgaaaaaacaggaacccagccgtgaagctgggcctgagtgttggagatgccactatagagaccctggtcttagcaatccagacttttccccagtagaagggaaaggcaaagattatcctggccgggactgtgtaaggactttgaaggtcggccatccatctcaccctgctgtttccctccttccctgcagaacagcygttcacctgaatgttccaggcttttggttaacaacccctggtcttcta

SEQ ID NO: 242930 - DNA, 610 bp, Homo sapiens
acttcatataaatgtaaccatattgtatatattcttcttcagcttcttastttttcactaaacaatatgttttgctgatacttacattcatatgtacagtaatagttgatttattttaatgtctatatattattccattgttagaatacaccaggatttatttttacttattttttttgctggaaaattgggtgtcttttttattttttgatataacaaacaatgttgtaatcattttgtatttacttcctagtccactcctgtaagtttctcttgagtacatactagcaatgaagatgctgagtcactgcatatacatactcacaactttattctataatgtaatattctataaagtagctgtatcagtttatactttaaccagtaatggacaagattttctgttacttcccatctttgttaattattacttttagactctaacttttatcaggctcatggatgtaaaaagcatctcagggtggttttaatttgcatttatctgctcatctatgaagatgagcttcttttcatataattatgagtcattatttttgttttgccttcttttgtttatgcattttgcttgttctatgtcttatttttcctg

SEQ ID NO: 242931 - DNA, 610 bp, Homo sapiens
acttcatataaatgtaaccatattgtatatattcttcttcagcttcttactttttcactaaacaatatgttttgctgatacttacattcatatgtacagtaatagttgatttattttaatgtctatatattattccattgttagaatacaccaggatttatttttacttattttttttgctggaaaattgggtgtcttttttattttttgatataacaaacaatgttgtaatcattttgtatttacttcctagtccactcctgtaagtttctcttgagtacatactagcaatgaakatgctgagtcactgcatatacatactcacaactttattctataatgtaatattctataaagtagctgtatcagtttatactttaaccagtaatggacaagattttctgttacttcccatctttgttaattattacttttagactctaacttttatcaggctcatggatgtaaaaagcatctcagggtggttttaatttgcatttatctgctcatctatgaagatgagcttcttttcatataattatgagtcattatttttgttttgccttcttttgtttatgcattttgcttgttctatgtcttatttttcctg

SEQ ID NO: 242932 - DNA, 409 bp, Homo sapiens
aggtgtctatccctggtccgatcgcctgtgcccagggtagcacatcaggtacacagggctgtttcttccctsctattggtagaatagcttttccaagaaggggataggctggaatggaagaaaagagtccaaagatgaaggaaccacaacagaaagagaattgctttcctttcagttgtgggagcaccagcttaatgcctcttccacatttgcccagcagaggaaatgattgggccgaatgacagaaaacctaggatagcctttttggtgcctcctgacaatcacagaagcgggctgggatcctacccaggtctggcagagcaagtgagcccacctaggtgggaatccttaccctcctaatcctgcaggttcacttcacaatcttgtgtggaccttaaaccattgttta

SEQ ID NO: 242933 - DNA, 409 bp, Homo sapiens
aggtgtctatccctggtccgatcgcctgtgcccagggtagcacatcaggtacacagggctgtttcttccctcctattggtagaayagcttttccaagaaggggataggctggaatggaagaaaagagtccaaagatgaaggaaccacaacagaaagagaattgctttcctttcagttgtgggagcaccagcttaatgcctcttccacatttgcccagcagaggaaatgattgggccgaatgacagaaaacctaggatagcctttttggtgcctcctgacaatcacagaagcgggctgggatcctacccaggtctggcagagcaagtgagcccacctaggtgggaatccttaccctcctaatcctgcaggttcacttcacaatcttgtgtggaccttaaaccattgttta

SEQ ID NO: 242934 - DNA, 227 bp, Homo sapiens
accagcttaatgcctcttccacatttgcccagcagaggaaatgwttgggccgaatgacagaaaacctaggatagcctttttggtgcctcctgacaatcacagaagcgggctgggatcctacccaggtctggcagagcaagtgagcccacctaggtgggaatccttaccctcctaatcctgcaggttcacttcacaatcttgtgtggaccttaaaccattgtttagac

SEQ ID NO: 242935 - DNA, 227 bp, Homo sapiens
accagcttaatgcctcttccacatttgcccagcagaggaaatgattgggccgaatgacagaaaacctaggrtagcctttttggtgcctcctgacaatcacagaagcgggctgggatcctacccaggtctggcagagcaagtgagcccacctaggtgggaatccttaccctcctaatcctgcaggttcacttcacaatcttgtgtggaccttaaaccattgtttagac

SEQ ID NO: 242936 - DNA, 227 bp, Homo sapiens
accagcttaatgcctcttccacatttgcccagcagaggaaatgattgggccgaatgacagaaaacctaggatagcctttttggtgcctcctgacaatcacagaagcrggctgggatcctacccaggtctggcagagcaagtgagcccacctaggtgggaatccttaccctcctaatcctgcaggttcacttcacaatcttgtgtggaccttaaaccattgtttagac

SEQ ID NO: 242937 - DNA, 571 bp, Homo sapiens
gtgtgtaataggatctcaaggcttgactcctagtctaagaccatttctggagtttgctgacttgatccccatccttcatcattagcactttgcagggaaggagctgagcrtggatcttgactccgaattggctggggcatgcaaaatcgggggaacgcttggtgttgcccaggctccgctctgcctagacacacgtgagggccaagatctggtttgtgtttcatgagctctcccaggatgaagacccagccaggctgtctgaagaaggggtgttcttgagtaggagggaaggtctgctccaatacgaaaaatctaacaatagcatagtccttaagagcttgagctttgaagagggagaacagacccatttaaggcacgaaaaataaaggaaactcttgagtccctccaaggaaaattccagccacctggctagcctcaagaagtagatgagcaccctgataagtaagaaggtaataatagcttaaaacaatagtcaagaaaattagagccacaaactaatcttaaatgacgagttaatgggtgcagcacaccaacatggtacatgtataca

SEQ ID NO: 242938 - DNA, 571 bp, Homo sapiens
gtgtgtaataggatctcaaggcttgactcctagtctaagaccatttctggagtttgctgacttgatccccatccttcatcattagcactttgcagggaaggagctgagcatggatcttgactccgaattggctggggcakgcaaaatcgggggaacgcttggtgttgcccaggctccgctctgcctagacacacgtgagggccaagatctggtttgtgtttcatgagctctcccaggatgaagacccagccaggctgtctgaagaaggggtgttcttgagtaggagggaaggtctgctccaatacgaaaaatctaacaatagcatagtccttaagagcttgagctttgaagagggagaacagacccatttaaggcacgaaaaataaaggaaactcttgagtccctccaaggaaaattccagccacctggctagcctcaagaagtagatgagcaccctgataagtaagaaggtaataatagcttaaaacaatagtcaagaaaattagagccacaaactaatcttaaatgacgagttaatgggtgcagcacaccaacatggtacatgtataca

SEQ ID NO: 242939 - DNA, 571 bp, Homo sapiens
gtgtgtaataggatctcaaggcttgactcctagtctaagaccatttctggagtttgctgacttgatccccatccttcatcattagcactttgcagggaaggagctgagcatggatcttgactccgaattggctggggcatgcaaaatcgggggmacgcttggtgttgcccaggctccgctctgcctagacacacgtgagggccaagatctggtttgtgtttcatgagctctcccaggatgaagacccagccaggctgtctgaagaaggggtgttcttgagtaggagggaaggtctgctccaatacgaaaaatctaacaatagcatagtccttaagagcttgagctttgaagagggagaacagacccatttaaggcacgaaaaataaaggaaactcttgagtccctccaaggaaaattccagccacctggctagcctcaagaagtagatgagcaccctgataagtaagaaggtaataatagcttaaaacaatagtcaagaaaattagagccacaaactaatcttaaatgacgagttaatgggtgcagcacaccaacatggtacatgtataca

SEQ ID NO: 242940 - DNA, 518 bp, Homo sapiens
ttcatgagctctcccaggatgaagacccagccaggctgtctgaagaaggggtgttcttgagtaggagggaaggtctgctccaatacgaaaaatctaacaatagcatagtccttaagagcttgagctttgaagagggagaacagacccatttaaggcacgaaaaataaaggaaactcttgagtccctccaaggaaaattccagccacctggctagcctcaagaagtagatgagcaccctgataagtaagaaggtaataatagcttaaaacaatagtcaagaaaattagagccacaaactaatcttaaatgacgagttaatgggtgcagcacaccaacatggtacatgtatacatacgtaacagacctgcacgttgtgcacatgtaccctaaaacttaaagtataattaaaaaaaaagaaaattagagccacaaaatgtttgtttccctatagaaactagagataacatcttaacatatgtccctgagttgttytgtagaaacccagaccccgctaaatg

SEQ ID NO: 242941 - DNA, 515 bp, Homo sapiens
tcctttatctgtggaaagagctattctggccacagttactgccaagaaacaaggtgttagaaaaggcctaaagttaagtgcagaactgytgtgttttgatgaatattccgttgttttgagaggaggtagaagcattctcagcttcaggatatttgctcactactcattagtctctctgagaagtagcaaacttcaaaggttaaatatgaaggatgaattgtgtaatgcctagatgtcagtagcggagaaggtatctgagcaaattcaggattttatccctgtctccatgggcctagtgtgaagaacagtcatttgtgtaagtgggtctttgtgtatatggtactgaatcaggtcactgagtcagaaacttagagctgtaaggaaagtgaggtgctctccagtccagtgttctggaatttcttctgcagtggcccccaacagcaggtggcagcctcatccatgattgtattcttaagtgacatggtattactctttctatttgcaatccatttcac

SEQ ID NO: 242942 - DNA, 362 bp, Homo sapiens
aggtcctttatctgtggaaagagctattctggccacagttactgccaagaaacaaggtgttagaaaaggcctaaagttaagtgcagaactgctgtgttttgatgaatattcygttgttttgagaggaggtagaagcattctcagcttcaggatatttgctcactactcattagtctctctgagaagtagcaaacttcaaaggttaaatatgaaggatgaattgtgtaatgcctagatgtcagtagcggagaaggtatctgagcaaattcaggattttatccctgtctccatgggcctagtgtgaagaacagtcatttgtgtaagtgggtctttgtgtatatggtactgaatcaggtcactga

SEQ ID NO: 242943 - DNA, 362 bp, Homo sapiens
aggtcctttatctgtggaaagagctattctggccacagttactgccaagaaacaaggtgttagaaaaggcctaaagttaagtgcagaactgctgtgttttgatgaatattccgttgttttgagaggaggtagaarcattctcagcttcaggatatttgctcactactcattagtctctctgagaagtagcaaacttcaaaggttaaatatgaaggatgaattgtgtaatgcctagatgtcagtagcggagaaggtatctgagcaaattcaggattttatccctgtctccatgggcctagtgtgaagaacagtcatttgtgtaagtgggtctttgtgtatatggtactgaatcaggtcactga

SEQ ID NO: 242944 - DNA, 362 bp, Homo sapiens
aggtcctttatctgtggaaagagctattctggccacagttactgccaagaaacaaggtgttagaaaaggcctaaagttaagtgcagaactgctgtgttttgatgaatattccgttgttttgagaggaggtagaagcattctcagcttcaggatatttgctcactactcattagtctytctgagaagtagcaaacttcaaaggttaaatatgaaggatgaattgtgtaatgcctagatgtcagtagcggagaaggtatctgagcaaattcaggattttatccctgtctccatgggcctagtgtgaagaacagtcatttgtgtaagtgggtctttgtgtatatggtactgaatcaggtcactga

SEQ ID NO: 242945 - DNA, 483 bp, Homo sapiens
acagttactgccaagaaacaaggtgttagaaaaggcctaaagttaagtgcagaactgctgtgttttgatgaatattccgttgttttgagaggaggtagaagcattctcagcttcaggatatttgctcactactcattagtctctctgagaagtagcaaacttcaaaggttaaatatgaaggatgaattgtgtaatgcctagatgtcagtagcggagaaggtatctgarcaaattcaggattttatccctgtctccatgggcctagtgtgaagaacagtcatttgtgtaagtgggtctttgtgtatatggtactgaatcaggtcactgagtcagaaacttagagctgtaaggaaagtgaggtgctctccagtccagtgttctggaatttcttctgcagtggcccccaacagcaggtggcagcctcatccatgattgtattcttaagtgacatggtattactctttctatttgcaatccatttca

SEQ ID NO: 242946 - DNA, 516 bp, Homo sapiens
gtcctttatctgtggaaagagctattctggccacagttactgccaagaaacaaggtgttagaaaaggcctaaagttaagtgcagaactgctgtgttttgatgaatattccgttgttttgagaggaggtagaagcattctcagcttcaggatatttgctcactactcattagtctctctgagaagtagcaaacttcaaaggttaaatatgaaggatgaattgtgtaatgcctagatgtcagtagcggagaaggtatctgagcaaattcagrattttatccctgtctccatgggcctagtgtgaagaacagtcatttgtgtaagtgggtctttgtgtatatggtactgaatcaggtcactgagtcagaaacttagagctgtaaggaaagtgaggtgctctccagtccagtgttctggaatttcttctgcagtggcccccaacagcaggtggcagcctcatccatgattgtattcttaagtgacatggtattactctttctatttgcaatccatttcac

SEQ ID NO: 242947 - DNA, 515 bp, Homo sapiens
tcctttatctgtggaaagagctattctggccacagttactgccaagaaacaaggtgttagaaaaggcctaaagttaagtgcagaactgctgtgttttgatgaatattccgttgttttgagaggaggtagaagcattctcagcttcaggatatttgctcactactcattagtctctctgagaagtagcaaacttcaaaggttaaatatgaaggatgaattgtgtaatgcctagatgtcagtagcggagaaggtatctgagcaaattcaggattttatccctgtctccatgggcctagtgtgaagaacagtcatttgtgtaagtgggtctttgtgtatatggtastgaatcaggtcactgagtcagaaacttagagctgtaaggaaagtgaggtgctctccagtccagtgttctggaatttcttctgcagtggcccccaacagcaggtggcagcctcatccatgattgtattcttaagtgacatggtattactctttctatttgcaatccatttcac

SEQ ID NO: 242948 - DNA, 333 bp, Homo sapiens
tgccaatccctcggtgcatcaccatttctaattagttcctgttttagtctgcttttgcgtgtgtgtgtgtgtgtgtgtgtgtgtgtgtgtgtgtgttgttataaaggaataccagaggctgaataattttaaagaagagaggtttatttggytcacagttctgaaggtgtgcaagaagcatggtgccaccatttgcttctggtgagggctttaggctgtttccactcatggcagaaggggaagggaagctggcatgtgcagagatcacgtggcgagagagaggggtttgtgccaggctcttgttaacaaccagctcttgtgggaattaagaga

SEQ ID NO: 242949 - DNA, 333 bp, Homo sapiens
tgccaatccctcggtgcatcaccatttctaattagttcctgttttagtctgcttttgcgtgtgtgtgtgtgtgtgtgtgtgtgtgtgtgtgtgtgttgttataaaggaataccagaggctgaataattttaaagaagagaggtttatttggttcacagttctgaaggtgtgcaagaagcatggtgccaccatttgcttctggtgagggckttaggctgtttccactcatggcagaaggggaagggaagctggcatgtgcagagatcacgtggcgagagagaggggtttgtgccaggctcttgttaacaaccagctcttgtgggaattaagaga

SEQ ID NO: 242950 - DNA, 333 bp, Homo sapiens
tgccaatccctcggtgcatcaccatttctaattagttcctgttttagtctgcttttgcgtgtgtgtgtgtgtgtgtgtgtgtgtgtgtgtgtgtgttgttataaaggaataccagaggctgaataattttaaagaagagaggtttatttggttcacagttctgaaggtgtgcaagaagcatggtgccaccatttgcttctggtgagggctttaggctgtttccrctcatggcagaaggggaagggaagctggcatgtgcagagatcacgtggcgagagagaggggtttgtgccaggctcttgttaacaaccagctcttgtgggaattaagaga

SEQ ID NO: 242951 - DNA, 576 bp, Homo sapiens
ctcaggaccaaaacacctcccattaggccccacctccaacaatggggatcacatttcaacatgagtttkgagtggtcaaatatccaaaccctagcagttcccttaaccctggaaagagacccttcattaaactctttctgcttaatcctttgagagtgcaacaatttcctgctaggaccctgacagatagagggaccatacagatcactaaaatgctgaggaatttttcaaatgaactgcacccaacagacctccctgattctgaatatatcaaacttttattttttattttattttattttattttttgagacggaatctcgctctgtcgcccaggctggagtgcagtggtgcgatctcggctccctgcaacctccacctcctgggttcaagcgattctcctgccttagcctcccgagtagctgggactacaggcatccaccagcaggcccggctaattttttatttttagtagagatggggtttcaccatgttgaccgggctggtcttcaactcctgacttcatgatccgcccaccttggcttccctaagtgcttggattacaggcgtgagccg

SEQ ID NO: 242952 - DNA, 576 bp, Homo sapiens
ctcaggaccaaaacacctcccattaggccccacctccaacaatggggatcacatttcaacatgagttttgagtggtcaaatatccaaaccctagcagttcccttaaccctggaaagagacccttcattaaactctttctgcttaatcctttgagagtgcaacaatttcctgctaggaccctgacrgatagagggaccatacagatcactaaaatgctgaggaatttttcaaatgaactgcacccaacagacctccctgattctgaatatatcaaacttttattttttattttattttattttattttttgagacggaatctcgctctgtcgcccaggctggagtgcagtggtgcgatctcggctccctgcaacctccacctcctgggttcaagcgattctcctgccttagcctcccgagtagctgggactacaggcatccaccagcaggcccggctaattttttatttttagtagagatggggtttcaccatgttgaccgggctggtcttcaactcctgacttcatgatccgcccaccttggcttccctaagtgcttggattacaggcgtgagccg

SEQ ID NO: 242953 - DNA, 576 bp, Homo sapiens
ctcaggaccaaaacacctcccattaggccccacctccaacaatggggatcacatttcaacatgagttttgagtggtcaaatatccaaaccctagcagttcccttaaccctggaaagagacccttcattaaactctttctgcttaatcctttgagagtgcaacaatttcctgctaggaccctgacagatagagggaccatacagatcactaaaatgctgaggaatttttcaaatgaactgcacccaacagacctccctgattctgaatatatcaaacttttattttttattttattttattttattttttgagacggaatctcgcyctgtcgcccaggctggagtgcagtggtgcgatctcggctccctgcaacctccacctcctgggttcaagcgattctcctgccttagcctcccgagtagctgggactacaggcatccaccagcaggcccggctaattttttatttttagtagagatggggtttcaccatgttgaccgggctggtcttcaactcctgacttcatgatccgcccaccttggcttccctaagtgcttggattacaggcgtgagccg

SEQ ID NO: 242954 - DNA, 576 bp, Homo sapiens
ctcaggaccaaaacacctcccattaggccccacctccaacaatggggatcacatttcaacatgagttttgagtggtcaaatatccaaaccctagcagttcccttaaccctggaaagagacccttcattaaactctttctgcttaatcctttgagagtgcaacaatttcctgctaggaccctgacagatagagggaccatacagatcactaaaatgctgaggaatttttcaaatgaactgcacccaacagacctccctgattctgaatatatcaaacttttattttttattttattttattttattttttgagacggaatctcgctctgtcrcccaggctggagtgcagtggtgcgatctcggctccctgcaacctccacctcctgggttcaagcgattctcctgccttagcctcccgagtagctgggactacaggcatccaccagcaggcccggctaattttttatttttagtagagatggggtttcaccatgttgaccgggctggtcttcaactcctgacttcatgatccgcccaccttggcttccctaagtgcttggattacaggcgtgagccg

SEQ ID NO: 242955 - DNA, 458 bp, Homo sapiens
gttgtcagccagttatttcaggttgttgagatcatctggctcttgattttattaatcatcttagccttccctttcaacaatttgccgactttgtgcaaattttattaatatgtgatctctgtctttatccatggagargcagtatagtatcatgaggaaaaatagactttggagtaggcagaaattaggtttgaattactagccacgaggctttgggaacattacttaaactctataagcttcaatttctttatctataaggtaggtataaaacctgaaagttttggcatgagtttagtaaaactgtctgtgaagcccttgtggactgcttggtccatgtaggcatttgataaacggtggctttatatagaggagggaaatgcaagctatctcaaaaagaaatcaggcaaataagaatgccatctgaaatctgtcatatgagaatgaaaggagcatag

SEQ ID NO: 242956 - DNA, 458 bp, Homo sapiens
gttgtcagccagttatttcaggttgttgagatcatctggctcttgattttattaatcatcttagccttccctttcaacaatttgccgactttgtgcaaattttattaatatgtgatctctgtctttatccatggagaagcagtakagtatcatgaggaaaaatagactttggagtaggcagaaattaggtttgaattactagccacgaggctttgggaacattacttaaactctataagcttcaatttctttatctataaggtaggtataaaacctgaaagttttggcatgagtttagtaaaactgtctgtgaagcccttgtggactgcttggtccatgtaggcatttgataaacggtggctttatatagaggagggaaatgcaagctatctcaaaaagaaatcaggcaaataagaatgccatctgaaatctgtcatatgagaatgaaaggagcatag

SEQ ID NO: 242957 - DNA, 458 bp, Homo sapiens
gttgtcagccagttatttcaggttgttgagatcatctggctcttgattttattaatcatcttagccttccctttcaacaatttgccgactttgtgcaaattttattaatatgtgatctctgtctttatccatggagaagcagtatagtatcatraggaaaaatagactttggagtaggcagaaattaggtttgaattactagccacgaggctttgggaacattacttaaactctataagcttcaatttctttatctataaggtaggtataaaacctgaaagttttggcatgagtttagtaaaactgtctgtgaagcccttgtggactgcttggtccatgtaggcatttgataaacggtggctttatatagaggagggaaatgcaagctatctcaaaaagaaatcaggcaaataagaatgccatctgaaatctgtcatatgagaatgaaaggagcatag

SEQ ID NO: 242958 - DNA, 367 bp, Homo sapiens
ataagcttcaatttctttatctataaggtaggtataaaacctgaaagttttggcatgagtttagtaaaactgtctgtgaagcccttgtggactgcttggtccatgtaggcatttgataaayggtggctttatatagaggagggaaatgcaagctatctcaaaaagaaatcaggcaaataagaatgccatctgaaatctgtcatatgagaatgaaaggagcatagacaggttttgagtgtggggtgaggagtaggggaggggaggagataagtgaactgcccctcagacttccagggaggagaaaaatgatgtcactgggaactgcagtcatttgaaaagatagcaatcaagcatttctttcagagcc

SEQ ID NO: 242959 - DNA, 540 bp, Homo sapiens
tgagcagcaatagcagaaggagaaaagtgagtgagggctctccaagaagccatctggcaggctaagggttctgagggaagctctggtttcagaagcaactcaggaattacttctgtcatattaggatgggatggtaggagattgggaactctagggactagaagtcatttaatttcctgtctacaatccttggaagaagttttgagacttgcaacctaggaccttaactaatcatcttccctcagcattgatagaattctttattatacatgttaatatcagattagtcaggatgggctrgattatgctgtgttaacagccattctctaaatctctgtggctcaactggaagctctgcctgtcatggtcacttgggacccaggctttgggtataaggctacagcacatggaaaacgtatgaatgtctctcagattcttaaagcttctgctggaagtgacatgtcattctgctcaccattcattggctaaatgagtcacgtggctctctctaacttcaaggatggtatgaaattgcaatcc

SEQ ID NO: 242960 - DNA, 540 bp, Homo sapiens
tgagcagcaatagcagaaggagaaaagtgagtgagggctctccaagaagccatctggcaggctaagggttctgagggaagctctggtttcagaagcaactcaggaattacttctgtcatattaggatgggatggtaggagattgggaactctagggactagaagtcatttaatttcctgtctacaatccttggaagaagttttgagacttgcaacctaggaccttaactaatcatcttccctcagcattgatagaattctttattatacatgttaatatcagattagtcaggatgggctggattatgctgtgttaacagccattctctaaatctctgtggctcaactggaagctctgcctgtcatggtcacttgggacccaggctttgggtataaggctacagcacatggaaaacgtatgamtgtctctcagattcttaaagcttctgctggaagtgacatgtcattctgctcaccattcattggctaaatgagtcacgtggctctctctaacttcaaggatggtatgaaattgcaatcc

SEQ ID NO: 242961 - DNA, 562 bp, Homo sapiens
agatgaatttttaaaagctggaatgaatgagcagcaatagcagaaggagaaaagtgagtgagggctctccaagaagccatctggcaggctaagggttctgagggaagctctggtttcagaagcaactcaggaattacttctgtcatattaggatgggatggtaggagattgggaactctagggactagaagtcatttaatttcctgtctacaatccttggaagaagttttgagacttgcaacctaggaccttaactaatcatcttccctcagcattgatagaattctttattatacatgttaatatcagattagtcaggatgggctggattatgctgtgttaacagccattctctaaatctctgtggctcaactggaagctctgcctgtcatggtcacttgggacccaggctttgggtataaggctacagcacatggaaaacgtatgaatgtctctcagattcttaaagcttctgctggaagtgacatgtcattctgctcacmattcattggctaaatgagtcacgtggctctctctaacttcaaggatggtatgaaattgc

SEQ ID NO: 242962 - DNA, 562 bp, Homo sapiens
agatgaatttttaaaagctggaatgaatgagcagcaatagcagaaggagaaaagtgagtgagggctctccaagaagccatctggcaggctaagggttctgagggaagctctggtttcagaagcaactcaggaattacttctgtcatattaggatgggatggtaggagattgggaactctagggactagaagtcatttaatttcctgtctacaatccttggaagaagttttgagacttgcaacctaggaccttaactaatcatcttccctcagcattgatagaattctttattatacatgttaatatcagattagtcaggatgggctggattatgctgtgttaacagccattctctaaatctctgtggctcaactggaagctctgcctgtcatggtcacttgggacccaggctttgggtataaggctacagcacatggaaaacgtatgaatgtctctcagattcttaaagcttctgctggaagtgacatgtcattctgctcaccrttcattggctaaatgagtcacgtggctctctctaacttcaaggatggtatgaaattgc

SEQ ID NO: 242963 - DNA, 540 bp, Homo sapiens
tgagcagcaatagcagaaggagaaaagtgagtgagggctctccaagaagccatctggcaggctaagggttctgagggaagctctggtttcagaagcaactcaggaattacttctgtcatattaggatgggatggtaggagattgggaactctagggactagaagtcatttaatttcctgtctacaatccttggaagaagttttgagacttgcaacctaggaccttaactaatcatcttccctcagcattgatagaattctttattatacatgttaatatcagattagtcaggatgggctggattatgctgtgttaacagccattctctaaatctctgtggctcaactggaagctctgcctgtcatggtcacttgggacccaggctttgggtataaggctacagcacatggaaaacgtatgaatgtctctcagattcttaaagcttctgctggaagtgacatgtcattctgctcaccattcattggctaaatgagtcacgtggctstctctaacttcaaggatggtatgaaattgcaatcc

SEQ ID NO: 242964 - DNA, 472 bp, Homo sapiens
gaattctgacctttgctacactctcatccacaatcttttctcctagtaaatggcagctccttctgttaagttgctgaggcttcttattgcttttttcttcaaataacagtcagaactgaacaactgtaatcatcctagtccatacaattkttatattttcatttaaagaagatcaatgtgtgattctttttttatatatttctggacaattctttatattttaatagtagtcagaatttgatcaggaaaacagaagacatcctatgtattataatgataaaagtttaatattaattagggccttatgctattattggaagagcttggtgaatagatattagaaaagcagctagacaaaatcagaagaggtctgttttatatcagagatcttagcctgacagtctagagtgtgggcacagaacccaagcttataggaatttctgaaaggtctgtaaatcttatccagatggac

SEQ ID NO: 242965 - DNA, 342 bp, Homo sapiens
aatgacatccagagacctatcaagacctgtatccaggaaaaggtaaatctgagctgaaattgtagcccttgtaaattacctacgtgacataccagatagtgttcatgatccatttagtaytctgttctaaaaatgagacaatatccatttattcacttgttcatttatttagtgtttgttcagcccttactgcatattccaggcactattctgactgtggcaggagtgaacaaacaggcatggttcttacttgcatgtaattacagtcttatagtgaaaacaagtgttaaacaacaaaatctcccaattgttttaaaattatgaacttgattcgatactatg

SEQ ID NO: 242966 - DNA, 447 bp, Homo sapiens
gtaaatctgagctgaaattgtagcccttgtaaattacctacgtgacataccagatagtgttcatgatccatttagtattctgttctaaaaatgagacaatatccatttattcacttgttcatttatttagtgtttgttcagcccttactgcatattccaggcactattctgactgtggcaggagtgaacaaacaggcatggttcttacttgcatgtaattacagtcttatagtgaaaacaagtgttaaacaacaaaatctcccaattrttttaaaattatgaacttgattcgatactatgtggccatataattgttcctaatttggttggagaagggaggcagttagggaagccttccctgagttagtgccatttaacctgatttatgatagatgataagtaatttgtcaggggaaaaatactccaggaataaagaacaggtacaaa

SEQ ID NO: 242967 - DNA, 447 bp, Homo sapiens
gtaaatctgagctgaaattgtagcccttgtaaattacctacgtgacataccagatagtgttcatgatccatttagtattctgttctaaaaatgagacaatatccatttattcacttgttcatttatttagtgtttgttcagcccttactgcatattccaggcactattctgactgtggcaggagtgaacaaacaggcatggttcttacttgcatgtaattacagtcttatagtgaaaacaagtgttaaacaacaaaatctcccaattgttttaaaattatraacttgattcgatactatgtggccatataattgttcctaatttggttggagaagggaggcagttagggaagccttccctgagttagtgccatttaacctgatttatgatagatgataagtaatttgtcaggggaaaaatactccaggaataaagaacaggtacaaa

SEQ ID NO: 242968 - DNA, 447 bp, Homo sapiens
gtaaatctgagctgaaattgtagcccttgtaaattacctacgtgacataccagatagtgttcatgatccatttagtattctgttctaaaaatgagacaatatccatttattcacttgttcatttatttagtgtttgttcagcccttactgcatattccaggcactattctgactgtggcaggagtgaacaaacaggcatggttcttacttgcatgtaattacagtcttatagtgaaaacaagtgttaaacaacaaaatctcccaattgttttaaaattatgaacttgattcgatactatgtggccatataattgttcctaatttggttggagaagggaggcagttagggaagccttccctgagttagtgccatttaacctgawttatgatagatgataagtaatttgtcaggggaaaaatactccaggaataaagaacaggtacaaa

SEQ ID NO: 242969 - DNA, 381 bp, Homo sapiens
caaactaaaacagaaactcctgaactgggttctttcgagcccaggaagcagcagtaaatcattaaagaacagataagttcttaaggtgagggagartttcagataaatggaatgctggtagaacacagggcccaaaggagcaaaagttaacctaagcccaggtagaaccttgtttactagagtattaggcatgggtttgggcaactattctaaccagagaaactggcttcagtgagggcaagttggcaatccaaggtatagcatgcatagggctggcaaaattcagggtgactgaagcaaaagcttcagaaccagaaagaccacatctgggggtagagcacagaactctcaagagatgaatctttttaagagtgaggcaga

SEQ ID NO: 242970 - DNA, 588 bp, Homo sapiens
actgcagtatacaatcaatataaaaaattacggagattttcttttccatgctcagtcttttaaatctgtggcatattttatatttgcagaacatcacaattcagactacccacatttcaaagattaatagccacatgtggctacaggctgctgtactatttaataaaaagtgcatatctagagtctagccccttgctttataaagtgtgatctaccatccagcrgcatcagcatcacctgggatcttgttagaaatgtagaaaggcagcccatctcagaactactagaagaaataaatttaacaggatacccaggattggaatgcgtagcaaagactgagaagcagtaaattagatcacatatagcatgggagttttacagaattgctattgccattcaactatgatatggtattatcccactgactaatatagaacactatttaaataacaatagtttttctatgaatcatgttttctctacactgtccaatgcaattttctacaatgatgaaaatcttcatatatgtgctgcacaaaatggcagccacttgccacatgtggctgttgagcacttgaaatgtatctg

SEQ ID NO: 242971 - DNA, 588 bp, Homo sapiens
actgcagtatacaatcaatataaaaaattacggagattttcttttccatgctcagtcttttaaatctgtggcatattttatatttgcagaacatcacaattcagactacccacatttcaaagattaatagccacatgtggctacaggctgctgtactatttaataaaaagtgcatatctagagtctagccccttgctttataaagtgtgatctaccatccagcggcatcagcatcacctgggatcttgttagaaatgtagaaaggcagcccatctcagaactactagaagaaataaatttaacaggatacccaggattggaatgcrtagcaaagactgagaagcagtaaattagatcacatatagcatgggagttttacagaattgctattgccattcaactatgatatggtattatcccactgactaatatagaacactatttaaataacaatagtttttctatgaatcatgttttctctacactgtccaatgcaattttctacaatgatgaaaatcttcatatatgtgctgcacaaaatggcagccacttgccacatgtggctgttgagcacttgaaatgtatctg

SEQ ID NO: 242972 - DNA, 588 bp, Homo sapiens
actgcagtatacaatcaatataaaaaattacggagattttcttttccatgctcagtcttttaaatctgtggcatattttatatttgcagaacatcacaattcagactacccacatttcaaagattaatagccacatgtggctacaggctgctgtactatttaataaaaagtgcatatctagagtctagccccttgctttataaagtgtgatctaccatccagcggcatcagcatcacctgggatcttgttagaaatgtagaaaggcagcccatctcagaactactagaagaaataaatttaacaggatacccaggattggaatgcgtagcaaagactgagaagcagtaaattagatcacatatagcwtgggagttttacagaattgctattgccattcaactatgatatggtattatcccactgactaatatagaacactatttaaataacaatagtttttctatgaatcatgttttctctacactgtccaatgcaattttctacaatgatgaaaatcttcatatatgtgctgcacaaaatggcagccacttgccacatgtggctgttgagcacttgaaatgtatctg

SEQ ID NO: 242973 - DNA, 588 bp, Homo sapiens
actgcagtatacaatcaatataaaaaattacggagattttcttttccatgctcagtcttttaaatctgtggcatattttatatttgcagaacatcacaattcagactacccacatttcaaagattaatagccacatgtggctacaggctgctgtactatttaataaaaagtgcatatctagagtctagccccttgctttataaagtgtgatctaccatccagcggcatcagcatcacctgggatcttgttagaaatgtagaaaggcagcccatctcagaactactagaagaaataaatttaacaggatacccaggattggaatgcgtagcaaagactgagaagcagtaaattagatcacatatagcatgggagtyttacagaattgctattgccattcaactatgatatggtattatcccactgactaatatagaacactatttaaataacaatagtttttctatgaatcatgttttctctacactgtccaatgcaattttctacaatgatgaaaatcttcatatatgtgctgcacaaaatggcagccacttgccacatgtggctgttgagcacttgaaatgtatctg

SEQ ID NO: 242974 - DNA, 573 bp, Homo sapiens
cacttccaaacacaagttaaagtccttgcttgcctttttgtggctgttctatttcacttaggmaaagagaagttgtttaataggtgcagagtttctgatttgcaagatgaacaagttctggagatctattttacagtaataggaatatacttgacactactgaactttacacttaaaatggttgagttggtgaattttacgttatttggtttttaaccacatttttaaattttttttatttgcttttgtgtctgcaagtcaatttagagatctaagctgggcttagaatagcggctctccttcaagcttcatgtcacttgggtttgactccttttggtagattggggttagatttgcatcagatatattcatcctagagctcaggttaaaagaacagaagctacttgggaaaaaactcttttcatggtgatggcagaaaacttgcaatgtttcttttggccaaggtttgaaactggctatgacttctgcccacatttcattggttaatataaatcccataaaagcccaaagtttagggttaggaagttacattctgcctctcataagagaaac

SEQ ID NO: 242975 - DNA, 528 bp, Homo sapiens
tggctaaaaatttaatctacagcaatatgctgtgactcagtggtttcactgttagtggataccaaataaattgagtgatatgttacttaaagcgtacaagtatgttcccagcactgctttccactatagcccaaacctggaaataacctaaatatccatcaatggtagaacaaataarttgaagtacactcatataatttatttttgtgcaacagtgaaattttactattatatttactaatatgggtaaatctcacaaacattatttaagtgaaagaaaactaaacaaaaatcttatatactctgtaattccaccctgataaatttcaaaaactggaaaaacaaacatatgaccatagaagttcagaataatggtttctcaggcaagaaagtgggtaatgttctacttctaaatttcattgtggattggtgtgtgtcactttgtgaatccaggtacagactttgatttgtgtacttttgtgtatgttacactataataaaagtttcttaaaatttaggaaagaatca

SEQ ID NO: 242976 - DNA, 528 bp, Homo sapiens
atgtgcctgaaaatagacctctggagtgacagaagttaataaagttaaggcagaaaatgtaaacctattkggaagagcttttgtaggttaagttaaagaggtcagattgggccaggtgccatggctcacgcctgaaatctcagcatgtcggaagccggaggtgggtggatcacttgagcccaggagtttgagaccaggttgggcaacatggagaaaccctgtctgtagaaagaatgtggtggcacatgcatgtaatcccagctactgggtggcaatgaggaggaaggatcacgtggttccaggaggtcgaggcggcagtgagctgagaaggcaccactgcattccagcctgggtgatagagacgctgtctcaaaaacaaaacaaaacaaaacaggtcagattgaattcattgatgtgaaaaagtaggttttatccaactgtggcttggcttaatatattttacatgttaaagttaccatatatataaaacaaaaaaaagaaaaatagattgactttttgatgattgct

SEQ ID NO: 242977 - DNA, 528 bp, Homo sapiens
atgtgcctgaaaatagacctctggagtgacagaagttaataaagttaaggcagaaaatgtaaacctattgggaagagcttttgtaggttaagttaaagaggtcagattgggccaggtgccatggctcacgcctgaaatctcagcatgtyggaagccggaggtgggtggatcacttgagcccaggagtttgagaccaggttgggcaacatggagaaaccctgtctgtagaaagaatgtggtggcacatgcatgtaatcccagctactgggtggcaatgaggaggaaggatcacgtggttccaggaggtcgaggcggcagtgagctgagaaggcaccactgcattccagcctgggtgatagagacgctgtctcaaaaacaaaacaaaacaaaacaggtcagattgaattcattgatgtgaaaaagtaggttttatccaactgtggcttggcttaatatattttacatgttaaagttaccatatatataaaacaaaaaaaagaaaaatagattgactttttgatgattgct

SEQ ID NO: 242978 - DNA, 642 bp, Homo sapiens
ctgaattctattcatacgttctaaaatatcacaattaaggggattttgagatcatctaactagagagtctttgattctctgagcaagaaaggctcctaggggtcatagtactccgatacyatcttagtcaaaattcctctgtaaaatgttcagggatcctctgcttcagtgccttccacatatcccaacagtttattccattactgtttatgctatccctttaattaaaaaaaaaactaaatattgaaggtatatacttcatctaaagtcacagaagactagacctgaaacctaaatcttttcacatcaccctaaagatctttcatcttcattttacagcttgaacgtattttgtaggatgagaatttttattttcctggtcttaagtctttctatcagtacagatgacaacacactatggtggtccctaatggcatcttgagcagatgggggctgccttctcagatgcaccatggagctgaatccatagatcataaaaaggcaattatatcgatcacatgattcatttaggctatggatttatattaatactatgtaaaaatccactggactagaatcagctgtcctcatgtgcctgagcaaaaaataatccaaacaattctctttggtatcagttagata

SEQ ID NO: 242979 - DNA, 642 bp, Homo sapiens
ctgaattctattcatacgttctaaaatatcacaattaaggggattttgagatcatctaactagagagtctttgattctctgagcaagaaaggctcctaggggtcatagtactccgatactatcttagtcaaaattcctctgtaaaatgttcagggatcctctgcttcagtgccttccacatatcccaacagtttattccattactgtttatgctatccctttaattaaaaaaaaaactaartattgaaggtatatacttcatctaaagtcacagaagactagacctgaaacctaaatcttttcacatcaccctaaagatctttcatcttcattttacagcttgaacgtattttgtaggatgagaatttttattttcctggtcttaagtctttctatcagtacagatgacaacacactatggtggtccctaatggcatcttgagcagatgggggctgccttctcagatgcaccatggagctgaatccatagatcataaaaaggcaattatatcgatcacatgattcatttaggctatggatttatattaatactatgtaaaaatccactggactagaatcagctgtcctcatgtgcctgagcaaaaaataatccaaacaattctctttggtatcagttagata

SEQ ID NO: 242980 - DNA, 642 bp, Homo sapiens
ctgaattctattcatacgttctaaaatatcacaattaaggggattttgagatcatctaactagagagtctttgattctctgagcaagaaaggctcctaggggtcatagtactccgatactatcttagtcaaaattcctctgtaaaatgttcagggatcctctgcttcagtgccttccacatatcccaacagtttattccattactgtttatgctatccctttaattaaaaaaaaaactaaatattgaaggtatatacttcatctaaagtcacagaagactagacctgaaacctaaatcttttcacatcaccctaaagatctttcatcttcattttacagcttgaacgtattttgtaggatgagaatttttattttcctggtcttawgtctttctatcagtacagatgacaacacactatggtggtccctaatggcatcttgagcagatgggggctgccttctcagatgcaccatggagctgaatccatagatcataaaaaggcaattatatcgatcacatgattcatttaggctatggatttatattaatactatgtaaaaatccactggactagaatcagctgtcctcatgtgcctgagcaaaaaataatccaaacaattctctttggtatcagttagata

SEQ ID NO: 242981 - DNA, 553 bp, Homo sapiens
gcttgtaccaacacagatgttaacgaatttgtgatattcatttgtggagttcttgtacttgtggttccctttctgtttatctgtgtttcttatytctgcattctgaggactatcctgaagattccctcagctgagggcagacggaaagcgttttccacctgcgcctctcacctcagtgttgttattgttcattatggctgtgcttccttcatctacctgaggcctacagcaaactatgtgtccaacaaagacaggctggtgacggtgacatacacgattgtcactccattactaaaccccatggtttatagcctcagaaacaaggatgtccaacttgctatcagaaaagtgttgggcaagaaaggttctctaaaactatataattgaaatattattacattttagatttcttaataaataatgcctttttatcacaagcatattataactgtaacaaattcattgaaataataggagtccttaagaggcatgtcataaaatatgtttttctccttacagtctctttaaatttaatccacaagctaatgttttt

SEQ ID NO: 242982 - DNA, 555 bp, Homo sapiens
agctagtgatctgtttatccctagttattagtaatgaaaaatagaaattgtgaccaaatgacagaaagcaaagctgaatagtgaagaaaataaggataaaaattgagaccaaggccaagacaaaggcagagactcaggctaagtcttgattatttcatagggtggaggtagtattagttttggaaagaaagaataaaaaatttacagtaaacatagaatgtataaggaagacagaagtgtttctcacttaagaggcacatggtagtgcctcttagggaaaccaagttactacaaaataaactaattggaattattattaattcattaatagacatttattttttcatcaagtatccatatctcatttatttaaatattggataaagttgaggatacaaagggaataagatgaggcatttatccttgggactcttaaatctattggagagwccaataggaaaaaaaaattagatataacatgttgagtattttgatgaagacatactagacaagctttagattactaagaagggaacagcacaccctccctagaca

SEQ ID NO: 242983 - DNA, 492 bp, Homo sapiens
acagccttttgggcctccaagtcaggtacatcaaggataggacataaaacaatgggcaacaagtgaatgctgaagcaaaactaaagattctagctatgtcttttctgtaaggagaaatcaggcctataattttgtaagagtttgtagaataatcataaagctagtcctaaaacaatagcaatagttcaaaaccaatttatttgtaacaaatgaatgcataaaaattggttatataattagttgtaaaagggaactgtgctctttaagtaacacaaagwtcaatggatgtttctctagatggggaaggtattaaaaacaggtgtagaaatgtgaattgtcagacattggtgctattgcttattcatgctatcgcttattgacatatgtatcagtaatcaggataaaagtgtgaccgttgaaaataataattaatatagataaaggattttatagcattagattacaagaatcccctctagtctgcagggaata

SEQ ID NO: 242984 - DNA, 579 bp, Homo sapiens
tcatatattatgccattcttgcattgctataaagaaatacctgagattgggtaatttataaagaaaagtggttttgttggctcatgatttgcagaatttacaggaagcatggtgctggcatccacttggcttctggtgaaggctcagggaactttcaatcatggtggaaggtgaagcaggagcgggcacatcacatgaccagaacaggagagagagagttgggggaaggtgctgcaaattttgaaatggcaagatcttgtgagaacttactcactatcataaaaatagaccaagtcatgcgaagttcacccccatgaccsaaacacctcccaccttcagcactggtgattacaattcaacgtaagatttgtgtggggacaaatatccaaactatatcaatatttctccggctcctcccaaatctatgtccttctcacattgcaaaatatatttatgccttcctaagagtcctccaaagttttaacttgttccagtgttaactcacaagtccgaagtccagagtctcatctttgacaaggaaagtccctttcattcatgaacctataaaatcaaaaccaa

SEQ ID NO: 242985 - DNA, 579 bp, Homo sapiens
tcatatattatgccattcttgcattgctataaagaaatacctgagattgggtaatttataaagaaaagtggttttgttggctcatgatttgcagaatttacaggaagcatggtgctggcatccacttggcttctggtgaaggctcagggaactttcaatcatggtggaaggtgaagcaggagcgggcacatcacatgaccagaacaggagagagagagttgggggaaggtgctgcaaattttgaaatggcaagatcttgtgagaacttactcactatcataaaaatagaccaagtcatgcgaagttcacccccatgaccgaaacacctcccaccttcagcactggtgattacaattcaaygtaagatttgtgtggggacaaatatccaaactatatcaatatttctccggctcctcccaaatctatgtccttctcacattgcaaaatatatttatgccttcctaagagtcctccaaagttttaacttgttccagtgttaactcacaagtccgaagtccagagtctcatctttgacaaggaaagtccctttcattcatgaacctataaaatcaaaaccaa

SEQ ID NO: 242986 - DNA, 579 bp, Homo sapiens
tcatatattatgccattcttgcattgctataaagaaatacctgagattgggtaatttataaagaaaagtggttttgttggctcatgatttgcagaatttacaggaagcatggtgctggcatccacttggcttctggtgaaggctcagggaactttcaatcatggtggaaggtgaagcaggagcgggcacatcacatgaccagaacaggagagagagagttgggggaaggtgctgcaaattttgaaatggcaagatcttgtgagaacttactcactatcataaaaatagaccaagtcatgcgaagttcacccccatgaccgaaacacctcccaccttcagcactggtgattacaattcaacgtaagatttgtgtggggacaaatayccaaactatatcaatatttctccggctcctcccaaatctatgtccttctcacattgcaaaatatatttatgccttcctaagagtcctccaaagttttaacttgttccagtgttaactcacaagtccgaagtccagagtctcatctttgacaaggaaagtccctttcattcatgaacctataaaatcaaaaccaa

SEQ ID NO: 242987 - DNA, 465 bp, Homo sapiens
caagtctggggacttggccagcatcctgtggagaaatgtttatttaggaagatgcactaagcagaccagaagtccaaaaaaaaccccaaaactcagctgcaaatggaaaaaaaaaactttgtgaacatttgaaaattgctggaagcagcagtagctgccatgggatctctgtgggtaacctgtgacaatggttagtataattggaaagaaaaagactctgagacaggaatcctctcatttgggagtttctmctgctctgatagcaccttctgggaacaatgccaggaacgtctgctgggagccactgacagaaactgcaacaaatagactcaggctggggaagacctcgatgctaagtgccttcaattctctctgccatcctcttgcgagtcactcataacaagctgagggagaatagagagggcagatttttcctctgttatctcacagaggaggaagaataac

SEQ ID NO: 242988 - DNA, 359 bp, Homo sapiens
tgaaaaaaacttcatttttttattggagmatttaaggacagtggttggggagaggagagaacacttggtgaagaaagtaagagatgctttagcatcattcctgctaagaattatactttgcttatacagcctaacgaaattgtgtaatatagacaataagtatttattaaacgtgtgtttaataaagtagttaaattcacatgttaatttcctgtttgctatttaaagtaggcaatgtgaaaagatcacctagacttaaacgttataagagatgtaaacatgtcactggaaacaaacgtaatctgagtattttgaaacaatacaatgaatagatatgatcactagggcatttactacta

SEQ ID NO: 242989 - DNA, 359 bp, Homo sapiens
tgaaaaaaacttcatttttttattggagaatttaaggacagtggttggggagaggagagaacacttggtgaagaaagtaagagatgctttagcatcattcctgctaagaattatactttgcwtatacagcctaacgaaattgtgtaatatagacaataagtatttattaaacgtgtgtttaataaagtagttaaattcacatgttaatttcctgtttgctatttaaagtaggcaatgtgaaaagatcacctagacttaaacgttataagagatgtaaacatgtcactggaaacaaacgtaatctgagtattttgaaacaatacaatgaatagatatgatcactagggcatttactacta

SEQ ID NO: 242990 - DNA, 545 bp, Homo sapiens
aaacaagactggattacctttatggacagttcttttgtagaacaaggaatccataaagcaaagtatgcaatagtyactctgaatgacattgttaagagcatgtctctctcttcaggcacaagtgttcaactagatgagctaattgtgttcacaggggcaccgaaacaagggaaaatggttcacatttatgctgattctagtcagcatagtcttcctcacagctaacaagtctcccattaaataccatcaggaaattagtagactattatcctaggttatcctctcatgaaaagtggcagtaatacattgtaaatgccaccaaaaagtgattggataaaatagccaagagaaatacgttgatagaccaagtggctaaatcagcagcaaaaggggtccacatttaggagtcacttgaagccccactgatctgagagggcttcataagtgaaataaaacctcaatgatctgcaaaaatagaatgggccacctcttggggatatatctttcagtcctcaggatggctaaaatgagaggatgccaagctt

SEQ ID NO: 242991 - DNA, 545 bp, Homo sapiens
aaacaagactggattacctttatggacagttcttttgtagaacaaggaatccataaagcaaagtatgcaatagtcactctgaatgacattgttaagagcatgtctctctcttcaggcacaagtgttcaactagatgagctaattgtgttcacaggggcaccgaaacaagggaaaatggttcacatttatgctgattctagtcagcatagtcttcctcacagctaacaagtctcccattaaataccatcaggaaattagtagactattatcctaggttatcctctcatgaaaagtggcagtaatacattgtaaatgccaccaaaaagtgaytggataaaatagccaagagaaatacgttgatagaccaagtggctaaatcagcagcaaaaggggtccacatttaggagtcacttgaagccccactgatctgagagggcttcataagtgaaataaaacctcaatgatctgcaaaaatagaatgggccacctcttggggatatatctttcagtcctcaggatggctaaaatgagaggatgccaagctt

SEQ ID NO: 242992 - DNA, 381 bp, Homo sapiens
ttgtaataatttgtgtctttgaaaggattgattcattacatataagatataaaatttatgatcrtagaattgctcatggtttcctttattgccatattaatggccatgagattaacctctctttcatttctgataattagttcattttctttttcattggtttctctaatgagaggttaattaattttactgatctttcaaggagttaggttatggcttagctaattttctccattggtttcctgttttcaatttcactaatatttgctttaatttttatgctttatttactttatcttgctgtaggcttacatttctattttttaaacagttacctaagatggaaacttacattattgacttcagataaatttaagatct

SEQ ID NO: 242993 - DNA, 630 bp, Homo sapiens
aagatacaatgaaatgcatttgtcattggaattatctgtgatgcttcaaaataaatctaatatcatctatgagcacattattcacacaagggaaaacatattgctttcaaattcctaatattgtcctaaagaagggtggtgaattatcttccttgttactcatgcctctgtaaagctgtgcatgtctgtggttacagygattgcagaaataataatggtgataataaagtgcaatttttgagctgcctttgaagacagcaaggcagtcctttcacaatacatctttgaaaaaaattatcttgtccattacctattccaagttctggcttcctaatttctccctccttttgatgtttctcattcttctagctttcttttatttcacacagtttaaatacttacttaaaaatatagccaattagattttctgaaacaaatccttagtgactttctaattgaaactttattttcattaaggggaatagtagacaaatattcactatgtaaatacctaatggatactgttcttgcattagttgtattaacagcaaaagctacttgtttccccacttgaatgcttttcttcaaggctaatttgcaaaattcattaaatgtgggtatgaaaacttg

SEQ ID NO: 242994 - DNA, 630 bp, Homo sapiens
aagatacaatgaaatgcatttgtcattggaattatctgtgatgcttcaaaataaatctaatatcatctatgagcacattattcacacaagggaaaacatattgctttcaaattcctaatattgtcctaaagaagggtggtgaattatcttccttgttactcatgcctctgtaaagctgtgcatgtctgtggttacagtgattgcagaaataataatggtgataataaagtgcaatttttgagctgcctttgaagacagcaaggcagtcctttcacaatacatctttgaaaaaaattatcttgtccattacctattccaagttctggcttcctaatttctccctccttttgatgtttctcattcttctagctttcttttatttcacacagtttaaatacttacttaaaaatatagccaattagattttctgaaacaaatccttagtgactttctaattgaaactttattttcattaaggggaatagtagacaaatattcactatgtaaatacctaatggatactgttcttgcattagttgtattaacagcaaaagctacttgtttccccacttgaatgcttttcttcaaggctaatttgcaaaawtcattaaatgtgggtatgaaaacttg

SEQ ID NO: 242995 - DNA, 525 bp, Homo sapiens
gaaaaatttgatactagcagaggctggttcaagagttaacataccattaaatctccataacatacaagtgcaaggtgacatttcacctgtaaaaactcatataaactaaaaataaagacatgggaaaagatactctatgcaaatggaagccagaaaagagcaggagtagctatacttatattaggtaaaataggcttcaagaaagaaactgtaaaaagagacaaggaaagtcatcatataatgataaaagggtcaaatcagcaagaaaatgtagcaattgtatatgtgtgtatatatatatatatatatatatatatatgcacmcaaagctggagtactcagatatataaagtaaatattattagacctaaagagagagatagacccaatacaataatagctaaagacttaataaccccactttcaccttagatagatcatccaggcaaaagatcaacaacaaagacaccagatttaatctgcactatggaccaaatggacctacaagacatttaaataatattt

SEQ ID NO: 242996 - DNA, 654 bp, Homo sapiens
taatctcaaaagccctagtagatggagatcttaagtgtctctagaaccttatttaattgtgtttctatagcaatctgcaaagaggttgttgcatcctgagcratctgtgcgcattgaaaagacaactgtatctgatgattgcaagaaacaccgagttttagaagaagccatctgtgtctttaattgattttattcccaaggaagttatgacctttgttattttttttaaaaagccagcaatgaaactaagtcattttccatctctgattatttgctctaagaaatgtggacaagctctaccggaaaagtaagataagcaattcaaagagatctatcttgagtagtaactacctgctagaacaaacgtttcataatgtgtggcctctggtattgcttgtctgctcacaacctcacagtagccgcttttattaacattatattgttttgctctgcacttacacagcctacccctcaactaagaattgagggaaacccccatactgctttgctgtgtctcattcttcttttttctaagtgccctatctcccaaattgcaaatgcttcagcagccacgaattctgatccatgcctccttagctcaacagaagggcaaagttttgctgtgggaaattgttcacaggccattgactgagg

SEQ ID NO: 242997 - DNA, 504 bp, Homo sapiens
  misc_feature (1)...(504): n = A,T,C or G
nnnnnnnnnnnnnnctgcacaaaataatccacacagagacgggggatggtagcttgcagcagtaagccccactcagcttctaggcactttaaaaggcatgtctgagaaccagtgttytgctagtggcagccagctgggttccaggcagcctgtgctcagagctcaaaactgcctctggccataagctttcccaatggagacagaaaccgtgctttcaggccacacccctccgcccctgcccatgaagctgaggtgtccaactcctgcacccatgtttataacacactacttacttgccccttgattctgctcatcaaggttccttcccattcaatattagactgcagatcttcattgggagcttatctcaacctgtgcccaccacctgagttagctggcagagttctgtgaggtcccctgtgaggtatgatctggaatggcttccctctgtccctgctttagtctgggagtgaatgcaaagcacgccctgatgcctctccttct

SEQ ID NO: 242998 - DNA, 504 bp, Homo sapiens
  misc_feature (1)...(504): n = A,T,C or G
nnnnnnnnnnnnnnctgcacaaaataatccacacagagacgggggatggtagcttgcagcagtaagccccactcagcttctaggcactttaaaaggcatgtctgagaaccagtgttctgctagtggcagccagctgggttccaggcagcctgtgctcagagctcaaaactgcctctggccataagctttcccaatggagacagaaaccgtgctttcaggccacacccctccrcccctgcccatgaagctgaggtgtccaactcctgcacccatgtttataacacactacttacttgccccttgattctgctcatcaaggttccttcccattcaatattagactgcagatcttcattgggagcttatctcaacctgtgcccaccacctgagttagctggcagagttctgtgaggtcccctgtgaggtatgatctggaatggcttccctctgtccctgctttagtctgggagtgaatgcaaagcacgccctgatgcctctccttct

SEQ ID NO: 242999 - DNA, 504 bp, Homo sapiens
  misc_feature (1)...(504): n = A,T,C or G
nnnnnnnnnnnnnnctgcacaaaataatccacacagagacgggggatggtagcttgcagcagtaagccccactcagcttctaggcactttaaaaggcatgtctgagaaccagtgttctgctagtggcagccagctgggttccaggcagcctgtgctcagagctcaaaactgcctctggccataagctttcccaatggagacagaaaccgtgctttcaggccacacccctccgcccctgcccatgaagctgaggtgtccaactcctgcacccatgtttataacacactacttacttgccccttgattctgctcatcaaggttccttcccattcaatattagactgcagatcttcattgggagcttatctcaacctgtgcccaycacctgagttagctggcagagttctgtgaggtcccctgtgaggtatgatctggaatggcttccctctgtccctgctttagtctgggagtgaatgcaaagcacgccctgatgcctctccttct

SEQ ID NO: 243000 - DNA, 615 bp, Homo sapiens
  misc_feature (1)...(615): n = A,T,C or G
acaaaataaagacttacttttttttgtccttatgaaattttattctagctattgtaagaatactatttttaaaacttaaaactacaataatagagattataggagatacatgacaacagctacaaaagtttatcagttggaaagagataaatgaaagcagctctgaggtaactgaaacctaaactagagtggacaaagrtgagaaaatacatgatttcaactaaagatccctaaagaggatgaggaacaggtgtctttgaaattagcaataaaggattggtggctaagataacaggggttgcttgaaggctatttgagtccattagatctctacatcacaaacagcaagctgctacagaattccacctttctcatcccagctgaattatgaaattatattctctgttaccaattacagttcaagtatagatatcaagtataaatacctacagctattcttccttttaaataaacatatcagaattatgtatcatgtttaattatgagatccacaatggtgatttactatgtctaaaaataaacaatgagaccngatgaaagtatctttgatgttttcattctacgatcatcagctacaataaaaccaaagaatat

SEQ ID NO: 243001 - DNA, 373 bp, Homo sapiens
caaggacccacccctgacctgagctttcactccacatccaggacatcagtcagctgctcctgtcctcagtgctcctccttctgtctcttctccatcctgctccctcttggattctgcctggtacccacttctagtacctttactttctgctgggaggaarcaggctcctgtttcctcagtggaccctgtatggtgagcagaccttttccagaggatctgggcaatggccaaggcctctcatgggcaccgtcagaagcctctgagccaccctagctccccaaccccaccactcctcctgagccagctgtcccttccctggatgcctggacccttccccgaaagccacctgagtcacctcacctggggcgaacct

SEQ ID NO: 243002 - DNA, 373 bp, Homo sapiens
caaggacccacccctgacctgagctttcactccacatccaggacatcagtcagctgctcctgtcctcagtgctcctccttctgtctcttctccatcctgctccctcttggattctgcctggtacccacttctagtacctttactttctgctgggaggaagcargctcctgtttcctcagtggaccctgtatggtgagcagaccttttccagaggatctgggcaatggccaaggcctctcatgggcaccgtcagaagcctctgagccaccctagctccccaaccccaccactcctcctgagccagctgtcccttccctggatgcctggacccttccccgaaagccacctgagtcacctcacctggggcgaacct

SEQ ID NO: 243003 - DNA, 622 bp, Homo sapiens
agatcttcatccacggatttttccttgaggcaaacatccatgaacaccttcaagggctgcttctctcctgtccttggacagtcctccactgtctgyctcttactcatggcctctggggagcaggacaggggcctggctccagaccatatggtccaaaaattctcatcaacatcccgcatttccagcacttgaagtttccacctcctgtgagtaacataggggaaaagctcagaacgtagacaaggacccacccctgacctgggctttcactccacatcaaggacttcagctgcttttttcctcagcgcccctccttctgtctcttctccatccctttcccccttggattctgcctggtacccacttctagtgcctttaccttccactgggagcaggcaggttcctgtttcctcagtggaccctgtatggtgagcagtcctttcccagaggagctgggcaatagccaagaacgttcccagctttctcactggcaccatcagaagcccctgggccaccccaggttcccaatttgtctgacccagctgcttagtccctggacacctgggccctccccacctgggtcacctcacctggggcgaaccttttgggcaagcaggcaatc

SEQ ID NO: 243004 - DNA, 622 bp, Homo sapiens
agatcttcatccacggatttttccttgaggcaaacatccatgaacaccttcaagggctgcttctctcctgtccttggacagtcctccactgtctgtctcttactcatggcctctggggagcaggacaggggcctggctccagaccatatggtccaaaaattctcatcaacatcccgcawttccagcacttgaagtttccacctcctgtgagtaacataggggaaaagctcagaacgtagacaaggacccacccctgacctgggctttcactccacatcaaggacttcagctgcttttttcctcagcgcccctccttctgtctcttctccatccctttcccccttggattctgcctggtacccacttctagtgcctttaccttccactgggagcaggcaggttcctgtttcctcagtggaccctgtatggtgagcagtcctttcccagaggagctgggcaatagccaagaacgttcccagctttctcactggcaccatcagaagcccctgggccaccccaggttcccaatttgtctgacccagctgcttagtccctggacacctgggccctccccacctgggtcacctcacctggggcgaaccttttgggcaagcaggcaatc

SEQ ID NO: 243005 - DNA, 615 bp, Homo sapiens
tccatgaacaccttcaagggctgcttctctcctgtccttggacagtcctccactgtctgtctcttactcatggcctctggggagcaggacaggggcctggctccagaccatatggtccaaaaattctcatcaacatcccgcatttccagcacttgaagtttccrcctcctgtgagtaacataggggaaaagctcagaacgtagacaaggacccacccctgacctgggctttcactccacatcaaggacttcagctgcttttttcctcagcgcccctccttctgtctcttctccatccctttcccccttggattctgcctggtacccacttctagtgcctttaccttccactgggagcaggcaggttcctgtttcctcagtggaccctgtatggtgagcagtcctttcccagaggagctgggcaatagccaagaacgttcccagctttctcactggcaccatcagaagcccctgggccaccccaggttcccaatttgtctgacccagctgcttagtccctggacacctgggccctccccacctgggtcacctcacctggggcgaaccttttgggcaagcaggcaatcaatcccatccactacataatgtaagatct

SEQ ID NO: 243006 - DNA, 615 bp, Homo sapiens
tccatgaacaccttcaagggctgcttctctcctgtccttggacagtcctccactgtctgtctcttactcatggcctctggggagcaggacaggggcctggctccagaccatatggtccaaaaattctcatcaacatcccgcatttccagcacttgaagtttccacctcctgtgagtaacataggggaaaagctcagaacgtagacaaggacccacccctgacctgggctttcactccacatcaaggacttcagctgcttttttcctcagcgcccctccttctgtctcttctccatccctttcccccttggattctgcctggtacccacttctagtgcctttaccttccactgggagcaggcaggttcctgtttcctcagtggaccctgtatggtgagcagtcctttcccagaggagctgggcaatagccaagaacgttcccagctttctcactggcaccatcagaagcccctgggccaccccrggttcccaatttgtctgacccagctgcttagtccctggacacctgggccctccccacctgggtcacctcacctggggcgaaccttttgggcaagcaggcaatcaatcccatccactacataatgtaagatct

SEQ ID NO: 243007 - DNA, 615 bp, Homo sapiens
tccatgaacaccttcaagggctgcttctctcctgtccttggacagtcctccactgtctgtctcttactcatggcctctggggagcaggacaggggcctggctccagaccatatggtccaaaaattctcatcaacatcccgcatttccagcacttgaagtttccacctcctgtgagtaacataggggaaaagctcagaacgtagacaaggacccacccctgacctgggctttcactccacatcaaggacttcagctgcttttttcctcagcgcccctccttctgtctcttctccatccctttcccccttggattctgcctggtacccacttctagtgcctttaccttccactgggagcaggcaggttcctgtttcctcagtggaccctgtatggtgagcagtcctttcccagaggagctgggcaatagccaagaacgttcccagctttctcactggcaccatcagaagcccctgggccaccccaggttcccaatttgtctgacccagctgyttagtccctggacacctgggccctccccacctgggtcacctcacctggggcgaaccttttgggcaagcaggcaatcaatcccatccactacataatgtaagatct

SEQ ID NO: 243008 - DNA, 517 bp, Homo sapiens
acagctggaattccagcacctgatcccagtgggtggatcacctgaggtcaggagttcgagaccagcctggccaacatgttgaaaccctgtccctactaaaaatacaaaaatcagctgggcatggtggcccacgcctgtaatcccagctacttgggaggctgaggcaggagaatcacttgaacctgggaagcagaggttgcagtgagccgagatggcgccactgcactccagcctgggcgacagaaggagactccgtgtcaaaaaaaaaaaaaaaaaaagagtggccaagtgtckgatggccactctgacgggaggagcagcatcaggcagtttgttgctatgagtggtagattcttaaagagctggtttctgtttgacccttaaggaagaaaggctaatggtggttagcaagggagggggtatagtgaagcatgtggacccctccgcccaacatctcgttctccttgagaactcagttttcaaggataactgggggttcctcttgaccaacaggggg

SEQ ID NO: 243009 - DNA, 517 bp, Homo sapiens
acagctggaattccagcacctgatcccagtgggtggatcacctgaggtcaggagttcgagaccagcctggccaacatgttgaaaccctgtccctactaaaaatacaaaaatcagctgggcatggtggcccacgcctgtaatcccagctacttgggaggctgaggcaggagaatcacttgaacctgggaagcagaggttgcagtgagccgagatggcgccactgcactccagcctgggcgacagaaggagactccgtgtcaaaaaaaaaaaaaaaaaaagagtggccaagtgtctgatggccactctgacgggaggagcagcatcaggcagttkgttgctatgagtggtagattcttaaagagctggtttctgtttgacccttaaggaagaaaggctaatggtggttagcaagggagggggtatagtgaagcatgtggacccctccgcccaacatctcgttctccttgagaactcagttttcaaggataactgggggttcctcttgaccaacaggggg

SEQ ID NO: 243010 - DNA, 648 bp, Homo sapiens
catgtcaaaattacaaagggaagtgaaggtggaggctggtcagggttgagctgtgtgttttaatgggatccggggagtgaaccaagacttggtaaacatgttgggggttattgagggcgtggaggaggaatctttccaacattgcactgaggcccccttggtgttgatacttgtgaccaagaatgagtcttccaaaacagtgtatgtaattctcctgatttttcctttcaaaacctttgtcttcctttacctccctgaataatctcacatctattcccattgctttgctcatttcataataaaaatcctttttttttttaaaagaatctctttctctgtgaagtagaccatatattttattgccacacaasatgagtagcctggtattatggagagaaagggtcaaaaggatcccattccccaccagctgggggtgatataaaggtcctggttattatttgtcatatgtgcacctgcatattgccagtgaaaacttacaggtcacatttttcaggagtccaaattaaccacctgtggaaggtcttatgattggcttacattctgtccctgagtaaagaatctgatcttgagttcatgagtgcctcaaactctgcaattattgatgaagcttcacccacttacagtgag

SEQ ID NO: 243011 - DNA, 633 bp, Homo sapiens
tgtgcttaattataatgctacttacagagaatttatcagcggcaaatcagaggcttgatgctttgcttaagaaaaaaaattggtagtggctctttgaaatgtgttcatctgatgagtcctttggatttttccagtatacagcatttgaaagaaattggccatttctggaaagtcaagtgcggggagcgggggcagaaagkgcagaattaaaagactgcagatgcctgccaaaaaagattataaacatttactttcttttaagatacttctttgtctttgtgttttttctcacctagtttcctgttattcatgaatccatcattgtccaaagactcctagctttgagacctaattatgtattaatcactgttaaaaagcagtttttctgacactttcagtaataaattccttttgatgtgattaatagtaactctgccttatagcaagttccaggctaaagcaagtaatgtgacagcaaactgctttggaggcagacggatctgttttaaatcttggttttgtccttccagtttgaccttactaatctctctaagcctcagtttcctcacctgtaaaatagggaaaataatgcaagacagaccctggttgcctacctaatagccatttccatct

SEQ ID NO: 243012 - DNA, 552 bp, Homo sapiens
accagcccaaggaacatctcaccaatttcagatcgggtaagcggtcgtttcactcccttctccaacctctctcactatccctccacccttcaatctctcccttccttaattttggttccttttcccctttctggtagagacagaggagatgcattttatctgtgaactcaaaactccagcgctggtcacagactcgggaagacagtcttcccttggtgtttaatcactgcggggacgcctgcctgattattcasccacatttcagaggtgtctgatcaccatggggatgcctgccttgatccttcaccttggtggcaagtaccaccccccgccctctgtgtctctaccctctcttttctctaaacttacccttttactatgggcaaccttctgccctccattcctccttcttctcccttggcctttgttctaaaaaacttaaaacctcttcaactcccacctgatctaaaacctaagcgtcttattttcttctgcaacactgcttggccccaatacaaacttggtaatggctccacatagtcagaaaatggc

SEQ ID NO: 243013 - DNA, 589 bp, Homo sapiens
gccaagccttttttttttttttacaatgccatctcttcatattgttccatttaacaaaactgcagcccttcatctatccttaagtcccttggccaatkgtacagagccagagtatgctacccccagcaggaaatcaacaggatgacctactaaacaccattcagaagatgctaagacccatgaattgcaacaggaaagaaaagacagagaattagtcagacaggtacatgctgtgccaaaaatgcactacagcccccacccaattctgcctaatcctagctgggctgacaccaacctgatgagacaggcctataagatctcaaactaaaacagaaactcctgaactgggttctttcgagcccaggaagcagcagtaaatcattaaagaacagataagttcttaaggtgagggagaatttcagataaatggaatgctggtagaacacaggcccaaagagcaaaattaacctaagcccaggtagaaccttgtttactagagtattaggcatgggtttgggcaactattctaaccagagaaactggcttcagtgagggcaagttggcaatccaaggtatagcatgcataggg

SEQ ID NO: 243014 - DNA, 589 bp, Homo sapiens
gccaagccttttttttttttttacaatgccatctcttcatattgttccatttaacaaaactgcagcccttcatctatccttaagtcccttggccaatgrtacagagccagagtatgctacccccagcaggaaatcaacaggatgacctactaaacaccattcagaagatgctaagacccatgaattgcaacaggaaagaaaagacagagaattagtcagacaggtacatgctgtgccaaaaatgcactacagcccccacccaattctgcctaatcctagctgggctgacaccaacctgatgagacaggcctataagatctcaaactaaaacagaaactcctgaactgggttctttcgagcccaggaagcagcagtaaatcattaaagaacagataagttcttaaggtgagggagaatttcagataaatggaatgctggtagaacacaggcccaaagagcaaaattaacctaagcccaggtagaaccttgtttactagagtattaggcatgggtttgggcaactattctaaccagagaaactggcttcagtgagggcaagttggcaatccaaggtatagcatgcataggg

SEQ ID NO: 243015 - DNA, 589 bp, Homo sapiens
gccaagccttttttttttttttacaatgccatctcttcatattgttccatttaacaaaactgcagcccttcatctatccttaagtcccttggccaatggtacagagccagagtatgctacccccagcaggaaatcaacaggatgaccyactaaacaccattcagaagatgctaagacccatgaattgcaacaggaaagaaaagacagagaattagtcagacaggtacatgctgtgccaaaaatgcactacagcccccacccaattctgcctaatcctagctgggctgacaccaacctgatgagacaggcctataagatctcaaactaaaacagaaactcctgaactgggttctttcgagcccaggaagcagcagtaaatcattaaagaacagataagttcttaaggtgagggagaatttcagataaatggaatgctggtagaacacaggcccaaagagcaaaattaacctaagcccaggtagaaccttgtttactagagtattaggcatgggtttgggcaactattctaaccagagaaactggcttcagtgagggcaagttggcaatccaaggtatagcatgcataggg

SEQ ID NO: 243016 - DNA, 497 bp, Homo sapiens
ctaagacccatgaattgcaacaggaaagaaaagacagagaattagtcagacaggtacatgctgtgccaaaaatgcactacagcccccacccaattctgcctaatcctagctgggctgacaccaacctgatgagacaggcctataagatctcaaactaaaacagaaactcctgaactgggttctttcgagcccaggaagcagcagtaaatcattaaagaacagataagttcttaaggtgagggagaatttcagataaatggaatgctggtagaacacaggsccaaagagcaaaattaacctaagcccaggtagaaccttgtttactagagtattaggcatgggtttgggcaactattctaaccagagaaactggcttcagtgagggcaagttggcaatccaaggtatagcatgcatagggctggcaaaattcagggtgactgaagcaaaagcttcagaaccagaaagaccacatctgggggtagagcacagaactctc

SEQ ID NO: 243017 - DNA, 305 bp, Homo sapiens
acagataagttcttaaggtgagggagaatttcagataaatggaatgctggtagaacacaggcccaaagagcaaaattaacctaagcccaggtagaaccttgtttactagagtattaggcatgggtttgggcaactattctaaccagagaaactggcttcagtgagggcaagttggcaatccaaggtatagcatgcatagggctggcaaaattcagggtgactgaagcaaaagcttcakaaccagaaagaccacatctgggggtagagcacagaactctcaagagatgaatctttttaagagtgag

SEQ ID NO: 243018 - DNA, 375 bp, Homo sapiens
agaaactcctgaactgggttctttcgagcccaggaagcagcagtaaatcattaaagaacagataagttcttaaggtgagggagaatttcagataaatggaatgctggtagaacacaggcccaaagagcaaaattaacctaagcccaggtagaaccttgtttactagagtattaggcatgggtttgggcaactattctaaccagagaaactggcttcagtgagggcaagttggcaatccaaggtatagcatgcatagggctggcaaaattcagggtgactgaagcaaaagcttcagaaccagaaagaccacatctgggggtagagcacaraactctcaagagatgaatctttttaagagtgaggcagaactatata

SEQ ID NO: 243019 - DNA, 375 bp, Homo sapiens
agaaactcctgaactgggttctttcgagcccaggaagcagcagtaaatcattaaagaacagataagttcttaaggtgagggagaatttcagataaatggaatgctggtagaacacaggcccaaagagcaaaattaacctaagcccaggtagaaccttgtttactagagtattaggcatgggtttgggcaactattctaaccagagaaactggcttcagtgagggcaagttggcaatccaaggtatagcatgcatagggctggcaaaattcagggtgactgaagcaaaagcttcagaaccagaaagaccacatctgggggtagagcacagaactctcaagagatgaatctttktaagagtgaggcagaactatata

SEQ ID NO: 243020 - DNA, 494 bp, Homo sapiens
tcataatgttttgttttattgatacaacttaccctttaatattttgaagttattctcattatcttcagcaatactctgtattgaagtgcctctcatmtgatatttacatagcatcttgggctttcttatgcttactctttgaatgatacatctattttttgtcttgttacttttaatctatatctgtctttatatttaaaatagtttccttgaagttaggtcttgcttattttatctattttgattatctctgatttttaattatagtatactgccttaatatttaatataatgattgctattacagatttaggttatgcattgttgtttgcttgggcattgctatggtttgaatgtttgtgtcccctccaaaatttatgttgaaattgaatacccatttcaacagcgttaagagatgagacttttaggaagtattaataattagatttttgccttataaaaaaaaactggaggttatttttgccttatggcct

SEQ ID NO: 243021 - DNA, 552 bp, Homo sapiens
aacagtaatggatttattgaacacatcaatctgtaaaacaggtagaccttcacttgataaaattggcttaactttaataattttgattctaaaaaaaatccagctctgcaagtctctgactgtaaattaagagaaatttgattgatctcagwaatataatactttttttgtttaataaaagttttttggtttagtgtaaaatgaaggaatcagacaatatggctacagttggttaagtcagaaataaagatgcaatatttttaattactatatatcccaaaaagcatatgaatatgaaatatatttacacagtaaataaaatataccattgttaatattccaataaatattttgacttataggaaaatgggttattgtgaaatttagagctacaactgagacattgccataacgccttgctactgatcctctactggatagttgaggcttaaaggcatattctccacaaagtctccagggatggaagtacctcaagatttttaggtttgcttttacctaactattcctcacagaatacgtacctgccaacat

SEQ ID NO: 243022 - DNA, 552 bp, Homo sapiens
aacagtaatggatttattgaacacatcaatctgtaaaacaggtagaccttcacttgataaaattggcttaactttaataattttgattctaaaaaaaatccagctctgcaagtctctgactgtaaattaagagaaatttgattgatctcagaaatataatactttttttgtttaataaaagttttttggtttagtgtaaaatgaaggaatcagacaatatggctacagttggktaagtcagaaataaagatgcaatatttttaattactatatatcccaaaaagcatatgaatatgaaatatatttacacagtaaataaaatataccattgttaatattccaataaatattttgacttataggaaaatgggttattgtgaaatttagagctacaactgagacattgccataacgccttgctactgatcctctactggatagttgaggcttaaaggcatattctccacaaagtctccagggatggaagtacctcaagatttttaggtttgcttttacctaactattcctcacagaatacgtacctgccaacat

SEQ ID NO: 243023 - DNA, 552 bp, Homo sapiens
aacagtaatggatttattgaacacatcaatctgtaaaacaggtagaccttcacttgataaaattggcttaactttaataattttgattctaaaaaaaatccagctctgcaagtctctgactgtaaattaagagaaatttgattgatctcagaaatataatactttttttgtttaataaaagttttttggtttagtgtaaaatgaaggaatcagacaatatggctacagttggttaagtcagaaataaagatgcaatatttttaattactatatatcccaaaaagcatatgaatatgaaatatatttacacagtraataaaatataccattgttaatattccaataaatattttgacttataggaaaatgggttattgtgaaatttagagctacaactgagacattgccataacgccttgctactgatcctctactggatagttgaggcttaaaggcatattctccacaaagtctccagggatggaagtacctcaagatttttaggtttgcttttacctaactattcctcacagaatacgtacctgccaacat

SEQ ID NO: 243024 - DNA, 549 bp, Homo sapiens
cttgctactgatcctctactggatagttgaggcttaaaggcatattctccacaaagtctccagggatggaagtacctcaagatttttaggtttgcttttacctaactattcctcacagaatacgtacctgccaacattaataagctttctcttctgaccagcacagctattctcactgattctgctctttgaaagggctcaagtgacttgggggctgaatagtgacagaagtctctttgggtataacttgaccaaatagtacttaatggtagctgaggaacattcgcatgtgctcagtttatatcatgttttcagaaaagttaagccacagttttgttctctgtacaaaatactgaatatgtggtattttaaaaaatatattytttcatagtgagaagctccacagtgttcttttgtaaaagattttcttttgagaaatgttttaggttcacagcaaaattaaaaagaaggcacaaacatttcctctgtaacctctccccatacacatgcatagcctcccacgttatcaacatctcccaccagagtaat

SEQ ID NO: 243025 - DNA, 525 bp, Homo sapiens
attactgtaccacatggtagaaataggcaggggacgatagtaatagaagactttaatgcttcactcttaataatagatcattcaaacagaaaattaataacagcagactttaacaacactgtagaatgagtttacctcacggaaatatacagaacattcaacccaacagcagtagaatgcacattcttctcaagtgtacatagaacatactctaggatagatcacatgcttggtcacaaaacaagtcttatgaatattgaaataattccaaatatcttttcacaccacaatggaatcaaactagaaatcaataccctaaagtaaagggaaaatatttacaaataaatgcaagttaaacaacacagtcttgaacaatcatcaggccaaagaagaaatcaaaagggaaattataaaatatcttgagacaaaaatgagaacagaacgtaccaaaacatgggatgtagaaaaaacagtactaagagggaagttcatascaataaatgcctacattataaaagaaagatc

SEQ ID NO: 243026 - DNA, 540 bp, Homo sapiens
tatgtttaaccattgtttgagtctatataaagagagtttwctttgttagatgtaatttgagtttatatgctacactcttctgttcttatctatgattcatgtaactacagatggtcagtctgtggatcctttggagatacaggatctaagtgttactgagtactataagcttaatactgatgactgaggccttcctggttttgttaaagaataattttgggagacatatcaagggacagttgaagtagctgcttcataaacataatgtatttgccccataatactttttccaaaaaatatgagcttataaatggagaggacatatcaatgtttatatcaattccatcaggcaggtggaagctaagtatcatctgtaaaattaccatctgtgtctcagctgtgtgctgagtgttgtatttacaaacagtgtctccattggcatcacacttccacacactgcttctgtttccctcttcacaggtccattgataaatccagatgcagaatgaggaatgaagctagttataggcaaaattaata

SEQ ID NO: 243027 - DNA, 540 bp, Homo sapiens
tatgtttaaccattgtttgagtctatataaagagagttttstttgttagatgtaatttgagtttatatgctacactcttctgttcttatctatgattcatgtaactacagatggtcagtctgtggatcctttggagatacaggatctaagtgttactgagtactataagcttaatactgatgactgaggccttcctggttttgttaaagaataattttgggagacatatcaagggacagttgaagtagctgcttcataaacataatgtatttgccccataatactttttccaaaaaatatgagcttataaatggagaggacatatcaatgtttatatcaattccatcaggcaggtggaagctaagtatcatctgtaaaattaccatctgtgtctcagctgtgtgctgagtgttgtatttacaaacagtgtctccattggcatcacacttccacacactgcttctgtttccctcttcacaggtccattgataaatccagatgcagaatgaggaatgaagctagttataggcaaaattaata

SEQ ID NO: 243028 - DNA, 356 bp, Homo sapiens
  misc_feature (1)...(356): n = A,T,C or G
gaaataaagctaataagctaacataaggaaagataaaatatgtgacaaataggctgggcacatggctcacagctgtaatcaagcactttgggaggccaaggcaggtagatcacgagatcaggagttcgagaccagcctgatcaacatggtgaaaccacrtttctactaaaaatacaaaaattagccaggcatggtggcatgtgcctgtaatcccagctactcangaggctgaggcaggagaatcgcttgaacctgggaggcacaggttgcagtgagccgagatcacaccactgcactccagcctggtcgacagagtgagactgcgtctcaaaaaagaaaaaagaatgggtgacaaa

SEQ ID NO: 243029 - DNA, 540 bp, Homo sapiens
agcctgtggaaccatgagcaaattaaacctcttctttataaattacccagtctcaggtatttctttatagcatgaaacaatggactaatacaccatgtaaactaacacagtcaaaggttccatagattagtayaagaatgtgttttggggaattattattctgagcttccacaacatgacagccttattgtagcactctcttatggagactagactccccttctgtaaataactcctaacagggtgggaactcatgactttagatgatagtggttcaaataaggtatctgcttaccatgcctagggatttggggttatatagatgatgtaacatctgttggttatatagatagtatatcatctataagctaaacctttcttagcttactctaaagaagaaaactattctcagattcctatatgtcaaaatactcttaatttctcctccagccattatgcttattgcaatgttggtgcttgcattgtttctgagggttagtcattgtcacgtggactcctttgcttcagaattccatcgcc

SEQ ID NO: 243030 - DNA, 356 bp, Homo sapiens
  misc_feature (1)...(356): n = A,T,C or G
gaaataaagctaataagctaacataaggaaagataaaatatgtgacaaataggctgggcacatggctcacagctgtaatcaagcactttgggaggccaaggcaggtagatcacgagatcaggagttcgagaccagcctgatcaacatggtgaaaccacgtttctactraaaatacaaaaattagccaggcatggtggcatgtgcctgtaatcccagctactcangaggctgaggcaggagaatcgcttgaacctgggaggcacaggttgcagtgagccgagatcacaccactgcactccagcctggtcgacagagtgagactgcgtctcaaaaaagaaaaaagaatgggtgacaaa

SEQ ID NO: 243031 - DNA, 462 bp, Homo sapiens
caggtggcgcacagctgcggaggagacagcaggagcacaagccccggcagcagcagcctcagggagggctggggtctggaggtggagctgtcacgacaggaacaaaagatctcttgcttaagcccaaggtttcattgtgtccactggaagccagacacacagactcaagccctccaacggagacaggcgctgctgcctcagagatttgccttcacagttctttttagtaaccacttattaccctaccccagggcctctggaaacagaaaatcagatagcccagccagagaggcacagagaggtgaagtgactagctcagcacaccagtctggcagctgcaaggctgtagccaccatcagacccaggggattctcagtcctgaagagttagggaaaacagcaaggaaggaggaaygcaaggcatgcagagaaggtagtgtaagtgttgtggggagggggtgtt

SEQ ID NO: 243032 - DNA, 555 bp, Homo sapiens
ttgaggcctaagaaccccgtgtgacttgctgtggagcctgaaggctccaaatggaaagcccctgcactcttgccagagaccatctgggcaggcacttggctgctttacccattataataaatgtcctggggtctcctgacgtgtgaaaatgagtgaattttcaaaaatccagttcccaggctgctggggctggagatgaaacagctgacaccactctccaggctgtgaattagcaagtgaaagggaaggcttcggtactgctggggaaagaagggtttatcaggcccaagtagcccacctttttccktctccaaactggatctgttttgtgtgaattttggaggatgctttgacagtcgaggtgatctggggcaaaatgcctgggatgtttgtgaagctcattgagttggcccagtgtaagggcagacgctgggctcctgtctcctctgtctcaacaaacaaatttcaatgagggctttccctcacagagagtatctgttatgtagacagaaactgagcagagccttgtacaagattattccgagtagagaatct

SEQ ID NO: 243033 - DNA, 540 bp, Homo sapiens
tgcacgggctctggagccacctgcattcattcctggctctgcctcttcctagtggtgatccttggcaagtcacttaacccatctgtgcctcagtttctttctgtgtaaaatggggataataacagtactaccctcaaaggttttttgtaaggattcgatgagttaatccatctaaggtgcagagaagcatgtctggcacgtccataagggctccggatggaatgtgcagtgcccagcacatggcgagcatgtcacctaccatcattctgattgcagttccttctctaacgcttcccatgggcccagccctgggataggcctgtggcaactaccgaagaaggcagggcatttcttgtgctcaaggaattcagacttgcatcaggaatacaaaggctcagccgggcatggtggctcatgcctataatcacagcactttgggaggccgagatggktctatcaatggaggccaggagtttgagactagcctggccaatatggtgaaacccccatgtttactaaaaatacaaaaattagccgggc

SEQ ID NO: 243034 - DNA, 383 bp, Homo sapiens
gaattccttggcctatggtagcataacgyctacttcagtcttcacgtggcctcctgacctctgtgtctctctgtatgtgtgtccaaatctccctctcctctgcttagaagcacaccagtcttattttatttagggcccatcctactagaatattacctcattttaactaattatatttgcaaaatccctatttccaaatagggtcacattctgaggttttaagtggacatgaagtttcaggggatcttattcaacccagtacacctgttttccactaacacttcatttatgaaaaagggcagtgggctggatttggttctgggctcaagcaatcctcccacctcaaccttccaagtagctaggaccacagatgtgtgccactg

SEQ ID NO: 243035 - DNA, 393 bp, Homo sapiens
agatcttctcatcctcaaagtggcaggtgttgtctgcattttatggggcgaatgagacaaagagtcagcctcttcagtccctgaggcccagcctcgcccctctcaccccccagaggcagctcccatgcatccaagcaaggcacccaggattccgggcttcaaaagaccaggcatggggcccataacaaatttcttgccataacaagacttcttaaccctttttgtgccctaggyccttctggcaactagtgaagcctaaggataatctcagaataatgattttagacacataaaatgaaatgtataggattataaagaaaatcaattatatcgaaatacagttgtcaaaatatttttcaatttgttataaaatcataagtaggcttctttatt

SEQ ID NO: 243036 - DNA, 451 bp, Homo sapiens
actctacgataaggtaagggtggttcattcacagggcagtgattgtgcagtggcacgatcacagctcattcctgggctcaagcaattttccggcctcagccttctgagtagctggaactatagggctgtgccattgcactcagcttttttttttttttttttttttttgagatgagttcttgctctgtcacccaggctggagtgcggtgatgtgatygtagctcactccaacttcaaactcctgagctcaagcgattctcccacctcaggcttcttagtagctgtgactacaagtatggaccacacacccggctatatttgttttgtaaagatggggtctaattatgttgcccaggctggtctcaaactcttggcttcaagtgatcctcctgcctcagcttcccaaaatgttgggattacaggcaggaaccacgaagccctactgttcatg

SEQ ID NO: 243037 - DNA, 509 bp, Homo sapiens
tggctttcaggaaattaggttgctttagcctaagctacattgattcataaaccaatctacaggattttgccatagctcatgggagacttttccttctctgttaataatgttgctgcttcaaaagaggaaagcctctttccatctcttcagagtgccagctctgcaacagaacaggccaggaaatgagggggaaaggccagcgcagaggaggggacagggagcttgaggcagggaaggagatcatcttagaactgattgcaatgtctgccatgctgagctcatgcctagcctgtccyaggcaatgacaggaagcagattttcgaagtgatctagggattcaaaataaaaaaaagtagtttcattgctttttcttgcccctgggatggaaccagtgtgcttccctctgcctagaaccccctcccctttcccttgtccaatctccaaccatcctccctgttcttcactgtgtcatcatcgtagccattcacagtcaaagaacccatcaatga

SEQ ID NO: 243038 - DNA, 498 bp, Homo sapiens
cctatctacctatactaaaagctacaattatttttattttatatataatttaccaaatgtatagtacactaaattttatgtgtagcatagaattacagcagtgattctctttctgaataataccagggctagtgctttctgctgcctttactgttttagcccagggtagaaacattccattcatacacagataacctcatctccaaakaatcaaaatggtttactctatgtaagatatatatttatggagagagacagtgagaatgaacgcaagagcatgagcaagagagagagggaaaacaactggaaatggggttcccttgaaagaagattccaaagtctcagtaagtatttttgccacctttctaggcgcaccgatgcagaactacagtaaacttaaggaaaaagcaaaagcactgaagttgtgaaaaggatgatgcaattggcaccatggaaagaccccttgaagctagaatccaattaagtcagtttcaagtc

SEQ ID NO: 243039 - DNA, 531 bp, Homo sapiens
atttccctttcctctcttttattattcaaaacagaattaaccatattctactgtcaaataaaaaatgaacccagacttaggtaagargagattttatttgaaacgacttgcaatacctgcaagcaccttgaagtgaaggcagaaaagaatgacttttatgggaaaaagtaaaaaaaaactagaaataactgggtgtgaaaagtagggtgtgcaggtggcatgatcgagcaattgaacaggaaattttctttggggtcagctgattctcagaagggctgttaaggggggctgttcctcattgccatgcttgcttcagctcccattggttacacaagctcaagagtgggtcaaagttcaggggcttgaggaaagagaaaagctggttttaagtttgagcaagtcaaattagcaggcattttgtccagattggccagcaggacaacattttagcaaatcacgtatgagaaaaagaatgggaatctggtcttataggtaaacaagacagacgtctgaatcttatcaagtcatatg

SEQ ID NO: 243040 - DNA, 531 bp, Homo sapiens
atttccctttcctctcttttattattcaaaacagaattaaccatattctactgtcaaataaaaaatgaacccagacttaggtaagaggagattttatttgaaacgacttgcaatacctgcaagcaccttgaagtgaaggcagaaaagaatgacttttatgggaaaaagtaaaaraaaactagaaataactgggtgtgaaaagtagggtgtgcaggtggcatgatcgagcaattgaacaggaaattttctttggggtcagctgattctcagaagggctgttaaggggggctgttcctcattgccatgcttgcttcagctcccattggttacacaagctcaagagtgggtcaaagttcaggggcttgaggaaagagaaaagctggttttaagtttgagcaagtcaaattagcaggcattttgtccagattggccagcaggacaacattttagcaaatcacgtatgagaaaaagaatgggaatctggtcttataggtaaacaagacagacgtctgaatcttatcaagtcatatg

SEQ ID NO: 243041 - DNA, 531 bp, Homo sapiens
atttccctttcctctcttttattattcaaaacagaattaaccatattctactgtcaaataaaaaatgaacccagacttaggtaagaggagattttatttgaaacgacttgcaatacctgcaagcaccttgaagtgaaggcagaaaagaatgacttttatgggaaaaagtaaaaaaaaactagaaataactgggtgtgaaaagtaggrtgtgcaggtggcatgatcgagcaattgaacaggaaattttctttggggtcagctgattctcagaagggctgttaaggggggctgttcctcattgccatgcttgcttcagctcccattggttacacaagctcaagagtgggtcaaagttcaggggcttgaggaaagagaaaagctggttttaagtttgagcaagtcaaattagcaggcattttgtccagattggccagcaggacaacattttagcaaatcacgtatgagaaaaagaatgggaatctggtcttataggtaaacaagacagacgtctgaatcttatcaagtcatatg

SEQ ID NO: 243042 - DNA, 531 bp, Homo sapiens
atttccctttcctctcttttattattcaaaacagaattaaccatattctactgtcaaataaaaaatgaacccagacttaggtaagaggagattttatttgaaacgacttgcaatacctgcaagcaccttgaagtgaaggcagaaaagaatgacttttatgggaaaaagtaaaaaaaaactagaaataactgggtgtgaaaagtagggtgtgcaggtggcatgatcgagcaattgaacaggaaattttctttggggtcagctgattctcagaagggctgttaaggggggctgttcctcattgccatgcttgcttcagctcccattggttacacaagctcaagagtgggtcaaagttcaggggyttgaggaaagagaaaagctggttttaagtttgagcaagtcaaattagcaggcattttgtccagattggccagcaggacaacattttagcaaatcacgtatgagaaaaagaatgggaatctggtcttataggtaaacaagacagacgtctgaatcttatcaagtcatatg

SEQ ID NO: 243043 - DNA, 599 bp, Homo sapiens
cgttacattttagctatgacaatattattttctatttgaaggacggataaactaatatactttcctgcctgtcttcttcccccagctccccgactgatacttctacatttgttaagtaactagtaatggtagtgtttttcaaggcactagatataagaagcccctgctactaagaagttcagtttaggcaccttctccctctctagattgagtgtacatcacaaatccttggaaccaactcttcacaaggctcctgtaacaatctggtctcctccccagtggagaaatctttgtactgagttgaaattacctttattcctccttattagacacaatgcttgacctcacaggctttyactggatagtgtatcaattgatcctattatagcacttggcacatggtagatcatcagtaaatatttgttgaatgaacggttataatactttcattctgttagataaacttcataagcatggtgtttgcatctcaaagacaaactgtcttatggcctaaagaggtctcactttcctgcctgtgtcccatgtcatgtttaccttgtagattgttcgccttcctgagggtattgtcattaattgga

SEQ ID NO: 243044 - DNA, 596 bp, Homo sapiens
ggaatcttacaccgtggagtgactcagccatcaatctcaggctacaagaagaaagacaactgacatgaacattccttgtttatatgtgacccttccactcacttgatacctggtcaccaggtaatcaccagggctgtctaatgcttcccccacttttttaayctcagctgcttccgaaattgtaatttgcatggagagcagataaatggagtaagtgtccttaacatattcccttcattcttcctaggctctgctatggcagagttgttgtcatgggggaaaagcttttctgttttttttaatatttaaaaaaatatatcctactgagctacaaatgaatagtattccactcttcccttgggggatatttaacaggcaggcatattctgcagtgggaagattttttttttcctttgcacatccaatgtgaatacttgttgtgattcacagctttgctcctgtgactctgcactctcctaacatgctcagcctctttgggcatcttttccaatgaagtcacaggtgtgctaggccttccacaattctctgtgtaactagaatgacctcaaagtgcctctggtctctgatggcattca

SEQ ID NO: 243045 - DNA, 560 bp, Homo sapiens
attttgagctttggtgaaacttctcatctcccataggagaatcccagcattatctgcctccttgatggcacaggaggcaatctggcagttacagatatttagaaaccaaagtgacactgaatatctcagcagtcctaccatcccattcagggctctttccactgtacctgctaaataaactgaccctgaataggatgaytatatgaagatcatgatgacaatgacaatgacgatgacaacagtagcatttttgactgctcattctgtgttgtttggtgttctaggaactatatgcattaactaatttcattcttgcaacaaccctgggagttacaattattatcatttccctgttatagcagaggaaactgaggcacaggatgattaagtaatttgcctaagttccacaactctaggaagtgacggagctagaatttgaacccaggtgattttacaccagtacctgtgattctaacctttacgtattttaaacatggaaaggaaactgggctaggtatttgactagaatctacacactgggtcactccctgtcactagcc

SEQ ID NO: 243046 - DNA, 560 bp, Homo sapiens
attttgagctttggtgaaacttctcatctcccataggagaatcccagcattatctgcctccttgatggcacaggaggcaatctggcagttacagatatttagaaaccaaagtgacactgaatatctcagcagtcctaccatcccattcagggctctttccactgtacctgctaaataaactgaccctgaataggatgattatatgaagatcatgatgacaatgacaatgacgatgacaacagtagcatttttgactgctcattctgtgttgtttggtgttctaggaactatatgcattaactaatttcattcttgcaacaacccwgggagttacaattattatcatttccctgttatagcagaggaaactgaggcacaggatgattaagtaatttgcctaagttccacaactctaggaagtgacggagctagaatttgaacccaggtgattttacaccagtacctgtgattctaacctttacgtattttaaacatggaaaggaaactgggctaggtatttgactagaatctacacactgggtcactccctgtcactagcc

SEQ ID NO: 243047 - DNA, 560 bp, Homo sapiens
attttgagctttggtgaaacttctcatctcccataggagaatcccagcattatctgcctccttgatggcacaggaggcaatctggcagttacagatatttagaaaccaaagtgacactgaatatctcagcagtcctaccatcccattcagggctctttccactgtacctgctaaataaactgaccctgaataggatgattatatgaagatcatgatgacaatgacaatgacgatgacaacagtagcatttttgactgctcattctgtgttgtttggtgttctaggaactatatgcattaactaatttcattcttgcaacaaccctgggagttacaattattatcatttccctgttatagcagaggaaactgaggcacaggatgattaagtaatttgcctaagttccacarctctaggaagtgacggagctagaatttgaacccaggtgattttacaccagtacctgtgattctaacctttacgtattttaaacatggaaaggaaactgggctaggtatttgactagaatctacacactgggtcactccctgtcactagcc

SEQ ID NO: 243048 - DNA, 545 bp, Homo sapiens
aaatttcaacatgagttttggaaaggaccaatattcaaaccataacaggtacccatagcaattatgtgagagaaaagatttgcagacaaagtgctggtggcattcaggaagctgttccttacagctaaggggaccaggaaggttgttattagaaaagagacatttaagtcctgaaggctgcatagtatttttaaagtttattttttatttaattttccttgtgctcgtatttgagagagaggcttaaaaagctgtttggacactccggatgcatggccacagcttgttgcctggtgaaattcattatagggtgattgggtggggagtgacgrgttcactggagagatttcaaatagctgcaggttttttctattgtgccagttagtttcactagagagaaatcctccagtcacttgcttggggtatgaaagcctgacttccagtgttctgggagctgagtgaacagaggtagctgggaccattcaggagaaggttttctctgtccccccgttttcagtctatgccttctccctgccctctgttgt

SEQ ID NO: 243049 - DNA, 644 bp, Homo sapiens
gcttcaagtctactagcagccccctgcaaagttccatgggtgatctgattctctctaaatccacgtgggcctatatacatatcattcccacagagaaaatagacttgtagaaaatgcactttagcattattgattagttaacctttaaaatagccccttgtcttaagattttaaaacttcactttttctttgccaaggaatgtactaataagcaagataaaagggcagagaagcaagcagtgccagtttgggaaggygattttagacttaattcgtttgctttccaattgggcctaatgttgaactaatgtacttaatctgcctgggttgtaacaaggaaaaatatgtatgaatttatatttataattttgaggagtttgcaaaatcatttgaaagttaaacctgttgatatatgagacacagaacaataaatgagtatataaacaaaagctacactgcttcctttataatcagagaaggcttcgtgaaaggacagagaccaggttgggccttgaaaaaatataagatatttttagtatgtatgtctactaataggagttatcaaaaatgcaagacttacaagagtgatcctaatacctctttaataatagatgtttcttcaagacatttatcaagaagaaata

SEQ ID NO: 243050 - DNA, 644 bp, Homo sapiens
gcttcaagtctactagcagccccctgcaaagttccatgggtgatctgattctctctaaatccacgtgggcctatatacatatcattcccacagagaaaatagacttgtagaaaatgcactttagcattattgattagttaacctttaaaatagccccttgtcttaagattttaaaacttcactttttctttgccaaggaatgtactaataagcaagataaaagggcagagaagcaagcagtgccagtttgggaaggtgattttagacttaattcgtttgctttccaattgggcctaatgttgaactaatgtacttaatctgcctgggttgtaacaaggaaaaatatgtatgaatttatatttataattttgaggagtttgcaaaatcatttgaaagttaaacytgttgatatatgagacacagaacaataaatgagtatataaacaaaagctacactgcttcctttataatcagagaaggcttcgtgaaaggacagagaccaggttgggccttgaaaaaatataagatatttttagtatgtatgtctactaataggagttatcaaaaatgcaagacttacaagagtgatcctaatacctctttaataatagatgtttcttcaagacatttatcaagaagaaata

SEQ ID NO: 243051 - DNA, 580 bp, Homo sapiens
tcgatcttccctcttcctttaggaactcagatgcctgtaagagggatgcattcaactctccttctccatgctgtaaggtgttttaytttctttaaaatttaattttattttatcttacattctaggatacatgtgcaggatgtgcaggtttgttatgtaagtaaatgtgtgtcatggtggtttgctgcgcctatcaacccctcacctaggtattaagcccagcatacattagctatttatcctgatgctccccatccccctgcccctccaacaggtcccagcatgtgttgttcccctccctgtgtccatgtgttctcactgttcagctcccacttacaagtgagaacatgcagtgtttgattttctgttcctgtgttagtttgctgaggataatggcttccagctccatccatgtccctgcaaaggatatgatctccttcctttttatgagtgcatagtattccacggagtatacgctgtaagttttaaaggggcagacttctttgcagggaggctactcattgtctaatgctgcctatgatgggtcagataagtctgtgtcattctggggttcattatc

SEQ ID NO: 243052 - DNA, 572 bp, Homo sapiens
gagccactgcgcctggccatgatacaaagatttctaatttgggggttatatatccaataatgggattgttgggttgaatgttagctctgtttcaagttctttgagaaatcacaaaactgctttccacagtggctaaactaaatttaaattcccaccagcaatgtgcatgtattcccttttctctgcagcctcgccagcatgtgttattctttgactttttaattatacccactctgactgatgtgagacggcatctcactctacttttgatttgcatttctctaatgattagtaatgttgagtattttaataygctttttggccacatgtatttcttgtgagaagtgtctgttcccgttctttgccccttttttaatggggttatgttttgcctgttaatttatttaagttccttatagattcggaatattaggtctttgttggatgcatagtttgcaaatattttctctcattctgtaggtggtatgtttactctgttgatagtttctttcgctgtgcagaagctctctagtttaattaggccccatttgtcaatttttgtttttgttgca

SEQ ID NO: 243053 - DNA, 512 bp, Homo sapiens
tatagtcaaaagtcaaagagaaaatgagaattgtaaaaaccgcaagagaaaagcatcaagtcacatataatgaaatccccttcagactaatagcatatttctcagcaaaaaccttacaggcatggagagaatgggatgatatatttaaagtgctgaaagaaaaaaaaccctggcagccaagatacattacccaacaaacttatccttcagaaatcaaggagaaacaatgtctctcccagacaagcaaaactgtgggaatttaccactagacctacacgacaagaaatacatgagagtcctgtatctggaagcaaaagaatgataactaccatcataaaacatgtgagagaataaaacacactgrtagagcagatacataaataaaaaagaaataattaaactttatcactacagaaaattaccaaactgcagccaacattggagttaaactataccctagaccaaatggacctaacagacatttacagaacatttcatcctaaagctacaga

SEQ ID NO: 243054 - DNA, 559 bp, Homo sapiens
tcccagaatgcattccctttgttaaatgatgtttaacagtacataaaagtacaggtatagctctgaggatggtattctcaaagtaggaagtgcagagagaatgggaaaagattagggaacatgacrttcaagctgaatgttgaaggattgagtaggagcttgccaggaaaaagaaatgagggagagatcctcccaagcagaggaaacatatatccacatactggttcccagaacaacagaacatgattttccaaactttgtatgtttcctaactcccatgttatacatttaaaacatatttcagcactattatggggcaattatatatgcctgttatcactagaatttcccccaataaattacacagagcaatgaataaagagatataactcaggtgtgaaaatagatacagccttcactttcaaaaatctggccctttcaaatgtgcagctatgattaggaaagccaaatgtcctattgcttttacatgtgctcctataaaataaaatgaaaaacacacattttttccacaggagctaaggaatgcttttgtgagaac

SEQ ID NO: 243055 - DNA, 559 bp, Homo sapiens
tcccagaatgcattccctttgttaaatgatgtttaacagtacataaaagtacaggtatagctctgaggatggtattctcaaagtaggaagtgcagagagaatgggaaaagattagggaacatgacattcaagctgaatgttgaaggattgagtaggagcttgccaggaaaaagaaatgagggagagatcctcccaagcagaggaaacatatatccacatactggttcccagaacaacagaacatgattttccaaactttgtatgtttcctaactcccatgttatacatttaaaacatatttcagcactattatggggcaattatatatgcctgttatcactagaatttcccccaataaattacacagagcaatgaawaaagagatataactcaggtgtgaaaatagatacagccttcactttcaaaaatctggccctttcaaatgtgcagctatgattaggaaagccaaatgtcctattgcttttacatgtgctcctataaaataaaatgaaaaacacacattttttccacaggagctaaggaatgcttttgtgagaac

SEQ ID NO: 243056 - DNA, 636 bp, Homo sapiens
gctacatttatttttaaactgttgatctaactactcagagatgacctgttagtgagtgtggttatcactgaatgtcccgggctgattttagacttctgaaggaaaaggttgacttcagacctttggtcaaaggattcccatgattccttttaggtttgctctcaggggtttaagactacacagagctgcaaactttaagaagtcccattaaaccaaaaccttgtcatatcattccttaattctaggactccttaactctacacctctcagaactgcttcttgctgaaacaactgtacagccaacttccagtcaaactcagaaactaatttaaaaagtcagtaattcatctgcggagtgaagagcaaaaatgatgatggctcaccctgtcaaatgcccttagcctctcatgagaaatgtcataggaacctatctgactgagcccattcctttctgcagacttcaccttttaytgcatccctctttgttatctacattccatttccatttttccaacatgccatctttcttcttaggtggtttccacacatctgtggtctaactactgtatgtgcctttaaccaatgcgtgctcctacttgtcctttataatttgcttaaaggcagtttctcttggaa

SEQ ID NO: 243057 - DNA, 607 bp, Homo sapiens
ttgtactcaattaaatcatgaaaggctaaaaaatgggcaatttccccactatgataatatacacttaattcatttgcagcaaatatggtagtcttgacttctaaccctttaggtgagtgaaaatcctgaataagacaagtgtcttttaagattcattagatataaaccatgctgttgttgcctttgtatgctgccctaactaaagtaatgcatgtaccagctgcatcataaaaactgattggctaattagttgaatgagttcataaatgagaagagaggctgtagagtttatgataaaatgccagaatgtcatttattccaatgatttgtattattgtaatatcttatagaaattattttaaaacaaataaaatataggtttaacaacaatacttattaaatgccaggcaggcattgttctaactgctttgtatatagtaacttgtttagttttcccaacaaccccatgggagtatctttgatgctggactaagaytggttgacccaaaccacatattttaaaactagggaactttaaatttccaaagggaagttatggtcctgagtaatagatggttgggtagaagccaaaaggtgcccatcacac

SEQ ID NO: 243058 - DNA, 503 bp, Homo sapiens
ctgaattcctgttcacttcctgattttgatatttgtattttacttatgtaagaacatatacttatttttagaaaatatacattgaagcatttagctgcaaaggatatgaagatatgttagaattacatatagtcagtcttccatatckgcaggttccttatttacagattcaaccaatcacagatagaaaatatttgggaaaaaatacaataaaaataatacaaataatacagtataactatttacacagcatttacattgtattaggtagtataagaaacctagagatgatttaaattatatggaagaagatgtgtaggttatattcaaatattatgccatctcatataagggggacttgagcatgtgcaaattttggtgtctgagggatcctggaatcaatcccccatggatacagagggacaactgtattcatagatactgtgtgtgatatacacacacacagaggagtgggggataaagcaaatgtggtaaaatgggaa

SEQ ID NO: 243059 - DNA, 553 bp, Homo sapiens
tataagacaaatgatgattaaatacttatagggaagacagacagaatcaaggctaatgaatcaagaatgggccagagtgaaacttgctttgattttggcaaagattattaagatacacacacgctgagctaaggcgcagcatgagataggtgtcaatgagatgatttcaactacaaatgaagaaaagttaactctgtaagatatttccacacagaatgagctcctttaaagagatagattcacaactattggaggtgttcaaacacaaagtacacgatcatttactgatattgaaacatctaaggaatactttgattggataatcttcaaaaacttttctgattcttgtgaaaaaataaaaataaaaacttgggacaccaacacactctgacaaaaaaaaaactaagctgaaagctgagtcatgcaagaagckgccttaccttttcctcttaagcagagagctatagagaaaaggtcaattatctccacaagtagctgttctgtgttcaccttattttatgctcagcaccagatgaatacataatcgacgatt

SEQ ID NO: 243060 - DNA, 464 bp, Homo sapiens
tctgcctcatatttgattatcatgcagaatagtttccataccctggctctattcattatcgggaaagccaaactaacccctcattctgaccccctccacacctcgagttggtttacataaccctccttggtgctcctttaatgctccgttcatatcattagcacagtgctcgtcacatatgtattatttakgtaaataccctaagagcagagacctagtctgttttgttcacttttctgtatgctaagcaccagaacagcactccatatagagtagttgcttcgtgaatatttactgcttgagtgagtgaatgcatctgcttccccctggctagatactatctcttggtgttgattattcattatctcttccctccattatctatctccttagtactgtaggggctgaaagcctgaagttcctagacttgcttgttgctagggtccaaatgcaattctggttct

SEQ ID NO: 243061 - DNA, 410 bp, Homo sapiens
cagtagctcatgcctgtaatcccagggcttggggaggccaaggcaggaggatcgtttgaggccaggaattcgagaccagcctgggaaacatagcaagatcccatctctccagaaaaaagagtctcccatactttttgagagttaggcgtttcacagatattaactaatttgctcctccgaatgtcacttataaataaagcaaccaaggctcagagagactcagtaattcacccaaggccacataagcagtggcagagctggttaratgaccaaacccagggcaagatggcgccatcctcccctctctgtttgccatgccaggttgcaccacacagatccacatcaggaggcagggacaccagccttggcgcagcagctgagaccagggcgaggtccctcaatgcctgtaa

SEQ ID NO: 243062 - DNA, 591 bp, Homo sapiens
tgcagcctaggtccatcacctttagccccaaccacccttagtaagtggagctgaacatgtgcagggaagacccatctgtgggaattcaggagagccaggagaaaggcatggatccccatctttgcttctgtcacctgcctgactcttcttgccataagtgtttcaccaaaataaatcgggggcctggccaggccactggaaacactgaccttgaagacttttcaggaaatgatttgcatgcagtgcagaagacctctgaccccttcctgtcgctggcacctgatcggatcctagcagtgacctcacctggggatttgactgtgtgcttccccacatgccctagctctctctctctctcttcctttctcttagccttacatgttctctctggaggagataacgcgctttacattcataacagtgtgtcagtctgcagagagagaaatcatctaaggccatgacctcactgccacaagtgtcactgactgccaggcagagcatccatcgggcagggcgctgtccctcctcrgccctccttccctccatttgcaggaggaagggtcactaccatccaggtcacaggcacaaaag

SEQ ID NO: 243063 - DNA, 644 bp, Homo sapiens
acaggtataaactaggactgtcctgggcttacccaaatgggggttcgggggaacttgctaatctgatgtgtataaagtgaaggtgggttaactttgctttggtgggcaaaaaatagacccaatgaggggaaattccagaagatacwttcggattcaatggaaggaagaacttttgaacaagcatcattgctcaaaatggaatgggttgccccgttatcactgcaaatcatcaggaagggaccagagactttagcaagggaagttgtagaaaggattacagaactcagggacagacggactctaagatcccttcccttcctctccaataagttgtgatgtataaggcatggatatataggcccagctagaaacaaaggagttccaagaaaatatattcattctgatagctgatgtatttacttgtgatgtttccttggtacaatattacatgtggtttggggaaacaaatttttacaacgttcactcagtgcttcagaaagcttacaaaaattttagtacagactgataggcacaaacgcatttttctactttttgatgctaccaatttttctcatataaatgtgtggtcgaacatcccctatttaaaatgtaattctgtgcagaagagttaccggcatctgttg

SEQ ID NO: 243064 - DNA, 644 bp, Homo sapiens
acaggtataaactaggactgtcctgggcttacccaaatgggggttcgggggaacttgctaatctgatgtgtataaagtgaaggtgggttaactttgctttggtgggcaaaaaatagacccaatgaggggaaattccagaagatacattcggattcaatggaaggaagaacttttgaacaagcatcattgctcaaaatggaatgggttgccccgttatcactgcaaatcatcaggaagggaccagagactttagcaagggaagttgtagaaaggattacagaactcagggacagacggactctaagatcccttcccttcctctccaataagttgtgatgtataaggcatggatatataggcccagctagaaacaaaggagttccaagaaaatatattcattctgatagctgatgtatttacttgtgatgtttccttggtacaatattacatgtggtttggggaaacaaatttttacaacgttcactcagtgcttcagaaagcttacaaaaattttagtacagactgataggcacaaacgcatttttctactttttgrtgctaccaatttttctcatataaatgtgtggtcgaacatcccctatttaaaatgtaattctgtgcagaagagttaccggcatctgttg

SEQ ID NO: 243065 - DNA, 455 bp, Homo sapiens
gaattcaactgaattgtatttagaatttaaaattatagctcaatgatccatttttaaaaagagaaattcagctgggaggaaaaggatagttatacttaacataccttttttttttttttttttttctgagacagggtctcactctattgctgaggctggagtgcagtggtgcaatcttggctccttgcagtcttgacctcccaggctcaagcaatcctcctacctcagcctcccaagtagttgggactataggtgcatttcaccatgcatagccaactttttaaatgttttgcatagaagaagtcttgctacgttgcctaggctcgtctcmaactcccgggctcaagcaatccgctcacctcggtctcccaaagtgctgaaaggcccagccttacttaacatatctttagctggatttttttttttgttttaagtagaagagaaaaacaaactct

SEQ ID NO: 243066 - DNA, 482 bp, Homo sapiens
gaattctaattaatgaaaattaaattatttacacaagtatttggattggcatttatatcctggcaaatgatctacatgcacattttttaaagccgtgggattaaaaagataaagacccttactagaagactagcagttggttttttawcttagctgctctgtttcatttctttttacagtcagtgataaatggagatcatatattctccttaatggcctgttcgtgatttggcattgtgctaaggctggctggcagtggctctgaggatatgtgggggtgtccctgggcaggagaggagatactgctgaaagtcatgccccatcccttttccctctgccccagtgctaggggctggctgggccactcagccagcacagacggcccagtgggcacaagttacaggggacttcttccagcttcctttttcctctcccttcctgcctgttcagagacgtgcaacagagtaatgagaaggaggagg

SEQ ID NO: 243067 - DNA, 482 bp, Homo sapiens
gaattctaattaatgaaaattaaattatttacacaagtatttggattggcatttatatcctggcaaatgatctacatgcacattttttaaagccgtgggattaaaaagataaagacccttactagaagactagcagttggttttttaacttagctgctctgtttcatttctttttacagtcagtgataaatggagatcatatattctccttaatggcctgttcgtgatttggcattgtgctaaggctggctggcagtggctctgaggatatgtgggggtgtccctgggcaggagaggagatactgctgaaagtcatgccccatcccttttccctctgccccagtgctaggggctggctgggccactcagccagcacagacrgcccagtgggcacaagttacaggggacttcttccagcttcctttttcctctcccttcctgcctgttcagagacgtgcaacagagtaatgagaaggaggagg

SEQ ID NO: 243068 - DNA, 582 bp, Homo sapiens
acacactctgtagtatttttttttaatggcaattcttgcaaaatcatacacatggggaaaaagttgaagaaagaaaggcctatgagagaaaagttttcttaatgtgtttaacgagccagctatgtagaactgtattcataaaccacagatgggccttcaaagttcctggttcttaccaagatggtgactcatcatggttgttagatcattcccttgatatcagtctcagagaagctataaagggaaaagaccaagatgcaagatatggaagaaattgtggggcatccctcaattgataacaagttgttttaaatgcagttgtttataggatgatagatttggcctgaagcaggaggatggatatccagcaggtctatacaaggataagagagaaacagtaaatttggaattctgcttgtgatcctctctctccgttgattttttttttaatctttaggattaaaattgggacattgcagaatccctatatgattaggacctaggaaaatagaacagaatctctttytaattttatttttgaatgccacatttagtgccacttcttaaagacaaactaagcag

SEQ ID NO: 243069 - DNA, 411 bp, Homo sapiens
catggttgcttcagaatagggtgggatatagagtcattacagattacaaagtggcacaaggraagtatggggaatagtggatatgttaattactataatatgtgtatgttgagggttttgaaagttttatatgtatgtgtgggcataaaaatcaaattgtgcaatttaaatataaaaatatttaagctttaacaataagattcaaagagtagagataaagtgagtaaaatcactttttctgcagacaaaattaattgaggagaccgaagacaaatctcatgtaagcaattttattgaataagtggcaaattccactctcaagatagattcccagccttggagaggctgtatccttgattctatctctgtgttccacaaatgaccttttaaatgacagaatattcatcacct

SEQ ID NO: 243070 - DNA, 411 bp, Homo sapiens
catggttgcttcagaatagggtgggatatagagtcattacagattacaaagtggcacaagggaagtatggggaatagtggatatgttaattactataatatgtgtatgttgagggttttgaaagttttatatgtatgtgtgggcataaaaatcaaattgtgcaatttaaatataaaaatatttaagctttaacaataagattcaaagagtagagataaagtgagtaaaatcactttttctgcagacaaaattaattgaggagaccgaagacaaatctcatgtaagcaattttattgaataagtggcaaattccaytctcaagatagattcccagccttggagaggctgtatccttgattctatctctgtgttccacaaatgaccttttaaatgacagaatattcatcacct

SEQ ID NO: 243071 - DNA, 548 bp, Homo sapiens
tcaatattgttgtcttcaggcaattaaggaggcctgaggagaggaaaagagatatgtgaaccactggctgrtggagtaatcagagtgcatacatctttttttaaagtacgccttgttatatgggtgtagttatggcaccccaaaacaattacaatagtaacatcaatgatcattgattacagatcaccataacagatataataataattaaaaagtttaaaatgtgagaattaccaaaatatgacacagacatgaagtgaggacatgctgttggaaaaaatggtactgagagagttgctccatgatgggttgccataaaccttcaatgttttaaaaaatgcagcatctgcaaagtactgcaaagtgaagtacaataaaatgagctatgcctctactaatataagtggcttttattttgtgaaatagtaatttttgctaaaccacatagtagagccatagcataattacctcagtggattgtcttgttagacttcagattaattttggatatttttattttcccctgtaaaagaagtttccaacttacc

SEQ ID NO: 243072 - DNA, 548 bp, Homo sapiens
tcaatattgttgtcttcaggcaattaaggaggcctgaggagaggaaaagagatatgtgaaccactggctgatggagtaatcagagtgcatacatctttttttaaagtacgccttrttatatgggtgtagttatggcaccccaaaacaattacaatagtaacatcaatgatcattgattacagatcaccataacagatataataataattaaaaagtttaaaatgtgagaattaccaaaatatgacacagacatgaagtgaggacatgctgttggaaaaaatggtactgagagagttgctccatgatgggttgccataaaccttcaatgttttaaaaaatgcagcatctgcaaagtactgcaaagtgaagtacaataaaatgagctatgcctctactaatataagtggcttttattttgtgaaatagtaatttttgctaaaccacatagtagagccatagcataattacctcagtggattgtcttgttagacttcagattaattttggatatttttattttcccctgtaaaagaagtttccaacttacc

SEQ ID NO: 243073 - DNA, 548 bp, Homo sapiens
tcaatattgttgtcttcaggcaattaaggaggcctgaggagaggaaaagagatatgtgaaccactggctgatggagtaatcagagtgcatacatctttttttaaagtacgccttgttatatgggtgtagttatggcaccccaaaacaattacaatagtaacatcaaygatcattgattacagatcaccataacagatataataataattaaaaagtttaaaatgtgagaattaccaaaatatgacacagacatgaagtgaggacatgctgttggaaaaaatggtactgagagagttgctccatgatgggttgccataaaccttcaatgttttaaaaaatgcagcatctgcaaagtactgcaaagtgaagtacaataaaatgagctatgcctctactaatataagtggcttttattttgtgaaatagtaatttttgctaaaccacatagtagagccatagcataattacctcagtggattgtcttgttagacttcagattaattttggatatttttattttcccctgtaaaagaagtttccaacttacc

SEQ ID NO: 243074 - DNA, 437 bp, Homo sapiens
aagtgagaaactttcttccctatttcttaatgttaagtaaccaaagtattggttattctttccagattaaaaataggttacaaatatctatctacaaatacacatattttrtcattattttaatcatatgttttttcaaatcagtaaataaaaatccatgtcactatgtaataaccacaaagtattctatagttttcatggagtattatttagttaaataattaattgcttatcaatagtcactttgtttgccttcaggtttcattatcacataactacggagatggtcacattgtgactgactgtgcaggaggtaccattgtcatttctatttaacagaggaggaaaggaagtcacagagcattcaagcagatttcctggtatccctcactttcctagtgcagtcaaaatataaataaaggcagtctgacttcaga

SEQ ID NO: 243075 - DNA, 463 bp, Homo sapiens
ttgctatctatctaatgtgattacgctgagtactttctctgtttatttgcagtttaatggttcccttgaactgtctttgctaaaaaattatagcaaatccacatgatttgtgttcctcagttctacatggagacttaaatgaaacatttcagggtttggagttggtaaccatcttttctccccttctttccatcagaacagccttagatcacaattgagtactggccaccttttgggacctcatgcattttattgatacgttgttactttcaaaacaactactgttatttttatgctctaaacagcaactgttgaagtctagagaaagacctatagtgktctcatcagtcacactgttcttgacatcttcagagggaaattcttaaagagaaaacaggtatctgtcacacaatattttatcccacacactcagtaacttacacttttcgtggttgggaatata

SEQ ID NO: 243076 - DNA, 413 bp, Homo sapiens
gatctgatggttttataaaggagcaaagcaaagcatgactttgctcktcctttgcctttgccatgattttgaggcctccccagccatgtgaaactgtgagtcaattaaatctctttcctttatatattatccagtttcaggtatgtctttattagcagcatgagaaaagactaataccactatggtagaaaaaatattgttgaaaattaaaaatttaaattacactaaaattttgaagtgaattaaaatatactctgacagacatctttactacacaccactacaaatattattttttgaatttatgtatgcacagactgattcctgacatctttgagatgtttagttagtatatgagaacactgagttaactcattgatatgatacctgcacatttctttgtttagcacaat

SEQ ID NO: 243077 - DNA, 491 bp, Homo sapiens
  misc_feature (1)...(491): n = A,T,C or G
tcaattgggttacatgattttttgttgtttttgtttgttttgctattgagctgtaggagatccttaaatattgtggttatggactctttatcagatctatggtttacaaatattttctcccattctgtatattaccttttcactytttttattgtttcttttgccattcataagctttttagttttgatgtaattccagttgtctacttttgggtattttgcctgtagctttgatgttatatccaagaaataattgccatggccaatgttaaaaaactttttttttctatattttcttctatgagtttcattatttcaaatcatttaagtctttaatccattttcagtttatttttctgtatgatgtaagaaaagtgtttaatttcattcttttgcatgtggatgttcagtttttccaacgctgtttattcaacacagaatcctttcccgattttgtattcttgacacgccgcaaaagattagttnataat

SEQ ID NO: 243078 - DNA, 491 bp, Homo sapiens
  misc_feature (1)...(491): n = A,T,C or G
tcaattgggttacatgattttttgttgtttttgtttgttttgctattgagctgtaggagatccttaaatattgtggttatggactctttatcagatctatggtttacaaatattttctcccattctgtatattaccttttcactttttttattgtttcttttgccattcataagctttttagttttgatgtaattccagttgtctacttttgggtattttgcctgtagctttgatgttatatccaagaaataattgccatggccaatgttaaaaaactttttttttctatattttcttctaygagtttcattatttcaaatcatttaagtctttaatccattttcagtttatttttctgtatgatgtaagaaaagtgtttaatttcattcttttgcatgtggatgttcagtttttccaacgctgtttattcaacacagaatcctttcccgattttgtattcttgacacgccgcaaaagattagttnataat

SEQ ID NO: 243079 - DNA, 535 bp, Homo sapiens
caaactctatggctggtatgagggctaagtggcattcaaacccaataattcacattcaatgcctaggattctctctccattataccacaataccatcctacacagttaatcatcttggcttcttttatgactataaaatrcatatcaagtagaaatttggaaaaagaatgatagattcagaatgcactcatttattcaacatatattatttctactatgtgaaatgcactattatagttgctgaggctaaagcagcaaaccaaacaatatccttgatctcatggatatctcattggagtaagggaagcagctatttatatccataagccagacttgtgaatatatatgcaaactaagaagacagaggaggttctacttaaataggttttatagtaaagacctatctgagaatatgataattcagcacagagctgaagaatattaagaagccagccatgcaaatacccaggccgtgggaatgactagtgctaaggagctgagagagcgatactcttgatggatgcacttgagaggc

SEQ ID NO: 243080 - DNA, 595 bp, Homo sapiens
tggagtgcagtggtacggtcacggctcactgcaacctcaaagtcccaggctcaagcgattctcctgcctcagcctccacagggctaatggctgccgcagccaggtgctcactccagctggtttctgagttccccagcatcagatcggggaggagagaaggaggataagcaaaggcccggaggccagggtcgcagcagcccttctcttgtgcggtgccttcacaggttcttctgagaccctccaactctccattccctactgggccacgatcctggggctgtctcccctggagccccttggggccctgaatgcatctcttctggctgcttgcttatggctcttcctcagccccggggawtctgaagtcacttcctaccggggctgcctcactttctatttggcccctcttactccctccttcccccgaatggccctcaccattcatgggaagcatgacgagtcctttgtacccaattctgagtgcaagctgaccccaacaccacagagcaaccaacaagccaggctccccacttctcagccagacaccagcccactgtgtcccccgagcgtcaggaggcacccctacaccttggct

SEQ ID NO: 243081 - DNA, 455 bp, Homo sapiens
tatttatcttggaaccactgtgggtgattgcattattgtccttaatttcttatcctatcctgtatacatcctctcctagtggttctatagctctcccagtatctccatgggcagaatggcagaatggagtttcatgcttcttgaatttgggcttggccatgtgacttgttttggataatgataaatgggtagaagtgacagtaagctactctgagcctagacgcatgttttcacttgttatttagtacctctataatcactatgatatgawaaacatgacaaggtcagtgcactggtcaatgaaggctgaaacctgtatgatgtagggttgccttgaccaaccatcagagctgcagtgggaaacagctgccaagatacctgatgcagagccctcagctgagcccagcctacatcagccaaatcccagtagaccaaagatatgagcaacaataagt

SEQ ID NO: 243082 - DNA, 619 bp, Homo sapiens
tagtttagcttgataaggttatttaaaaattggtaatctgtatttgatatggatgataactcttaatagtatgaaatagttgaatgttcttaaaccattctgagtaaatgggagattgctgtctacttcttttcactctggagcttgccaaacttttaatagaaagccacgtgccttcttcagatggtcattataaaatagaaaaacttactgattcttagagaattcctgcttcacacacacaacttctgaaaagagattgtaggatcataagtggctcataacaaaattatcagagtgcctatttttgagggagagtccttgttttgatccttcttttccrtcctaagatgtctcctgtgaactagtccagggtgggaggctagtgaaagaacactaatgttctactcagcaggctcctgtcactgcccctgcccttgcatgcatttcccaaagattgtacttattaacttaattctgttggactcgtaagatgaaacatgcaaattcacatatgtcaatatatttgtttatgaaaatgtgtgtttccaggcaagaacccttcgagactgtggagaaaagaagtggtagccccattctaagttatccacctgccatc

SEQ ID NO: 243083 - DNA, 619 bp, Homo sapiens
tagtttagcttgataaggttatttaaaaattggtaatctgtatttgatatggatgataactcttaatagtatgaaatagttgaatgttcttaaaccattctgagtaaatgggagattgctgtctacttcttttcactctggagcttgccaaacttttaatagaaagccacgtgccttcttcagatggtcattataaaatagaaaaacttactgattcttagagaattcctgcttcacacacacaacttctgaaaagagattgtaggatcataagtggctcataacaaaattatcagagtgcctatttttgagggagagtccttgttttgatccttcttttccgtcctaagatgtctcctgtgaactagtccagggtgggaggctagtgaaagaacactaatgttctactcagcaggctcctgtcactgcccctgcccttgcatgcatttcccaaagattgtacttattaacttaattctgttggactcgtaagatgaaacatgcaaattcacatatgtcaatatatttgtttatgaaaatgtgtgtttccaggcaagaacccktcgagactgtggagaaaagaagtggtagccccattctaagttatccacctgccatc

SEQ ID NO: 243084 - DNA, 453 bp, Homo sapiens
agcaggctcctgtcactgcccctgcccttgcatgcatttcccaaagattgtacttattaacttaattctgttggactcgtaagatgaaacatgcaaattcacatatgtcaatatatttgtttatgaaaatgtgtgtttccaggcaagaacccttygagactgtggagaaaagaagtggtagccccattctaagttatccacctgccatcctacactctggatcttattgggattatcttaattcaggcttagattctggtttaaaaatatctttaaaaaataaatttaattccaagttagaacatgtaaaactgtgcaacacacaaatgtaataaaagagtcgctgtccatgttgccataggagggaggcaggacaaatgcggcaccttgaataagttttaccttttttcaccttatctcttaaagtgttactgaataacgaatagtttgagg

SEQ ID NO: 243085 - DNA, 578 bp, Homo sapiens
aatctgaccttcattgtatgtgatttgagctgatctgtgcaatctgcttgattctagttcactgatttctttttatgctggtcctgaactgctcatggaactgctcacctatgattttaaaaacactattctacaatacatatgctcaaaaattgctgattgaatttcttttactaaaaatcttctaaagccaagcacagtggctcacacctgtagttccagcactttgggaggcataggctagaagattgcttgagcccaggaattcccagtctgagcaagaaggcaagacactgtctctacatcaaatgacaaaatcagctgggcatggtarcatgcacctttagtcctagctccttgggaggctgatgtgggaggaaactgggaattgcttgagcccaggaatttaaggtggcagggagctatgatcatgcccctgcactccagtgtgggcaacaaagccagaccccatctctaaaaaataaaataaaatatcttctaataatgagctcccactttccttccctgtcagagaggcagggtggcatcgaacaggaagacttcatccaagcctagga

SEQ ID NO: 243086 - DNA, 612 bp, Homo sapiens
tgttgctataaaacagacgtaatatatgggaaaacatgaagtatatgttaataagacctcagtgaacaagaaaagtaaaaaaawatatatatatataaaaattctgttaagcaaaattatggagaaaggtctttgagttttaattgaaaaaattagcaaacattgaaaattgtttctttttgcagcatctttcaagtcctattactagttaaaatggtttatgattatttcaaaatatattttaaataattctctttctatcagaaaaaatgaatcctgtgtatataccatataaaataatagtatataatctactttacaatagtttcagagttgtttcattaaatcggttctagctgtttccattaaacttcctgagtttcattctttcctttctccatagaatcaatggccaaatcctttatattttttcctgctttttcatcttttacagtctatgcttggaacagaaaacacagtcttttgtttttggattcagtcctattgccaatactttttactttattattgctatagccaactagcaggcttccctgactacagtctatgggcctctattaacccgccttttcagagtctccacaatttgaa

SEQ ID NO: 243087 - DNA, 487 bp, Homo sapiens
agacttcagaataaggaatattaccaagrataaagatgactattacatagtaacaaaaaggtcaattcacaaagatgtcataaaacccctatatatatgggcacctaaaaacatagcttcaaataccagaagcaaacctgatataaatgagagaagaaatagacatacccataataacagtttgataattcaacattcctgtctcagtaatcaattgaacaagttggcagaagatcaataaggaaatactaaacctgaacagcaccagcaacttgcactaactcaggtttgcagaacaatccatgcaacaacaaaaaatgcataataaaaatttaaaaattatttgtatataatagcaatgaaaagttggaaattgaaattaaaaacagttccaacacagtttataacaatttatagcataaaagccaagaaatagttttaaatataaaatatgtgcatgattatatgcttgaaaccccaaaatatt

SEQ ID NO: 243088 - DNA, 452 bp, Homo sapiens
tacaccattaagttctggggggtaatttgttatgcagcaatagtaaccacaacaatctccttgaacctagtaagcatagtttctttaaatctttgctgattactctaaaacatgtggcctctatgggtctgtttctgttgtctattatttctgatgtttttaatagtgtgttatctgacttcttatgtrtatggttatttttgattatgtgttggacactgtatttataccatcatttgtaaaaataaaatgaagcctagaatgaggttatcttccttcagaaaggattcacattcgtgtcagccaggtgcctaggacagtaataatacaggatctcctacttcagttttgaggattgagtgagtggttcacccataactcctagggtgtagcccttttggggtccctgcttaaagagaggaagttcattaagttccacctcttggcaagct

SEQ ID NO: 243089 - DNA, 543 bp, Homo sapiens
tgacaccacctcagtaggggcaactcacactcacaaacactgcccttgtgtcagactgtcctaaccacgccatccatgatctcatttaccctgaagcctccatgagctgcctgagggaatgggggccccaagagatcaagggacttgtctctgaggggcacttccaggtgctctaccctgggtgggggtgaaagctctggcagggccctggcccagaactgaytcttccagctgctgctaggccgccctgcagcagccaggcagaggggttcatcccagggcacccctatctcctgtgcgacccaagctaagtatgtcaaactccagccccatccttcagagcaggaccctgagcagccccctcctgtctctggctgcactgcaaggacagcagagttggctgccagggctcgggccgcccccagggtgtgctgctgctcctctggactgccaaggctgcctgcctgctcacccttcacctctgggccagctgggcccgccagggagaggtgctgtaagcagggacaagcccaacttccctct

SEQ ID NO: 243090 - DNA, 543 bp, Homo sapiens
tgacaccacctcagtaggggcaactcacactcacaaacactgcccttgtgtcagactgtcctaaccacgccatccatgatctcatttaccctgaagcctccatgagctgcctgagggaatgggggccccaagagatcaagggacttgtctctgaggggcacttccaggtgctctaccctgggtgggggtgaaagctctggcagggccctggcccagaactgattcttccagctgctgctaggccgccctgcagcagccaggcagaggggttcatcccagggcacccctatctcctgtgcgacycaagctaagtatgtcaaactccagccccatccttcagagcaggaccctgagcagccccctcctgtctctggctgcactgcaaggacagcagagttggctgccagggctcgggccgcccccagggtgtgctgctgctcctctggactgccaaggctgcctgcctgctcacccttcacctctgggccagctgggcccgccagggagaggtgctgtaagcagggacaagcccaacttccctct

SEQ ID NO: 243091 - DNA, 543 bp, Homo sapiens
tgacaccacctcagtaggggcaactcacactcacaaacactgcccttgtgtcagactgtcctaaccacgccatccatgatctcatttaccctgaagcctccatgagctgcctgagggaatgggggccccaagagatcaagggacttgtctctgaggggcacttccaggtgctctaccctgggtgggggtgaaagctctggcagggccctggcccagaactgattcttccagctgctgctaggccgccctgcagcagccaggcagaggggttcatcccagggcacccctatctcctgtgcgacccaagctaagtatgtcaaactccagccccatccttcagagcaggaccctgagcagcccsctcctgtctctggctgcactgcaaggacagcagagttggctgccagggctcgggccgcccccagggtgtgctgctgctcctctggactgccaaggctgcctgcctgctcacccttcacctctgggccagctgggcccgccagggagaggtgctgtaagcagggacaagcccaacttccctct

SEQ ID NO: 243092 - DNA, 407 bp, Homo sapiens
gaattcatagataaagaagacagatggacagacagataaatagtagaacccttctgcttacatgtaatttcatatattcttaaaacatggagagatgggttttgttaccatagttggcaagtgaggaacctgaggcatttggaggttaagtaatttgccccaaaccacatcgctagaactgggcaggacaggcccccagctctgttgaccacaaattccagggatttcctctccagaccctccagctggttctactggaagcaaacaatgccgtgctaaccagcctcagctctttctcactgggatgctggactgctggaggtgagaatgctgagttttggccaaragggtaatataggcctgttaggatatgctagtgaggccagctcccatggtaacagcaggga

SEQ ID NO: 243093 - DNA, 612 bp, Homo sapiens
ggctctcttgatttagagtgggccctaagtccaattactaatgtccttatgagaagaggagacacagagagacagagggaagaaggccacctgaasatggaggcagagatagcagtgatgctcagatgcgtgccctccggaactgtgagagaacacatttctgttggtcgtaagccaccaagtgggtgatttgttatggcagccacaagactccgtaatttactgatttatttagtttattgtctacagacacactccctcccactgtctcatgaatctgagctccaagaggatagggttttttttttcttttgctcacttgatatatcccctgcgacgaacacagtgcctgttatcttacgggtgctgagtaaatatttgtcaagtggttgagtgaataaattagatgaaagcacacaggaggggtgggtcctcatgggaccgacttggctgcccaacatctgggcctgctgaatgcagcttagtgtggtgggaacttggcacctgtgcaggagatcacctggaagaggagaggaacagttggggtcccttaggaccagcctccccaggacaggtggcctcagtttatctgtcacagccttacctgtggac

SEQ ID NO: 243094 - DNA, 612 bp, Homo sapiens
ggctctcttgatttagagtgggccctaagtccaattactaatgtccttatgagaagaggagacacagagagacagagggaagaaggccacctgaagatggaggcagagatagcagtgatgctcagatgcgtgccctccggaactgtgagagaacacatttctgttggtcgtaagccaccaagtgggtgatttgttatggcagccacaagactccgtaatttactgatttatttagtttattgtctacagacacactccctcccacygtctcatgaatctgagctccaagaggatagggttttttttttcttttgctcacttgatatatcccctgcgacgaacacagtgcctgttatcttacgggtgctgagtaaatatttgtcaagtggttgagtgaataaattagatgaaagcacacaggaggggtgggtcctcatgggaccgacttggctgcccaacatctgggcctgctgaatgcagcttagtgtggtgggaacttggcacctgtgcaggagatcacctggaagaggagaggaacagttggggtcccttaggaccagcctccccaggacaggtggcctcagtttatctgtcacagccttacctgtggac

SEQ ID NO: 243095 - DNA, 471 bp, Homo sapiens
gtcatctttccctttaactctagccccaaaatgtctcctttctcaattatagtagctgctgtcttgactacacgtatagcatttaaccttaacattgtttcctagtttaatgatgatgtgtgtacaccctttctggtggcagggactctggctatattatatttccctaagacactagaatagtaaggggtggggctcttgataagctagatacaagcttattttcctttctttgggagagrcatgctcctggttccagaagcccccttgactcagcatctgatgccttaaacactatccctcagaggttccaggactaaagaattcacagaccacatgctctagtgttgatggttcctattgttagtctatctttatcatttataagttaatctaatacatcaatggggacaatttcccatacaaataattgtcctatttaaaattgaactcgattgcattaatctacag

SEQ ID NO: 243096 - DNA, 605 bp, Homo sapiens
ctgttcagctcctatgtgggaatgttactaacagacttgcttcttctttaatggcattatttaacatgattgcaaaaatgatataagcattgctctgactgcaattacaacaataaaaccagtcgagtattatttcagagctaacactactgaaagaataaaaattcaagaaagaacattgaggttcaaaaagaaatccaacacagatgtttcaaataaaagaactttaatgagggagttatatagagagttgtcgaaaatgttaaggtaagtagtaagggctgttgagwcagcctgacttggaagggtgagaaactgtccacaccggtagggctggaagggcagggagatgaaaatgtgctgttggagccctgtgagagcatcaggctggaggccagggtcacccagcaggagctgccatcactgagggacacagacactgcctcagccatgggggttgggggtgggaagggaactgtcccagataatctctctcactctcttttctctgcttttctctgcattctagtctttgatttccagccagtgagcccagggaatgaagtccataggtgtcagccccccttatgcacaagaagagaaga

SEQ ID NO: 243097 - DNA, 527 bp, Homo sapiens
gagaatggcttgagcctgggaggaggttgcagtgagttgagatcgggtcactgcactccagcctgggcaatagagccagaccttgtcaaaaaaaaaaaaaaagtaaaatgtawcctactgtgatcaaacagggcatttggttagaaataactgttgtgggatgatgtgtgattcctatgaaatggtctattaatggcttatttcaatactttcaaaaactttttaattttatcaaaaatctttaaagtcaataaatcttaaaatattataattgagctgattctcccaagtgccattttttttccttgaggatccttaagatctcaggatttttttttaaagctggtactagatgactgtggagatcagtttatatgagtcaaatataaatttatagatgtagctaacccccatttttcattaagccttaaaatagcctgagacctttttccctgaggtcagtccatggcagaaccattttttttcactttcacaaattttcataaccaaatgtagtttgattaatt

SEQ ID NO: 243098 - DNA, 447 bp, Homo sapiens
gggtctcactctgtggcccagactggagtgcagcagtgcattcatggctcactgcagcatgacygaccacctcggctcaggagatcttcccacctcagccttctgagttgctgggactgcaggcatgcaccaccacacccaattaattttttaattttaattttgcaaagatggggtcttgcttgttgctcgggctagtctcaaactcctgggctcaagtgatcctccctccttggcctcccaaagtgctgggattataggggtaagacaccacccagcctaaatgtgatcttttgctgctgtttaatgaaatgtgtcagggttaggaagatctgcacaactcagtgaacaaatattttccaaatggccaatgcatggtgttacaaaatcacacacaggtaaagatctatccacactgcgtgatgggccaggggattacaacacagc

SEQ ID NO: 243099 - DNA, 653 bp, Homo sapiens
ggattgcttgagcccaggagttcaagacccccctgggaaacatagcaagagcccaccccatctctaccaaaaaaaaaaaaatcttaattaaaacaaaattttttacatcaaatttacccaactgacatttaagtagctactaagactagaagataatttagctattttagtcattttcattgtttgccctgacttttaaatggttcagataaaatccaatcctgttaaatggttacatcaaacatttatattgcagagctgaaacccaaggacaaagatgtgatcccttcatactcaggcaagcaggaaacatttcaactctgctaaggaaaaggaaaaggaaaaggaaatgaatccacaggctggggagggaaaacagggaccaacygcaaataacacacacagttgtgagcacctccaaggtattccaagacgttattcactgctgagagaggaaatctgagttgacatgttattttctgagctggttattaatgcattggccagggaagaagcaggagcagccttcaatcccatcccccaattcaaagtcagtgtttcgtcaccatctctccttgctggctgggaggagaaggggaaaactaagattctgaaaaaggtgtttagaacagttaagcagaaaaggaacccga

SEQ ID NO: 243100 - DNA, 653 bp, Homo sapiens
ggattgcttgagcccaggagttcaagacccccctgggaaacatagcaagagcccaccccatctctaccaaaaaaaaaaaaatcttaattaaaacaaaattttttacatcaaatttacccaactgacatttaagtagctactaagactagaagataatttagctattttagtcattttcattgtttgccctgacttttaaatggttcagataaaatccaatcctgttaaatggttacatcaaacatttatattgcagagctgaaacccaaggacaaagatgtgatcccttcatactcaggcaagcaggaaacatttcaactctgctaaggaaaaggaaaaggaaaaggaaatgaatccacaggctggggagggaaaacagggaccaactgcaaataacacacacagttgtgagcacctccaaggtattccaagacgttattcactgctgagagaggaaatctgagttgacatgttattttctgagctggttattaatgcattggccagggaagaagcaggagcagccttcaatcccatcccccarttcaaagtcagtgtttcgtcaccatctctccttgctggctgggaggagaaggggaaaactaagattctgaaaaaggtgtttagaacagttaagcagaaaaggaacccga

SEQ ID NO: 243101 - DNA, 565 bp, Homo sapiens
aggctaataggctagaaagacgcagtaactcaggaaaatttgcatttttgtggttagagagcaaacccgtgtaaactatgatataaatgtgaatgaaataataagtgcgtttgaagctttagaaggtatgatgggttgaattctaaagatttaaatggaattaagaaagaaatatataaaattttttatcttctctcatcctttttttcctgaaaggaaacaaaatctaaataacagaaataagmccaaaaaaaaaaaaaaaaaagaactcaacttttcaagtgaaggaaatatgcaagacatagttatagaaatgtctctaatggtttgaatttttgcagggtaatggtgcacattcccagacacattatttaatcacgattaccttggatggagtcaggtttttcttgacactgtttgcttctttccatggtatctggggcaaacatcttaaactggatcttttacttcctaaaaataataatcacaggtttttacatcccttttcatttctgctactaagtcaatgtgaatccttacattgcatctgcagtttgactaggac

SEQ ID NO: 243102 - DNA, 384 bp, Homo sapiens
aagctgtgaccttggatgttatttttgctggagagagccaacatgatatggaacaaattataacactgagaacatttctcttagaaaacagagacagatctgtggttttaatagattagcaagtaagtgtgagctctgcatgccaagcacaaggaaaacaacaacttactagatcatcagaggaaactctggagcagcagcacacagtaagggctgagctgtgtttcttsaaaagctacagaatgtcagaggaaggaatgtgtgagtcatgaaatcacaggtagcatctaaatggcattggagaggcaaaggaggagagggggttacgagaaaaacattttagggtcttggctgggataaaactaagaggctttgtggggaaat

SEQ ID NO: 243103 - DNA, 325 bp, Homo sapiens
tttcatcctgaaatgcacatttgatttctctacaactgacactgtttaggagccctattatatactttcataagctcttacccttcttcggttatagaagttgcttgcaattcttcgcatgatttgatgggtttccttccctactggatggtgagattcatgagggctgagctctgtgagctttgctcgtgttgctggagtctcagccactgacacagagcagggccccagtaaacamtgttgcatgaacaagtgcatgagatccttcttcacaaggacaaagtaggtacctgcctgccttgagtgatttaaagcattttaagat

SEQ ID NO: 243104 - DNA, 491 bp, Homo sapiens
cagaaagattatcaatatcatttgtcattaggaaattgcaagttaaatcagtgagataatactatatacctgttagaatgactaaaatctaataaccgataattccaaatgtttttgagaacttagaaaaacaggaaatgtcattcatttctagtgggacatttgrcagattcttaccaagctacaaagtcccagcattcacatttctagatatttacccagttcttttgaaaatctttatccacacaaaaacctgcacaagaatgtatacagcacctttatttgtaattaccaataaatggacataacaatggtgctcctcaacagatgaactgataagcatatttgtgtaaaaccatacaaggaatattattcaacaataaaaaatgtgcaatcaatccacaagagcatatgaatgaaacttaagtgcatatttataagtgaaaggagacattctgaaaagggtccatactgtattattacaattatat

SEQ ID NO: 243105 - DNA, 491 bp, Homo sapiens
cagaaagattatcaatatcatttgtcattaggaaattgcaagttaaatcagtgagataatactatatacctgttagaatgactaaaatctaataaccgataattccaaatgtttttgagaacttagaaaaacaggaaatgtcattcatttctagtgggacatttggcagattcttaccaagctacaaagtcccagcattcacattyctagatatttacccagttcttttgaaaatctttatccacacaaaaacctgcacaagaatgtatacagcacctttatttgtaattaccaataaatggacataacaatggtgctcctcaacagatgaactgataagcatatttgtgtaaaaccatacaaggaatattattcaacaataaaaaatgtgcaatcaatccacaagagcatatgaatgaaacttaagtgcatatttataagtgaaaggagacattctgaaaagggtccatactgtattattacaattatat

SEQ ID NO: 243106 - DNA, 390 bp, Homo sapiens
ggccacaaggctgcagtctttgggcaagccctggggcttggctagactcagagtcaatggacttggtggggcacgtgacccagtgatacacaagctgtggtgtccaagggagtgcttgcatcacccctcccccaacttcagccaatgcagcgtgggaagagactccatgcccctgcaaaatgaagaggaaagagtactctgccttgcaagagtctctgcttgagtactagctcagttacagtaaaataaagcacaaagcagttttctgaaraccctattgctaagccctagctaccgaacggcttttcgtgtttgtgatggagtttcacttttgttgcccagtttgaagtccaatgagtgatctcagctcactgcaacctatgcctccca

SEQ ID NO: 243107 - DNA, 390 bp, Homo sapiens
ggccacaaggctgcagtctttgggcaagccctggggcttggctagactcagagtcaatggacttggtggggcacgtgacccagtgatacacaagctgtggtgtccaagggagtgcttgcatcacccctcccccaacttcagccaatgcagcgtgggaagagactccatgcccctgcaaaatgaagaggaaagagtactctgccttgcaagagtctctgcttgagtactagctcagttacagtaaaataaagcacaaagcagttttctgaaaaccctattgctaagccctagctacygaacggcttttcgtgtttgtgatggagtttcacttttgttgcccagtttgaagtccaatgagtgatctcagctcactgcaacctatgcctccca

SEQ ID NO: 243108 - DNA, 519 bp, Homo sapiens
gaattcctggcgtcaagcgatcctccggtcttggtctcccaaagtgctgggattactggcgtgagctacctcatttggccaaattttaaataagaaatgctaacgtttactgttactgctgtgtgctatgcactttgctaagcagctttaaactgtggagttttcttttcatttaaacatcacaacaattaagtgaggtgagtcctgcttttattctcattttacagagacagaaaggttaagttcygatctcaaggttacacaggtggcaagtggtggagaagggatttgaacccaggcaatctgactttagggcctattctcttatctactatgctttaacactcccctgaggtaacacctttctgggaaactgtcctattgagaactttactttttatgtgttaccttgtgtgaaggcattaaaagcttgtgcctgtttgggattttatagttgcacctttctcccgctgtaaggggtttgccattgtattacttaagtaacccagttgctgaaat

SEQ ID NO: 243109 - DNA, 401 bp, Homo sapiens
accaccttaatgaagtgactaaaacttaagatcaaggagctggtatcaagtaccccctgacttgatgcagtaagagctatgcaccatcacctttgtttaaatcattgccggaaatgaagaaacaatcagagaaatcagaatgtggagcgttctttaaaacccttggyctggattcttaaaaaagacgctgaagtatttatttaggggtgaagtcaagatgtctgcaacttactttcaaatggtttcacaaaacacagagatacagcaaatgtagcaaaacgttaactattgatgaacctaaatgaagagtacacaagtgttaattttaatagtcttttaattttcctgttttcaaagtgtagatttttaacagttaattgataataaaatatgactctgaa

SEQ ID NO: 243110 - DNA, 564 bp, Homo sapiens
aagcattaaatatttataaagcagccaatctttggtagycatcagggagtgtttctgtatgaggcgtgtcaggctttataattagttatgggacttattattatttgagttttttgccatgctattttctgcctgtgaaggaccattattttaaatgtgtaataagaagagaaatattgtttgagaaagtggtcacttttcagtttttaaacttttgaataataatttatgtgacagactcaatctagtagtgactttgaatttttttaaattacattttcaaggatagtgttacaccaaaataaagatcatgaactttagtgtaagataaaaataattctaaaggtaggtatcttcatctgtcttaaaactttctccattaggaataataaaaacaaaataaaagacacaaagcaaacctcacattttcttctggaaaacactgtacttttgattcttagcagaaatggccttgtgaatacttacggcatttgtaaatataactaagaaagggcttttttttttttttttttttcctgaaagaaagttgctacattaccatca

SEQ ID NO: 243111 - DNA, 564 bp, Homo sapiens
aagcattaaatatttataaagcagccaatctttggtagtcatcagggagtgtttctgtatgaggcgtgtcaggctttataattagttatgggacttattattatttgagttttttgccatgctattttctgcctgtgaaggaccattattttaaatgtgtaataagaagagaaatattgtttgagaaagtggtcacttttcagtttttaaacttttgaataataatttatgtgacagactcaatctagtagtgactttgaatttttttaaattacattttcaaggatagtgttacaccaaaataaagatcatgaactttagtgtaagataaaaataattctaaaggtaggtatcttcatctgtcttaaarctttctccattaggaataataaaaacaaaataaaagacacaaagcaaacctcacattttcttctggaaaacactgtacttttgattcttagcagaaatggccttgtgaatacttacggcatttgtaaatataactaagaaagggcttttttttttttttttttttcctgaaagaaagttgctacattaccatca

SEQ ID NO: 243112 - DNA, 569 bp, Homo sapiens
  misc_feature (1)...(569): n = A,T,C or G
attactacaggttaaaaaaaaatgtctrttttaaagatttagagatagattcaaatagctagaggagggtctgagctatttttttattacaataaggcacacttttaaatgcctaatgtccttttgttttaggggggcttgtttgttgttttgtttgtttgttttgagacagggtctggctctgtcacccaggctggagttcagtggtgtgaccttgcctcactgcagcctcctccaacccttctccacacaacttncccaatacccccatccccaccccaggctcaaacaaccctcccacctcagcctccagggtagctgggactataggcacgtgccagcatgcccgtctgattttttgtatttttgtagagatagggtttagccatgttgcccatgctggtctctaactcctgggctcaagcaatacactggcctcggcttcccaaagtgctggggttacaggcatgagccaccacacccagcctcaatgtctcttttttttaaatctcaaaacctttatttttgcttctgcttttctttctaagtttacctcaggaaaaaaaaaa

SEQ ID NO: 243113 - DNA, 437 bp, Homo sapiens
atgatttgtgctgacagagccacatcatattttagggagatgacattgctattgatggttccttctaatctattcccagtaacatgctcatctgtatgttttccccaggcaccagaagaacaatctcagatccttaaaacagtatgtcattcctttccacacatctcatatgcacatatattattattatttaacgtttattaagtaccaacagtatgctaggcacaatagacatagggggccataaaaacatatttaacgcatcaaaaaccacaataaaaggatgctgtgtrtgtgacagaagacgataaaaatctctgcaattcatagttcaagatgaaatgcaccccaagtcccagagaagccttggaacagtgtggcacatcaaaaaaggtattggaatttttattcagccagcgtaaggaaggttatgcata

SEQ ID NO: 243114 - DNA, 440 bp, Homo sapiens
cagttggttctgtaatgtttttagaattaatcccttcttcagaagtagattaataaagctatttttaggctttactgctatacaggctttattttcatgtgatttaagacttgtaaccatttgtgtggaagggtttggacccatgagtaktcattaactctcctgctgaaggtcaattttagcagaaaatgagaggtggcagatgtagaatattggagcgcacttgtaccaggagttaggaggcctgggttcaggtctttgagtttttatggccatgtgactaagtcatttaatttcgctgaggttcaatatttttccatgtgtaaaatggggaaaaatgtcttgcctctctgatgaggttatggagagggtcatatgagagacagtggaaaaagatatcttgaaactccagagtatcctttaaatttagagttttgtta

SEQ ID NO: 243115 - DNA, 549 bp, Homo sapiens
atttgtgtgtgtttctagactcaaattgccaccttttatagagacaccagtaatcagattaggggctcactcctcatatcaatgaattatatctgctataaccctatttccaaatagggtcacatttcccattaatcagaattagtgacattttgccatcaaatttatatttcctgttcagagtggtggctatacggcagcatactgataccactagaaaaataaatgcaataatactgtaataatagccactaccatttattaagtactagctttgtgtcaggaaccgaacacagttcggacygaaatagaaatttttatcttcacgtgaactttatatataaacagactcctgagccccagagcaagagatgggctatactagcctctttacttcctgctcacactagtgaaggaggtggcttcccttttggtccctcacctttcctgcccattcccctgccccagtactgcctcctcaaacttctccttagctcctattttatttctcctttgcttctgcaagaaggagccaagccctgctgctta

SEQ ID NO: 243116 - DNA, 574 bp, Homo sapiens
tctccctgggagggaaatggctctgactaggtttctccctcagactctgtccacactctaggatgctggaggacagcgtcctggtttctgtcagkcttctctgttaagtctagtctctctctatctcttctccttctctcgttcaggtctctaggagacctcggttttaaacgggtataaaaaattgtaataaactctgtgagtgagtgagtacatgtggagttcaagggcttgtgcttgaatttctagtttgtagctccatggcgaaagctatggagtttcagagggccctcacctgcggttccgtggcgacctcataaagcttagggcagcatcgggcatagctggatccgagccgggggtttataccggcctgccaatgccaggaggagcctaagtccccgcaaggggagcagccaggcaggcatctgactgatcccatcacgggacccactccccttgtctgtctataaaaattgccatacttgtttatatacccccgtgtctattgtcctgtttggtgtctgtctaaatttcgtaggtcaggtcatcgatactgcccaagacgactggg

SEQ ID NO: 243117 - DNA, 574 bp, Homo sapiens
tctccctgggagggaaatggctctgactaggtttctccctcagactctgtccacactctaggatgctggaggacagcgtcctggtttctgtcagtcttctctgttaagtctagtctctctctrtctcttctccttctctcgttcaggtctctaggagacctcggttttaaacgggtataaaaaattgtaataaactctgtgagtgagtgagtacatgtggagttcaagggcttgtgcttgaatttctagtttgtagctccatggcgaaagctatggagtttcagagggccctcacctgcggttccgtggcgacctcataaagcttagggcagcatcgggcatagctggatccgagccgggggtttataccggcctgccaatgccaggaggagcctaagtccccgcaaggggagcagccaggcaggcatctgactgatcccatcacgggacccactccccttgtctgtctataaaaattgccatacttgtttatatacccccgtgtctattgtcctgtttggtgtctgtctaaatttcgtaggtcaggtcatcgatactgcccaagacgactggg

SEQ ID NO: 243118 - DNA, 575 bp, Homo sapiens
tctttttttttggtagagacaaggccttgctgtgttgcccagtctggtattgsactcctggttcaagcaattctcccgtcttggcctcccaatgtgatgggattacagctgtgagccactgtgctcaaccctctttcaaatctttacatccactcctcaccaggctatccctttccccctttcctgcttttccctcatagcacttatgacaattagactattattattatttctttattttgtttcttgtctgcctttcctctgtataacgtcagctcgatgaagacagtgatctttgtctattttactcactacagtggataattccagagcccaaaactcaatagtaagtggttgaataagtgaacaaatgagcaagtcagtacattatctggaaacaagcacatctttccttggataccatgatcctcttagaacaccagatgattaaaatctattgttagaggacaagaaaatccagcctcctgtgtttccatggaacaactccctgttttgtccagttgcttgttccttccacagggccaagaaatactgtccctttctccagcccatat

SEQ ID NO: 243119 - DNA, 634 bp, Homo sapiens
cctgtgaattttgaattctgcatacaaaatgtactttttggaataaaacattgtatgcttccaaaactgttgatagcacttccatgtttgttctgttcttaatgatatttggataacattaaagtagatattgctcattcagctaacaaagaccaaaagctaaatgatgacaagtaaccaattttggccttatatcatggctgaagccaaaatttgatgcatctctactggaaacttatgcagacttggatgttagccttgtagggactaaagactaaagaagcaaaaaaaaaaaaaaaaagaagcatactccaccccatctttttgactacagtagagagtagacatgtgcatagtaagtaaataaatgmtcagagtttcaggtgatcatcattgttaccagagaatgacccatgacaagctaaaagcaacactgaaccagaggggtgttccaggcagaatgtgtataaacttgaatgcataaaactttctgttagactcagtttagagaaagtgcttcctttaaaggggaaagaaaaaggacagcaagtcattgtattaaagatcagattattttggttatattttaaccgaattcctaattgttgaatatattgcatatggacaaaaactc

SEQ ID NO: 243120 - DNA, 553 bp, Homo sapiens
tcatccttcttggatttgcattttgcagtgtaagcaggtggtaaatatgtgccttcaggcatcccccttgggtacrtaatcctatattcctggcctgagttcagttccatagattttatctcccagagatatttggagagataaatatataacaacgaagaaataaagaagagtttcttccatagacaagtttagaactgcatttggagaacagtgacagctatccagtactcccatgggctaactgacttagaaaagacattaaaaggaaaataaatgaaattgagaaatttcagtaattatttctagaaattcctctacatcatagaccaccagttggcaagtgcttctgttagagagatagaatggaggaagacgttgtgatacagaaacctgtagctgtccctttgaaattcactctttccttactaatagaaataggagagtattggctgaccttccttatagttgatgatggccatttgacaccgttctttccagtgagatataagtgaaaattatgctgccataggggcaggaaaaataataattt

SEQ ID NO: 243121 - DNA, 553 bp, Homo sapiens
tcatccttcttggatttgcattttgcagtgtaagcaggtggtaaatatgtgccttcaggcatcccccttgggtacataatcctatattcctggcctgagttcagttccatagattttatctcccagagatatttggagagataaatatataacaacgaagaaataaagaagagtttcttccatagacaagtttagaactgcatttggagaacagtgacagctatccagtactcccatgggctaactgacttagaaaagacattaaaaggaaaataaatgaaattgagaaatttcagtaattatttctagaaattcctctacatcatagaccaccagttggcaagtgcttctgttagagagatagaatggaggaagacrttgtgatacagaaacctgtagctgtccctttgaaattcactctttccttactaatagaaataggagagtattggctgaccttccttatagttgatgatggccatttgacaccgttctttccagtgagatataagtgaaaattatgctgccataggggcaggaaaaataataattt

SEQ ID NO: 243122 - DNA, 373 bp, Homo sapiens
gccaaacttttatcttggagaaaaataatatatagaaaaatcagaagaaagcaaagtttatataatatatatgtgtgtacctatataatttctctatgtgtgtggatgtacatatgtatatatgtgtgtggttatatatgtgtatgtatatgtaaatacacatatatacatatatacacaaccacacacatatatatatttacatatgtaggcggccctttgtatttttggattctgcwtccatgaattcaattatggatgcaaaatagttgaggaaaaaaattgcatctgtattgaaaatgtatagactttttcttgtttgtattccctaaacaatatagtataacaactatttacatagcatttacattgc

SEQ ID NO: 243123 - DNA, 581 bp, Homo sapiens
tcccaaagtgctgggattacaggcatgagccacygtgcccagcccttgaatgctttttagcatttattgaaatgatcatatggtttttgtcctttattccattaatgtgatatattgattgatttgtgtatgttgaaccatacttgcatcccagagataaatctcatttgatcattataaatgacctttttaagtgcagttgaatttggcttgccagtattttgttgagaatttttacatctacggtcatcagggatattgttccatggttttcttttttgtgcgtgtctttgtctggttttggcattagattaattatgacctcacagaatgcatttggaagtatgctctactttttaatttttaaaaagagtttgagtagaattactattagtacttctttaaatattttatataattcatcagtaaagcaatcaggtcctgagcttttctttgatgacagactttttattattgcttctatcccatttgtcattattgttctgttcaggttttttatttttcatggttcaaccatggtaggttgtatgtgtctaggaacttatttatttcttcaaggt

SEQ ID NO: 243124 - DNA, 549 bp, Homo sapiens
gagcttcttgtggcagcatatagattttatctcatttacagtcaatgttattgataggtaagaatttgcaactactattttgttacttgttttctggctgttttgtaagtcttctcttattttcttcctttgttacactcttcctttgtggataagtgattttctctgagarcatgtttaattcctttctttttctttttcacataggtttctattataggtttttgctttgcatttatcatgagtcttacaagaaatattttatagatataacaaattaaattaatgacaactcaactttgattacaaagaaaagaagcaaagaaaaaattgttaaaaaaatcctgcatactttaacccatcttcctaggaagttctagggtacatgtatacaacgtgcaggtttgttacatatgtatacatgtgcctgccatgctggtgtgctgcacccgttagcttgtcatttactttaggtatatccagcattagagtattcttaatctgtctgtgtacttacttttatcaatgagctttattctttcagatgat

SEQ ID NO: 243125 - DNA, 549 bp, Homo sapiens
gagcttcttgtggcagcatatagattttatctcatttacagtcaatgttattgataggtaagaatttgcaactactattttgttacttgttttctggctgttttgtaagtcttctcttattttcttcctttgttacactcttcctttgtggataagtgattttctctgagagcatgtttaattcctttctttttctttttcacataggtttctattataggtttttgctttgcatttatcatgagtcttacaagaaatattttatagatataacaaattaaattaatgacaactcaactttgattacaaagaaaagaagcaaagaaaaarttgttaaaaaaatcctgcatactttaacccatcttcctaggaagttctagggtacatgtatacaacgtgcaggtttgttacatatgtatacatgtgcctgccatgctggtgtgctgcacccgttagcttgtcatttactttaggtatatccagcattagagtattcttaatctgtctgtgtacttacttttatcaatgagctttattctttcagatgat

SEQ ID NO: 243126 - DNA, 650 bp, Homo sapiens
gaagacaagaaaataaatgtatacatgtgacaacaaagacaaatattatgaagtaagaggaaaaggagaagggaaaggagatacacagcattcatctaattccccactttgggcagatactatgctaggagcttcagtatcatatttcattcccatggaaatgctatgagctgggtacatttattaacaaatatctctactcttcccaaaaggaaatggaggcttgaacaaattygcatggctattaagttgcagagccagattatgaacagaaagtgtgtgcctttaatcactacactactttggttcacaagattgcaagataatctgaggcaaagatgtggtaggggctaattttccttacttttagagagaaggtattattctctagaggtggagatgagaaagggtatgctcaagaagtgagacattagggaaacggtttattgaaaggtagtgtgggtgcttgattgatgtatgattttaataactgtgctatctagtgtgaaaatcaaggaaagctgatggctcctctctgtcctccccccttggcttttctttgatctcatataatggatagggcaggtcattgaatcatagttccaggaagtgaagatttaacaggagttatgtttaagtgcaaatggaca

SEQ ID NO: 243127 - DNA, 650 bp, Homo sapiens
gaagacaagaaaataaatgtatacatgtgacaacaaagacaaatattatgaagtaagaggaaaaggagaagggaaaggagatacacagcattcatctaattccccactttgggcagatactatgctaggagcttcagtatcatatttcattcccatggaaatgctatgagctgggtacatttattaacaaatatctctactcttcccaaaaggaaatggaggcttgaacaaattcgcatggctattaagttgcagagccagattatgaacagaaagtgtgtgcctttaatcactacactactttggttcacaagattgcaagataatctgaggcaaagatgtggtaggggctaattttccttacttttagagagaaggtattattctctagaggtggagatgagaaagggtatgctcaagaagtgagacattagggaaacggtttattgaaaggtagtgtgggtgcttgattgatgtatgattttaataactgtgctatctagtgtgaaaatcarggaaagctgatggctcctctctgtcctccccccttggcttttctttgatctcatataatggatagggcaggtcattgaatcatagttccaggaagtgaagatttaacaggagttatgtttaagtgcaaatggaca

SEQ ID NO: 243128 - DNA, 598 bp, Homo sapiens
ggggaggtatatattatataaaacagaagcgaattctagttagaacttgtttttcatcatttgtaaattttcagctctgaatgaattcagtataaaatatgtcttgaatcattgggttctatgtatgagtcaaatgtccttgaaaaccatattatgctcttaggtaaagaccatgatgctaagccactatattgcatctgtattatttgcatagttttggcattttataaaagtagacaagtcacaatacaaacccctggcaatgttaatgcattaatatttggggaatggaaaaggtattccctttggtaggtattactatatataaagtttattttraatattttatagttgcaaagtactgtttatagaacagttagaaaattgttgcaatgcattttggttaataacaaaactaatgatagataacatttctaaatcagagatggggccaaagaacaagaataccatattctgtgtctctggagctatgcagcgttcagtgagtgagtaaaaaagttcttgggttttataattataatcttaggatgcctacatattttatcaccttatgctgatattaaggttttttttgcat

SEQ ID NO: 243129 - DNA, 491 bp, Homo sapiens
aacttctaaatataattttcagtaaaacttcctctgaaaggtttcatacaatatcagagtatattgtagtatgtaaagaaaataatattaaaataaatttattttatacagaaattggactttatcrattagggattattaacaggaaagttaggaagagagatgcttaataaccaagacaactcattatccagaacaggtccaggtgtatagtggacactctataattgtttgttgaatcaatgcatgaatgaaatgtttagtagtatattctaattttcgtactgctactaatatccaagttagtatggtatttaggacaaagatgattctcagaaaattcagccttctttagttgtgtgactagggtaaaatgtttaatttctatgaaactttgtttctttgaaagcatatgaaggataatgcaactgtagtagtttataattgctactataataaattactacaaatttagtgaatttacaatgcaa

SEQ ID NO: 243130 - DNA, 559 bp, Homo sapiens
atagatatatactttctctttaagaaagagaaatcatttttgacatatatttttggaaaagcaggcactaaactgatgatctcttaggagagtggagatgggattaatgggaatgtttattctcttaatgtccaaattttctttgttgcttttttttaaaaagtggtgtttaattttcttttttcttwtctttctttctttctttctttctttctttctttctttctttctttctttctttctttctttctttcttttttttgagacacggtcttggcaagatcacagttcaccacagcctccatctgccaggctcaagtgatcctcccacctcagcctcccaagtagctgggactacaggctcatgccacgatgtccaactatttttttttacttttggtacacataaggtctcaccatgttgcccaggttggtttcaaactcctgagctcaagcgatcctccagcctcagtctccctaagtgctgagattacaggcatgagccactgcaccagccagcatttaagattcttataactaaatagtacttttaaaagaa

SEQ ID NO: 243131 - DNA, 489 bp, Homo sapiens
tctctttaatgagaccaagaaaatggcttcagaccctggttgaaccagccagttctccttttgatggccacaaaccaaatatgggcagtgtaatgatggtatgactctggcctgactaatatttttgtgargagaatgccattattatggtgaccatattttccaaacaaaaaattgggaactttttattcagaggaaagaggggcagaatatttgaaattgagactgacccaggaaatccagaatgaatggtcttggtagctattgatcacagcataaaggaaaaagaatgtgaatgaaccagtgcaaatctaattggttgctagaaaagtcaggagcctcaaaatgaatgacttgctagtggtggcaaagaatcaccatctacatgcaaagaaaacacattagatgccctgagaatccagtgactgtttttctcagagtttttatttttctgtatttttgccgagtacatttagtagctaccatgtt

SEQ ID NO: 243132 - DNA, 489 bp, Homo sapiens
tctctttaatgagaccaagaaaatggcttcagaccctggttgaaccagccagttctccttttgatggccacaaaccaaatatgggcagtgtaatgatggtatgactctggcctgactaatatttttgtgaggagaatgccattattatggtgaccatattttccaaacaaaaaattgggaactttttattcagaggaaagaggggcagaatatttgaaattgagactgacccaggaaatccagaatgaatggtcttggtagctattgatcacagcataaaggaaaaagaatgtgaatgaaccagtgcaaatctaattggttgctagaaaagtcaggagcctcaaaatgaatgacttgctagtggtggcaaagaatcaccatctacatgyaaagaaaacacattagatgccctgagaatccagtgactgtttttctcagagtttttatttttctgtatttttgccgagtacatttagtagctaccatgtt

SEQ ID NO: 243133 - DNA, 530 bp, Homo sapiens
acaattagacttattaaaataatatctgctaaaaggaaagcttccaagttggtttgaactccaaattattcaaaatataatatccacattttttccctgacctcccttttctaatcctattgaactctgtcttaattttgtataaggtttattcatcttgatcagaagcttaatagactaaactggaattactatatttaagatatatggctctgaaggggactaaaacttgttttcttccttagatttaaaataaagtcaatttcaatttaattggttaatttcaagggcttttaaattttttctttcctggggagggcaagtatgtttcagttgtaaagaagtaaacaaaagccattctctttsattaagaaagtgtaaggttaacaaaattaaagcactcacatctgggtgaattggtctctcagaacaaaccagctatttctacatgacaacaatagtttgcaagtggttgttttgacacctccccatctacagtaccaagaaaatataataacttgaggaaataa

SEQ ID NO: 243134 - DNA, 583 bp, Homo sapiens
cataaaaacttgctcacaatgcctttcacagaattatacacaatagccaaaaagtgaaaacaactcagatgttcatctaccgataagcagaggactaagatgtggtatatccawatggaatattatctgccaagaagcagcaatgaagtactgatacatgccacaacatggatgaatcttaaaaacattatgagaagtgaaaaaagcccatcacaaaagactgtatattgtataatttcctgcatgtgaaaagtccagaataggcaaatatatagagactgaaagcagattagtggtcagctagggctagggaaccggagtaattggtgtgtcagagggtaatgatgatcaaaaggtgcagactttctttttggggtgatgaaaatgttgtacaattgatagtggtgatggatgcaaactctgttaatactaaaagtcgttgaattgtacacttcaaatgagtgtattgtatggtatgtgaactgtgggagcgggctcctgctgttttatgaagtatcttcaagaaaggtctcactgacaaagcgacatttgagcagagactgcaaggaatggagaaagtaag

SEQ ID NO: 243135 - DNA, 395 bp, Homo sapiens
ctgtgtcgctcaggctggagtgaagcggtgtgaccacagctcactgcagcctcaccctcctgagttcaagggatcctcccatttcagtgtcctaagtagttagaagaggtcttgtttttgtttgttttgtttgtttttttttttgagacagaggctctgtcatccaggctggagagcagtgtcatgatcttggttcactgcaacctcagcctccagggtagctgggattacagctgtgcgccaccacccctggctaatctttgtttgttttgtttcagtagagacagggtttcgtcatgttggccaggctggttttgaacccctggcctccagtagtgatccacrcatcttgaactcccaaagtgctaggattacaggcgtgagccaccgtgcca

SEQ ID NO: 243136 - DNA, 559 bp, Homo sapiens
ctgttctcaggaggcagaagcagaaactggggtgcttgaggtgcacctgagactgaacaaagctggcctctgcagctgcagatgaactcagaggtcacagcaccatcaatgtctgttacagctttccaagaggatccagtgaaatcacatttgcaaagccaggtatcacaagtgctcgaaaaatgctaggagtgtcacccactcagtgctgctttggggagcttcagtttcactcctcactttcgagaagtgcaaacaattctgttgacactttcccatccttgcattctctctccttcctcttcttctcactctgtatgccctcaaataagaataaatcttgtctggatggcaataagaagcaaatctaatcagatttgggagatgtggtcaaagctcagagaataaacggttatacagatcctttcccgttccgtttctgtttccagcctgccatttttacctcactgcaaagagaaaatggaattgatggagatataggaaaaatatgtatgtatgtgtgtatagatacaaacmaatatatctatatatatttaca

SEQ ID NO: 243137 - DNA, 619 bp, Homo sapiens
atgtttctatcatctatctccgtatttgtagatttatgcatgtatccatctataatttgtcattcatcatttataatagaatacctagcattgttttcgtggaattcagaaaagcatatagttgtaaaaagctggatatttgcrttactgatttctataatttacataataaattacaactacaaatatatttatttataaatatacaatatacattatacattgatttatcttctttatttttttatgtttagtaatcttatggctttagatttttttattaaaaacttttgaacaatccccaatattaaattttgcattttcttccttttgatgaaacaaagttgataaacaaaatgaaaatgccattacttattgaaccacaagatagaaatctccactcccacaagattctggaattgaagatttagttcagagattgtttgctccaatacattttttctggagatgttatatgttaattttttaaactgcagctgcgaaacatttactgctctaagaaattaacaggctgtttacttttaaaataaggtgtgaccccagtagtcagtaagattaacaaatgagtttgcagttatcttctcagaaaattaaccag

SEQ ID NO: 243138 - DNA, 587 bp, Homo sapiens
tgtttattttatgttctttgagggagatactgtttttatccttatttaacaatgagaaaacaggcrcggaggcaaagctagcatttaaacacaggcattctgactccggagtctgtgttttaaactgctatagggggtctttgatgagaatctcttggctggagggatttgcgttcattccacttttaagaccacattagaacttctttgctttgcccctatccagtaccacatagtctatgccatctgtgcctggtgtagggtgacccattgcccccttttatatgaaattgagggactgccaaaaatgggaaagccccagccaactcaggatgtgttgctcaccctactattctgccatccaaaaattcttactgtgtcccagagtagggtctagggccatggtgattcaaaaaagtatgaaactttgtgagattcacttcacctctagtttgttaaattgggccctctggtgttaggtatggcctttaattccttggaagatactagttgtggttcactccgttttataggtatggaaactgaagtgcagagaggtgaagtaaatggtagaagaggaaatggca

SEQ ID NO: 243139 - DNA, 473 bp, Homo sapiens
actttacgtttgtaacacatcgtatctctcaactggtcatgactttgctggggagagtgtttagatgagatgattcagtcctctcctctctagagttctgccttctaagatccagttcttgaccataaggagatctgcactttgatttctgttcattatcctatatacaaatgtcctttcctcagagaggctacctttgacctttatctaaagaagcctccttcactccccaggcccccaaaactttctactcckaagctgttttattttcatcatcacgtttgtcaccattgaacattatcttgttcatcttgttttttgctctcttcctccaccaggatgtatgcttgccatttgtattcatgaaagtgggatagtggctctcttgtcacagtgcatggcgtataggaaacagtaattgttaaataaactactgcatggatgaaagttgaatacaaaaattagctgggcat

SEQ ID NO: 243140 - DNA, 473 bp, Homo sapiens
actttacgtttgtaacacatcgtatctctcaactggtcatgactttgctggggagagtgtttagatgagatgattcagtcctctcctctctagagttctgccttctaagatccagttcttgaccataaggagatctgcactttgatttctgttcattatcctatatacaaatgtcctttcctcagagaggctacctttgacctttatctaaagaagcctccttcactccccaggcccccaaaactttctactcctaagctgttttattttcatcatcacrtttgtcaccattgaacattatcttgttcatcttgttttttgctctcttcctccaccaggatgtatgcttgccatttgtattcatgaaagtgggatagtggctctcttgtcacagtgcatggcgtataggaaacagtaattgttaaataaactactgcatggatgaaagttgaatacaaaaattagctgggcat

SEQ ID NO: 243141 - DNA, 290 bp, Homo sapiens
ttattacaaaataaagtctgtaatgatgagttacagttggatataaacctattaaaataatgcattatatagattaattccctatgtatgcattattcaagtgcttttaatacagttccccccctttggggagtgggatcttaaaayaaaaaggagaaaagttttcattgctatgttgtcctatatatcttgtcaaattatgcaaaaaatacatgtagacttgtttcacaaacataactagatagcataattacttgggtggtactaaaatttgtttgaacaaagttcta

SEQ ID NO: 243142 - DNA, 556 bp, Homo sapiens
atttacagaataaagataataccataatgaatccctgtgtagctatcacccagcctccaaaatattatattcaactcatgtccagttttattttctctcctctccatttcctccacttcagtgtattttgaagcctatctcaagtatcatattatttctgctgtaaatatttcaacatacttttctaaaaaatacaatattccttacttgaaaattataatttcttaatattatcaaatatctagtcatagtgcacatttgtatgattagcttatgatttttacagtatgttttttcaaatcaaacagtttcatacatwgcaattggtggatatgtttcttatcctttttaatcatctcatttttttcttatttgtttattgaataaactaggtcatctatctgttagaatttccagccctctgcatctttatgatttcatctgtgtggctgacgtagagatgtaccacccagatcccacttcaggaaggtcttgttgcacagttgctgggaatgtgagcagcagacagattccctcttccagctttcagttcctt

SEQ ID NO: 243143 - DNA, 603 bp, Homo sapiens
taagttagttcaacactgcttaatatgtattcttaatgatacaattattaagtttctgtgtgcctctctttgacctcactttctttgcctaattaatttataattatttcccattatctggagtactgtgcatgtcccctaccatctagctcattggctagcacagtgcaggtacacaaacgtttgatgaatatccttatgagggatgcagataacaatgatgaagaccatgacaataattgcctttatggagcatattccatgggccaggctctgtctttttctctgtttataatcaacacaaatattctgcaaggtattttataatattgctrtgttacagctgaagacaccaaagcaatcacaagcatagtcgtttgctaaagccacacacagtcactaaatggccagaccagaattgaagccaactctttcaagtgacagagctttttctcttttcgttgtgctaacttaactcagtctcttacttctcagtgtctgttacaggatcaggcctggagtttgttatataattgatacctggagatgcctcggtggtctatggattggcacaattgtggcattgccttcccatgaattcaa

SEQ ID NO: 243144 - DNA, 542 bp, Homo sapiens
tttatttatttattcattcattcattcatttttgtagagactgggtttcccaggctggtataaaactcctgggtttatgcagtctcctatctcagcctcctaaagggctgggattacaggtgtgagccaccgtgtccagcatttcactgatttcttggtctccagtctcaacaccttcaaattatgtcactcctgtactcaaaaatcttaaaaaaaaggagatcattaactactgaataaagttcagatttagcaagcaatgttctccatgacctagtctgttaaccactctagmctcactgcttgtacttttctggtagacattatgatgtttcatgcccttagaactttgttttgccttgcctcaagattttctattttagctcactaattcctatccatacccttaagatacagctcaggcagcatatctcccagcatatccactctggtgtcccagacttggtcatgtatccctcttctgggcacccttgaaatcctgtctatggccttaccgttgtgttacattaatatttcatggt

SEQ ID NO: 243145 - DNA, 597 bp, Homo sapiens
cttatttattcaattcctacatatttattgtcgtttttttctctattagagtgtagttttcctcaaaattagaatcttgctttccttgttaacatctgtatccttcaatccctgaacagagtttggcactgagtgggttctcaatatggatgtattcaaagaatgaacgtacytgaagtagtaaactaatggtgaatatgtcaaaatgttggattttgaccttatttaaaaattataatgacaataacccataatatatatccaaatccttagattcctgaaatgtgtgaaaaataaggcattgtaatggataaaatggaagaattatgtatttatctagtcactgattagcttttgaattagccagcataggggtactgatttgaagttcatttattcattgccctggcaatgcactttcactaaattaattttccaaatgtcatgccccaagttagactgatttgcaacatatgaagttaattgtgtccacaaatggacaatactctcaggcttgcagagctacaatgtatcaaggaaatgtcaaatacaattcagttttatttaggaatgaaaatttatattttcaagtgagaa

SEQ ID NO: 243146 - DNA, 633 bp, Homo sapiens
acaatgtgatttttgtggggagatattgaaactacaagaaatgtaggacctatctgatattaacctatcataccacaaactcatgwtatataggaaaatatttatataagatagtattaagcaataatatacaataggagagaacaaaaatctggcttcattgtatggcaaatgattatggagagcagcttgtacataattaccgccctagatctcagatattccacagattatttggacagtacctaacaccacaattcattgggaggcaattgggttgggaaatactgtctataacactaagtaatttcaatcaaatgtcagttgatggttgatatattctctacccacaatgaacaagtcctggggtacaccaaagcaagactttgaaaggtgaagttgctattgtttttcataatctgatatggagtatttctcttgctgactgcttgtgagtttgtcttctttataaattatcatgcttcatcttgtcagtgattatgtcctagacctcttgagatatgaggctaagcatgccctggggaacaaactagaatgaaaaatctggtggctgggtgtgatgcttaattttatgtgacaacttgactgggccacaaggtgcccagacatttg

SEQ ID NO: 243147 - DNA, 637 bp, Homo sapiens
tagacactaaataataacatacttaagatagtaggttttaaattcaacagcaacaactttttaaaaataagggactactcttcaagcacatttagacagaggtgtgtgaagtccagataagagataggaactctagcgccatctagcaaacatgctggggaacatcaccaactttctctactaagacctaacagtgaggttaagtgtccttcagttctatgttgatagttggccttggaaatcacatgtaagcattccttagcctttccagaattctgaacttgctatatagttctttaaaaggcaaaggagaaaacagtttacaactgcatcaggcctggttggtaaagaaatgtgtcttagcaaataaacgccagctaactataaatctgataatacataaatgtcttcgccytcgtaaaagtggtggtatcattccttcttgataaagacataattatgctaaatttgctaatttgtaatctaagctatttttagtaattaaagtaacgaagaaaagaaatattttcctttgccagcttcccatacagcacacacacacacacacacatacatacacacacacactttaatatttttaatacatactcatatatattgtttgtcaagctagcca

SEQ ID NO: 243148 - DNA, 447 bp, Homo sapiens
ggaaatttaaaccatttcagtccccataaaacccacctctctatcaatatatagataattgttaagcacaaagattttcattatagtcttttaatcacaattggtttgaggtaaagatcacatgtactattgtataatctcctaaatatggaggcagattctctctgaagtcaaggcttgcctatacccatactccaaccccaaattctatatcaacttgacagaccaagatatatcctttttcccagatgctctcagggcaattccaataaattcctaaaattctgtaggtatagacccagctacgtggcttctgacaattagtcatttyactagaagatcaagttcaagatgcagcaaattgaggcagcataagtattcacacctggtcactgcatcctcaggcactaccattagcaaagtgagtgtgacggttcatttggggta

SEQ ID NO: 243149 - DNA, 457 bp, Homo sapiens
atttaaaccatttcagtccccataaaacccacctctctatcaatatatagataattgttaagcacaaagattttcattatagtcttttaatcacaattggtttgaggtaaagatcacatgtactattgtataatctcctaaatatggaggcagattctctctgaagtcaaggcttgcctatacccatactccaaccccaaattctatatcaacttgacagaccaagatatatcctttttcccagatgctctcagggcaattccaataaattcctaaaattctgtaggtatagacccagctacgtggcttctgacaattagtcatttcactagaagatcaagttcaagatgcagcaaattgaggcagcataagtattcacacctggtcactgcatcctcaggcactaccattagcaaagtgagtgtgayggttcatttggggtatcaactttaccaga

SEQ ID NO: 243150 - DNA, 457 bp, Homo sapiens
atttaaaccatttcagtccccataaaacccacctctctatcaatatatagataattgttaagcacaaagattttcattatagtcttttaatcacaattggtttgaggtaaagatcacatgtactattgtataatctcctaaatatggaggcagattctctctgaagtcaaggcttgcctatacccatactccaaccccaaattctatatcaacttgacagaccaagatatatcctttttcccagatgctctcagggcaattccaataaattcctaaaattctgtaggtatagacccagctacgtggcttctgacaattagtcatttcactagaagatcaagttcaagatgcagcaaattgaggcagcataagtattcacacctggtcactgcatcctcaggcactaccattagcaaagtgagtgtgacgrttcatttggggtatcaactttaccaga

SEQ ID NO: 243151 - DNA, 599 bp, Homo sapiens
ttttgctaccatatctatttccttacttaggtatgccactggttgtgaggttgtcccacaagtctgagtaagggctccaagagctattcctgttctctctgtcacatataaagagaagttttttcctgtgggaaggcttaagcstggagcttgtactagggcctgccttaaggttttgaaggctgttcctgcctctggttcccattctactagatgagtatttgccctctgggtctccttgattagagtatagaggggcctggctatctcgctgtatccagggatccatagtcagcaaaagccagtgatttcaaggaacccctgcaactgttttaatgtcttagagctaggataaaccagtacaggctgtattcattccttgctgagggtcctggttcctctggctaatattaggtctagatatttaacttgttgtagccagagctgggcctttgatttagatactttgtacccttgattagctagaaagctcaagagatctagagtagcctactggcatgaggcttctgaactggtagctaaaagtaaatcatccacatactgaaagaccagagtgtctggacttgagaagtggccta

SEQ ID NO: 243152 - DNA, 594 bp, Homo sapiens
  misc_feature (1)...(594): n = A,T,C or G
nnnnnnnnnnnnnnnnnnnnnnnnnnnnnnnctaagtactatattggcaggaccttgggtggcaagtgacagaaactcaaacaaaaaaaaaaaaatggtggtgacygagtcactgtgtgagtgggaagaattgtttatggattttccaagtggaagattcagaaacgggattcctttcagaaatgccttgatagagaagcttggaaaatgcataataattctgtcattttctctccttgtcacagtactgctttcctagatgtcagcttcttttccgcatgaagtggcaaagatgaccattggcagttctaggttttgtttatctctgcaagtaatgattccaggcaaaagagtgcctctttcacatgatgcttagaaaatatcccagaaatgatgatagcctggccccctgtagcagacacatggagtattctggttggtcagccccgggcacaggtccactccaggaagtgggtgctaagataaactccaagtgaactctaagatggaaaatgaaggagagatgacttctctaattgatgacacatggaaaaatagaattccatcacaaatacccaaataatattgtataaa

SEQ ID NO: 243153 - DNA, 594 bp, Homo sapiens
  misc_feature (1)...(594): n = A,T,C or G
nnnnnnnnnnnnnnnnnnnnnnnnnnnnnnnctaagtactatattggcaggaccttgggtggcaagtgacagaaactcaaacaaaaaaaaaaaaatggtggtgactgagtcactgtgtgagtgggaagaattgtttatggattttccaagtggaagattcagaaacgggattcctttcagaaatgccttgatagagaagcttggaaaatgcataataattctgtcattttctctccttgtcacagtactgctttcctagatgtcagcttcttttccgcatgaagtggcaaagatgaccattgrcagttctaggttttgtttatctctgcaagtaatgattccaggcaaaagagtgcctctttcacatgatgcttagaaaatatcccagaaatgatgatagcctggccccctgtagcagacacatggagtattctggttggtcagccccgggcacaggtccactccaggaagtgggtgctaagataaactccaagtgaactctaagatggaaaatgaaggagagatgacttctctaattgatgacacatggaaaaatagaattccatcacaaatacccaaataatattgtataaa

SEQ ID NO: 243154 - DNA, 594 bp, Homo sapiens
  misc_feature (1)...(594): n = A,T,C or G
nnnnnnnnnnnnnnnnnnnnnnnnnnnnnnnctaagtactatattggcaggaccttgggtggcaagtgacagaaactcaaacaaaaaaaaaaaaatggtggtgactgagtcactgtgtgagtgggaagaattgtttatggattttccaagtggaagattcagaaacgggattcctttcagaaatgccttgatagagaagcttggaaaatgcataataattctgtcattttctctccttgtcacagtactgctttcctagatgtcagcttcttttccgcatgaagtggcaaagatgaccattggcagttctaggttttgtttatctctgcaagtaatgattccaggcaaaagagtgcctctttcacatgatgcttagaaaatatcccagaaatgatgatagcctggccccctgtagcagacacatggagtattctggttggtcagcccygggcacaggtccactccaggaagtgggtgctaagataaactccaagtgaactctaagatggaaaatgaaggagagatgacttctctaattgatgacacatggaaaaatagaattccatcacaaatacccaaataatattgtataaa

SEQ ID NO: 243155 - DNA, 511 bp, Homo sapiens
ttctcagactctcactgaacatctaagttatctcctgtgtggaagaggttgaaatcctgaaaatgatactttccaggccttcctcagcagagcattattgtaatctatcatttattcrtattgccttatgcacacttattcaagaactgaaatcagaggcaagcaagacattttccccctgcagacctgtaggtagataaatgggcactttcagctggtaaatatggggtttggcctgcagcattcccttctctgtgcaccatttgcactttgcacataactctatcacatcacttatcacattgtattttaattattagtttatctggttattctccttaccagactgagaactcaacaagagtaaatatgatcctcctgaatggctactatcaaaaagaaacaacataacaaatattggtgaggaagtgaaaaaattctgcaacatttcaaatttgtaaaattgtgcaagtgtgcatggttgatagaaatgcaaaatagtgctgctgct

SEQ ID NO: 243156 - DNA, 507 bp, Homo sapiens
ctgaaagattaaatgacataaggctactagggttgagttactacttaccatgtcacatccatatctgcagactttagataaagatgcgtaatcttacagactgaagtagtttgttctgtggctggtcaaatagcatacagggaaaaccactaatcttcacattcagcttttgctatcatcaaaatcaaactaaactagacaaaatttgacaaccttactttcaatttcttctcaccagtgaaatccagtgtttgtgttcaacccttccttaaagcttttccaataacctttggttactatgaatcaactaggtagttaaagccattgaggaattttttatctgaaaaatgaagttttgggtcaggattttaatagtttgaatggtattagaactacttattrttaaactatattgaataatccattaactgttgctgttcaaatacggtaaatctttataaagtgtagcctaaaaatatttaagccaatatttcataagatcctatt

SEQ ID NO: 243157 - DNA, 515 bp, Homo sapiens
cagttttaggacggttactctacatcaggttgccagccgctggttacgtagaatatataaagaacgtagggggcacattttcaactttctccattttttggactgtttactattagacaatcatgttaaaatgaatgtcattttttttttggaacaactagtcctttaacaaaagatagcttaaagagaatccacagggatcaagtcagaaaaggtctcttttgttttgagacagtctcactttgtcactcaggttggagtgcagtagtgcyatcttggctcactacaacctctgcctcctggattcaagcaattctcttgcctcagcctcccaagtagctgggattacaggcgaatgtcatgaagcccggctaaatttttttgtatttttagtagagacggggtttcaccatgttgcccaggctagtctcaaactcctgagctcaggcaatccacccaccttggcctcccaaagtgctggcattacatgcatgagccacccacctggaccaagt

SEQ ID NO: 243158 - DNA, 232 bp, Homo sapiens
ctccacaacacaaatgaattatagtattttatgtttgatattgttatttagaacattctgaatagacctatcttgccacacagtrcataaaatgcagaagaagaaatgtccttcacgtctccatagtccacaattagaataaagaaaaacaccattaagaaactagaaaaatataagatgagcaggaaaatttttctcgacatttggatttgattttctttctgcttagttt

SEQ ID NO: 243159 - DNA, 526 bp, Homo sapiens
acataattaaggctattctgtctgaggaagagaaggataaggaatttctgtccacaagaaaatgaaggcagtttatgtaaagaaaaaggagagactcatcacttatcttctatgaccatggaaaatttgcagagggaaaaaaatccttagttttatagcaggacagatcttggttggccaaaaacaactttttaaacattacgttgaaaaaaagacacccatgggaatgaaaactatgtgagaaagattgtagagtctctaagagttctttttttttttttcaccaatgaaaattaccytttatgccaaaagccaggaaaaccacaatttgaatgaggtaaccacaaacaacttaagctgacaccaggaaaaatcagacgttgagattatctgacaagaattttaaagcagccatcataaattggatccaaaaatcaataataaattcttttgaaacaaattaaaaaatagcaaacctcagtaaagaaatagaagttatttttaaaatgaccaaatggaagctaca

SEQ ID NO: 243160 - DNA, 618 bp, Homo sapiens
taaagcaatctaaggtatgttttgccacctccaaataacacatatagatattaaaatttccaaatttgcatgtgcttctttctgagagtattgatcaaaatctgttcaggtggagcaattgaccttagggtatagcatatcaagacaatcactctggactcaccattttcacaagctctgcattattgcagggaatatgttgcatagatactctaggatgacaggaactcagtatttttgagggaggaaaaatcaggtgacattataggctattagtaaaaactatatgagatactcttctataattggcacataaacactcccacccataacaaagggaaccagagctagtttgctcacaaagttttcctcacctttaaatactctccttgaacctcaaaacgtccttttgcaaaatctatttgtactcctctaccttcaagccttttaacattacccttcacttttgttcataatttgtgcatttatgtgcatttttccattcttttggcttgtttgatgtcctattttataagtgagrtttactgaagaatattttttgtagaataaaacacatttttaggatacagttatatgttttgataaacacatataatc

SEQ ID NO: 243161 - DNA, 538 bp, Homo sapiens
gaagcaacctaagtgtccatcaacagatgaatggataaagaaaatgtggcacttatacacaatggagtactattcagccataaaaaagaatgagatgccatcttttgcagcaacatggatgggactggaggtacttgtgttacatgaaataacccaggcacagaaagacaaacatcatatgttctcacttatttgtgggatctaaaaatcaaaacaattgaactcatggagatagagagtagaaggatgattaccagaggctgggatagacagcggggactctggcggtgggggggcmggggggtgaagtgaaaaggttaatcaacacaaaaataacaattagaagaaatgaataagactttgtatttgatagaaaaacagggtgactatagtcaaaataatttaattgtacactttaactaaaagtgtataattggattctttctaacacaaaggataaatgcttgaggggatggacacccctttttccatgatgtgattatttcacattgcatgcctgtatcaaaatatcctatgt

SEQ ID NO: 243162 - DNA, 574 bp, Homo sapiens
agccaggtgagccatgcctgctaggcacagtggtccttcttctgcctaaatttcctaaggggtgcagctgcctgttgccatggaaacacctggatggcaggacaagcaactctactcaccgccacctgtcatatccggatgggccatacctgctacagcttccaaccaactggacttgcttctgcctgaactcttaggcaggcacaactctttgacagscaaagcagtgtcaagagcaaagtttatagcactaaatgcccacatcaaaatgttacagagagctcaaattagcaacctaatatcacaattagagaactagagaaacaagagcaaaccaactccaagactaggagaagacaagaaatagccaaaatcagagcagaactaaaggaaattgaggcaaaaacactatacaacaagttaataaactcaggagctaattctttgaaagaattagtaagatcagcagactgctacccagactaataaaggaaataaaagagagaagataaaaataaacacaatcagaaatgacaaaggggatgttaccactgatctcacagaaacacaaaaa

SEQ ID NO: 243163 - DNA, 609 bp, Homo sapiens
aaactgtaatatttattttgttcctctacttgtaaggggttttatttctctagtattgtttcaagattttctcaggtttcaattttttttwaaatttattatgctcagtgttttctgaattctctacagctgtgttttgctgtctgtcactaatttctggaaattctcagccattatttcttcaaatattttttctgcttttttgtccctttctcctgccatttggggtgcatggtttatgttttttcaagttgtttaacaattcttggaccttttggatcttttttttttttcacattttttctctttacatttcagtttgggaattttttatagactccatctttaaattcctttcttggctgttttcagtatgccgatgagtgcatcaaaagcattctttatttcttttgattcatagcatttccttttgattcttttatgtatcttctgtctctctgcttacattatccatctctatatggtgtctaatttttttattagcatctttagcatattaatcatagtttttaaattccctgtcagataatctagtatctgtatcatatctaagtctggttctgatgcttgctttgtgtctcggactgt

SEQ ID NO: 243164 - DNA, 609 bp, Homo sapiens
aaactgtaatatttattttgttcctctacttgtaaggggttttatttctctagtattgtttcaagattttctcaggtttcaatttttttttaaatttattatgctcagtgttttctgaattctctacagctgtgttttgctgtctgtcactaatttctggaaattctcagccattatttcttcaaatattttttctgcttttttgtccctttctcctgccattyggggtgcatggtttatgttttttcaagttgtttaacaattcttggaccttttggatcttttttttttttcacattttttctctttacatttcagtttgggaattttttatagactccatctttaaattcctttcttggctgttttcagtatgccgatgagtgcatcaaaagcattctttatttcttttgattcatagcatttccttttgattcttttatgtatcttctgtctctctgcttacattatccatctctatatggtgtctaatttttttattagcatctttagcatattaatcatagtttttaaattccctgtcagataatctagtatctgtatcatatctaagtctggttctgatgcttgctttgtgtctcggactgt

SEQ ID NO: 243165 - DNA, 609 bp, Homo sapiens
aatgtgcattcctctggtctgcctttgctcactcagtattttttgtattcaactgtgttgtggtatcagcagtggcttgttggttttcaytgcagaatagaattccatggtatgaacacttcacagtctattgcctagtgtttttttttttgtttgacatttgagtggttttgagttttgggctactatggctaacgtgtgttgttatgatttatgattgatgagcatgctaagtcatagcatgggcacatattcattcaggctcttactgctgaacagaccaatgtctgatagaagcaagaggcccctaacggttggttatctgaggaatagtgataaagaaatctttatttgtttttaacttttatttgaggttcgagggcacatgtgcaggtttgtgacatgggtaaattatgtgttgtgggggtttggtgtacaggttattttgtcacccaggtaataagcatagtacccgatagacagtttttccatcctctccctccttccaacctccaccctccagcaggtggctagtgttccctctttgtgtaagagacctttaaaagctgctagaaggtggtaaaaatatttggggagctggagattgaa

SEQ ID NO: 243166 - DNA, 609 bp, Homo sapiens
aatgtgcattcctctggtctgcctttgctcactcagtattttttgtattcaactgtgttgtggtatcagcagtggcttgttggttttcactgcagaatagaattccatggtatgaacacttcacagtctattgcctagtgtttttttttttgtttgacatttgagtggttttgagttttgggctactatggctaacgtgtgttgttatgatttatgattgatgagcatgctaagtcatagcatgggcacatattcattcaggctcttactgcygaacagaccaatgtctgatagaagcaagaggcccctaacggttggttatctgaggaatagtgataaagaaatctttatttgtttttaacttttatttgaggttcgagggcacatgtgcaggtttgtgacatgggtaaattatgtgttgtgggggtttggtgtacaggttattttgtcacccaggtaataagcatagtacccgatagacagtttttccatcctctccctccttccaacctccaccctccagcaggtggctagtgttccctctttgtgtaagagacctttaaaagctgctagaaggtggtaaaaatatttggggagctggagattgaa

SEQ ID NO: 243167 - DNA, 642 bp, Homo sapiens
gctagaagaagaagctcctgtcaaaacagactctgaaaagggattggaaatgttgacatattgtcttcaccctcaatcacacaaaacaatttctttcattggcttgccaaggtataaaattctattaagtcaagagtcattctttttttactttatttctataaatgttccctcaatgccttcagcagggccaagactcagagagcatcattagctaacaacttagtggataaatcgatgactcctgaaggaaagcaaattaactcctggagtcaggaaggaccactgaggaatgacagagacattgggaccactcttcagtttgaccgaggaccaggcttgattgctcttgtttatggtgggaactgcatcattgcactgaaaatgccttgtagtgctgttatttaatacygcagtgtgccattatccttaagctacaccagagtgaaactgcaggaaacacgatgatataaaattataatgtaagtcctatccttgacaaggggaaaaatgacaacactctgtttcttcatattaatgccttcttgtaacttctcatgttttaagttctttaagtttgtagcttgaaacattatttaaatcagcaattgtctagatgagaaaataagtcattatataaaa

SEQ ID NO: 243168 - DNA, 642 bp, Homo sapiens
gctagaagaagaagctcctgtcaaaacagactctgaaaagggattggaaatgttgacatattgtcttcaccctcaatcacacaaaacaatttctttcattggcttgccaaggtataaaattctattaagtcaagagtcattctttttttactttatttctataaatgttccctcaatgccttcagcagggccaagactcagagagcatcattagctaacaacttagtggataaatcgatgactcctgaaggaaagcaaattaactcctggagtcaggaaggaccactgaggaatgacagagacattgggaccactcttcagtttgaccgaggaccaggcttgattgctcttgtttatggtgggaactgcatcattgcactgaaaatgccttgtagtgctgttatttaataccgcagtgtgccattatccttaagctacaccagagtgaaactgcaggaaacacgatgatataaaattataatgtaagtcctatccttgacaaggggaaaaatgacaacactctgtttcttcatattaatgccttcttgtaacttctcatgttttaagytctttaagtttgtagcttgaaacattatttaaatcagcaattgtctagatgagaaaataagtcattatataaaa

SEQ ID NO: 243169 - DNA, 405 bp, Homo sapiens
ttgtggcgctcagtttatatccaaaagccaattataaagagagagaaaatgtgcaataaattactgacataattaaactgttaaaaaatatctattgacatatgayggacataatgaaaaaaacatggaaaaattaagaaaattaagtattttgtttcatagtgggataactggttttttatttccttgaaagtttttatattgctattatgaactataagcaaattagatagaaaaaaagaaagctaaattgaatattctatttactagaaatttcccagaggccacattaattttacatccaattgccactttaacgtcttcccctgtgttccttccctacccaaactcctgctgtttgccatctgaggtaatgactctcctgaaatttgtgtttatcattct

SEQ ID NO: 243170 - DNA, 570 bp, Homo sapiens
tcacatggtcttaccctcacctctcctgcctgtctcttctacttttgattgcactgggccaacacagataatccaggacattctcctcagtttaagtttggctgatcagagaccttaattctatttacaaccttaattctccttggcatataacatgactattcataccttcttaggattagaatgtggatatctttgttggcggggattatcctgctcatcacaatatacaaaggtaatgagtaataataccctgaggtctgaaagtagcagtgtggttttttttttwaggacaaataaaggaggtacaattttttcagcaggtgatactggctgaaaatatacttagcttaaaaacttcacggatgataaatgcttgacagatcagcaaaggatgccagagattctggggatgcattcttaaaattttatgctttatttttctcatttacaagaatcatataaatatttaaatagaaataagaaaaatggtgggaagagtcaagatggctgactaggtgcagccaggaagagcttattctatggagagaccagaccatcaagaagact

SEQ ID NO: 243171 - DNA, 425 bp, Homo sapiens
acatggtcttaccctcacctctcctgcctgtctcttctacttttgattgcactgggccaacacagataatccaggacattctcctcagtttaagtttggctgatcagagaccttaattctatttacaaccttaattctccttggcatataacatgactattcataccttcttaggattagaatgtggatatctttgttggcggggattatcctgctcatcacaatatacaaaggtaatgagtaataataccctgaggtctgaaagtagcagtgtggttttttttttaaggacaaataaaggaggtacarttttttcagcaggtgatactggctgaaaatatacttagcttaaaaacttcacggatgataaatgcttgacagatcagcaaaggatgccagagattctggggatgcattcttaaaat

SEQ ID NO: 243172 - DNA, 586 bp, Homo sapiens
gttattctcccgtgggctttggaagacccttgcactattattaatatctcagggcgamggccggtgagggcgccagaatttaattgcctaaataattgctttccccaaatgcgaaatcccgatggacccaccagcttcagtgtgcgcatgggttttaatgaatggtgggcgccgagagatcacagcttctgtgcaaacacggacggccgttactatttataggtttgtacaggttgattcttgggatcatcattgctacggctgcagaacgtaagatctatttttaaagcactacctataagcctagtgctatggattttctgtaatttatagctcgggctacgagactgcttttgaatggttactctgtaaagtacttaatctacagttgctgcgacggggtgctggtggcatgaatctgtgctgtggtgagtccgtaagcccagctccacggactctgctgggaaaagaaacaactctcttaagtatataaatccagtaaacataggaaacgtccacattgaactggcagaaggagaacatgtttgggtgacaaggggcattatttaaacatgaaagatcttcc

SEQ ID NO: 243173 - DNA, 612 bp, Homo sapiens
ctgccctacaaatcctctgtgctctgcctagtcattcctctcttccttctctgcaacccctggcatccactcatctttttattgtctccataattttgcctttttcaagaacagcrtagagttggaatcacacagtgtgtggccttttcagattggtttctttcactgagcaatatgcatttacatttcctccatataatttcttggctttatagttcatttttttttgtactgaataatattccaatgtctggatctaccatagtttgtttgtctactcacctgctgaaggacatcttggttgcttccaaattttgacaattatgaataaagttgctataagaatccatgtacaggtttttgtgtagacatgagttttcgacttctttgtgtaaataccaaggaaggcaatgtctggatcgtgtggtaagagaatttttagttttgtaagaaaccacaaagctgtcttccaaagtagctgcaccattttgcattctcagcagcagtgaatgtgaatgagagttccttttgctccacattctcgccagcatttggtattgtcagtgttctggactttggccattctgatgggtgtgcagtggtctctcattg

SEQ ID NO: 243174 - DNA, 612 bp, Homo sapiens
ctgccctacaaatcctctgtgctctgcctagtcattcctctcttccttctctgcaacccctggcatccactcatctttttattgtctccataattttgcctttttcaagaacagcatagagttggaatcacacagtgtgtggccttttcagattggtttctttcactgagcaatatgcatttacatttcctccatataatttcttggctttatagttcatttttttttgtactgaataatattccaatgtctggatctaccatagtttgtttgtctactcacctgctgaaggacatcttggttgcttccaaattttgacaattatgaataaagttgctataagaatccatgtacaggtttttgtgtagacatgagttttcgacttctttgtgtaaataccaaggaaggcaatgtctggatcgtgtggtaagagaatttttagttttgtaagaaaccacaaagctgtcttccaaagtagctgcaccattttgcattctcagcagcagtgaatgtgaatgagagttcctkttgctccacattctcgccagcatttggtattgtcagtgttctggactttggccattctgatgggtgtgcagtggtctctcattg

SEQ ID NO: 243175 - DNA, 612 bp, Homo sapiens
ctgccctacaaatcctctgtgctctgcctagtcattcctctcttccttctctgcaacccctggcatccactcatctttttattgtctccataattttgcctttttcaagaacagcatagagttggaatcacacagtgtgtggccttttcagattggtttctttcactgagcaatatgcatttacatttcctccatataatttcttggctttatagttcatttttttttgtactgaataatattccaatgtctggatctaccatagtttgtttgtctactcacctgctgaaggacatcttggttgcttccaaattttgacaattatgaataaagttgctataagaatccatgtacaggtttttgtgtagacatgagttttcgacttctttgtgtaaataccaaggaaggcaatgtctggatcgtgtggtaagagaatttttagttttgtaagaaaccacaaagctgtcttccaaagtagctgcaccattttgcattctcagcagcagtgaatgtgaatgagagttccttttgctccacattctcgycagcatttggtattgtcagtgttctggactttggccattctgatgggtgtgcagtggtctctcattg

SEQ ID NO: 243176 - DNA, 542 bp, Homo sapiens
atggacaccactacatactggaaaaaatatggagcaagaggaactctcattcattgcggctgggaatgcaaaacggtgcagccactttggaagacagtttggtgatttcttactaaactacataaacccttaccatatgattcagcaatcacactctttggcatttactcaaaggagttaaatacatactttcacacaaaaaacctgcacacggatgtttgttatggctttattcataagtgctaaaactggagagcaaccaagctgtcctgcagcagataaactgtagtacacccagaaaatggaatattattcagggctaaaaataaatggaaccatttagccatgaaaagrcatggaggaatgttacatgcatattactaagcggaaggaggaaatctgaaaaggctagatatagtataagtccaacattctgaaattctggaaaagacaaaactgtggagacttttatacctttcataacaattaactcaaaatgggttacagatttcaatgtaaaacacaaaactataaaactccta

SEQ ID NO: 243177 - DNA, 542 bp, Homo sapiens
atggacaccactacatactggaaaaaatatggagcaagaggaactctcattcattgcggctgggaatgcaaaacggtgcagccactttggaagacagtttggtgatttcttactaaactacataaacccttaccatatgattcagcaatcacactctttggcatttactcaaaggagttaaatacatactttcacacaaaaaacctgcacacggatgtttgttatggctttattcataagtgctaaaactggagagcaaccaagctgtcctgcagcagataaactgtagtacacccagaaaatggaatattattcagggctaaaaataaatggaaccatttagccatgaaaagacatggaggaatgttacatgcatattactaagcggaaggaggaaatctgaaaaggctagatatagtataagtccaacattctgaaattctggaaaagacaaaactgtggagacttttatacctttcataacaattaactcaaaatgggttayagatttcaatgtaaaacacaaaactataaaactccta

SEQ ID NO: 243178 - DNA, 582 bp, Homo sapiens
ctctaccatgcagcccaggtgtgtagtaggctgtaccatctaggtttgtgtgaatatgctctacgatgctcacacaatgacaaaatgacctaacaatgcatttcrcagaatgtgtcctcatcatgaagcaatgcctgactgcaatgtcttatcagagctgatggttacattttcaggaatttcgtaagctacttgttaaccacagccattattaaaaattaaataacaaagttatagttaaattatatttaaaatgcaaataattacttaaaagtcatcacttcctaattagttaactacattttacagtgatctattctaattatctgtgcctactgtatcagcttggtgggaatcctgtgagacactgtgctcacctctccccaatgctggctgttttctttctttctttctttctttctttctttctttctttctttctttctttctttctttctttctttctttcttttctttctttctttttctttctttctctttctttctttctttctttttcttgctttcttgctttcttgcttttttttttttttttccagaatctcactctgccacccaggt

SEQ ID NO: 243179 - DNA, 490 bp, Homo sapiens
accatgcttcttgggggtatgctgactggaggagtcagtgcctagaagtgaacacaactggtgggaagcgttccccttcctgtttatttctgtaccagcttgtcacctctgttattgtgcccctcttctccttctcatccactccacagttttgatgccattttgtgccctaaccctcaccacccccggctgtgttccagcctctaggagacaatcaatggttctttcctctakaaaataataatgcaaccatggtggtgtgtctgaattatatggtatgtgcaggaggtgcttttaaaatatgttgatacttagaacccttccctagcgattcttatttaattgtgctggtgttaactggtatagacttttaaaaaaatcaacccgattgattctattttatagcttgggtcaagaaatactatcccagagcaaaatagacacaataagcagcttgtataccacctccctcttgcaagacagacatctc

SEQ ID NO: 243180 - DNA, 490 bp, Homo sapiens
accatgcttcttgggggtatgctgactggaggagtcagtgcctagaagtgaacacaactggtgggaagcgttccccttcctgtttatttctgtaccagcttgtcacctctgttattgtgcccctcttctccttctcatccactccacagttttgatgccattttgtgccctaaccctcaccacccccggctgtgttccagcctctaggagacaatcaatggttctttcctctagaaaataataatgcaaccatggtggtgtgtctgaattatatggtatgtgcaggaggtgcttttaaaatatgttgatacttagaacccttccctakcgattcttatttaattgtgctggtgttaactggtatagacttttaaaaaaatcaacccgattgattctattttatagcttgggtcaagaaatactatcccagagcaaaatagacacaataagcagcttgtataccacctccctcttgcaagacagacatctc

SEQ ID NO: 243181 - DNA, 522 bp, Homo sapiens
agacaaatttctgtttaagctaatactctctgcccagatgatttttcatgctgctgtataattgagccagctgcgtaagggaacatggatctggcttgtaaataaggttgctaggggagctgaattataaatgatagaaaaagttaatctttctcaggttaaaaatgtcataaatctctgtwattaaggtgtttcatttttttccttcccaagttcaaattggattttgcatatggaaagatgaaatcacttgcatccatagaactttatcagggctgtgtgagaattatctgaagagataccaagaagcacagcaggcttacacataggcaggcatgcactgtgaagtgctctttgtaaattctagagtgtggcttgtaatttataacacatattttactttatttaggttgtaacaacttgaatcttcctttcccaatagcaagcaattccaggcgggggatcttagccatcatttcatttctccggcagcaaacaatataatgctaagcaggggaattc

SEQ ID NO: 243182 - DNA, 422 bp, Homo sapiens
tggttagtcactctactaaaatccaaaggctaaaccccaaatctcttccatgacttaaaaggctctgtgtgatctgacccctgacctgcctcattgtgcacccctctctccttgctcttgggtcctagactgtgctcctgtaccacccagagcatctgtgcatatcattgttccctttgttgagaccattcttcctcccctttttcttaactccctcacccttcagatatcagattaaacatcccatcctttgctcagaaaaatccattttttttttttttttttttttttggkatggagtctggcctgtcacccaggctggagtgcagtggtgcaatctcggatcactggaacctccgcctgctgggttcaagcgattctcctacctcagcctcctgagtagctgggattacaggtgtgtg

SEQ ID NO: 243183 - DNA, 599 bp, Homo sapiens
aggctttgcaagcacactgcaaacataacccaaagtggctgcccaattttgtcatggacatttctgttttaactcagatgggagctttccatctaattaggcagagtcccatacccttggtgacatacagctatggtaggaggactgaaagaaattatgtaggatccatttatagaattcactcacaaaagcctggctactctgtaccaggtcctgcagatgagtcggatgcagcccctrctctccagaaacaaaaacactgcattcaaagccacttctccccatcccctatcatctttgaagcaacttaatgtgctttcactttttgttcctcgttatctgaaatgttggtttcatacgcaaaatgggccctacagaatttccaagttatgcctgagtccagggacaaacacaatctaggcttctgagccgaggccatctattgcacaaagaagaattcaataaccaccataaaaataaaacagaaaaacattattagcaattagagtatgtagatactacaggactccttgtgtgagaaaattataacccaggagccaaaccctgctagcagcctgcttttgtaaataaagttttat

SEQ ID NO: 243184 - DNA, 577 bp, Homo sapiens
tggtagatgttattaaccataacaaaaaccagcaatgtcacagcagaagattggctaagtgatctaagctgtacttattgataagtgggtgtagtccaggccttatgggacaacacttttcagagactagattcaacactgaagatgcagaaacatggtcaatgtatccagtgataattaagttcatgaatttttgagtcacaaaaaccaagtttatttcttataaaatgaataatgtggttaaccagctatatctacatctacacagggctaaaactgtaaagtgaccagaattccataccagccagtcagagcaatgacagctccttcaaataatgcttaagatgcaacaccattttttatttgatttttaagtttccttttactagtttcttggaagaatactttcctgacatttcttccaatggagtackatggtagtctattacatctagctgtggagtcagaaaatatctaaattctaattcctattctgccagttattagttgtttcactccaagaaagtagttcaaactacttgtactttagtttctggagaactgaaatggaaacaat

SEQ ID NO: 243185 - DNA, 634 bp, Homo sapiens
tgaggtgggaggatcactggaaccctggagtttgagatcaacctgggcaacatggcaaaaccctgtctctacaaaaagtgcaaaaatcacccaggtgtggtggtgcattcctgtagtttatctacttgggaggctgaagagggagaatcacctggaatggtaaaattacctgagccagggatcaggccactgcactctaacctggtgaatggcagtgaaaccctgtctcaaaataaaatgaaatgaaatgaaataaaaataattgcagagttgtgtgtggtggcatgcacctataatcccagctactccagcatatgaggcagaagggctgattgagcccaggagttcaagagaagcccaggccacatagtgagatgcctatctcattttaaaataaaaaatacaatttaaaataactacagtatagtcagtgaatgaccctccaaagaggaatcaaagaggtggcttagaggcaatcacccgcttagaaatgcgctgcaacataaacctttgtatttgaattagctattttaaacagaaaaaacattttctcttcaaattaakaatcttttaaatcattactagttctcagtgtcagtgttggaacagtgcccacagtaatggatggtactta

SEQ ID NO: 243186 - DNA, 479 bp, Homo sapiens
aattagggaatagtggatagtgaccatctagacaccgtttgccacaactgctgtgttatggccccagccttgattttccagataaaagtgaaagccaagtrtaaggaattgttcccttgagagtgctcaccttggctgaataggatcttagaagcccacaggtcataggctcagttcttaaactgtagatttcagtaacagcacagacaaaacattactggttcatcttgtttttaaaagggctcagaatatgtaaacttttaaataaacaccactatcctatgatcctcatttttgaagtgcctttgtgagaactgttcattttttcttctgttcttgccacaccaaaagggagttatggtgttgaactcacttcatgcctgagacagatccatccaagaagcaatactttgaacaatgtaaagatggctataaatgttatattgtatgttttccctcagaactttaaagaaattcca

SEQ ID NO: 243187 - DNA, 479 bp, Homo sapiens
aattagggaatagtggatagtgaccatctagacaccgtttgccacaactgctgtgttatggccccagccttgattttccagataaaagtgaaagccaagtataaggaaktgttcccttgagagtgctcaccttggctgaataggatcttagaagcccacaggtcataggctcagttcttaaactgtagatttcagtaacagcacagacaaaacattactggttcatcttgtttttaaaagggctcagaatatgtaaacttttaaataaacaccactatcctatgatcctcatttttgaagtgcctttgtgagaactgttcattttttcttctgttcttgccacaccaaaagggagttatggtgttgaactcacttcatgcctgagacagatccatccaagaagcaatactttgaacaatgtaaagatggctataaatgttatattgtatgttttccctcagaactttaaagaaattcca

SEQ ID NO: 243188 - DNA, 442 bp, Homo sapiens
cttacctggaattcagtgctactgtatggtaagtaggtggattggtaacaggttttcaaaaagttctacagaaaagcccagctaaagaaatataaatatgartgaatgaatgaatgaatgaatgaatgatgaagcagtcctattctcctgatgatcctatggtaggattttggttcttaagggtttttaaagttcaccctatagtttatctgtgggctcttgagtcccctcctacttcttcatgtattggacaaacctacacctttatgagtggttgctccagaccctgctgcccaggatataaggaagaaagtacaggttcagacagggaacaagtctatctgaaattcctggcaaaagtacctgatattaagtacatcaggtatgtgactggtgctgaatttcagatataaattaaaaatggtaaaataaataaatagca

SEQ ID NO: 243189 - DNA, 497 bp, Homo sapiens
tctgaaatgaatgaaaacaaacacacaacataccaaaatgcataggatgcaataaaagcagtgttcagagggaaagttataactgtaaatacttactttcaaaaagaataaagatctcaaatcaatactttaaacycgaaggtaaagaaactagaaaaggaagagtaaattaaaaccagagcaaacagaggaagcaaataatacataatagggtgaaaatgaataaaatagagaactcaaaaagcagagcaaatcaacaaaacagatggttttttaaataatgaaaactaagtttatttccctttcctctactccaccacccatttttcctccccagttgcattctctcttacaagtttctcatgtatcctttgagaaacagtctacaaattttataggtatatattttctttctctcccccataaaatttttagcataatatgaacacaattttccaccatgcttagagagcattggtattctctatacaggtgca

SEQ ID NO: 243190 - DNA, 549 bp, Homo sapiens
ttacattatctcaggtgtttctgagtgatgaattttargcttacacaactgcctctgaataactcaacaagtttcaaattgagtgtcctttcagtataatggttgttggggaaatttttattttcattaatttttaaagtaacaggttcagtgagcatatctttttcattattgtatgaagcccaaacactgttttccccattaattgatgataatatggtttatattattaagaggttactgggaatataagtggtaattttttaattctcaaaagccacagaattttaacttgctattcttcatagtacctaaacaatgaagaggtcattgaacactttgtccctgttataaacatctgcttacaagaatggaatggagattaataaatgaactgtcctgggccaagaatggtggctcacacctgtaatcccaacacattgggaggcccaggtgggagggttgcttgagctctggaattcgagaccagcctgcacaacctaacaagaccatgtctctactgaaaatcaaaaaaattatcccagcatg

SEQ ID NO: 243191 - DNA, 492 bp, Homo sapiens
atatcacattagagtcctctttttttatctcataatggatagaaacactcaaaggtggcgccacagcatcaactgtaaaattgaagctggactcttcccccattctctgctttcaccttttgcctacacttaatagcatttttggaattcagctcaggatgcaaaaggcagattcaccacattgtacactttcagagtgcattgrtgtcacttttttttaaagtttcagttaatcattatctgtaaaaaaatgtaggagaatatttgcctctatatagggaatgttgaaaaaataattgtggtgtttgtttttagaattctttactggaaggaaaagagatgaacctgaaaaacatctaaataatttgaatctgggatatagtctcactagcaagagaaagttttagcatttaatcaagtcacagaggagtcagtctttggagtaaatcaagagatagttctgaaggatccagatcaggtagtgaactacaa

SEQ ID NO: 243192 - DNA, 588 bp, Homo sapiens
aggagagatagggcctcactcaratcagctttcagttttctgatatcctcacctctggtctcaagctattcagccaatattgcatctttaatggttaagctttggggcaggtggctatttgtaaggctactaattagataaagggactgatttgcaccaggatgcagataatgcgtggaattgtgccaggacccacagctcaggagtttatgaccccctagctgccatggcaaccatgcctattcagttggggaagtctttttgttgtgggataggagtcagtgcatagggcacagcatcagcttctgtggggtgtgaaaatgaaaactgaaaatggaagtgaaaggacaagaaggcaggagggcactagattttccatttatacccaaatggatagattgttctgtgggtttgcttctacttgcttgtcataaaaatcagggcctttcctttcatgcaactgtctgatgagcctaatgtttggaaggaagcatgttttgtgaatcttctttttttggtacggtctttactgttcacagcttccacctcaatgtctttgttttattatgcttccttttatttttccca

SEQ ID NO: 243193 - DNA, 569 bp, Homo sapiens
ttacctcaaacccacactgtgtggattatgtggagaactctataaactataaaagttacacaacatttattattttggtgtactttaattcaagggacagtatttagcacattgagatggtcttctgatctatttttaagaaaaggtcagctaacatgacatctaagaagagtattatcctgaagttaccattaagctataagtcaaaagccaatatcttggtgtcaaaaaaattgtttgaaattttaccagtcaaaaataattttttattaaatatataaaattttctatattatgcaaaaccaaaagatatgcacatttaaattttacagaaattcagaggcacatttattttacttaggtcactgttcgatgggagaccatatcctgtacccctctgccaggggtgatgtattatctggctcaaccatgtgtctggagttgggcctcagcagaaatarcctgcagctattcctcttaaaagttatgtgactttgggcagttagttttcaaccctgtgcctgtttctttatctgcccaatagggataaaaatcctttacttgctcat

SEQ ID NO: 243194 - DNA, 603 bp, Homo sapiens
aagtctgtgaggtggtactatatatattttctttttatggattagaaaattgaggatcagagagaagttaaataatttgtcaaaggtccctgtcttagtttgggttcccagaagcagaccttgaataaggacttaagtgcaaggggttaaagaagagatctcaggaaaaactagtagtgaaatagaaacatgagacaagggagggacggcagccaatgaaatgttcattatcaagcaagttaccatcatcgatgaccaaaacttaatcctcgtgggactctggaagccagtgtagaactcatatcttagaattatcttgcrtgagggatgagggagctgaatatttttcaccaactccagtcagtcttggttgaggttgcttctaaggggtgctaatttcctgtcacttctgcctgctatggaaaaggggcaggtaggaggtgagtgggcaaagcaggctctggcagacagataaatgaaggtgatggcagtcagaagttggcaggacttcctacagtgttgagggtaaggggggcactgagaggagcactgcagccacattgctagtaactctcagagctgggatgtgactgtagatgtgcc

SEQ ID NO: 243195 - DNA, 424 bp, Homo sapiens
gcctctgtctcttaaaaccctcccctggcttcccattatctgcaggagaaagttcatactcataacatcacacaaggcactcatgatctgtgcttgcatttttctcttgcttccttctttatcttttagaagatattccagccgtgacaaacatcttcaaagggatcatcatgcctcagcatgcttgcacatgcctctgcctttattcaggatgctgtttcatgccattcaactctcttyacctggccaagtcttacttttccagtcacctggatttcaatcttatactgtatttgttggttggtttactgcctttcttcccttgtgagctctataagagtttgtcgttgtatgcaattgtattcctgaaactagaaaagtatctggtacatcatagattctcaattaattgttgactaacttg

SEQ ID NO: 243196 - DNA, 547 bp, Homo sapiens
tacatgtcttctctaaaggctgctcaagaacagggactgatttctcatctccaaacccatagcgtctggcwcagtaccttacacagcagatactcaataaatattgaataaatgaattaattttaagaaagttaaaataataaagaattatagcataaaaataatttttcaagccacaggccttgtagtaggacagacccgagtttaagtcctaaccgtccgcttgctaactgagtggtattagaaaggtgacatctctgaacctcagttttctaacctataacacaaggataccaaaatctaccttgcttgtaataaatgaaactagcacagtacctggaaaatagtccgtggtcatcaacattaatttcattccctaagttttaagttcaaaacaacagttaaaaagaaagtaacatcacagcagaaaaaaaaaatcataaaatgttagaaccatgagggtcctaaagattgggatttaagtttataatcacacacttcctaggcatgggattcattgctgttttgcttgaaatataacaaggat

SEQ ID NO: 243197 - DNA, 532 bp, Homo sapiens
gtgttttattttataataaagaagtgttaagtcactattaagaaagtgatttgaggctgggtgcgatggcttaagcctataatcccagcacaktgggaggctgaggcaggtgcattgcttgagcccaggagtttaagaccagcctgggcaacatggtgaaatcctgtctctataaaaaatacaaaaatttaggtgggtgtgatggcgcatgcctgtcctctcagctactgggggtgctgaggtgggaggatcatctgagccctgggggtggaggttgcaatgaattgaaatcacgccactgcactccagtctaggcaacacagaaagaccctgtcaaaaaaaaaaaaaaaaaagaaaagcgatttgagtgggagaagatatttgtacccatataatcaacaaaggagaatattcaaaacacaataaataactcctgaaaattcattagaaaatagtaatcaactgtgttgtagaaacagatggaacactcatattgacaaatttgtggagagttttacaaacataaatttac

SEQ ID NO: 243198 - DNA, 627 bp, Homo sapiens
ttctgtcttatctttaccatatcatttactctaaacgttctggccttgtcactgccatggaatgtgtcttgttaggtcctgcttctgcctgttctctactctattccccaatacagaataccctttatcccctttctatttcatcartcaaaattccatatgtctgttaaagccaagttcaaatgccacttcttctctgaagttttcttggacatgcctgccagctacaaaatacttgccagatttggtaggagaggaacttctgcttgggtctcacttttcttttctttagtgtgaaggggttgaagtcggtaattttgggggcttcttcagttctaccacagctcagtaacagtcatggattatttagaatttaatctatgctaggccctgcaccatgcactaaggatacagaagtaagtaagactgaggacactgaagctaccagagaagccagacatgcatagaagccatgacaatacaccacaggacataccatgctagaggtatgtacaaaacacagttaggagctcagcagagaggaagcagctctgtcttgggcagagaacatggacaaggaaacaggttgtgatatttggactgagttttgaatgataattatgagct

SEQ ID NO: 243199 - DNA, 661 bp, Homo sapiens
atcctctcactttttatttttctgatgagtctaatcagaggtttgttgattttatcaattcttttcaaaagacccactcttatgggcaaaaggatcattcacctgaccactatgcaccaccacaaactggaagtacctcctgggaatgcatcctgaggcactagtgctgggggtggggagaaggttaatgtaagactgggtaagagagatttttatcaatgtggggggcattaacctgtgacttagtatttaacatcccaaaagacatctgaagccagtcctaatatgctgctatattgcttcactaatcttgaaaatacatgcatgcacactggtgtgtgaagtggagataacacttcccaatcattctatgtggctattaatattatcctgatacaaaaacccacaaagacattataaggaaataagactatagaccawtatctcttatgaatacagacacaaacatcctcaagaatgcaagtgtgcacacataaacacacacatacacaatgatctacagtaggaaagatgctagaattgtcatgaaaaaatattaaaaaggggtcaaagagtataaggaagtggtcaatgctagagtagattttctatagaggtctggagaacccatcaggctgattgtgttacctatgagggtcct

SEQ ID NO: 243200 - DNA, 531 bp, Homo sapiens
gtctgatccaatcaaaaacatcaaacctcttctaagtaaaaaccctccccatcctctagctcagacctgtctcaaataggctgctcatgkgaccaaggggttagggtctggctcacttctgtttccctgacttggcttcccagcctttcccctcaatctgggtaacagtagctgtttactcctccaaggttgagcaagatgagggagaggagaaaaggaacaggaaaggtcttaggggactagtactctcatgagacagcatgggcagtccctcacgaacttctttagacacaccctctcctggtgcttgagctctgttgatgtgagcagatgtgtctgctcagttcagttgcttatggttccttcctaagcctctggtgatctgatggtttacccctgttggggtcactattcccctccactggctctcatgtctgaaggtgagctaaagatggtgaaactggttttctgggttacttttgcaagtcctgcatggtggtttcatacttcactctgaactgtaatgtctat

SEQ ID NO: 243201 - DNA, 391 bp, Homo sapiens
cttacaataccctcctgccagcaacctctacctgacaaccttcatgtaacccaaaacaaagggcctcagtctccacacggccaacattccaagggatgggccatggattcaaatgtccttcatagatagtaagtgaacctctgggttggtccctcctagattccttagcccagtactctgaacacacattcttcttaggccatagggtcgttctcaggttatgcttaagttattgctgtcaggtgcatctgccatccagcagcattggcatcacctgattgctgatagtaatgtaaaggcttaaagatccacccctgagtcagcaactgtggtcatggagcgcagsaatctgtgttttaacaagcccttcaggggattctgagcacactca

SEQ ID NO: 243202 - DNA, 387 bp, Homo sapiens
tatagaggacttacgtttcattagaggttaatttctaggtatttttwaaaaacttatatgctatggtaagtaatattttcataaactttcattttctaaatattgatggtatgaaagaaataatttacctacaatagaatgcactaattctaatagtacaattatgtgaactttggaaaccattatcccccaaagtttccttgggcctctttgtagtcctccactctgggcagttactgacctactgtcagtatagttttgcctttaatataatttaatacaaatggaatcatacattaatttgattccagtagttgtctggcttcttttacttagcataatgcttttgagattcacccatgttgttcaaattctttttacatttaa

SEQ ID NO: 243203 - DNA, 387 bp, Homo sapiens
tatagaggacttacgtttcattagaggttaatttctaggtatttttaaaaaacttatatgctatggtaagtaatattttcataaactttcattttctaaatattgatggtawgaaagaaataatttacctacaatagaatgcactaattctaatagtacaattatgtgaactttggaaaccattatcccccaaagtttccttgggcctctttgtagtcctccactctgggcagttactgacctactgtcagtatagttttgcctttaatataatttaatacaaatggaatcatacattaatttgattccagtagttgtctggcttcttttacttagcataatgcttttgagattcacccatgttgttcaaattctttttacatttaa

SEQ ID NO: 243204 - DNA, 530 bp, Homo sapiens
gtgtagtgttagctgtcggatttttgtagatattctttgtctagttcaggaaatttctctgtatcccaagtctgctgagagtttttattataaattggtgtttaawtttatcaaatgctttctctgcatctattgatatgatcatgtgatttttattatttagtctgttaatgagatggagtatattaatttttgaatgttgaaccagccttggatacctggaataaatccaacttggttgtgttgtataattctttttatatattatggaatttgatttgctaaattttgttgaggatttttttatccatgttcatgagagacacttgtctgtagttttcttgtaatgtttttgtctggttttgatattaggtaatgctggcctcaaagaatgtattaggaagtatttcctctgcttccttcttctaaaagtaattgcaaatgattgacattatttctttcttaaatattgatatgatttatcagtgaatccatctgggcctggtactttctgttttgaaggtaattga

SEQ ID NO: 243205 - DNA, 586 bp, Homo sapiens
ttgtaattatgtaattagatgttctttaaagactatcttaggtacctcatagattagaatggttcctttgaagcagttaccagatctgttatgtaattacataattaagtccatgtagtaaaaatcttaacaaaactctttaaaaaaaataaacagcctgcactggggcaacagatgacttcgattgcaaattagaagtggaacaaaattggcaatatattcagtgtcaagaacaaaggtgtctcaacaccaatttttatactgggattgcatccctcaaggaaagctccagggaggtggatctggcccctcaatcgtccagaaccttggcytacatatggttttattagtactactgcaagagactttcctcttcgtaaacttcatattctaccttcctcagagacactcataaaatcaatatggtttggaagctaacaaagaagataaaaggtgactaagacactaaataaaatgaaagctctttatattgtcattttatatatgtttaagtcaattaaattctgccacaacctatgtagcccaaacttaactaccaattacatatggtggatttgcagagtag

SEQ ID NO: 243206 - DNA, 532 bp, Homo sapiens
catcaactttttgtggtagtacattcacagtaacagaatatagtagagaaagtctctgctcagagatgctttcttctttgccagtgtcagacctactacacaagctctttgaattgtgcaaccctgcataagcatttgctgctgttaatttactctggaatctgcccttaactcttttctgtaatgcatttttctctccatttccttgctctcttttccactctcaggtgagtttgttttgatgtaatctcctttttcccattttcccattctttccctcctgaaaatgtggtccattcttttgctgagaaatataattaccaactakcatacaaatatatggccatgtatgttctaaaggaacagctgcaaaattgctaatattaggtctaatttagcgacaataaattagcaaatgtgtagaagcacaatgatgacagcgtacttataacaaaagtcgatgtgttgaagtatatggatgacaatacgtactaattttagagagaagaaaagaactctaaaccaaatgaaa

SEQ ID NO: 243207 - DNA, 532 bp, Homo sapiens
catcaactttttgtggtagtacattcacagtaacagaatatagtagagaaagtctctgctcagagatgctttcttctttgccagtgtcagacctactacacaagctctttgaattgtgcaaccctgcataagcatttgctgctgttaatttactctggaatctgcccttaactcttttctgtaatgcatttttctctccatttccttgctctcttttccactctcaggtgagtttgttttgatgtaatctcctttttcccattttcccattctttccctcctgaaaatgtggtccattcttttgctgagaaatataattaccaactagcatacaaatatatggccatgtatgttctaaargaacagctgcaaaattgctaatattaggtctaatttagcgacaataaattagcaaatgtgtagaagcacaatgatgacagcgtacttataacaaaagtcgatgtgttgaagtatatggatgacaatacgtactaattttagagagaagaaaagaactctaaaccaaatgaaa

SEQ ID NO: 243208 - DNA, 532 bp, Homo sapiens
catcaactttttgtggtagtacattcacagtaacagaatatagtagagaaagtctctgctcagagatgctttcttctttgccagtgtcagacctactacacaagctctttgaattgtgcaaccctgcataagcatttgctgctgttaatttactctggaatctgcccttaactcttttctgtaatgcatttttctctccatttccttgctctcttttccactctcaggtgagtttgttttgatgtaatctcctttttcccattttcccattctttccctcctgaaaatgtggtccattcttttgctgagaaatataattaccaactagcatacaaatatatggccatgtatgttctaaaggaacagctgcaaaattgctaatattaggtctaatttagcgacaataaattagcaaatgtgtrgaagcacaatgatgacagcgtacttataacaaaagtcgatgtgttgaagtatatggatgacaatacgtactaattttagagagaagaaaagaactctaaaccaaatgaaa

SEQ ID NO: 243209 - DNA, 532 bp, Homo sapiens
catcaactttttgtggtagtacattcacagtaacagaatatagtagagaaagtctctgctcagagatgctttcttctttgccagtgtcagacctactacacaagctctttgaattgtgcaaccctgcataagcatttgctgctgttaatttactctggaatctgcccttaactcttttctgtaatgcatttttctctccatttccttgctctcttttccactctcaggtgagtttgttttgatgtaatctcctttttcccattttcccattctttccctcctgaaaatgtggtccattcttttgctgagaaatataattaccaactagcatacaaatatatggccatgtatgttctaaaggaacagctgcaaaattgctaatattaggtctaatttagcgacaataaattagcaaatgtgtagaagcacaatgatgacagcgtacttataacaaaagtcgatgygttgaagtatatggatgacaatacgtactaattttagagagaagaaaagaactctaaaccaaatgaaa

SEQ ID NO: 243210 - DNA, 493 bp, Homo sapiens
ttagctttgtccatcaggggcagttggtattgagcactgactctatcacytgtatcaagaatctaaaacaaaataaaattttccttcctcaccctgcccccacacagttcacctactcaggttcatagaaacaggaggatattctcagttggtttttttgccctaatctatttggctccaggtcaagctgcttacccagataacatggcaagagaaagtgattgatgaaggcagcatctgagtccattttgtgtggctatataggaatacctgaggctgcataatttatagagaaaaagtttatttggctcttgtttctgatggctggacagttcatgattaggcatctgcatctggttagggccccaggctgcttccactcaaggtagacggtaaaggggagctggattattcagggatcgcatggtgagagagtgagcaggacagaggagggaggtgccaggctgtttttagcaatgagctctcctgggaa

SEQ ID NO: 243211 - DNA, 409 bp, Homo sapiens
tatataatgtttaatggttaactttactgagcctgaaaagcttagatttaatactaacagacttctggattctctctataaattgaggcctgcagyacattcagtaaaatatacaaatcttgagtgcacagctttacaaatggttacatgtagatgtacctgtgtaactttcacctacatcaagatgctacacatttacatgtccccagagattcctgttgccctttccctatcagtgattctcttctctctaactatttcgacctccatccctctcggttagtattacgtgttcttgaagttcccataaattgactcagacagcattattcttttctatggtgggttccagtttcagatttattccccaaccagagattttcccatgcatgtcatcactgggtctggg

SEQ ID NO: 243212 - DNA, 582 bp, Homo sapiens
ggtaatctatttctgttcaaccattatttccctgaaaatttgcccacaattttactttacattaaatatgatagagaagaaggatttctggacaaagaattagacaatgtgggtattagctstggttcttctgttgactagcaaagtgaccttgggcaaatcatgtagctactctggtttgaaatttgtagtcctctggtttgtaaccttatattacaggatagtgctaacagtgaaagaaacttgtgacttatgcaaggtaacattgctactaaatggcaaagaacccaagtctatctgactctatgtactatggtagtggaattcaggatgttatggattttctattgttgctgtaatattggctgctcagtaaatgaaatatgctattttgaaaagaacatagttgggatgaggaagttagactagcatatatattcaaggatttttctatcacattagtccataatttatgaaatttatgtaactttctttctttcaatgaaagcttctatttggtcagttcatatgtccttaaatttcatacttccaattacaactcttattgtttcctccactgaa

SEQ ID NO: 243213 - DNA, 582 bp, Homo sapiens
ggtaatctatttctgttcaaccattatttccctgaaaatttgcccacaattttactttacattaaatatgatagagaagaaggatttctggacaaagaattagacaatgtgggtattagctgtggttcttctgttgactagcmaagtgaccttgggcaaatcatgtagctactctggtttgaaatttgtagtcctctggtttgtaaccttatattacaggatagtgctaacagtgaaagaaacttgtgacttatgcaaggtaacattgctactaaatggcaaagaacccaagtctatctgactctatgtactatggtagtggaattcaggatgttatggattttctattgttgctgtaatattggctgctcagtaaatgaaatatgctattttgaaaagaacatagttgggatgaggaagttagactagcatatatattcaaggatttttctatcacattagtccataatttatgaaatttatgtaactttctttctttcaatgaaagcttctatttggtcagttcatatgtccttaaatttcatacttccaattacaactcttattgtttcctccactgaa

SEQ ID NO: 243214 - DNA, 582 bp, Homo sapiens
ggtaatctatttctgttcaaccattatttccctgaaaatttgcccacaattttactttacattaaatatgatagagaagaaggatttctggacaaagaattagacaatgtgggtattagctgtggttcttctgttgactagcaaagtgaccttgggcaaatcatgtagctactctggtttgaaatttgtagtcctctggtttgtaaccttatattacaggatagtgctaacagtgaaagaaacttgtgacttatgcaaggtaacattgctactaaatggcaaagaacccaagtctatctgactctatgtactatggtagtggaattcaggatgttatggattttctrttgttgctgtaatattggctgctcagtaaatgaaatatgctattttgaaaagaacatagttgggatgaggaagttagactagcatatatattcaaggatttttctatcacattagtccataatttatgaaatttatgtaactttctttctttcaatgaaagcttctatttggtcagttcatatgtccttaaatttcatacttccaattacaactcttattgtttcctccactgaa

SEQ ID NO: 243215 - DNA, 611 bp, Homo sapiens
  misc_feature (1)...(611): n = A,T,C or G
nnnnnnnnnttcagcattggtacttcatcatgaagaggtaggcagacatagagtcagactagtagggaagaaggctgggactgaaggtttcgttcaccatatatcaaaactctttctctgctaatctgattcttgcaacacagggctactttgcacactgrtcaattccactaacagaaattgttctatttccactcacttcctctgtgctcttggttttttctgctcacttatcatcaatcacagatcaagcaaatgttgatttgctgggtcgtgaccacattcagggagctagcaaaaggctcatggtggtgctgatattttgaattacataggtgctgtgtggctttgcaacaagatgtatcataggagcctcacactgagcttgtgcaaaactcttctcttgattctcccattcatacctaattctccttcagtagcccacaccttaaggaatggctcccctaacattccaggtgctcataccataaactggagccattcttaatttcccttctcctctacctattaccttcaatggctactggcgttctagctcccaaactgtgaagtgaactgtgtccactctctccatctctgtggtcatcatg

SEQ ID NO: 243216 - DNA, 599 bp, Homo sapiens
actcacttcctctgtgctcttggttttttctgctcacttatcatcaaycacagatcaagcaaatgttgatttgctgggtcgtgaccacattcagggagctagcaaaaggctcatggtggtgctgatattttgaattacataggtgctgtgtggctttgcaacaagatgtatcataggagcctcacactgagcttgtgcaaaactcttctcttgattctcccattcatacctaattctccttcagtagcccacaccttaaggaatggctcccctaacattccaggtgctcataccataaactggagccattcttaatttcccttctcctctacctattaccttcaatggctactggcgttctagctcccaaactgtgaagtgaactgtgtccactctctccatctctgtggtcatcatgttaactgaagccatggttgtcctttctcctgaattgctggctaagccttctaattgttttcctgtcattcctttgtatgctcttctgttatctaattctaacagcaaagagtatattttaggaagcatgtaagttttgtccatgctgtacctttaaactcttacttattgcatttcaagtt

SEQ ID NO: 243217 - DNA, 599 bp, Homo sapiens
actcacttcctctgtgctcttggttttttctgctcacttatcatcaatcwcagatcaagcaaatgttgatttgctgggtcgtgaccacattcagggagctagcaaaaggctcatggtggtgctgatattttgaattacataggtgctgtgtggctttgcaacaagatgtatcataggagcctcacactgagcttgtgcaaaactcttctcttgattctcccattcatacctaattctccttcagtagcccacaccttaaggaatggctcccctaacattccaggtgctcataccataaactggagccattcttaatttcccttctcctctacctattaccttcaatggctactggcgttctagctcccaaactgtgaagtgaactgtgtccactctctccatctctgtggtcatcatgttaactgaagccatggttgtcctttctcctgaattgctggctaagccttctaattgttttcctgtcattcctttgtatgctcttctgttatctaattctaacagcaaagagtatattttaggaagcatgtaagttttgtccatgctgtacctttaaactcttacttattgcatttcaagtt

SEQ ID NO: 243218 - DNA, 546 bp, Homo sapiens
ggcagtatggaatgtaacagtaatttgtgttttgcaaaagttagccctaagacatttgaaacctggatggcaagtataaaacctagtaaagatagactccgagccttacacaatcctctatgttataagcagtggagatttgtgtaattttaattatacaggatgaacttgaatttgattctttctaaaagaaacacaagttagactccaagaagcattgaagtgactgggatgcttttcattctttatatcaaactgtatgataaccatgacattctggatacctgcagagaaagagctatttgactctttggtactgacatatttctgctaccaacagttaaatttctctgcttaggtagagtcagcagtgtttgtgcccagactggctcacaccagttgtgcttgttttggcaaatacacaatttattattagataaacsaatgaaatgagaagtgtgaaaagaaagagtcattgattgtattttaaaaagataaaacaagtttgaatgctttagaatacttgaaaatcacttaaactattgt

SEQ ID NO: 243219 - DNA, 606 bp, Homo sapiens
gtcaaaaaaaataaccattagaaatcattggcttccactcttctgttaatagtgttgytgttgatgaaattctctgggttttccattcaccacagcaccaccacagaacagttgacttggtgtagctaccaagactgtaacagtgcttaggaaaaaataatcatcctagtctagttcacaaaaagggattttggcttctgaatcgttcttctggattgcttgctctgggcgaagccagtggtcatgccatgaagacactcaaccagccccaaggagatgcacatcatgtgagggagccatcttggaagtggctcctccagccaaatcgtgccttcagataacagaagcaatagccaatatctgactgcaaccgggctgctcccaaattcttcatccatggaagccagaaagataaattattgttgttgttttaagcctctacattttggggtagttttcacagaggaatagataactcatacagaaatgttatgtctgtttcaacttaaacatcagcattttattaacttgagaactaatttgagaaaacattttataattaccttaaggagcatgtagtagacagaaaacaatagctacccaaag

SEQ ID NO: 243220 - DNA, 549 bp, Homo sapiens
gtctagttcacaaaaagggattttggcttctgaatcgttcttctggattgcttgctctgggcgaagccagtggtcatgccatgaagacactcaaccagccccaaggagatgcacatcatgtgagggagccatcttggaagtggctcctccagccaaatcgtgccttcagataacagaagcaatagccaatatctgactgcaaccgggctgctcccaaattcttcatccatggaagccagaaagataaattattgttgttgttttaagcctctacattttggggtagttttcacagaggaatagataactcatacagaaatgttatgtctgtttcaacttaaacatcagcattttattaacttgagaactaatttgagaaaacattttataattaccttaaggagcatgtagtagacagaaaacaatagctacccaaagatgtccacatccttttaataatcctaattcctagaacctatgactatgttactttacagggtagaaggaactttgtggccgggtgcggtggstcatgtctgtaatcccagc

SEQ ID NO: 243221 - DNA, 500 bp, Homo sapiens
ggacagattcttcccctgaagcctccagtaggagcacagccctgctgacactttgattttagacttttgacctccggaactataagggaataaatttgtgttgttttaagccaccaagttcrtgttaatctattatagcgcaataggaaaccaatgcagagcacttaaatcataccatcttaagtttttcaaatcatactaatgggtaatgaaaaatgatctgggagctgtgagatttcaggtgaatcactagagtgctttgaacctcaccttgttttacctataaactgatgtttgattacaatcatcttggtggcctaccaaaggccccaccttacgataccatcacactggggattagggctttgacatatgaattggggaagggagatacataatggaactgatatcaccatttagtccatagcaaagagtaataataaaaattagaccaactttcagttggtatattaatattttaaaattctctgtagagaatc

SEQ ID NO: 243222 - DNA, 358 bp, Homo sapiens
gagccatgttgctgactagcaacctcacatttyactcatcttttcaaaatgctagcaggtctagatattgatgggggaaaaaaaagccacctccctgccccctccaagcacataaataaatcccttctgcaccaaaacggatccatcttctaatctagcaacatcccctctctcctccattttatagcaaaagccccgcagagcaaacaacaaacagatcctctttagaaccaattactctacttaaataaacagcaaagggacttttctggtcacagtgattatccaaagtgtacagagactgttctttgtggaaaataactgaaacttttagctcaccctcttcctcaagttgtac

SEQ ID NO: 243223 - DNA, 420 bp, Homo sapiens
gaactcagcgagctcaaaataagtaaaagtagcaaattatctgaagaccttttcaacctgtttctgaccttcttgattcatttgcagaagtaattgcctatggaaattgctgtgcttttatstgtggtgctattaaaacactggttgaaatgaggtggcacagactgcattgttaatgggttaccgtggagcaggagctgttgttttattcgacagatgagaagtagctgaaaataaccttctgtctcccctgtaagaactgtgcttgttaagtgacattcaccaacacggccgagtttgaatgtggtgtaggaattcatgctattcttagcaggttattaaatgagagtttttaggcttctcttgttataaaatagggaatgtatctgttttatattctctgtttcggggagcttcttt

SEQ ID NO: 243224 - DNA, 471 bp, Homo sapiens
ctttacaattatttttacttttcctttccttcttttgaaagacagcacagccatcagaaaaaagctagcaacccccagttcagccttcaggatttcatttgagaacatctaagaagtattkttcttctctccatgaaattatctgctaaagcagttctgcaattattctgaatacatagaaactaaaatgacttacactctgaaagttacatttccaactgactatgtgtgaaaagcagctttggaaaatgtgcctttgtgtgcagaacccagtgagcaattacctatcccctcctatccaggctgtgcaagcacagagcctgggcagcacctgtaccaaggctgccagtgcctgcggagttggcacatagacacctggagtctgatgggaaacacgttcaccgtcaaagccctagtttcttaaacctggactgaatataaatttaccttttacaatttcataactataat

SEQ ID NO: 243225 - DNA, 591 bp, Homo sapiens
gtagaaaacatattcaagtataatgcacatgaagaattctcatcagaccagctgaattaaatggcagatggatatgtaacatcttggtatgtgggcagatttaaaatctaagtgttcacatttattaattctaaaaaagcataaatttccattgatttgaatcagtgcaaacacacaatgtctacattattctacttttccaatgtttctaataaggagattttttttctctgatatgagcagaagcatatcaagtttagggctagaaatttgggtctccaaataaaaatctttgcaggagtcatgatactcttttggctatttcttttgcatatgcttttgtttcgtgagccttcctgcttcttgatccgaccttttcagtaatacattaaactgtcagtttctagtgcttatttggattattttcagaccgagcacatagattttatagtaagttgttataacaccattttgactccttagtaactctttctcatcataataatattygcattatatggaatcatatgtattttgctgggccaggataagatgaaggtgtaatacagagaacgtgttttaaagccattt

SEQ ID NO: 243226 - DNA, 317 bp, Homo sapiens
gttcccttctggcctgggatgtgtctagaaatgttgtctggagctagggcctcatgaatctgattggtgccctatcctgctgtggctgagctagtaaccaagaggcaagacaaagtcctccccactcttccctctcctttcctcaagaggaaggaaggggccttttttggagtcwtgagctgtacagcctggggttggggagggatgatgccagcacttccttagccagcctggctggtgtcgcagcgggtcatgtcctccctggcccccctacaacccaccagccaggtccactgactctgggcccagttcagcac

SEQ ID NO: 243227 - DNA, 557 bp, Homo sapiens
gtggttagttcagccctgtgagcccccagttgcttcacatgtagtatgtgactcatggataaggccacgttcaccctgattcatctatgatgagctaacgcctagctggctcgtggttggaccttagaagtttcaacaagggtcatgtgtacgtggargagccagtgctttcacggcacattagtcacaactcccacttaacttctcacggctgcctccccttccctgtttgtggcatgggccagtataatccatctgtgcattctctctgggcagatgaatatttaatcagcagtgaataaaacaatattcccttgtccaggacctggataaattgctaataataataactatcacatcattctaagggaatactcctctgaggaaaacaataatgtcccgtttagccccactgagactgtggttttaaagccctaattttgtattattgacaaagaaaaataagtagatatggctggctcacaaaagcatctagaaagttctatggcaaaaaaagaggttcacctgaaattagtattccttgttttgatcttgtg

SEQ ID NO: 243228 - DNA, 596 bp, Homo sapiens
ttctgtgtattaggcctttcttgcactgccctaaagaaatacctgaggctggattatttataaagagaagaggtttaattgactgacagttctgtaggctgtacaggaagtagggtgctggcatctgckcagcttctagggaggcctcaggaaactcacagtcaactgtgggagtagacacttcacatggtgaaggcaggagcaagatgggagtgtggggaggtgccacacacttttaaaccacccgatctcatgtgaactcagagcaagagctcacttatctctaaggggatagcccaagccattcatgaggaattcaaccccatgatccaaacacctctcaccaggccctgcctccaacagtgggggttatatttcaacatgatatttgggtagggacaaatatctaaactatctcgttctgaagaatgtcatttgtattttggtagagattgcattgaatatgtagactgctttgggtagtatggtcattttgacaagattcattcttccaatccatgaacaaaggatatcttttcttttttgtgtgtcttctacagttcctttcacagtgttttgtagtatccattgtaatg

SEQ ID NO: 243229 - DNA, 604 bp, Homo sapiens
gactgtggcactgcttatcaatttccattgcccatcatgcattcattcagtctttccttcatttttgagcacttgtgctggccactgttctagttgctggaggatattcatgccttcaggatattcacattctccaatctgttggagctctgcccaactcacagtggtcagcgaagggttagaaaatgttcatgctggctgggcatggtggctcacacctgtaatcacagcactttgggaggctgaggtgggcagatcacgacggcaagagatcgagaccatcctggccaacatagtgaaaccctatctctactaaaaatacaaaaaaatagctgggtrtggtggcacgcacctgtagtcccagctactcaggaggctgaggcaggagaattgcttgaacccaggaggcagaggttgcagtgagctgagattgcaccactgcactccagcctggcaacagagcgagattccatctaaaagaaaagaaaagaaaagaaaatgttcacgctttgcctattcccctgctttgcaaggcaaggatggcactgcctgcatgcccagaggtacctaatgtctttgtcttacagcctctgtctaaattaga

SEQ ID NO: 243230 - DNA, 555 bp, Homo sapiens
gttcttagggtagttcttctctggaaagtgatctactcccaggctccccagaattcacacgggattacaaattgcaagcactgcagctgattttaattgccacagtgatgcatagggagagatgtgatatctggagtaactggcttctaaacaatgaggggttttaaagattaaagtcaacactttaaatagcactcaaaaataaataggaagctaatgctgaccatagaatgcaggtataatattctccatatgttttggaccctgtagctgaaagacacctagccctttgtatcacacacaataaaaactcaaagacagggcattatagcactctattttgaaggttagaaatgcaaagatcatggtgtgaacaagacatatgtataccgagaggtgttcttggatgtargataccaactggagaaatcagtagacatctgtgaggccttcttaacccaaggcaagttggttgctgcagctaaatggattttgaatacctggaatcctggcctagaagtgacttggtctatagttcctgctgttacctgacaa

SEQ ID NO: 243231 - DNA, 574 bp, Homo sapiens
ctttttaagtcaaggttgtgagggacttttcttggcaggtgatggaatccatttgccatgacctttgagagaatagtatctgagctggccactgataaccagcagcaactgcaagagtcacttggttctcctgggtgccctgggccctctatccaggtctgcaggcagcagggccaagctcagctctgctcactcttattggtagttctttgaacagtgaaagaaaagcctggaaaatggcattcatgaagcagctactatgtgccaggcactgtgctagaggttgtgtgtgygttgatctcctttagtcatcaccacaactcattttactgtgggaaaaaactgggactcagggaaatggagtgggaaccagaggaagtgctggatctggggttcacatccagatttttttactccaaggccttcactaccccaggcagcacagccttagtgaacttctcaaaggggaaatggttaagagctaagaaatgaatgcccttggaagcataaatcatgagatttggggctatattagtaaatgtgcgattcgggctttaatttttagcagggtatt

SEQ ID NO: 243232 - DNA, 623 bp, Homo sapiens
tatttcctcttccttataattttcttgataatattttcttttctctagcttactttattgtaagaatactgtatataatacataaaacatacaaaacatatgttaattgactgtttatgttatcagtaaggcttccaatcaacattaggctgttagtagttttaagttttgagggagtcaaaagttctatttggactttttattgtgctggaggtcggaacctctagtccccatgttgttcaaggtcaactgtattttgaacagttgtagagtactacaaagatagtgtcgttatctattggcggccaaagtttatttctttgcttccttctctctcccacatccatgtttctgcctgcctaagagtgggggccagcagtggcaagatcagattacctcaaggtcacattactgggcaaagagytagacttctgcagggccagaagaggtttgggagctcatttcatccattcccctgtgcccaggcagccctggagtaaatcagaagggaatagatgggactctctcctgttagagaaggaagaggccttgcaaatccatggctaagcatgcttggaatttactgtttagccctttagatggaatcaagaaactggggattt

SEQ ID NO: 243233 - DNA, 592 bp, Homo sapiens
ctttggtttccaatagtttaagacaaattcaaggcaccacccagagggattgacttgcagttgaattgtggtagtttctcctggtctgcttaggaaaaaaaaaagtttttccaagtcgtttcatgatacttgcttaatttcccagaataaaaataagtaatgattcttctgaggtggctctgtatcctaaatcttcaccctcatratcccaaggagagtcctgaaggtatcctgtcccaccagaattcttgtgatttaggtcttaaaaatatagacatgtattcccactccttgatcaaacattgcgcccttcatgcctgggctactcagggatgcttcccctagtatcctcccttacccccattcatttacctgacatcacaggagtctaccaaagttaaagcacctttgtgttttgtctctcctggagggtgctaagctccttctgatggactacagaaaggcgttcatttttgaggactatccaacgttagtcgcatggtttctctgacagtgaagtcccttaaaagtttgtacatgctactgaatggtggggtttacaagttattataaaagtgcaaatgaaacactt

SEQ ID NO: 243234 - DNA, 610 bp, Homo sapiens
ttgtgcctttcaccatggctattcaaacacgtttgtcatgaactgacaattcttgttttactttgatttttctcaaaaagtastttataagcagtgatggtccaaaattttcttctttaaaaaattcatggtaaggacgctggcaggcacttttttttgtttttttttgtttctttgttgtttgttttttgagacagagtctcactctgttgcccaggctgcagtgcagtggcgtgatcttggctcactgcaacctccgcctcccaggttcaagcaattctcctgcctcagcctcctgagtagctgggattgcaggcggacaccatcatgcccagctaatttttgtatttttagtggagacagggtttcaccatgatggtccgactggtctcaaactcctgacctcgtgatatgcctgccttggcccctcgaagtgctgggtttacaagcatgagccagcatgcccagccacaagtactcttaaataaaggtttttcataatttttgcgatcatactattagagtaggaaaaaccatttcagggctccaattgaaaagcaaatgtgggcatgagggttgctaacccaacatcaagcagaacaacaaacag

SEQ ID NO: 243235 - DNA, 601 bp, Homo sapiens
tgaattcttttctggctacaagtctccacactaatgattcaaacttttcccccatttttactgacttaagcatccctaaaactaaaagtgcttttctccaaggccctgcaagctgaaactagaaaatytgacatacactttgagagaaatgactatagcaagtttgatatgaacagctttcaggcttgttgaggtacagactcgtgaaaaggttcactggaacacctgatgcaaactccacaccaagaacaatctgtccaatcgtcactatctgctctcactttagccaaagatgcttcaagcagaacatctaataatctcaactgactgccctctaaacttgaaagctgagtttatactctgttctaaccattaacttgtgtttgttgttgttcccatagaaatgtctcctgataaatatctgattgcttgaatcatacataggactaactctggtagaagcccctctaaaaatttactgcctaaaatgagaaacaacagttagctgtctgactcgaccggcctattctcagtcctgagagactggttcaagccttgtataagacaatccaacaacccagtttctgcactgtgaaactac

SEQ ID NO: 243236 - DNA, 517 bp, Homo sapiens
gcacctacttgggacagagctccaagggggaggggcgggccgccatgtttactgtttgggtgacttagcccttccagcctttgggatttggaaagtccaaaccaactcggggcagaagggatcccccagcacagcacagctgctctaccaaaacatggccagactgcttctctaagtgggtcctgatcctattcttccttactgggagggacctcccaaccggggcctccagccacccctgttggtgatctctggctgacagagatttgaaaattccctgggacagatgtcccagagaaagggcaggccaccatctttgcttctgcagtggagccgtccttgctaacttcgggctaacaaagaagcagagaccctaagtgccttctccacacctccaacaaactacagccaacccaaggagaagatgccagtttgtctctgaggggtccgacacacccyccattgcttgtcaccacacaggaaacccctggattgggcttacagcacaaaaactcta

SEQ ID NO: 243237 - DNA, 626 bp, Homo sapiens
tcctggaaaaggtttttttctcagttgactgaatgacttttctccactctgtcttgccactcttggtacatacatgaaaggccctgagataacttctgatggcctaagcctccttgagaaaacagaaaaggcactacagatcccattttgggaaaaatctatattttcctcatagaaaccctagaattagagacagacaaatccctctcaaaatcagcttttgccttccagctatgccccagaagctacatactttcctagccgtattcttaaaagactccaccctgaactactgaatcctcttctgtttgtgtagtcatatatgtgacatgtgtgtgatgtctayttaaaaaaaaagctaattaattgacttaaaaaataaacacttgaatcaaacattttttaaaaagaatataaaaactatggtacctttcaattcacataactttaatttttaaagaataaaaaccgtcttaaaaattattgataaaatacaaatgtcttcaaaatacagataggtggtctaaattatacaggtcagatactagatttactaaatattttaaggttgtaaactactttggcctttaagaactgttcaacttgcctactttacaatgggtgaa

SEQ ID NO: 243238 - DNA, 615 bp, Homo sapiens
aaggaaattttataaaaatcagaaagtggaggaatattcttgtcaagaactacaaaargtctagaatttgaccctatttacaaacttacaaattagcctgacacacacagtttcatgtattctgtcagaagacatgagaatcttgggtgagaggcaaaggactttattactcagaaaaagcagtagctagaacttcctgttggcttgtgttcgttcccaatgccccccaaatcccacaagggcaatgcaaaggaccaatgatggatggctgcacagtgggttgcattacaggaaagaaacaatacatttggaggatccactgcttttatagaacatggaaataaacctgctgtttgtgatgttttcccatccttcagggtttctcactgaaaacatggtcctgagaatggccaaggtgaagagtcatcagtgccttacctttttggcatactcagcaagagtacgcataaatgcttagggaccatgatgggttgtctttcccaacaatattccatttgtatgtgtggaaactttaagtcagcaaattggtaattcttctcaaattagtccataaatccaatattattccaatcaaaatattaacaggccaatttt

SEQ ID NO: 243239 - DNA, 209 bp, Homo sapiens
acccctaaaaaagcggagtcttgatgtccaaaaggaggctataccagggtgtcattgcagagataaaggttaaacwcacttgttttatcaacatatccattttttaaaggcagatattatattaagcactgcagaaaccaagataatagtaagtaataataatagtagctaacagccacaggcactcattatatctcagtgctagctat

SEQ ID NO: 243240 - DNA, 580 bp, Homo sapiens
agttggaagacaactgccatagtccaaacaatatatgtaaatagattaaacttgaatggctgtagcagagatagaaaggcacagataaatttaggaaatgactctaaaagtggtaaagtaaggaaacaaatttgattttgtcatttgtaatatgaacttaataataggaatagttactaggtttattatcagtccccagaaacttaaagttatctctgtaaaacaatagaagccgacttgaaagaataaaaatatgggcagagcacaacggttcatgtccgcaatcccagcactttakgaggccgagggggacggatcacttgagctcaggagttcaagaccagcctgggcaacacagtgaaacctcatctctacaaaaatacaaaaaagtagtccagcatggtggtgcactcctgtagtagtatcagctactcaggaggctgatgcaggaggattgcttgaacccaggaggcagaggttgcagtgagccaagatcatgccactgcactccagcctggatgacagagtaaaagcctatctaaaaaaaataaaaaaaaaattaaaaaaatacaagtatgtt

SEQ ID NO: 243241 - DNA, 517 bp, Homo sapiens
tcctcttcttgagttctctgggtgcagagctccagagctgtttctttgaaatacaagttatctgttgaacttaagcatatttggcagagcaccctgggaggacagcactgcccccaaactctgagtctcacaaggagggaggtcctttatcagcgtgcaagtgattcccctataattccacccaacccaccaaaaagcctcacttccaactccatccctgataccatggatgatgtaaagaatggtcagtcatttcactgcctgatgtcactaccaatacacaagaagctagaaaggagataaacagagagcagggaactctaaaatattttccctgagaatcactggaacaaggggtctgattacttctctgttggctgttgaggatccatagtcaaccgactgtccatgctcctcctattccctgggacccttgctcgaatgacctcaccacctggctggcacatgctaccctggggtggaarcacattctcttatgacttgcaatgggaaaaag

SEQ ID NO: 243242 - DNA, 562 bp, Homo sapiens
gacagggttttactatgttggccaggctgatcttgaactcctgacctcaagtgatccacccgcctcggcctcccaaagtgctgggattacaggcgtgagccactgtgcccagcctctcttgctatttttgatttgccctaaactccatcacccttcttaaatgcatggtacactttttacagcataaatatttggtgatagccctgaggctaaagtgcaagatcacagcacgcatcggggcccatttggtgcaggctcccatcccacggccccctgcccatgcgccatgctgtagcatgtgtaattcctatcaactttctgaaaatagcaggctccaggcctcgtgttgcatactacctggaacaccttccctcttccttctcaactggctgcatctgactgatcactaaagatgccattcaggtgcctcctccaagaagctagctgggtcatatgcacctccactggtgggacggggagagtggacagaacgcctatgaraacatgtgccagactgtatgttgctggtgctgatctccttgactaaacagacttttattat

SEQ ID NO: 243243 - DNA, 590 bp, Homo sapiens
atagcagtaagtttgaattttttccttcctattttccttaaattagattgtctaatttctgttgacagaaccccaccaaaagaaatatcctccatctttctgggctgatattgaatcaaatcaaacmgtcttacaaaaggaggaaaaaggagtagactcactaattctctgctcttcacacttcttcattatatcttgttttatctttcaagtttgaggagatagagaagagaggtctttttttcctaaaggataaatgatggcaggcacgagaaaaagggtcttttctctgtgtgatatatgatgagaaatagggggataaaagcagctgccacaggacaaatgttataatcaggttctattatttttagagctgatcaatatgatttcatttgttttcagtcatgttttgtacgaacatttggggattagaatttgaggtttagctagtttattggttatatcgtgaagcataatcaatcttattacaggcaattatagctctctcagttgttggaatcaatactaataatgatgctgtacattcacagaacactttatggtttacaaagccatttcttaaatgatca

SEQ ID NO: 243244 - DNA, 590 bp, Homo sapiens
atagcagtaagtttgaattttttccttcctattttccttaaattagattgtctaatttctgttgacagaaccccaccaaaagaaatatcctccatctttctgggctgatattgaatcaaatcaaaccgtcttacaaaaggaggaaaaaggagtagactcactaattctctgctcttcacacttcttcattatatcttgttttatctttcaagtttgaggagatagagaagagaggtctttttttcctaaaggataaatgatggcaggcacgagaaaaagggtcttttctctgtgtgatatatgatgagaaatagggggataaaagcagctgccacaggacaaatgttataatcaggttctattatttttagagctgatcratatgatttcatttgttttcagtcatgttttgtacgaacatttggggattagaatttgaggtttagctagtttattggttatatcgtgaagcataatcaatcttattacaggcaattatagctctctcagttgttggaatcaatactaataatgatgctgtacattcacagaacactttatggtttacaaagccatttcttaaatgatca

SEQ ID NO: 243245 - DNA, 604 bp, Homo sapiens
gttttctgctctgatccttcaaatactctaaaggggcctgctcctgtgagagaaatgtatgctagtctaacagcaccaagactgggtagagaaacctgtggaattcaataataggaaatcaacttgatgacagatataagctacattttccaatataagctataatagtaacaaaagtaacattttgagtgctatctgtcttacaatcatttctcttcacatgttcagattgtggacagaaaaatacaaactagagctctcttawaccccaattttggtgtgttagactgagatccctgataaattttgggacaacagaattgtcgaccaaaataacatatttatgaccagggtagacaactttggctttgaacttcagtgtgttgactggacattttactttggcagtttgtaatggcttttattgggccacccttttaatgatccctaccttctaatattcatacccttgtgtattccctcattccatgattttgagctgcacctagcaattgtttctaacaaatagatatacaaaaagtgataggatgtcatttccttgattaggttacaaaaacatgtgactttcattttgctagcattt

SEQ ID NO: 243246 - DNA, 560 bp, Homo sapiens
ttcccactgccacaaattatgcagttgcgtttcccacatttggggaaatcacaggatcagcacctctggagtgcagtggaacctcaccctgggaaaaccaccttcatgatcatggtatctcccctgccaggtaaggatctgttccactcacgttttatgtgtgtggccagtggagggaaaaattaaaattagatttgctttctagtctaaaaggaccactcattttgatataacaagcatgtgttgattgttatatcatctatataattagatatagatgtgcatgcaaagtttagatcccgtagatgtggatgatgtacatggagtggatgacgtcgatgtagttgacatagatattgtagatgctgtagaggtagctgtcgactacgtagatgccaatgtagagtagatggtgtagatatatacacagatttagatagagtagatgcaaatatagatgcagatgtgcatggcatagytgtaaatatggatgcagatgaggtaggtgatgtagattagagtttcttaacctcaacactattgatattttaggccggata

SEQ ID NO: 243247 - DNA, 569 bp, Homo sapiens
acttgggactgtagtacccacccccaaactgggaaggtgctgaaagaccaaagaataacttggacaagtccagcttgatgagtagttgagtttattagggcttataacagggcactcctggatggcagcaggatagctctagagatccgtgcgtgtgcacgatgggactgttttccttggtaggttctcagattctctccgggatgtctgggttctcaaggacacctactcctcagctgggcaccatggccttggctcactgctcagccttcagggttcaagcagcagacatacactcttaagtcacctggtgggggacccactacacactacaacaactattttcatatcatattatagtatgttgaaggtgttttaaatttttacgctatcactatgctatggactgaattgtgtccgcaaaaaattcacgtgttgaagctgtaacccccaacatgactatatttggagagagggctttttaggaggtaattaaagttaaatgaggtctataggtagaatcctaatctgawaggatccttataagaggaggaagagaaaaggagatc

SEQ ID NO: 243248 - DNA, 476 bp, Homo sapiens
ccagctgtgtcattgacaccatttcctcccagctcctggggtggcaactttatctctgccctgtcacctggtcttttccccaccttacctgccccttcccacagtcatcagccccataatatatcttgccaaatgtcaccaggtccttctttcattctctgagttactgtgggagattctttagcgctcttcattcctctcttcattcagtcaacaaattttcatttgtttcactttggccasacacctttctgggtgctgctgccatttacataagacagacatggtctttgcctcatggaaccttaaggtctcatgtgagatagggacaggaccttaaaggaataattataggaatgatgtgtactatgaaaaaggacatacaaggggctgtgagaccatgcattgtggatctaaggtttgggttttaggaaagtcttctctgaggaagtcgaatttctgctgaaacctgaagg

SEQ ID NO: 243249 - DNA, 665 bp, Homo sapiens
aaatatcagtaataagctggaatcaaaaatgctaaacttcagattgctacaccaagctacccaaaacaccccaggacctatgcattctggttagtcaaaacatttctgtataatggaacaaagcaattgccagtagttaatccatgagaagcatactttgctgtttggytggttttttgcttagttttggtttggggggaagttcttttatatctgatttaaagactattacattgcaagtttcatgacttacaaccatagttggaatgttctgtatgagaaagaatgttttcattagcaatcagtcatttttaggttaggactgaactaatcaggccaacaccacctcatgatcatcggtattaaaaactattgatagatgtaaacatgtgattggctgtttaactgttttccattgtcagaatgaaattaacctgtgaaattagagccatgcgtgttccattcacactggaaaaagccaagagagggaaaatgttctttgcctccaaagcaagtttttgagatttctgctctacgatgattttccccttaaaatgagagatgagaaaagaaattaaagataatcatatctgcctaggttttagttggattggggcctatcttcattagtaataaatctcatatttcctcatcattaaaaagaa

SEQ ID NO: 243250 - DNA, 464 bp, Homo sapiens
gtcacacagtggatgttcaaaaaatatttgccaaggggataagttaatgaataaacttagaatggtgttgtgagccaacagcaggaatatttcaaatctttctgggaaagctgcttgccccttcacctctgctggactccttgccccgaacccagtasttcagaaccttaaaggaaactactcagatagggtagatgtctttggttttgtctcatttcttcattcaccgttcattgaacaattactacagggctccgcctatgtgtccaggcaccactgactatctgaaagcaaggtgccaaagtgtaaaaaacactgctgaaaacaaatcgatttgtgtttgtgtgctgtcatgtggagagcagagcccatcttttggtatatttcagcgatgcctctttcttcctctgggataccaagggctttccatttatgcttgcagccaagaaaagttttccagaatc

SEQ ID NO: 243251 - DNA, 536 bp, Homo sapiens
agatctgcttggtaaatatttctagaaatattctattctaaccattttcctgggactcatgtcccaaataagacagaagctgtatcaggtaccattcaccatggggttctgatcactttccctaattctgggtgataagaaaatagggctagaacctattaggttgctgcaaaagtaatcacggcttctgccattaaaagtaatggcaaaaaaaagtgattacttttgcaccaacctaatggaatagtaggaacagtattggaatagtgggattgtgttgagaagacacagtctcatccaggctctatgtcctactttctgtgtggtctctacatctccaagcctgcttcctattccctgaaacacatttttttcctgwgttgtaacggacctcaaatgagacaataaatgtcaaagcacattcgaaactgtgttccttattacccagtgaacgatgctggggaatgacacctcagctgaaatatacctcctagtggattgcagctggactcagccatgtagcttcatttgtgggg

SEQ ID NO: 243252 - DNA, 545 bp, Homo sapiens
cgtatatctttcctcatcttctctcctgttttcctcaactttccaaaaaatgaagtctcctttcttttctaaaaatcaatgatagtcccttgtctttgtcttctctttctctttgtgaccttgcctygtcagtgttctgttcctactgtttcgtggattttttgttttaccctatctatagtctctcttctttcagcccacagccaggcccaggttcctcctatcctaaaagagcctccagtcatctctgtcatctcaccaaaccacattgcctttctttctctgccaaattgctaaaaaataataataaataatgactgtccttgaagcctccacttcttcaacctgatcatttgttataccattgggtaactggtacatggaacacacaagaattatggggttttatcagtttttttagaaaaattgtcttcccccatcctttgaggtttatgtaaggctggaagttcctttcttggcactggatggcacctcagcaatcccaagatttttctggtccctcctaagatagtaaaaaagtctgt

SEQ ID NO: 243253 - DNA, 592 bp, Homo sapiens
agtcccagctacttggggggttgaggctggaggatcaatggagcccaggatacagaggttgcagtgagctgagatcatactactgcactccagtttggacaatagagtgagaccctttctaaaaaaaaaaaaaaaaaaaagttgtgaacaaaaaaawacttatttttttggttcttttaagatcttcttgtctttggtattcttcactttgactatgatgtatctatagatatgatgtatctatgaagtatgtatggatttctttctgtttatcctgtttgagatcattggaattcctgaatctgaggattcatgttttttaataatcatggaaaactctcaggtactgtctctttgaatattgcctctctccctttttacttataattttcaaaactctgcttagatgtatattaaatattttttattccatcctttatgcctcttaacctgtttcatactttccatttttctatgctgtattatgtgtaattttttcagatctatcttccagtttacaaattccacctccagctgtgtctattcaattatttaactgtgtcattgagtttttaatttcatacctgatata

SEQ ID NO: 243254 - DNA, 434 bp, Homo sapiens
cacacaactgtacacttaaaagtggttaagatggtaaattttatgtgtattttaccacaataaaaatagtaaaagaaaatataaagaatgggctttctggcatggattgcctttagaggtagctgcctgtctatggatatttctaggcaagataatctaacaaaagtaattaatgtttcagataaagatggtttagatgatctcmtaggttgtttcctggaggtagaaaacaattgcagctaagatgtcaatgtgaggtttaatgataaacatataaatagccaggatggtagtgcttctaaattttgttgtaatttgttgcacaaagcacctgtgaggcacaactttcaccacttgttttctcctcacagttagaaatggtacagttgctggtttacttggttccattatacatctttcagttccagagaatt

SEQ ID NO: 243255 - DNA, 495 bp, Homo sapiens
tcacataacaacaccttatgtgacctccaatcccctggtcccaccactttctcactttctagtatccttatcctttccttacttcccacctaactcagcttaagatttatggcccatcacaatcatcaytcccttgcaaaaataataatagctagcacttacatagtgcatacaatgttccaagcgccgttctaagcactttacatgtggtcttaacttgagctcccccgaaaactgagcatgagtcaaaggcattcacataagtagtttatttgggaaatgatcccagaaagtatgtgtaagagacaaaagccaatgaaatatagaaggaggaaagcaatacaagggtgccttatttgggggctaccactacgggcacgtggtgcttggcaggaagccttataaatgctttcagaactatctgcccaacagaaaagaggggaatataaccatgactcctattcctcacaggccaagggtaggcacatggcttta

SEQ ID NO: 243256 - DNA, 495 bp, Homo sapiens
tcacataacaacaccttatgtgacctccaatcccctggtcccaccactttctcactttctagtatccttatcctttccttacttcccacctaactcagcttaagatttatggcccatcacaatcatcattcccttgcaaaaataataatagctagcacttacatagtgcatacaatgttccaagcrccgttctaagcactttacatgtggtcttaacttgagctcccccgaaaactgagcatgagtcaaaggcattcacataagtagtttatttgggaaatgatcccagaaagtatgtgtaagagacaaaagccaatgaaatatagaaggaggaaagcaatacaagggtgccttatttgggggctaccactacgggcacgtggtgcttggcaggaagccttataaatgctttcagaactatctgcccaacagaaaagaggggaatataaccatgactcctattcctcacaggccaagggtaggcacatggcttta

SEQ ID NO: 243257 - DNA, 495 bp, Homo sapiens
tcacataacaacaccttatgtgacctccaatcccctggtcccaccactttctcactttctagtatccttatcctttccttacttcccacctaactcagcttaagatttatggcccatcacaatcatcattcccttgcaaaaataataatagctagcacttacatagtgcatacaatgttccaagcgccgttctaagcactttacatgtggtcttaacttgagctcccccgaaaactgagcatgagtcaaaggcattcacataagtagtttatttgggaaatgatcccagaaagtatgtgtaagagacaaaagccaatgaaatatagaaggaggaaagcaatacaagggtgccttatttgggggctaccactacgggcacgtggtgcttggcaggaagccttataaatgctttcagaactatctgcccaacrgaaaagaggggaatataaccatgactcctattcctcacaggccaagggtaggcacatggcttta

SEQ ID NO: 243258 - DNA, 540 bp, Homo sapiens
tcaagggacagggtcctaaggggactggctataggagccacctattctgacctgctaaattaagagagctgatgcctcaattttggagcactgaggtcatatgaaaggtatttgctggatgagagaagccagtggatttggagagaggcaacaacacatgaataaaggggtctaatttagagctctgaagactgatgcctgtgaccccaggtaaaccatctctcacatctcaattccttttatacctaaaatcagttcatctttttgatcagaacccaagttaaggaarccaagaagtgtgttttacacatggtggttttcccattccagttgagagtacatatgttgaacataattgcaatcatatttggagacaactagtcaagtctgggctaatttgactgctccatgttatgtttaaagtgtaattctgtgcacatggaaatattagataaaaatgtgtgtctcaaaaactagcttctgattaaataatactctctttaggaaagactactaagaggaagaccccctgaacccaag

SEQ ID NO: 243259 - DNA, 447 bp, Homo sapiens
ggtatctctgtccaggttcccctcatctgtcttacccttgtggctgccctcctgacggttaaactagattcacaagatattgagatgcatgaactgcaatatatcatttgggatttttttgttgcaatcagtggaaactattcctggctaacttaacacaatgaaaaggagacagatggagggaaggagggaggargagagagaaagagtgagaaacagaatcaaccccaacaatttcctattcttctgtcattctacccaatatttaatttttaggaaacagataggtctagcttgaaccgtgtgtccttgataggaaacttttgctgactatcccaccaagactgcatgccacggggataggacatggcctaaaggagccattagaagaagggaaagtgagtgctacacagggaacaacaaacacccaccaaaggaaagcggagg

SEQ ID NO: 243260 - DNA, 462 bp, Homo sapiens
tcggtatctctgtccaggttcccctcatctgtcttacccttgtggctgccctcctgacggttaaactagattcacaagatattgagatgcatgaactgcaatatatcatttgggatttttttgttgcaatcagtggaaactattcctggctaacttaacacaatgaaaaggagacagatggagggaaggagggaggaagagagagaaagagtgagaaacagaatcaaccccaacaatttcctattcttctgtcattctacccaatatttaatttttaggaaacagataggtctagcttgaaccgtgtgtccttgataggaaacttttgctgactatcccaccargactgcatgccacggggataggacatggcctaaaggagccattagaagaagggaaagtgagtgctacacagggaacaacaaacacccaccaaaggaaagcggaggttccttgaggacc

SEQ ID NO: 243261 - DNA, 591 bp, Homo sapiens
ttaaaaggcaaaagtacagattggaagtaaagatcttcaacaagtttaacaagcaaataattggtatccataatatrtaggagctctttaaataataggaaaaaatttaaattgaaaaatacacagtacataaataggaaatttataaataattatggtgaataaatatttgaaaaaacaatcattctcactatattaagcaacattataactgaatgttagttttgcctttatataggtaaatattctcaaaaaatttatagtaccctggagaaatcagtaatcacatactattgataggaagacaaattgataatctttttgaagagcaatttgatttttccttttaaaaagttcatattttacttatataaatttattcgtattcccacaactaccccccaaaacacacattttaaaatcttctttacaacattatttgtaactgcaaaacttggaagcccgactaatattcatcagcatggaagtggttaaatacacttcagtacatccacatcatggaacaccaggtggtttttcaaaaagtagaaccatgtgttgtaatgcagaaagatactcaagaattattac

SEQ ID NO: 243262 - DNA, 591 bp, Homo sapiens
ttaaaaggcaaaagtacagattggaagtaaagatcttcaacaagtttaacaagcaaataattggtatccataatatgtaggagctctttaaataataggaaaaaatttaaattgaaaaatacacagtacataaataggaaatttataaataattatggtgaataaatatttgaaaaaacaatcattctcactatattaagcaacattataactgaatrttagttttgcctttatataggtaaatattctcaaaaaatttatagtaccctggagaaatcagtaatcacatactattgataggaagacaaattgataatctttttgaagagcaatttgatttttccttttaaaaagttcatattttacttatataaatttattcgtattcccacaactaccccccaaaacacacattttaaaatcttctttacaacattatttgtaactgcaaaacttggaagcccgactaatattcatcagcatggaagtggttaaatacacttcagtacatccacatcatggaacaccaggtggtttttcaaaaagtagaaccatgtgttgtaatgcagaaagatactcaagaattattac

SEQ ID NO: 243263 - DNA, 428 bp, Homo sapiens
ttcttggacggaaagagttaatattataatgaagttaataaaatgatctttagattcacttacgtactttaagatttccaaaatattgtccagagaaacatacaaaaggaaaacagccataggaagagaatagctaacagaaatttcaggggagttacgttkgggtgggggctgggaaatgaattaaactgggacaggggtcccaggagccttctaaagtttagtaatattctgtttctaagctgagacatagctattcaggtatttgttttatgattttttattaaactgtatgcttgagttttagacacctttgactgcatatttcaaaaatagtgattttttaaaataaaaatattagtaatttaatttgcccaaactgccaaacagctacggttgtctacaaaataccaataatgttagtccat

SEQ ID NO: 243264 - DNA, 428 bp, Homo sapiens
ttcttggacggaaagagttaatattataatgaagttaataaaatgatctttagattcacttacgtactttaagatttccaaaatattgtccagagaaacatacaaaaggaaaacagccataggaagagaatagctaacagaaatttcaggggagttacgtttgggtgggggctgggaaatgaattaaactgggacaggggtcccaggagccttctaaagtttagtaatattctgtttctaagctgagacatagctattcaggtatttgttttatgattttttattaaactgtatgcttgagttttagacacctttgactgcatatttcaaaaatagtgattttttaaaataaaaatattagtaatttaatttgcccaaactgccaaayagctacggttgtctacaaaataccaataatgttagtccat

SEQ ID NO: 243265 - DNA, 568 bp, Homo sapiens
atgcctaaaacctcttgtgtcaagtttgctttattaataatttagagatgctctttctttttttttattatactttaagttctagggtacatgtgcacaatgtgcagttttgttacatatgtatacatgtgccatgttggtgtgctgcacccattaactcgtcatttacattaggtgtatctcctaatgctatccctccctcctcccctcaccccaccacaggccccggtgtgtgatgttccccttcctgtgtccaggtgttctcattgtggagccgctctttctatgtcctgcccaggcagaggccttcccaaaagctctagagcagtagttctcaaaatgtgaccctggactcgcagcatcagtgtcacctgggagcttgttaggtatgcaaattctccaaccccaccccagcattactgaatcagcaattctgggacggggtccagcaatctgtgttttaacaacactccaggtaattctggtgcacactgaagtttgagaaccattgatccagatgtatgaaaactcattttccragttaacactgagttccaaaaggtttata

SEQ ID NO: 243266 - DNA, 621 bp, Homo sapiens
cacctcatctttctcaatggcatcagtaacagaacaaaatcaaatgaaagtgctccataaaaatgagcactgcccaagttatagtgtgtgcgggctgctgcccactactcccttctctgagtcattccccgatgtgacttggcagcccagctccatcagctctgtggttgaaaaaaaatgggtcattgcactgcgacaaaaggacattcattgaaaatacagcaattaagaaaaatttgagctccaatagtctcaaatgaccaaaggaagcttgtacttgcagcgtgtgggtgccagcagcaggcagaccaacaaagcagcaggagttccaccagcagccaccagggacacgtctaagaattctatcaaacagaaggaagtggctgaactccactgatgcaggggacaggaggccttggaaaaggctgttttcagcattactagcatttaattgaaacattctggaacctgtagtcccaggacctaaaaatagggcatcacaacaaaagactcaacaataacgtttttccttatgaaattttatttttgcttaaatataggggaatatataggacactgtaaaggcaaartctcactggtttctctctctctcacacacac

SEQ ID NO: 243267 - DNA, 555 bp, Homo sapiens
ccgccccaccccacaaaattcatgtgttgaagtcctaaccagtacctgagaatgtgactgtatttgyagacagggtctttccagaggttaatgaagtaaatgaggtcattagagtgggccccaaatccaataggactgatgtcctactggaaattaggacacagacatacgcagagggaagaccaagtaaaaccacagggagaaaagagacatctgaagccaaggagagaggcctcagaagaaaccaacctttcccataccctcttgttctctgacatctagcttccagaattgtgagaaaataaatttctattagtgaagaaatccagtcagtggtagtttgttatggcagccctagcaaaccaatatactgagtagcaggagtgtctgttatgatgatgaggggactcttggtaggcacctagatagcttcaggatgggggctggtcaccagagagaccaatcatgtgattagaggattgggactttgggcccactggacctccaggaaaagtagatgtgctagaaattaagttcaatcacatggccagtgat

SEQ ID NO: 243268 - DNA, 555 bp, Homo sapiens
aatttaaattttcaagtgaaagatacataagtttgggagatgatttgttgctattatgaaaggagaaagtagagcaaaaaatagagtaaaagtagagtaggctttcattacttagaaaatgatactttcatcatccatacggttggctttgagtagttctaataatgccaaaagttcttggagatagttgtgaggaacacccacrattcccttagcagaaacaagagcaaagtaattgcataagtagatgttaaattatattcaagttctcttttctgggaaagaaataaagcaaccaaaaacttgtataaatgtggtacaaaagtgacagcatagaaaacatcaagaccaaagcaattatccctttagtcttctagcatgaagcattgttgtagtgagttgaaaggagatttgaccccaaataaaatggaattaggtgactttttttttccaggaaactagtttaaaaattaagaggaatattaaaggcatagttattaaaataaaatttagtcaaagtcagtcatgtgtttaaaaaagaaaaaaaattgttta

SEQ ID NO: 243269 - DNA, 607 bp, Homo sapiens
tatagcaacttattttaagctgtttacaacttaacttcagtggtatataaaactctatttctttacatatttcacctcctccccacaaactttatgtcttttgatattgtatatccttaacatagatttatagttactttttatgcttttcttctttaaattctgtttaaattttgtttttgaaatttagattttcaagttatttatataccttcattacaatactataggattttataatattctaaatattgacctttaccatagagtttcatattttgtggttttgtgttgctatttatcatccttttgtttctccttttagcctttcttgtagggccggtctagtggtgataagctgtatcagcttttgtttgtcagggacagtcttaatttctccttttttgaagggcagttttgcccatacagtatttttgtttgrcagtttttttaagtttcaaaacatagaatataacattccatttccttctaacctgcaagatttccattgagaaatgcactcaatggattttttaatccattgagataattttttaatcctgtaggatttaaaatttttagtcttacaggattaaaaaattaaaaa

SEQ ID NO: 243270 - DNA, 533 bp, Homo sapiens
ggacactgggctaggagataggagaccagagtggtagcttttccttttcatttaataactgactgactctgagccacatttttcaacccacttctggataatacttttgtaactgccaatattgaacagatgacrttccaagagaaaagtttttctttctctaagaactgtcgctttgccactcagatatacaacctatttcctaacacatatgaaactagtatgcaacattttgagaataggggagactcactgagatattagcatattattacttgccaaatctgacattattttaggtagaaaaataaccttatttctttctaaactcttttgataaagtgtttctgaattagccgagcatggtggctcacgcctgtaatccagcactttgggaggctgaggcaggaggattgcttgagtccaggagtttgagaccagcctggggaacatagtgagaccctgtctctaccaaaaataattttttaaaaaataagaaaaaatatttctgaataaaacattctgaaatatca

SEQ ID NO: 243271 - DNA, 552 bp, Homo sapiens
ctatcttccctttgtgtttgtgaaagcagctatttcaccttttgcctgtgatttgttctgccatctcccagtaatattacatcgatgctggtaatatatttgtaccctaagggcctgttattagtccatactcagagaagaactccataaacacattgttgactctcagctgtgtgtacttgtactttggcagcaggaagtttaattctgatgaatgtattgagtttcaatcctggatagaatagttggcaaaggcagagcrtggctcctaacctctggagctaggttagggtgtaaaataaagagcttgaaggagatgtgtcaacagatgcctgctcgtgaactcagatttaggagtttgccaaggacatgaatgaatattcagaaatattccccacagagtttccaggaggtctggggtgacagggttcctgtaggattttctgtccacgggctgtcccttttgtcttcctttctgcaataatgccatggttctcacctgaatacttcagttcagactcctgaacttgaagaaggttttggatcctctgc

SEQ ID NO: 243272 - DNA, 607 bp, Homo sapiens
agacctgttactggaccaataatttttaaaaatctataaagcaaccacagcaaatataacatattggtaaaattttctggaattctgtatttatgattttttttttgacatctgtgtcctcagctgrgtgggtcaggtgcaagaagctgtctgacactggaaggccaagtagacactggaaggcaaagccctgtggagaggaggtgagggaaacgtgtgggttccaaatctcctgcggttgcctatttcttcctacaatttaggggttatacacagctagtgggattatttgttactgtatgagatttgttttaaaaactgtcatgaacagtatgtaataataaaaatactcctgacttccagaagtcaacaattttcatttttcttcactggctattgattattgaatgacaagataataaaaacaaaagctattggaagaaataattggctaagcatcctctcttcccttggataaaagcaacctatactttattcctctgaagtttagtaatggaagacgatcatctaaaactcattctttaaaaacaacaacaacaacaacaaaacaagcaaataggtaagctgtgttaaaactgtaggatag

SEQ ID NO: 243273 - DNA, 607 bp, Homo sapiens
agacctgttactggaccaataatttttaaaaatctataaagcaaccacagcaaatataacatattggtaaaattttctggaattctgtatttatgattttttttttgacatctgtgtcctcagctgagtgggtcaggtgcaagaagctgtctgacactggaaggccaagtagacactggaaggcaaagccctgtggagaggaggtgagggaaacgtgtgggttccaaatctcctgcggttgcctatttcktcctacaatttaggggttatacacagctagtgggattatttgttactgtatgagatttgttttaaaaactgtcatgaacagtatgtaataataaaaatactcctgacttccagaagtcaacaattttcatttttcttcactggctattgattattgaatgacaagataataaaaacaaaagctattggaagaaataattggctaagcatcctctcttcccttggataaaagcaacctatactttattcctctgaagtttagtaatggaagacgatcatctaaaactcattctttaaaaacaacaacaacaacaacaaaacaagcaaataggtaagctgtgttaaaactgtaggatag

SEQ ID NO: 243274 - DNA, 607 bp, Homo sapiens
agacctgttactggaccaataatttttaaaaatctataaagcaaccacagcaaatataacatattggtaaaattttctggaattctgtatttatgattttttttttgacatctgtgtcctcagctgagtgggtcaggtgcaagaagctgtctgacactggaaggccaagtagacactggaaggcaaagccctgtggagaggaggtgagggaaacgtgtgggttccaaatctcctgcggttgcctatttcttcctacaatttaggggttatacacagctagtgggattatttgttactgtatgagatttgttttaaaaactgtcatgaacagtatgtaataataaaaatactcctgacttccagaagtcaacaattttcatttttcttcactggctattgattattgaatgacaagataataaaaacaaaagctattggaagaaataattggctaagcatcctctcttcccttggataaaagcaacctatactttattcctctgaagtttagtaatggaagacgatcatctaaaactcattctttaaaaacaacaacaacaacaacaaaacaagcaaataggtaarctgtgttaaaactgtaggatag

SEQ ID NO: 243275 - DNA, 599 bp, Homo sapiens
tgtgactcttcctttcacttgaacacttagaggttcaccgtaggattactagttgtcttaattttaatagtgttatgcttcagggaatagagaggcccaaggtgagacagagagatgcgggaacagctggatgatggaacaaacatacacaatatttattgattaaatttactgtcttatatgggtgcagtttgtggtgccccaaaacaattacaatagtaatatcaaagatcactgaccacagacaactgtaacagatataataatgacaaaaaagctttaaatattacaagaattaccaaaatgtaacatcgagacatgaagtgaacacatgctgttggaaaaatggcgcccatagacttgctcaacacagggttgccataacacttcagtttgtacagaatgcaatgyctgcaaagcataataaagcaagaacaataaaattagatatgcctgtacatcctacaggttctgtctctctggagaccccgactaatccactttctaagactcactggatggttggatggaatacataaccagctgagcactactttaaacttgtgaaactttatataagcacctaaataaatcagcag

SEQ ID NO: 243276 - DNA, 633 bp, Homo sapiens
gggaaattttgagaagggtaagaatcctgataagcacagtgacacaggtagccgtttcctcttgacaccccttcccttctctattatctgaagcccagtgttttgagagakaagggacccaccttaaatacttgactttctcattcaatttgtagctaggtctgacatgtgattaagttctggccaatgaagtaggactgaacttgggggaattttccttcaacagacccttctttctttcccactctatcctgctgcctggaaaggttatgctgacctgaccacgggctctggctcagtcttggccaagagaacagctcagccataccctagacgtaggatagtgctgagctaaaaggagcctaggtcccatgtggaaacaccaaaatagccccagctcactcaaccaaagacttctttttaaatgagaaatcccatcttaagccattatcaatttggggtgtgtgacactgacacacagcagtaatcctaagtgaggaaaaggatttgaatggggcagactgtattcactacagggcccagaagacgcggggacggccccaactactgcccttcaggtccgggccagacccgcaatgggcaggatgggtagggtacagggcgtgcgtcccc

SEQ ID NO: 243277 - DNA, 633 bp, Homo sapiens
gggaaattttgagaagggtaagaatcctgataagcacagtgacacaggtagccgtttcctcttgacaccccttcccttctctattatctgaagcccagtgttttgagagataagggacccaccttaaatacttgactttctcattcaatttgtagctaggtctgacatgtgattaagttctggccaatgaagtaggactgaacttgggggaattttccttcaacagacccttctttctttcccactctatcctgctgcctggaaaggttatgctgacctgaccacgggctctggctcagtcttggccaagagaacagctcagccataccctagacgtaggatagtgctgagctaaaaggagcctaggtcccatgtggaaacaccaaaatagccccagctcactcaaccaaagacttctttttaaatgagaaatcccatcttaagycattatcaatttggggtgtgtgacactgacacacagcagtaatcctaagtgaggaaaaggatttgaatggggcagactgtattcactacagggcccagaagacgcggggacggccccaactactgcccttcaggtccgggccagacccgcaatgggcaggatgggtagggtacagggcgtgcgtcccc

SEQ ID NO: 243278 - DNA, 633 bp, Homo sapiens
gggaaattttgagaagggtaagaatcctgataagcacagtgacacaggtagccgtttcctcttgacaccccttcccttctctattatctgaagcccagtgttttgagagataagggacccaccttaaatacttgactttctcattcaatttgtagctaggtctgacatgtgattaagttctggccaatgaagtaggactgaacttgggggaattttccttcaacagacccttctttctttcccactctatcctgctgcctggaaaggttatgctgacctgaccacgggctctggctcagtcttggccaagagaacagctcagccataccctagacgtaggatagtgctgagctaaaaggagcctaggtcccatgtggaaacaccaaaatagccccagctcactcaaccaaagacttctttttaaatgagaaatcccatcttaagccattatcaatttggggtgtgtgacactgacacacagcagtaatcctaagtgaggaaaaggatttgaatggggcagactgtattcactacagggcccagaagacgcggggacggccccaactactgcccytcaggtccgggccagacccgcaatgggcaggatgggtagggtacagggcgtgcgtcccc

SEQ ID NO: 243279 - DNA, 476 bp, Homo sapiens
tgttcagtttgtcttaaaaaaatcagattaggtaaaagctgtcctaccaaagagtctagcaaaacaatatagtatttttttgcagaggcatgaaaaattaagaygctttagagtacttgaaagttgtgtagtcattttatttgcaaaatgaggtgactgtggcaaattatagaacacagagtattattacttttgccaggtttttctgacttgatttctgtaatttccagaaacccagacttctcatttccacacctagagatggaaacaggcaagtaactgacatgtctatttccttgggagcatgtgagaacatagcagtagggaccaaaagtctcagcacacttacctccgattatgccttaaagagttgattgtgaagaaccagtaactttgtcccaaatgcttctttggctgtttcatgcaggacttaattattgcttttaaaaattcacaatgaaaagacgattctgctg

SEQ ID NO: 243280 - DNA, 608 bp, Homo sapiens
gtgagttccacagggccgactgtgggacttgactatgcacagattttgatatatgagagaggtcctggaactaatcccctgtagacactgaggaataactgtacttagaaacactggaaaatcaagtaggctgggtgtggtggctcacacctataatcctggcactttgggggaccgaggtgggcagatgacttgagctcaggagctcaagaccagcctgggcaacatggcaaaaccccatcgctacaaaaagacttgagctcaggagttcaagaccagcctggacaacatggcaaaaccccatcrctacaaaaaatagccaggtgtggtggtgcatgtctgtagtctcagctattctggaggctaaggctgaggtgggaggactgcttgaggttgggaggtggaggctgcagtgagccagggtcgcaccatttccctccagcctgggtgacagagtgagacccagtctcaaaaaaaaagaaagaaagaaaaaaaagaaaagcaacccataaaaaggttggaaaaagaaaacagagaaacaaaaagcaaagaatagaaagcaaaaactaaaatggcagaaagcagaattaagccctaacatataaata

SEQ ID NO: 243281 - DNA, 608 bp, Homo sapiens
gtgagttccacagggccgactgtgggacttgactatgcacagattttgatatatgagagaggtcctggaactaatcccctgtagacactgaggaataactgtacttagaaacactggaaaatcaagtaggctgggtgtggtggctcacacctataatcctggcactttgggggaccgaggtgggcagatgacttgagctcaggagctcaagaccagcctgggcaacatggcaaaaccccatcgctacaaaaagacttgagctcaggagttcaagaccagcctggacaacatggcaaaaccccatcgctacaaaaaatagccaggtgtggtggtgcatgtctgtagtctcagctattctggaggctaaggctgaggtgggaggactgcttgaggttgggaggtggaggctgcagtgagccagggtcgcaccatttccctccagcctgggtgacagagtgagacccastctcaaaaaaaaagaaagaaagaaaaaaaagaaaagcaacccataaaaaggttggaaaaagaaaacagagaaacaaaaagcaaagaatagaaagcaaaaactaaaatggcagaaagcagaattaagccctaacatataaata

SEQ ID NO: 243282 - DNA, 536 bp, Homo sapiens
aaattaagtttacatctttttgcatagcaacagggccagttttctccaagctgctcaatttacaagaaaagaaatcatacggctaagaattcaaacttcagcagacatgggtaaacaaggaactcttacaaatctattctagcaacctaacaagaaaccagaaatttagcaagttctttcccgctcaggacaattgtgttcactagatcagaggcactgagacatgaagaaaagacccgctaaaaagggaaagccttccttcctgccctaggacatccctgccaacttcagggaggtgggaacccagctgcgctctctacagtatgggttacttttgtgtctggaaggtgtctgacatcctgagacctggacccatttcaaggagctttgggaagagcccagatcactgatggaattggacagtgcrtggaaatggttcagcaggacgagggtaagtgcaggatcacggccaggtcattctgagagacaatgagtggcactgatggggtcagacaaagattaaaaacaaaagtttg

SEQ ID NO: 243283 - DNA, 561 bp, Homo sapiens
tgtttggcacattgcacagtacctggctaccttaaattctcaaattacaatagctagtatttttctttctaatctttatattttgctagcatttttctctctaatctttatattatattcccaaaattgatgtagctaaatagagtgaaatcaatagrcaattgaaaagtaagtctttcactgttttagtctaaacattctgttcccccctcccacccacccctacaagaaattaaataactcctttaaaatgtagagaagatcccttgaaaatttagaaaatatttacttgccacggaatttcttggaaaatgttctattgctatatgcgtctttttgctttttaatcagaaactagtaacatcccctccagtttttatagttttgtaattaaattggaaactttcttacttttttctaatgttgaacttactttgcccattgattttctcccaacttattatgaaaactgtaaactctaaaaaggatggcacaatgaacatttatatattcaccacctataaaatttaacattttgccataattacattttgtctctct

SEQ ID NO: 243284 - DNA, 561 bp, Homo sapiens
tgtttggcacattgcacagtacctggctaccttaaattctcaaattacaatagctagtatttttctttctaatctttatattttgctagcatttttctctctaatctttatattatattcccaaaattgatgtagctaaatagagtgaaatcaataggcaattgaaaagtaagtctttcactgttttagtctaaacattctgttcccccctcccacccacccctacaagaaattaaataactcctttaaaatgtagagaagatcccttgaaaatttagaaaatatttacttgccayggaatttcttggaaaatgttctattgctatatgcgtctttttgctttttaatcagaaactagtaacatcccctccagtttttatagttttgtaattaaattggaaactttcttacttttttctaatgttgaacttactttgcccattgattttctcccaacttattatgaaaactgtaaactctaaaaaggatggcacaatgaacatttatatattcaccacctataaaatttaacattttgccataattacattttgtctctct

SEQ ID NO: 243285 - DNA, 578 bp, Homo sapiens
tcttgtcaagttacttgatgtgcccttgtgtttctttctccccatccctgagctggggagtatcagatgccagaaagttgggaggttgataaataaagatgtggaaatgcctgcctggagcctggtactggagctgctttcgtccttgggatggatgctgccgcctgccctatagacastgaccccagcagcatgtcccaccttccactgaggcaggcgtgtctgtcttttctcagagtgtgaagagtacaaagacatcatagactctgtgctgagggatgaactgcagtccatggagaagctggcagagaagctcaggcaagctgaggagctcaggtgagcgggccccattgggggcaggcagatgggcaggggtgtgaatctctgaagtgcagcaactcagctgggagaactaagagctgagctgggccaggacaacggcaggcatttacatggcaggcacgtgtcacacaaatatttataaaacagagaacagtcatcttagtaagttatgggttgtagttgttcttaagccttgttttctcttcttaaaaccactgattgttgaggtaaaattt

SEQ ID NO: 243286 - DNA, 578 bp, Homo sapiens
tcttgtcaagttacttgatgtgcccttgtgtttctttctccccatccctgagctggggagtatcagatgccagaaagttgggaggttgataaataaagatgtggaaatgcctgcctggagcctggtactggagctgctttcgtccttgggatggatgctgccgcctgccctatagacactgaccccagcagcatgtcccaccttccactgaggcaggcgtgtctgtcttttctcagagtgtgaagagtacaaagacatcatagactctgtgctgagggatgaactgcagtccatggagaagctggcagagaagctcaggcaagctgaggagctcaggtgagcgggccccaytgggggcaggcagatgggcaggggtgtgaatctctgaagtgcagcaactcagctgggagaactaagagctgagctgggccaggacaacggcaggcatttacatggcaggcacgtgtcacacaaatatttataaaacagagaacagtcatcttagtaagttatgggttgtagttgttcttaagccttgttttctcttcttaaaaccactgattgttgaggtaaaattt

SEQ ID NO: 243287 - DNA, 566 bp, Homo sapiens
agttaggctgtagatggaagaaaacttggttatccattgcccgtagctattagagctgggtggtaaggggtcatctactcaaacctgtcttttaagttagactccattttggagaagtcttgtttgtttttactgtaagaagtttacttagggattaaatgaatctkttttaatctggcttaaactaaaagtcaatcccgtttaagcttaaaataattattcctaaacagacatgtatatcatccctccctttttttttaagatacagtcttactttgtcacccaggttagagtgcagtggcgtgattatagctgactgcagcctaatctcctggattcaagtgatcctcccacctcagccttctgagtacctgggactgcaggcatgcaccaccatgaccaactgatttttttttttttttttttagtagagatgaggtctcactacattgtccaggctggtctcaaactcctgggctcaagctatcctcccaccttggcctcccaaagtgctcagcttgtaggcttgaggcaccacacctggcctcatctttttatttcttctt

SEQ ID NO: 243288 - DNA, 458 bp, Homo sapiens
gttctctatttctataatcttgacatttcaagagtgttgtacagatagagtcatatatatgtgacctttggggattggatttttttattcagcataattccttgtgatccacccaagttgtcgtgtgcatcaacagtttgttcttttttatttctgagtagtattccatggtattgtggatgcaccatggtttgtttaaccattcacctgttgatggacatataggttgtttccagttttttggatattatgaaaaaagctggtgtgaacattgatgtacatgtttattatgaatataagtatttctstgggataaatgcctaggagtgcagttgtcgggtggtatggtggttacatgttttttgtttgttttgttttttaagaaactgtcaaattcttttccagagtactgtgccattttacatgcccactagcaatgtatgggtgatccagattgt

SEQ ID NO: 243289 - DNA, 495 bp, Homo sapiens
agtctggttggagagataaacatgtaacatttagtgacaatactagatacatttgttaagtgttgttggagttcagaggaggcaaaggccactgtgtattggtgtgattgaagaagccctctcagaggaggtaagatttaaatgttcttttaatactacctrttctttagaaaagagaggtaatgacatttcagttgcaacagatggtgtgagcactagggagtgtgctaactatggaggagatgtgagacaaggttagaaaggtagctaaaaattttgaactgtatttggtaactagtatagacttatacagagttagttatcagttagtttcaatatggttgaaggtttttgaaccagaagtgacatgataaaagccatatttgaaaattattaatctggtggtcaataaataggattagagagaggaagaactggaagcaggcagaatggataggagatattacagtcatttaggcatgaagacttggtcta

SEQ ID NO: 243290 - DNA, 549 bp, Homo sapiens
aatgcagattaagacagtgggctctcattttcaaaaagcattttagatttatagaaaagttgtaaaaataataagagagttgtcatatatcctcactcaacttcccctaatgctaacatcttacttaactatagtacagttatcaaaatcaggaaactaatattgatacaacactattaactattagaccttattttaattttgccagttgtcccattaatgtcctttcctgatccaggatcaaatccaggatgccmcattgcattttgttatctccttattctgttcctatttgtgacagttctcagtctgtctttgatgaccatgacaattttgaagagtactatactggtcagttatattgtataatgtccctaatgagggtctgtctgatgttttttcatgttttgtgtttttggtgagaatgccacaaaagtgatttttagccctttttagtgcattgtatcaggacatatttgatgataatttttaatactggtgatgttaaccttgatcacttgcttaaaggggtgtttgctggatttcttt

SEQ ID NO: 243291 - DNA, 520 bp, Homo sapiens
gttacatgtgcatacatatgtttctgaaaccttgactctccaacaagactctcatcaacaagactctcattatcctaaatccagataaaatccacaaggatattctttatccatttcttttcttagacttcaaaatgatcacatgtaatcagccatcattctrtcgttcacctctgataaaactggtggtgttggctgcctgattcttcctctttgctttgtgttgtattgttttgttttgcttttctcattataaaaataattcatgcttattgttgaacatttgataaataaagaaatatataaagggggaaaatctattaccccatcatccagaggcaactgctattaactttttggtattttccttccagtcttttttctatacatactttaaaaaatatatagttgagattgtactgtacatccataaatcatccttttcacttttcattaacaaagtaattttcccatgttatttaaaaattcttcagaaatatttttaatgacagcataatat

SEQ ID NO: 243292 - DNA, 640 bp, Homo sapiens
tagaaacatgttctggccaggcacagtggctcacgcctgttatcccagcactttgggaggcctaggcgggcggatcacctgagctcagaagttcgataccagcctgggcaatatggtgaaacccaaactctactaaaaatacaaaaattagctgggcatagtggtgggcatctgtaatcccagatactcaggaggctgaggcaggagaatcgcttgaactaggaggcagaggttgcactgagccaagatcacaccactgcactccagcctgggagacaaagggagactctgcctcaaaaaaaaaagaaaaagaaaaaagaaaaagaaaaagaaaaaagaaacatattctgactggcagcaatgtattgctccagaaagcattgagtctatacaaagacttagcaagaaatcccctgaaatgagcaagccatttactgtaagtaagggatagttatacagattcaggaataggtttggactgaaaatatataaattactggagaggctgtgtctgccaatgamgaaactgctgccacatgagtacagtacaataagatattttgcgagagagaccacagtcacataacttttatcacagtatattattataattttatatttattattagttattgttgtt

SEQ ID NO: 243293 - DNA, 473 bp, Homo sapiens
tttttgctgatgtttctgtctggacaatctgtccattgctgaaagtggtctgttaaaagtccsctagtattattatattgtagtctatctctacctttagatccatcaatatttgctatacatatttgggtgttcaggtgttaggtgcatatatatttacaattgttatatactcttgctgaattgacctatttatcttcatacgatgactttgtctctttttgctgtttttgacttaaagtctgttttatctgatataaatatagctactcctgctctcttttaatttacatttgcaggaagtatcctcttttcatcccttcactttcagtctatgtgtgtccttacatatgaggtgagcctcttgttggacacatatatacaggtcttgtttttttatcatccagtcattgtatgtcttttaattgaagaatttaattcgtatacattcaagattattattgataggtatg

SEQ ID NO: 243294 - DNA, 473 bp, Homo sapiens
tttttgctgatgtttctgtctggacaatctgtccattgctgaaagtggtctgttaaaagtccgctagtattattatattgtagtctatctctacctttagatccawcaatatttgctatacatatttgggtgttcaggtgttaggtgcatatatatttacaattgttatatactcttgctgaattgacctatttatcttcatacgatgactttgtctctttttgctgtttttgacttaaagtctgttttatctgatataaatatagctactcctgctctcttttaatttacatttgcaggaagtatcctcttttcatcccttcactttcagtctatgtgtgtccttacatatgaggtgagcctcttgttggacacatatatacaggtcttgtttttttatcatccagtcattgtatgtcttttaattgaagaatttaattcgtatacattcaagattattattgataggtatg

SEQ ID NO: 243295 - DNA, 615 bp, Homo sapiens
gctggtaaggttggggtattgggctagtagtgggattgctggatcaaatggtagttctacttttagttctttaaggaatctccacactgttttccatagcagctgtactagtttacattcccaccagcagtgtagaagcattccctgatcaccgcatccatgcgaacatctactgtttwttgatgttttgattatggccattcttgaaggactaaggtggtatcacattgtggttttgatttacatttccctgattattagtgatgttgagcattttttcatatgtttgttggccatttgtatatcttcttttgaggcttgtctattcatctctttagtccactttttgatgggatcgttatttttttcttattgatttgtttgagttggttgtagattctggatattagtcctttgtcagatgtatagattgtaaagcttttctcccactctgtgggttgtctttttactctgctgactgttccttttgttgtgtaaaagctctttagtttaattaggtcccagctattaatttttgttgttgcacttgcttttgggttcttggtcatgaagtcctcgcctaagccaatgtatagaagggtttttccaatgtta

SEQ ID NO: 243296 - DNA, 510 bp, Homo sapiens
tgggcaatgtttctcagggctgcttcgagcaggattaggggcagcgtggraacctagagtgggagagattaagctgaaggaagattttgtggtaaggggtgatattgtggggttgttagaagcaatatttgttgtacagaatgattggtgatggcctggatacagttttgtatgaattgagaaactaaacagaagacacaaggtccgaataagagaaggagaaaaacaggtattaaaggactaagaattgggaggacccaggacatctaattagagtgcctaagggggttcagcgtgattattgcttggttggtcagttttggggctctatccttgagtttttttatgttgtcacataccaggccagattgatttaggtgaaaacaacactcttcatttaaaaatatagagtcccctttttttaagcagtgagtaagcggaagtctcggtgattttggaggaaatagaaatgcaaagccagcaattgtttgttaaagaaggattagaaac

SEQ ID NO: 243297 - DNA, 567 bp, Homo sapiens
gaatagcagatggaacactgagaagtgatttccttgaggatagagttccacgatagaaaggaaatgagaggttctaagaggcgggctagcagcttgtaacctacatggaagaagttatgaaatgatgacagaatagaatgggcctgtaaggctggaagsaaatattttccttggtccaagaaccatttgccttgtgtgggaagagattgataggtggaagtttcagcgggggagtaggtgggagtgaccaatgaaaaggagaaaaactggcagtgagggacagaagttggaatgctagctgcttttttagttatcttattagcataagtgttgccttgagcgatgggatctgatgccttttgatggcccttgcagtgaatgactagcttttttggaagtagagcagctttaagaagagtttttattaaggaggcattaattatggaggacctttgtgtagtggggaaacttttttctgctcatataacagcatggtggtgcaggatatggaaggcatatttaaagtcagtataaatattaacacatagtccctttgcaagagtgagg

SEQ ID NO: 243298 - DNA, 567 bp, Homo sapiens
gaatagcagatggaacactgagaagtgatttccttgaggatagagttccacgatagaaaggaaatgagaggttctaagaggcgggctagcagcttgtaacctacatggaagaagttatgaaatgatgacagaatagaatgggcctgtaaggctggaaggaaatattttccttggtccaagaaccatttgccttgtgtgggaagagattgataggtggaagtttcagcgggggagtaggtgggagtgaccaatgaaaaggagaaaaactggcagtgagggacagaagttggaatgctagctgcttttttagttatcttattagcataagtgttgccttgagcgatgggatctgatgccttttgatggcccttgcagtgaatgactagcttttttggaagtagagcagctttaagaagagtttttattaaggaggcattaattatggaggacctttgtgtagtggggaaacttttttctgctcatataacagcatggtrgtgcaggatatggaaggcatatttaaagtcagtataaatattaacacatagtccctttgcaagagtgagg

SEQ ID NO: 243299 - DNA, 559 bp, Homo sapiens
taaaaaacaacatttcttccctctggggatgtagcaacaagacctcattaagggagcagcaagagcacccctctctggacacaaacaaacaaacaaacaaacaaaaaacaaaactgccggtgcattaatcttggacttcccagtcttctgaactgtgagaaaataaattcctgtttattataaattaccagcttargtatcttgttatagcagcagagttgtgctaagacaccctatataatggaaaattttatcaaatttacttctgtattactggttcaattttctgcttccataattctgttctttcttactgtcttcaattatctttgtatttctgttaatagtctgatacttttattattttttaaacttttaaatatttttcaatgaattggtttgccattttagttcaaactgcctgttaactagcccaaaattaatgacttgctgacatattatcatcagttgttcttgtatcttcatcgaaacactgttttatgaaaaatataaaagaaatagattatgttttcttccattttcatagagaaattacctt

SEQ ID NO: 243300 - DNA, 561 bp, Homo sapiens
acaaattacattaaggattataaattacaatccttgtctaactgtatctcctttacatatttccaagatgggatagaacagaatagcatgccgtctggagcccatggtgagccagtgattagatacaggagaagtgtagagaaaggcagggaaaggtgaagagcttgggttgttgtgcagcagggcatctccgggtatcggccaatagaggtttaaaggccttgatgggaaacaggatgcagggaaggacagaagaaacaaaatgttggaaaggttttctaaaaaggaatggataagtgctcaaacaagccactcactccagaagaaatggaaaaatgttctgattcctggaatgtttcagccattctgagcttcaagtcacccctaagaagctcttgggaacccaatatctaaactctctttaggactgaaacagaagagctcttgatggccaaggggcatgagaattatyttcaaatacatggctgtttcttttgtgacccactatgtttaatgtacatccctaggggaaagtcaagaatcaatgtgtttactttgcaa

SEQ ID NO: 243301 - DNA, 618 bp, Homo sapiens
ggaaattcagtaaaactgtgtctgattactatttagcttcctggtttagttatttttgtttgattacattcctaagagtaccccagatttactcargcatctattctctttcttgtgatcataggcttcttagaggctggaagcagcctccaagcaggggtgaatccttatttgtctacactgatcaatgattcctattttctgtgccagcaacttgtctaggccagaaacagttctaacctgtgagatataaaggcagttaactggtggatcgcaggaaagattcctcaacccttcatttggtgcaaatgaaagcatgccttctacttcttaaaggctttgtcttctgtatgatacttcagagttctgcaatgaccccacaaggggagctagctgagtatcaggcagagagagacagagagagagagagagagagagagaagagagagaaagaaactgtggccttgatgacactatcatcccctgaattaattagctctggacttgctctacctctatgctaaagcataaaacatgaattaagacttaggtttgaactatctcagtttaaggcagtatagtattgagttaagagcatgggctcaagaaccaactgtc

SEQ ID NO: 243302 - DNA, 618 bp, Homo sapiens
ggaaattcagtaaaactgtgtctgattactatttagcttcctggtttagttatttttgtttgattacattcctaagagtaccccagatttactcaggcatctattctctttcttgtgatcataggcttcttagaggctggaagcagcctccaagcaggggtgaatccttatttgtctacactgatcaatgattccyattttctgtgccagcaacttgtctaggccagaaacagttctaacctgtgagatataaaggcagttaactggtggatcgcaggaaagattcctcaacccttcatttggtgcaaatgaaagcatgccttctacttcttaaaggctttgtcttctgtatgatacttcagagttctgcaatgaccccacaaggggagctagctgagtatcaggcagagagagacagagagagagagagagagagagagaagagagagaaagaaactgtggccttgatgacactatcatcccctgaattaattagctctggacttgctctacctctatgctaaagcataaaacatgaattaagacttaggtttgaactatctcagtttaaggcagtatagtattgagttaagagcatgggctcaagaaccaactgtc

SEQ ID NO: 243303 - DNA, 618 bp, Homo sapiens
ggaaattcagtaaaactgtgtctgattactatttagcttcctggtttagttatttttgtttgattacattcctaagagtaccccagatttactcaggcatctattctctttcttgtgatcataggcttcttagaggctggaagcagcctccaagcaggggtgaatccttatttgtctacactgatcaatgattcctattttctgtgccagcaacttgtctaggccagaaacagttctaacctgtgagatataaaggcagttaactggtggatcgcaggaaagattcctcawcccttcatttggtgcaaatgaaagcatgccttctacttcttaaaggctttgtcttctgtatgatacttcagagttctgcaatgaccccacaaggggagctagctgagtatcaggcagagagagacagagagagagagagagagagagagaagagagagaaagaaactgtggccttgatgacactatcatcccctgaattaattagctctggacttgctctacctctatgctaaagcataaaacatgaattaagacttaggtttgaactatctcagtttaaggcagtatagtattgagttaagagcatgggctcaagaaccaactgtc

SEQ ID NO: 243304 - DNA, 606 bp, Homo sapiens
gaagcatacacagctgtttctgatctttttcacaaagtgtatgtggaggcttcacccttttcctttatcttcccctatgccattaataaaatatttttctgggggaatgaggagacagtgacatagaggaatccctatttccttgagtaataggatcacacgagcagaaagaactatgatttratctggtacttatagtccattgaatctcgtttgcgcaagaaaggcaaatgaagccacaattagctattgggggtcattagagaggctactgtggtagtgtaaagtctggttctaaggtctccagtgtgtcttagtgggtgacagcaattgctgtaggtgacaaacaaccacctgagagggcagcctgttatgcgaatgctcccttaaagaatttttacttagtgtaaaattgtaaattaatgtatagtgattcaattttgctatcttagtgaatggtatcaaatgaatgctgtgctaaatttcctaaataatattcctgcttaaacacaataggacatcagggaggtttttccctcctgcaaatggtaatttaggaaatgagccataagctcattctgtgcactacgtgcacaagtgtaccat

SEQ ID NO: 243305 - DNA, 606 bp, Homo sapiens
gaagcatacacagctgtttctgatctttttcacaaagtgtatgtggaggcttcacccttttcctttatcttcccctatgccattaataaaatatttttctgggggaatgaggagacagtgacatagaggaatccctatttccttgagtaataggatcacacgagcagaaagaactatgatttgwtctggtacttatagtccattgaatctcgtttgcgcaagaaaggcaaatgaagccacaattagctattgggggtcattagagaggctactgtggtagtgtaaagtctggttctaaggtctccagtgtgtcttagtgggtgacagcaattgctgtaggtgacaaacaaccacctgagagggcagcctgttatgcgaatgctcccttaaagaatttttacttagtgtaaaattgtaaattaatgtatagtgattcaattttgctatcttagtgaatggtatcaaatgaatgctgtgctaaatttcctaaataatattcctgcttaaacacaataggacatcagggaggtttttccctcctgcaaatggtaatttaggaaatgagccataagctcattctgtgcactacgtgcacaagtgtaccat

SEQ ID NO: 243306 - DNA, 597 bp, Homo sapiens
gcactgttggtgggaatgtaaattagtacagccattatggaaaacaatatgaaggtttctcaaaaaattaaaatagaattaccatacaatccagctatctcacttttgggtatatatctaaagaaaatgaaatcagtatcccaaagaaaaatctgcactcccacactcattgcagcattattcacagtagctaagacatggaaaccagaaactacctgtatacatygacaaatgaattgatcaagaaaatgtgatatacacacacacgtattattactcaacaaaaaaaggagaaaatcctgttatttgtggcaacatgggtgaaccagcaggacattacaccaagtgaaataagataaggtgggcacagaaaaacaaatactacatgattttgcttacatgtggaatctaaaaaagtcaaattcatacaatcagagagtagaatggtcattgccaggcacaggagggtaggagaaatggggagatgttggtcaaagggcacagactttcagttataagatgaatttatgagatgaataagttctggcatgctacaatatacataatggtgactattaaaaaaaaagaactccatgc

SEQ ID NO: 243307 - DNA, 597 bp, Homo sapiens
gcactgttggtgggaatgtaaattagtacagccattatggaaaacaatatgaaggtttctcaaaaaattaaaatagaattaccatacaatccagctatctcacttttgggtatatatctaaagaaaatgaaatcagtatcccaaagaaaaatctgcactcccacactcattgcagcattattcacagtagctaagacatggaaaccagaaactacctgtatacattgacaaatgaattgatcaagaaaatgtgatatacacacacacgtattattactcaacaaaaaaaggagaaaatcctgttatttgtggcaacatgggtgaaccagcaggacattacaccaagtgaaataagataaggtgggcacagaaaaacaaatactacatgattttgcttacatgtggaatctaaaaaagtcaaattcatasaatcagagagtagaatggtcattgccaggcacaggagggtaggagaaatggggagatgttggtcaaagggcacagactttcagttataagatgaatttatgagatgaataagttctggcatgctacaatatacataatggtgactattaaaaaaaaagaactccatgc

SEQ ID NO: 243308 - DNA, 598 bp, Homo sapiens
gccactgggttcacagtagacagcaaatacttttctcctttaaattctatttattttgctaatagatttttctattgggcaatatgattcagtacctgacacataatacttaataaatatttgttcaattaaattaaatgtttaagcttgtgttcatttctaaggtctaatatttgccaaatgtttcatcgagacctcttgaacaccttctttaccatttaagatgttcttggtcattgcaaygagtcactgctctgagaagcttatggaactatccttaagaataacgcaatgacattttaaataaatatgtaatcatatgaaaaaagtcattaaagacactcaggctttataaactattacaatttaatagcagttataataacagcaataacaaggtagattacataaattctactgtagcattttacatctgtattttatgtttgctttattggagacacaacaaagcaagaaataaatagcccagggaagggaggaatggtgagaaataattaatttgggtatcagagatttgtattcaaatgtttcagtaacaaaacaaattatgactaactcaaaaatgtgttatcttaaa

SEQ ID NO: 243309 - DNA, 588 bp, Homo sapiens
tgaggaattaaatctgtaagcataatgcagggtaaatctattccaaagtgctgctaaaagaaggtttactaccctagttcaaaagaaagcacccaacttctgtgtattcccaaagctcaggtaactgcattgtgctaaaatcactacaatgaataagagtcttctggcttagcacaatgtaagaaccaaagctccaattgtgattcaaaattcctttaaacagtgctcacacagtgtagatgcacctgtctttatactcaaagagatgtgaatactgagtgtgtagtactatttgaattcacattgttataaaataatcattattatagccaaaagttgttaatgttgcccacatgtgaaaagctgtgctaagtgtattcttaatatattaccattgttatcctatttgctcctcccacccatccccatttcacaaataagacaattgggaggggtttaaatracctatcaggatcatatagtaaaagtggtggatctcaggattcgaacccaggcctcattgatttagaaatccacacactcaggcactccgctccatgcatcccataataattattactactacta

SEQ ID NO: 243310 - DNA, 472 bp, Homo sapiens
gacaaaaacataaactgactagatgaaagatacatgtgaaaaagaggaaggataatttatcttgttggaagaatgccaatttatgaagactgcatatgaatttgtgtatatgtacatgcatatatacatacatgtatgaaaacagatgtattaatttttgaaatggaaatatctttcttttgtctcaacatggaaactcaaaacttagtctatttctagtgcagacttaatatgcatgcagacttagtcaaattccatgtagggaaaaaaaaaamacacacacacactactaatccttatcagggctcttttggttgggagaaacagaaacctactcaaacgaagtcagtttaagattacatagtgattgtttttttcccgtaaatttgtttacattccttgtagactctggatattagacctttgtcagattgataggttgcaaaaaattcctcccattctgtaggctgtc

SEQ ID NO: 243311 - DNA, 507 bp, Homo sapiens
ccctatttgcctgcttaacttctgttcattctcagatcttagctcagtccttactgtcatttccatgggaagcacacctggataacctgatcttagtcaaaattcctgataaagtattattttatcaaaatattatacaatgttctgtgctgcctttatcatagattttaattttacgtgggtgattattcaagaaaatttacttccttctacaaaaggctattaattctagtaccacacctagcatatcatgagtagygcccaatctatttttgcttcaagaacaaatgaatgtggatcattcattttctttggccctctgatgattttctatttaaaaatttgaaagacactctcattagtatttggccagtcgataaattacctggccttgggccaactgtccaccattagtccagttagctacagccatgttgggatcatatggatgtagggctgcttcttccagaatagccactgccataaaatccacagaaagggctgtgg

SEQ ID NO: 243312 - DNA, 404 bp, Homo sapiens
gaattcatatttgatatctttccaggaagctcactgcacaagtttacaaaaattgttttcctcgtttaaaaagttgagcaaataacattcccaagacattatgcttctattagtcaagtcagcagtagcacatccagcccacactggtttccatattctccttctaatttagtaatgtatttacttaaataatgcctttttcatattttggggtgtaagatattaaaatcttttcaaaccctaatgaaaatatgatacctgcatacataggaaygctatcctcatccccctcaaggttccccagattttccttccacttttcttcttttcccagttggtaactgggatctctcataatgaaccttatggatatatttcaggccacagtattatatttgtgtaaa

SEQ ID NO: 243313 - DNA, 418 bp, Homo sapiens
aagctcactgcacaagtttacaaaaattgttttcctcgtttaaaaagttgagcaaataacattcccaagacattatgcttctattagtcaagtcagcagtagcacatccagcccacactggtttccatattctccttctaatttagtaatgtatttacttaaataatgcctttttcatattttggggtgtaagatattaaaatcttttcaaaccctaatgaaaatatgatacctgcatacataggaacgctatcctcatccccctcaaggttccccagattttccttccacttttcttcttttcccagttggtractgggatctctcataatgaaccttatggatatatttcaggccacagtattatatttgtgtaaagtaagtaaaaggaggaggaaagctgaagttacaggaattc

SEQ ID NO: 243314 - DNA, 410 bp, Homo sapiens
ctgcatgttttcctcaatccataaacttaacsttatatttttcagtcaactgtacttcagaaatcttacatgtagtaccttctgatttttccaatggaatctatactgtagtggatgttgtcatatttcactgagatcccccttcagaactgaagtacatatcaccgctgaggccactagtttggctgatcacaaatcacagctgtgtcctgagactaagaaagcactcttgccttatatacccttctgagaagaagtgttcttgttcaatgactggctaatattgcaaaattacaaataatcagccttttcatttggtataaggaggagggcatcttaaccttagaggtccctgcgcaattggtggagtttacagttgcagctgtgtggcagctaaattttcttcctgc

SEQ ID NO: 243315 - DNA, 529 bp, Homo sapiens
caattggttactgtattggatattaaaggtattgaacattaccatcattgcagagagttctatggaatattgcttccataaagaatcatgagtgtgtgatcagactatagggtagttaatgccaggtcatgtaaaagcttgtaggtaacaacgaattctggccctaataagaagggggagggaagtcacagaagagttaaaggcagggctgacattttccgattgcattgaacagattgctctatccctgacaaccagtagtttgagcagcagaagtgtgtggaccaatatatatatttataaatcgtgtcatatgtttagtgaagtagattgagacaacaagcagcaacatgggctcatacatttatcaaagaatggactrtatttggataatgtatcagtttttcattcatagttgctgctctctttggctgaattgacaatttctgaagtcagagattactatacttctctttgattcacaattcctatgattgagactcatcagattttactatgacccttactt

SEQ ID NO: 243316 - DNA, 621 bp, Homo sapiens
ttaacaatgtcatttttttaaaatttgggctatttcagaaacaaaaacaaactaaaagttggaacagaaataaaactacttcataaaaaattattagaatttgaagagaactttgatagtctctataccagcctgtttataatatatatagacaaggatataacaacatgaggtctaagcagatttagaaactagtcaaagatatatatatatatacataaaaatatatataaatatattatgtatataatatatataatatattatatatattatataatatatgatatatacattcctcaaatctgcttttcaactctcagtctagtgtttcttccacaacctcaaagtttatctttatgtgtagcaaacagttcatggatttttacagccagaataagcatcacgtgacaggggataaggctagaaaggtaggtggyataaaattgtgcagatctttcaatgataggctgaatagttgaaactttattccgcagaaaatagggacctactggtaagagtgtggaaactactaatatatgagaggacagtcaagaaaaccataaaacagtcttagatatgtagatttatcctctgtccatgaagctcaaaagacaagtt

SEQ ID NO: 243317 - DNA, 546 bp, Homo sapiens
ccaggtacatggggtgaataaaaaggagaagggtcggctgggtgcggtggctcatgcctgtaatcccagctgagggggscgggtcacctgaagtcaggagtttgagaccagcctggccaacatggtaaaaccccgtctctacgaaacatagaaaaaaaaaaaaaaagttagctgggcaacatggtggtggatgcctgtaatctcagctactcgggaggctgatgcaggagaattgctaagagaactgtggaggttgcagtgagccgacattgtaccatgcattccagcctgggtgacagagcgagactccatctcaaaaaaaaaggaaaagttgtcttaagacctgttctaaactccctcctgtgttgacattgtccacagctggtcattatttccaaatataatatcactgggcatccaccttaccttatctttttctctgtcttcttgtttgttttattacagaggcagcttctgttgtcaataactatcttggcattgttttggaattctctttgcccttatttgctgtttgctgtttttttg

SEQ ID NO: 243318 - DNA, 558 bp, Homo sapiens
tacacatgttctccttatctgttttgtaattactgtcctcttagtgcatgtggagtggcatttctttatggttttgatttgtatttctctaatgattagtgcttattgaccatttgtatgtccttcttggagagatgtcttttcagatcctttgctcatttttcaattgggttgtcttttttttwaattttttttttagaggtcttggctgggcatagtggttcatacctgtaatcccagcactttgggaggccaaggagagcgaatcacaggttcaggagttcgagaccaccctggtcaacatggtgaaaccctgactctactaaaaatacaaaaattacccaggcatggtggtgggcacctgtatcccagctacttgggaggctgaggcagaattgcttgaacccaggagacggaggttgcagtgagctgagatagtgccattgcactccagctctgggtgacagagcaagactctgtctcaaaaaacaaaacaaaacaaaaacaaacaaacaaacaaaaagacagagttctttatatattctggatacgagactc

SEQ ID NO: 243319 - DNA, 568 bp, Homo sapiens
tcaaactatctctattcactgatgatatgattctatacttacagaacccttaagactttaccaaaaagctacaagaactgataaatgattttagcaagacttcaaaacacaaaatcaatatacgaaaatcagtagcagttctacacatcaataatatccagcctgagtcaaattgagaacacagtcctgtttacaataactacaaagaaaataaaatacctaggaacacactcaaccaagaaggtgaaagagctctacaaatagaactataaaacactgctgaaagaaatcagataaaacacaaataaatagaaaaacattccatgctcatagattagaagaatgaatattgttaaaatggccatactatagaaagcaatttatakattctgtgctattcctatcaaaccaccaacctcattcttggctgaattagaaaaaaaactattctaaaatacatatgcaaccaaaaaagagcctgaatagccaaagaacaaagcaaaagaacaaagctggaggcatcacactacccaacttcaaactatagaatagggctacagtaaccaaa

SEQ ID NO: 243320 - DNA, 525 bp, Homo sapiens
tttgagtgctcaggtgcacctactggatccagcccaggactggagatactttccagaacacaacatcacctgagacatgaccagttcacactgttttactttcacaatttcagcttcctcrgaagaatattaaaattgctaagactttttcataaatattgtgccatgtccttcctctgtgcccttgcctgttcatttgtgtcagactaggtgcacttatttctaatgagatcagaattctgcctccagtaacacatcaaagatgacctatgattgtacttttggtttttgctcccacatgtaaattataaaattcatcacccccatttttatgtcaagaaacatctgcacaatctgaatgtcaataccttttggaatctattaaataactgaaattgcaagaaaaattacccactcccaaaactggagagacagacatgtccagaatcgcagttgacacttgcttaaatggaacataaactgcagaagacacaagttgttgagggcacttacatgctaagcact

SEQ ID NO: 243321 - DNA, 577 bp, Homo sapiens
gttaattacctacaaaactcttttgactgtaatgtttgaaaattgaataaatagctaacaatgaatcctttaagycataagtggtttctattaaaaaattatgtaattcctcccttaacccctgcttgcttatgtcatcttattattttagtaattatctttcacccagtagagcatgtgaatttatcttttctttcactgggtttactaaaggtatgagcagtaatcttaatgacctgtaatttaaacaaggtttaacgaaaagggtaacatgttgacctgagggatgcttttgacaccatctaatgtttactagaactttccaacctctaaccttttgcttcattttacagcgaatcatgcaagctacaatctgatcacccaaattgagccaatagaatgaatgcctggtgatcaatcagctggtgtgtcacctatgatctctgctttcaggaattaggggttcttcttaacacagttgaaaagcttccactcacaatggccccagccacagtgtcagataaaagtgcaccttcattagctagcaacatgaaagatgacggtggttaggtggggt

SEQ ID NO: 243322 - DNA, 595 bp, Homo sapiens
attagttaattacctacaaaactcttttgactgtaatgtttgaaaattgaataaatagctaacaatgaatcctttaagtcataagtggtttctattaaaaaattatgtaattcctcycttaacccctgcttgcttatgtcatcttattattttagtaattatctttcacccagtagagcatgtgaatttatcttttctttcactgggtttactaaaggtatgagcagtaatcttaatgacctgtaatttaaacaaggtttaacgaaaagggtaacatgttgacctgagggatgcttttgacaccatctaatgtttactagaactttccaacctctaaccttttgcttcattttacagcgaatcatgcaagctacaatctgatcacccaaattgagccaatagaatgaatgcctggtgatcaatcagctggtgtgtcacctatgatctctgctttcaggaattaggggttcttcttaacacagttgaaaagcttccactcacaatggccccagccacagtgtcagataaaagtgcaccttcattagctagcaacatgaaagatgacggtggttaggtggggtagtgagtgctggtg

SEQ ID NO: 243323 - DNA, 595 bp, Homo sapiens
attagttaattacctacaaaactcttttgactgtaatgtttgaaaattgaataaatagctaacaatgaatcctttaagtcataagtggtttctattaaaaaattatgtaattcctcccttaacccctgcttgcttatgtcatcttattattttagtaattatctttcacccagtagagcatgtgaatttatcttttctttcactgggtttactaaaggtatgagcagtaatcttaatgacctgtaatttaaacaaggtttaacgaaaagggtaacatgttgacctgagsgatgcttttgacaccatctaatgtttactagaactttccaacctctaaccttttgcttcattttacagcgaatcatgcaagctacaatctgatcacccaaattgagccaatagaatgaatgcctggtgatcaatcagctggtgtgtcacctatgatctctgctttcaggaattaggggttcttcttaacacagttgaaaagcttccactcacaatggccccagccacagtgtcagataaaagtgcaccttcattagctagcaacatgaaagatgacggtggttaggtggggtagtgagtgctggtg

SEQ ID NO: 243324 - DNA, 576 bp, Homo sapiens
gaaaaaaattagttaattacctacaaaactcttttgactgtaatgtttgaaaattgaataaatagctaacaatgaatcctttaagtcataagtggtttctattaaaaaattatgtaattcctcccttaacccctgcttgcttatgtcatcttattattttagtaattatctttcacccagtagagcatgtgaatttatcttttctttcactgggtttactaaaggtatgagcagtaatcttaatgacctgtaatttaaacaaggtttaacgaaaagggtaacatgttgacctgagggatgcttttgacaccatctaatgtttactagaactttccaacctctaaccttttgcttcattttacagsgaatcatgcaagctacaatctgatcacccaaattgagccaatagaatgaatgcctggtgatcaatcagctggtgtgtcacctatgatctctgctttcaggaattaggggttcttcttaacacagttgaaaagcttccactcacaatggccccagccacagtgtcagataaaagtgcaccttcattagctagcaacatgaaagatgacggtg

SEQ ID NO: 243325 - DNA, 575 bp, Homo sapiens
aaaaaaattagttaattacctacaaaactcttttgactgtaatgtttgaaaattgaataaatagctaacaatgaatcctttaagtcataagtggtttctattaaaaaattatgtaattcctcccttaacccctgcttgcttatgtcatcttattattttagtaattatctttcacccagtagagcatgtgaatttatcttttctttcactgggtttactaaaggtatgagcagtaatcttaatgacctgtaatttaaacaaggtttaacgaaaagggtaacatgttgacctgagggatgcttttgacaccatctaatgtttactagaactttccaacctctaaccttttgcttcattttacagcgaatcatgcaagctacaatctgatcacccaaattgagccaatagaatgaatgcctggtgatcaatcagctggtgtgtcacctatgatctctgctttcargaattaggggttcttcttaacacagttgaaaagcttccactcacaatggccccagccacagtgtcagataaaagtgcaccttcattagctagcaacatgaaagatgacggtg

SEQ ID NO: 243326 - DNA, 579 bp, Homo sapiens
ttttctgctctagaaaggatttatcttaattaaagttgttctttgccttggatagatctttaccacacctggtagcacactcttgagaggataaatccttcgttccattccaaatgtctttagaaagatccgttttctaatgagccagctgacaactcatccattcacatatttttgcgtacaactttcacatggatttaagactcaaagtggacgttgtcagtttattctctataagtttaatttcctagggaacatgtgttctattttattgaatgaatccttagtggataaggagaaggattttgaggcgattttaacacggattagtggaggggaggagtgaaggcttttacttaaaaattacaagtaatttgtcatggtgttagggaatttgacttgttagaccctatctcatggagaatcacatcattttattatgtttttaaaaatactaaaccaacctgcatctctaggataagtacagcttcatcattatacatgattttatatatacataygtgtgtgatatgtattttatatatacatatgtatacatatatatatatatatagagag

SEQ ID NO: 243327 - DNA, 599 bp, Homo sapiens
gtcaaaactaaaaatttaacattagtacaaaattattgactaaattacggactttactcagatttcacaatgttttctaagttaagttccttatatatctaggatttaatacaaatctaggatagtacattgcatttcattttcatatcttcttgggcttgtacatcctgtgatagtttctgtgatagtttcwcattctatccttgttttttgttttaatgatcttgaccattggaagctggttcaggttgttcctgtgtcttttcattacctaccctttttcttttctttctttctttgattttttcggagtactttatttctggcaccataagattctccaagcacattttggattttccctctctcaactttggtatcaagccgtacttcaagcaggcctacttccctttatttaaaagtggcatttagaatccaagatctgggtataattgcacttttagaatgacacttgcttctagccctcttggcagatagatagaactaacaaatgtgtgtgcgtgtgtgtgtgtgtgtgtgtgtgtgtgtgtattctttttgatgacagccctttttctccctttcctcaagagtcttgc

SEQ ID NO: 243328 - DNA, 539 bp, Homo sapiens
agagtaagacatactgcctctttccacaaacattcaagagttgtgaytggcaatcctggctgaggatcaaggttagcttggaagcttttaaaagcaacagatgcccaggctataacccgagagtcttggagtaagggtagaaattgtgacaataagtcagagttgagattcattgctttatggtcaaattggggagtaagcaaagatttatgtaatcaacattcaaagacaggttaatatgcacaccagcctgcaatgtttggtttgaacaaaaacaaaacatgtgggagtttagggaattctactgtatagattgccatttgttgttcttcatatcagttcagaattatccaaacattgtataaattaataaattccaaaaaaataaaataaaattttaaaaacctcaattttttaaaattacacatttcagagccctaccatggccccactgcaccacagttttcaagaaaagaccctgggaaactgaattttcacaagtgtcccgaggattcttatcatcaaggaagactggaaaa

SEQ ID NO: 243329 - DNA, 571 bp, Homo sapiens
ttttgcccattttgtaactgaaacatttgtcttttgttgttgaattgcagcagatctctgtatattcaggatattaaaccataatcagctatatgatttgcaaatattttctctcattctgtgaacagtctttttaccttcttgataatgtccctttatacacaaaagtgcttacttttgataaagtcacatttctattttctcctgtttatatgcttttgttgtctgttattggctaaaattccacatctcctccaccaaatcatatgttgcagycccaacacctattacctcagaatatgactctttttgaagataggttctttaacaaggtaattaaggtaaaatgaggtcattaggttgggacctaatccagtaaaactggtgtccttataagaagaggagattatgatctggacacactcagtcaaaataccatgtgaagacacagggagaagacactcatttacaagccaaggagagaggcctcagaagaaaccaaccctgatgacactttgatttcagacttctattctgaagaattgtgaaaaataaatttatattatttaag

SEQ ID NO: 243330 - DNA, 571 bp, Homo sapiens
ttttgcccattttgtaactgaaacatttgtcttttgttgttgaattgcagcagatctctgtatattcaggatattaaaccataatcagctatatgatttgcaaatattttctctcattctgtgaacagtctttttaccttcttgataatgtccctttatacacaaaagtgcttacttttgataaagtcacatttctattttctcctgtttatatgcttttgttgtctgttattggctaaaattccacatctcctccaccaaatcatatgttgcagtcccaacacctattacctcagaatatgactctttttgaagataggttctttaacaaggtaattaaggtaaaatgaggtcattaggttgggacctaatccagtaaaactggtgtccttataagaagaggagattatgatctggacacactcagtmaaaataccatgtgaagacacagggagaagacactcatttacaagccaaggagagaggcctcagaagaaaccaaccctgatgacactttgatttcagacttctattctgaagaattgtgaaaaataaatttatattatttaag

SEQ ID NO: 243331 - DNA, 538 bp, Homo sapiens
atttacttgtattctagcagggtacacgcttatttaaaaacaatgtaaaatgcagccttccacaaaagaagcagcgtcatgagaaaacttgggtttcaagttttgtgaacgctgcattttcaatattatggtgtcagtcttcattcactctttgacaaggttgtcaatcaaatagcaatctagttttgtgagacattaaacaaagatcaaagcaatgatactgstgagttaacattatcttcccacttaaacactttcatactttagcatcagtattaacttcaaactcatctttcaaagcaaacaaaatggtagaaactttagtatcaccctttcccatggaaaccataattgctaactcttattcaaatatctttgaaacatttctttcaatttgaaatttaatgaaatgcaagaagcctttttagtgtctatttatatattttacatttttttagcagtaagaagtaatgcagttaaacatggagtatcattttcattctcactttagaacaatggcaaatgaaaggcatcaata

SEQ ID NO: 243332 - DNA, 460 bp, Homo sapiens
tatattctttcaatccatgagcatggaatgcttttccgtttacttgtgtcatccacgatttctctcagcagtgttttgtagttttccttgcagagatcttctaccttgttggttaaygtattcctagatatctattttgttggtgaatttgtcatagatggctcttatttttttgagatatgtccctttgatgcctaatttgttgagcatttttataatgaagggacgttggattttatctaattctttttctgcatatattgagatgatctttttttttgtttttaattctgttcatatagtgaatcaaattattgatttgcatagttgaatcaaccttgcatcccaggaataaagcacactttatcatggcaaattaactttttgatgtgctggtggattaagcgaattaacacagaaacagaaaaccaaatattgcgtgttctcacttacaagtgag

SEQ ID NO: 243333 - DNA, 460 bp, Homo sapiens
tatattctttcaatccatgagcatggaatgcttttccgtttacttgtgtcatccacgatttctctcagcagtgttttgtagttttccttgcagagatcttctaccttgttggttaacgtattcctagatatctattttgttggtgaatttgtcatagatggctcttatttttttgagatatgtccctttgatgcctaatttgttgagcatttttataatgaaggkacgttggattttatctaattctttttctgcatatattgagatgatctttttttttgtttttaattctgttcatatagtgaatcaaattattgatttgcatagttgaatcaaccttgcatcccaggaataaagcacactttatcatggcaaattaactttttgatgtgctggtggattaagcgaattaacacagaaacagaaaaccaaatattgcgtgttctcacttacaagtgag

SEQ ID NO: 243334 - DNA, 503 bp, Homo sapiens
ctgatacacaatagtgattcaatgaatggaaaacaaaaaatatgaatggawcaacaaattttttaaaccagataccagtggtttcatctgattcaattaattgttaacaaattagcctgccagcaaatgacagattgacttgcttgaattaaaatgaaaagttaacatggcttacagattagactaaccagttttcagatgtaaactataatttaaatataaattttatatgtaaatatagaagtaaagtataaagaaagcaagatccattttgcagaaaggaaaactgaagtgcagaaatattttaaaagttgctcctaggacctttgtttagaaatgctaaatgctagaaataagtatgatttgtatatccagtcatttattatcttgatatattctacgcatcatataatcctattattcaaagaacatactagaagactactttccagtggaattagtgatcaaagtgttatgatcatcagtgacaagcattagcacag

SEQ ID NO: 243335 - DNA, 503 bp, Homo sapiens
ctgatacacaatagtgattcaatgaatggaaaacaaaaaatatgaatggaacaacaaattttttaaaccagataccagtggtttcatctgattcaattaattgttaacaaattagcctgccagcaaatgacagattgacttgcttgaattaaaatgaaaagttaacatggcttacagattagactaaccagttttcagatgtaaactataatttaaatataaattttatatgtaaatatagaagtaaagtataaagaaagcaagatccattttgcagaaaggaaaactgaagtgcagaaatattttaaaagttgctcctaggacctttgtttagaaatgytaaatgctagaaataagtatgatttgtatatccagtcatttattatcttgatatattctacgcatcatataatcctattattcaaagaacatactagaagactactttccagtggaattagtgatcaaagtgttatgatcatcagtgacaagcattagcacag

SEQ ID NO: 243336 - DNA, 375 bp, Homo sapiens
caacatacccaaagccatggaatacaggaaaagcagtactaagaaggaagtttataacaacaactgcctacattaaaaaagaagaaaaacttcaaataaataacytaataatgtatcttaaagagctagagaaaacaaattaaatccaaaattagtagaataaaaaaggtaataaaggttatagcagaaataaatgaatctaaaatgaaaaatacaaaagttcaatgaaataaaaagtcattttcttgaaaatttgtaattagcaaatttttagtggggattattaggaacaaaaggagagaagatccaaatgtaatcagagatgaaaaatgactcattagaactaataccgcagaaattcaaaaaattattagg

SEQ ID NO: 243337 - DNA, 375 bp, Homo sapiens
caacatacccaaagccatggaatacaggaaaagcagtactaagaaggaagtttataacaacaactgcctacattaaaaaagaagaaaaacttcaaataaataacttaataatgtatcttaaagagctagagaaaacaaattaaatccaaaattagtagaataaaaaaggtaataaaggttatagcagaaataaatgaatctaaaatgaaaaatacaaaagttcaatgaaataaaaagtcattttcttgaaaatttrtaattagcaaatttttagtggggattattaggaacaaaaggagagaagatccaaatgtaatcagagatgaaaaatgactcattagaactaataccgcagaaattcaaaaaattattagg

SEQ ID NO: 243338 - DNA, 577 bp, Homo sapiens
aggagcatccagatttactgagcatgttcttggtgacctacaaagagactgagataaccacaaaataatagtgggtgtcttcaacactctacagacagtatcagagagatcattgaggcagaaatataacaaagatatttggaacctgaacttgacacttgaacaaatggacctaataggcatctacagaacactccaccaccacgaatagaatatacattcttctcatctgcacatggcacattcttgaaaatctaccacacaattgcacataagacaatcctttacaaaatcaaaaaaaccctaaatcataccaaccacactcttggactacagtgcaataaaaatagaaatcagttctaagacaatwattcaaaatcatataattacactgaaattaaaccacctgctcctggatgacttttgggaaaataatgaaattaaggcagaaatcaaaaaattatttgaaactaatgagaaccatgatgcaacatgccagaatctctggggcccagctaaggcaatattaatagtgaagttaatagtactaaatgaccacatcaaaaagttagaaaga

SEQ ID NO: 243339 - DNA, 577 bp, Homo sapiens
aggagcatccagatttactgagcatgttcttggtgacctacaaagagactgagataaccacaaaataatagtgggtgtcttcaacactctacagacagtatcagagagatcattgaggcagaaatataacaaagatatttggaacctgaacttgacacttgaacaaatggacctaataggcatctacagaacactccaccaccacgaatagaatatacattcttctcatctgcacatggcacattcttgaaaatctaccacacaattgcacataagacaatcctttacaaaatcaaaaaaaccctaaatcataccaaccacactcttggactacagtgcaataaaaatagaaatcagttctaagacaataattcaaaatcatataattacactgaaattaaaccacctgctcctggatgacttttgggaaaataatgaaattaaggcagaaatcaaaaaattatttgaaactaatgagaaccatgatgcaacatgccagaatctctggggcccagctraggcaatattaatagtgaagttaatagtactaaatgaccacatcaaaaagttagaaaga

SEQ ID NO: 243340 - DNA, 333 bp, Homo sapiens
tctaagcatttgaatattttcctctacattaaaccaagaaagatcaagcgttttcagctcgctcacagtgggccatcatttaatccatattttagctaaccaagcaagtaaactattagaaccttttttaactccccaagctgcaatattaaatgcagagtccctacttagcaggcccaaatcaataaattcagcctgatccaactctatgyaccttccaccattatcctaaacccttaatatccattcccatgactgttctccagattgctgtttatatacattagaaaactcaagaagtccttttccagtgtagcccacttcctcatgggt

SEQ ID NO: 243341 - DNA, 583 bp, Homo sapiens
taaagttacagtaacaggaagcaaatatttgctagtgggtcactaggggtaatggagagttctaccacttttatttctacctcttgattcctggaccaatgatcctgctataraagaaacagcaccatatattggacactgattaagcacatctacagctttttggagagcattgtgccagacctgcaagacattgccacctagctgatgctgtaattgatccttcaaaccgtcattccactgttctatcaagtcagctgcttcagaatggtgagaaacatcgtaactaatggattctataaacattggcccactgttatatattttttttgctgtgaaatgtttttatcagaagcaatattgtgtggaataccatgacagtggaaaagccattctgtgattccaaagatggtagttttggcagaaatatcgcatgcaaggaaagcaagtcatatctagaataattatctgttctagtaaggacaaaatgctttctcttcctaatagaagcagtttactgcatttaatctgccaccaggtagctggctgatcaccctgagaaatagtgccacatcagggccat

SEQ ID NO: 243342 - DNA, 583 bp, Homo sapiens
taaagttacagtaacaggaagcaaatatttgctagtgggtcactaggggtaatggagagttctaccacttttatttctacctcttgattcctggaccaatgatcctgctataaaagaaacagcaccatatattggacactgattaagcayatctacagctttttggagagcattgtgccagacctgcaagacattgccacctagctgatgctgtaattgatccttcaaaccgtcattccactgttctatcaagtcagctgcttcagaatggtgagaaacatcgtaactaatggattctataaacattggcccactgttatatattttttttgctgtgaaatgtttttatcagaagcaatattgtgtggaataccatgacagtggaaaagccattctgtgattccaaagatggtagttttggcagaaatatcgcatgcaaggaaagcaagtcatatctagaataattatctgttctagtaaggacaaaatgctttctcttcctaatagaagcagtttactgcatttaatctgccaccaggtagctggctgatcaccctgagaaatagtgccacatcagggccat

SEQ ID NO: 243343 - DNA, 583 bp, Homo sapiens
taaagttacagtaacaggaagcaaatatttgctagtgggtcactaggggtaatggagagttctaccacttttatttctacctcttgattcctggaccaatgatcctgctataaaagaaacagcaccatatattggacactgattaagcacatctacagctttttggagagcattgtgccagacctgcaagacattgccacctagctgatgctgtaattgatccttcaaaccgtcattccactgttctatcaagtcagctgcttcagaatggtgagaaacatcrtaactaatggattctataaacattggcccactgttatatattttttttgctgtgaaatgtttttatcagaagcaatattgtgtggaataccatgacagtggaaaagccattctgtgattccaaagatggtagttttggcagaaatatcgcatgcaaggaaagcaagtcatatctagaataattatctgttctagtaaggacaaaatgctttctcttcctaatagaagcagtttactgcatttaatctgccaccaggtagctggctgatcaccctgagaaatagtgccacatcagggccat

SEQ ID NO: 243344 - DNA, 583 bp, Homo sapiens
taaagttacagtaacaggaagcaaatatttgctagtgggtcactaggggtaatggagagttctaccacttttatttctacctcttgattcctggaccaatgatcctgctataaaagaaacagcaccatatattggacactgattaagcacatctacagctttttggagagcattgtgccagacctgcaagacattgccacctagctgatgctgtaattgatccttcaaaccgtcattccactgttctatcaagtcagctgcttcagaatggtgagaaacatcgtaactaatggattctataaacattggcccactgttatatattttttttgctgtgaaatgtttttatcagaagcaatattgtgtggaataccatgacagtggaaaagccattctgtgattccaargatggtagttttggcagaaatatcgcatgcaaggaaagcaagtcatatctagaataattatctgttctagtaaggacaaaatgctttctcttcctaatagaagcagtttactgcatttaatctgccaccaggtagctggctgatcaccctgagaaatagtgccacatcagggccat

SEQ ID NO: 243345 - DNA, 393 bp, Homo sapiens
ggctctgttggaatctagttctgacagacagagtgaagtgagtttagtaagaataaaaaagtttatttctgttactatttcagctactccacacagttttaaatagaaaagggagttgtgtggtatttgtctaaattttataaatattaccccaatctttayaaacttttaaaaacagaggtgattattaaattacacccggttttagactatttcgtttaattaactatgatgtaaagaagcctctgccctttccctgaaccccaatgcactgttttgcatgggaaaatactatagtcttgttacatatcctaactagctaactatgtgagatttttacaagaatggattgatagtgatgcacagtgagataaatgagtgagagttaagatt

SEQ ID NO: 243346 - DNA, 613 bp, Homo sapiens
atttaatgtaatataaaagacagacatccaataaagaattattaacctaccatattttaccatatatagacaatgttaaagacaaatactagacagtgtcatttttaatttggaaaaaaatacaaaccaatttctttgctttaaaataaattacatctcattccttttaagatgaatctaactatctcatatttagcaagtaaaaacttgtagaacttattaaaagtatgcacaatgaaaacaagtattaaatgtgtcctttcctaagtgcaagtaaatatgcaaaatccattcttggtagacttcataaaagaatttggaaacgaagagtggatctaccttttgcttatatctcctaattgcccacgaataaaatatcactacttgttacatggaaatgaaataattttaggacagttcaaaagcttgtatttctctcagagttaagaaagatgttactactatgaactaaaggtatcatataaattaaacaaagagcaataaatcagaggtgcaggttaaaagataataaagataaaactcactagtggtgtattyggattaccctctccagttccaaagctgaccttaaacccactcaaagcagggcaca

SEQ ID NO: 243347 - DNA, 458 bp, Homo sapiens
gttttatttatttcaaaggtctatcttgagtacatgctggagactcttccactcatatgcctccaccttacctaagagcacatttagtagccaactatagaaatattgtgtccttcttgagtgctggcagatgctcactgctgatccagccgctgtccgccgaatggtgggggagcttgacttcaggttcgctatgaaggcctttaacaaaacctacggaagcaaaagtccaagtagataaaagatgaagctcctatgaagcttatcatgtattacataaaacttaacgtgaattagaagtttccaattcttgcaaagtataaacagtttgaggcttttcctacagctgaactgaagtaccccaaatttgggacactcaagagcagtttacagacaygtgtagtctatttgcttctttataaccttcactcaggggactgctcagcatccatgtcctc

SEQ ID NO: 243348 - DNA, 586 bp, Homo sapiens
ggagcagggaattctgattcatgttctcagtgtcatccctcatcatagctagcacagtgcacaccacaggacataactcaggttaacatttctcagaactcagtcatgcattcaccacttttaagattttttactagtatagataccattgtgctgatttttttctaatattttcagtgaaacagaattacttaaaattgaaagtaacttaaagtaacatatgtaactataaaagtggacaatcagggtaggaaagataacttcaaaaagaaatacaataaaatgtttaaaaggttttttttttaattttttattgaaaaatttccttaamttacttaaatcaatttatttcaattaaatattttattcttcaccctttttattaaaatgaaataaaaatgaaataaataatagatttctatactactaaacacttcatatgtattatctcatccaatcctcataaagcaactcagaatgcataataccatttccatttttcaagatgagaaaactgagaccagagaagttagaaaagatgcccaaatctgctatgccacagatttaggatggacacccacagtca

SEQ ID NO: 243349 - DNA, 589 bp, Homo sapiens
gtggcaaaatgctcaggacacccaatgagatgaggtatggtgtttttttcttcctgaaatgcagttataatttctgtcttttaggggtggggaaatttgtttgtatgctttctgagagagaaaaaattcatcgtttacaatatcttgctgtcagccaaagattgtgttctgaggagggtcctttattgcagaaatggttyctggttgaaagaatgcaaatcacaaccttagattctgcttctgtaaaaacagatgacagaaggggaggacagaaggatggcttctattcttggggaaacaagaagtctgataatggatgaaagatttaaacagtgagaaaaaactgcgcaattgccaacagggtaggaaatctgagggaaagatcagagatcttgaaaggaaatgttatggtgattttccatggagtgtgtaatatcaatgctcttccccaatcaccacacaaagatcttgatgtggctgtgatatactacatgtttactgaaaagtaaaacacatatacaactattaaaattttaatgtccaagtagcactaaaattattatgaacatcaccagttttctgtgttcca

SEQ ID NO: 243350 - DNA, 549 bp, Homo sapiens
tacctgccccttctctcactgctctctatggcaggttgaatcctcagagggagagtagctctccacagtatgagtgacattactggcaaagagagagatcagcatactggaagcagcacagggctttgaggcagtcagatttggggctgaaaaactcyagcgctaactagctgtgttttcttgagcaagttgcttaacatccacttattccttaaaggaatgtgtattgagtgcttgccatataccaggtactattctctctgttaatttctcatcagacaaatggagataataatagtacctacctactaaagaagccccctactgagaccacatggattaaaggggcccacctctgttttcccaacatcccctgctcttgtagctttcctgcttcccacacatcagtactgtaattatctgtgtccattagactgtgggttctttgagcctgggaccaaacttgaatcatcatgtgtactcacagtacctggaaactagtgccctgaaggtcttcagtaaacatttattctgtgaagaatatggaac

SEQ ID NO: 243351 - DNA, 508 bp, Homo sapiens
gacaaaaatccaacattcattcataagaaatactctgaataaaatagtaacaaaagggatgtttttcaacctgataaagagcatctatgagaaacctactgttaacatcataattaatggtaaaaatctgaatggtttccctcaatgatcaggaacaagacaagaatagcagctctcaccaattctattccacattgtattagaggtgctatccagtgaaagaaggcaggaaaagcaaataaagggtatctggattacaaaggaagatgttaaactgactttatttgttgacaacataatcttgatgaagaaaatgttaagacacacacacagaaatattagaactaatagctacatttagcaaagttgcargataaaagatcagttgtatttctatatattacgaatgaacaagcaaaaatgagtttttggaaaagaaggccattcacaacagcataagagaaaaatatttaggactaaatttaccaaaagaagtgcaagacttgca

SEQ ID NO: 243352 - DNA, 487 bp, Homo sapiens
aaagcacaatccacaacataacaaattgttaaatttatttcaccgatagtaaaaagtgctcctagaaaaacaatgataaaagaatggaaaaaaagccacatactgggtaaaaactcttttcaaagcatgtatctgataaagtacatatatctataatatataaagagctctcaaaatacaacaataaaacaaacaaccaaattaaaaatgggcaaatgatttgaacagatgtcaagtaagcacatcaaaatatgctcaacatcttcagtaattgggggaatgcaaactaaaaccccaatgagacaccactacatacctattacaatgtctacaatttaaaaagtctgaccataccragtgttataagaatgtggaagaactagaactctcatatgctcccagttgaaatgtaaaattgcacagccactttggaaaacagttttttagttacttaaaaagcatataagtatcatatggtccagccagt

SEQ ID NO: 243353 - DNA, 648 bp, Homo sapiens
tcacagttcagttaataagacatacacgttaccactgtttacagcacaatgggattagggctaaaatcgacatattatggcttgctactggcagatatagtaaggaaagcttttgttgttcacattccagtctttctgccaataaagccttatacctttaaaaggcctgagacctgcctcttgaattgtctgtgtataaaatttaatatggcagagagaacgagaaattatttctggttcagctgtatccaagtgtggctcaaaaatgcaaatggaaacagacayggcaaaagtcacaatggagcaaaatatatcttcctctgtggagattctcatcaacgttggcatatgagtagtattcatagacctctaggatgcaagaaaggatcttcaaaataagcaccatcgctttggagcagaagcagctgaggcctgattcagctctgcacaagaaaaatgtgctgagactgctctggttggatgtggttatggagtttttaaggcacagagatgactcagatggcatccctgtcctctgggagttcacactcttaacagtcagaaacataaacagataatctcaaggagtgcatatttttctttcccagcctaccctgagagatttttatcaattcctaccttctctgc

SEQ ID NO: 243354 - DNA, 617 bp, Homo sapiens
acttataaaaaggagagttataatagatatttgacaactaagatcacaatagtaactaatttattaaacatctaatgagggtcaggcactattttctgaatgttttacattcataataatatttcatacatacaataattttatattatatagggttctgtcactaatttcgtttacctggtgaaaaaaacagaggcagagagattgcgtagcttgcccaaagtcagagttaataactggaaataccaagttctaatccaggagtttgattatagaacttgggctccagaatgctgtgccatacttccttcttgtgtgaatggatagctcctcaactatcrtggctttatgccatcaactgaagatccacagatctagttccaacctgtctcccattctactactatgtatgctcaacatttgcctttagatatcccttttaattaaaattgcacagaagttatcatgacaagaatgaagcttgaaatggttaccatttatggtatctctactttgtttcaaattctgtagtaggtgctgtacctaaatatgtattttcctccttaatttagtttcctatattatctggcaaggtaattgtcattggtcccatttga

SEQ ID NO: 243355 - DNA, 471 bp, Homo sapiens
gaattcagttaaaaatgggtaaatattatagaatataaattatttctcaataaactttatatgtatatgtgtgtatatatacatatattttaatagtctagattttgcagataatcagtgacaggacaaggactcacatttagtgtgctggattcaaattccaggttctgtaaataaaagtggaatccattataggcatctttaacttatgcaaattcatgtcaaatgctcagaaaacccaataaacatacaaataaaacaaacatgaaatgttagaatttcttgatttattctattattcttccaggctttggctcttactgtgtgtggtggagagaggggaagaaactgcagccaaaatgcaataaaaataaaaatackacattttcaggaatatttcagtctttcaaaaaataattttgattatgcaatgatttgacattatgtatgaatttagaacttaaccttcat

SEQ ID NO: 243356 - DNA, 423 bp, Homo sapiens
aggtagggatacaactagttatacatccactcccctctctgagttatttggtcctgcctaagacttgctgccaccaagatctgcattcctgtgttcacaaggcagacattccttgcatcctctgtactctccattgtttcaacttcactgcaaacaccattccccacaatataatgaggccaaggaaagaaaaaastcgcctcagctggcaagcatagggtggaaaaacctgccacacaaatttgcaattatttgacttccgcctggaaggcaggtcggctgggtttatgtcccccaaagttagtatcctcttctgtacaaaatgtggttgagagaagggtgatctccaggtgtttcatctttgcacccttgcttccagcatccagcgaccaaacaggcgattaccagagatcaaaagaaaaa

SEQ ID NO: 243357 - DNA, 578 bp, Homo sapiens
tgtagactagaatagacagagcctgatattctacaatgatccaggcaacctaaatctccaaacttgaattgcttgtgaagtactcttaaatatttaagagtaactcttaaatatttgaaaactcaaatgaattttgccacttttagtctaaaattagtttctaaatattcatgggctattggttagatagtctcttaacttataactgtataaaacttcatgttagtaacacatattattaccagtattaataatattcctgaaattatgggtatactccttaggctgtgaaaacttgaataccccaactcacttacaggctggaggatgaataaacttgaagaagctcccttgaacaatgaaggttagtggcaacagacaaaggtgtctgttccatttataaaggtgtaaacaggataagctagtaaaacagggctawctgggttagaatagagaatgtacagagtcagaacaaaagagatgaactagtgaagagcaagaggcaaacatcaacaattacctgatctgaaggtaacagcaggtaaaaattagcagtaatatagtgacataatcaaagc

SEQ ID NO: 243358 - DNA, 525 bp, Homo sapiens
tggcatttaactttttcatgtttagtaaaattccatacaatgcattttcactagcagcaggaaaattcgatttttgcctggctattgatcaggaagccctttaatcataggccaccacttgataagacagaaacactggatttattattttatgtcatacaacttccaggtacatcaataaaaatataatgaatattatatcaactacagaacagtaaataaatactttctgtcagagtaccagtactatacacagggacagctacacatgaatgatatggagttattctcttgagaacaaatggtaatagagtcagggaaataataaacaaaattaaggtacttagggaactatattatgtgttaatgcsttgaatatagaaggatttaaatatttgttgaattcctatggaactaacaaattaggccagacacggtggttcacacctgtaattccagcactttgggaggccaaggtcggaggattacttgagttccacattttgagaccagcctgggaaacat

SEQ ID NO: 243359 - DNA, 589 bp, Homo sapiens
actgtgattcctgagtacccagtaggaacaaccagcgtgagcaagggctagcgcggcaaaacacgaaactgcccttcatgagccacggcaaacaggcaggacaagaatgttacaaaattcatctcagcaaacaactcacatgtgacgacagtgtaaaatgaacttctttgcatagttatacagatttgaagacatttcagtgattaaatatgcagcccagtaggaaggaaagcaaacagtccttaatgaacgtggcwcaatttctcttaccattaacatatttttaagtgtttcaaaaactgaaaattccccatattagaatgcctcaagctgggtgcagtggtgtgtacctgtagtcccagctactcagggggctgaggtgggaatgtcactgggaccatcggtcattcattcaacaaatgcttagtgatacctactgatggtgagtcccgtggacacagcggtggatggggcagacatggtgcagcccccactgagtgcaggcgggtgaggcaagtgggtaccggaggttagaggatgagccaaagctcacatgagaaaatccagctcatcttgagactgaaaccaa

SEQ ID NO: 243360 - DNA, 521 bp, Homo sapiens
tcagaatcctgtagcctcccgctgcgtgactcttcaaccgtagtttctaatcttgtggctaatctgttggtcccacaaaagcaggctaatccccaggaaaggtttcctttgggaaagggctgttatcatctttgttttaaactaagttcctcccacagttcaacctgcgtgcagcagtaaacaaggagggcatggaggttagaagcaaaatggagctggttatctcactgtcggcaaattttgcaatggcagtttcatagagatgcctgtcctctgggaaaaaagctaataacaggttgtctttttggctgcaggtggaaaactgcatctattaggmagaggtggggctttgttcttacccacaattggaagttctctatggagtaaaggcggtatgtgtgccacctgattcctttccccatgtgtatctggttagggtcggccacgtgagatccgcaagcattttagaaggtgggaggggaggtgggagctggctacaggccaggcgttggcgtggttcc

SEQ ID NO: 243361 - DNA, 598 bp, Homo sapiens
tatcttaacatttctgtttgagtggtttgggtacctatcatgaataaaaatacatgcttataataatttgtcttatctggaaagctgcttgatgaagtataaaattcccaagggawgcaatctgtcactagctctgccatttagaagccatggtgagcctcagtttccaaatctgtaaacaagatctaacatgacatattgttcagggctgcttataagtatttatcaaagaaatatttattgagcatctactatgtaccaaaaaccttcaaagcactaggcatatgatggtaaaaaagaccaagtccctccctcgcattctaagtgagggagtgatatggtttggctctgtgtccccacccaaatctcatctcaaattataatacccacatgtcgagggagggaccaggtgggagtcccgtgattggatcgtggggacggattccccatgctgtcctgcgataatgagggagttctcatgagatctgatggttttaaaagtggcagtttcccttgtgctctctctccccctctctctctcctgccaccatgtaagacgtgccttgcttccccttcgcttttcaccatgattgtaagt

SEQ ID NO: 243362 - DNA, 565 bp, Homo sapiens
ccctcttggggcctctgaggcttgtaaccagccctgcttaggtaagtacactgtgcaaataagccctctggggcttacagacatgtaaacagctctccagctgaccttcagacacaaactcgggatttaaaacactaatttcagacccatgagtccagagagggtctgggctggaggaatgggggcgccagagaaggggtcccaaaatgattggtcagtgggccgaagggcaagccataggaaagaggggaggcaaatgagccaacaggtgtgaaaccagctcccacaggacctggaaagaaatggataatcaatacaaaggcagtgattgttccaggaaacacaagtgttgctgacaaagtaaaaggagagcaaaagggaaagggatgattgagagggagggagaaggaaggaacraacaggcaaggttcagaagggagccacgtaagttaagtatttttcaagaaacttgttgttataaggggcaaggggtgaaatttcttttttgcctgccctgtccaaaatcacaatgcaaaatgaagtagcgttgcacaatgtcatcgat

SEQ ID NO: 243363 - DNA, 554 bp, Homo sapiens
atcttggtattttaaaaaacatgatccctggttagtgatcgtacgaaataggccaacttcaattttatttgttagtggttacaaaaatcatatttgccaacattcgtgtttcatttttgaaaatattatagcaatagctcctaatacctgcaatcttttgggggaaaaaacccagtaagctatatttactttaaaagtggaaaattaattgtaacaaccttataactaccataaaatawaattaaaaagtcaatatcttctttcttttttaaacacccaactccttgcatattatgttttctcctagaactttaaaacaaaggctgttttctaggatagttaacattactaattgaagcctgatttgtaagctattatagctatctgaccagcaaattatttttatgcttggttaatcttttccaatagtggaagtaaacacatttcttacatacatgttcaggagctctaaaatttggaacgatagtatgttagtccagtatgattcttgatagcatttttcactgaagcagaatcacttaaataaacattag

SEQ ID NO: 243364 - DNA, 305 bp, Homo sapiens
aggtgggcagcaggtgatcccactagtggcaacttggtgttctgcgatgtggcacatccacttcttaaatgcagattattgcactgtaataaaaatcctccatattcagtgctttcattgtgtataattatgtaaactgtagacaaaaaatattcctgaatttgtgtgtgtgtgtgtgtgtgtgtgtgtgtgtgtgcggatgcgcaatccgagatggttgttaaagctcgaaagcgagtttagcttctagagtcgcccctcctycgaggcccagccgaggtggactcgcaccgtcgcaagaccgg

SEQ ID NO: 243365 - DNA, 305 bp, Homo sapiens
aggtgggcagcaggtgatcccactagtggcaacttggtgttctgcgatgtggcacatccacttcttaaatgcagattattgcactgtaataaaaatcctccatattcagtgctttcattgtgtataattatgtaaactgtagacaaaaaatattcctgaatttgtgtgtgtgtgtgtgtgtgtgtgtgtgtgtgtgcggatgcgcaatccgagatggttgttaaagctcgaaagcgagtttagcttctagagtcgcccctcctccgaggcccakccgaggtggactcgcaccgtcgcaagaccgg

SEQ ID NO: 243366 - DNA, 549 bp, Homo sapiens
gtgggcagcaggtgatcccactagtggcaacttggtgttctgcgatgtggcacatccacttcttaaatgcagattattgcactgtaataaaaatcctccatattcagtgctttcattgtgtataattatgtaaactgtagacaaaaaatattcctgaatttgtgtgtgtgtgtgtgtgtgtgtgtgtgtgtgtgcggatgcgcaatccgagatggttgttaaagctcgaaagcgagtttagcttctagagtcgcccctcctccgaggcccagccgaggtggactcgcaccgtcrcaagaccggccaggcggtggcaatgaataaaaagccagtcttggtgctagggacccaggtgttctccgtcccgcccctgcctggcagccccgcccctcccccgccccgggccacgccccaccctggcccagcccccaaaagtaccgtttgcatctcccgtgagcctcttcgactgtcactctttggaaaaaaaagtgacgtctgcactgaggtggccgctaaagtgcgaatcacgacgggcggtggccgttgggt

SEQ ID NO: 243367 - DNA, 581 bp, Homo sapiens
catttaaagaataccaatccttctcaaactcttccaaaaactgaaaaagaggagacatttccaagctcattttatgagaacagcattatcctgatacaaaagccagacaaggccactgcacaaaaagaaaattacaggccaatatccctgaagaacataaatgcaaaaattttcaagaaaatacaaattgaattcatcagcatattgaaaggatcatacatcataatcaagtgaaatttatctctgggatgcaaggatggcttaacatatggaaatcaaaaaatgtgatatgccatattaatagaatgaagaaaaaaatcatatgaccatctcaatagatacggaarcatttgacaaaattcaacatctttccatgataaaactgtcaacaaattagttatagaaggaatgtacctcaatacaattagtgcatataagaaaagcccatggctaaatcaaactcaacagtgaaagactgaaaactttttctctaagataagtgcccactcttgccacttttattcaacatactattggaagtcttagccagaagaattaggcaagaaaaataaatgacatcc

SEQ ID NO: 243368 - DNA, 581 bp, Homo sapiens
catttaaagaataccaatccttctcaaactcttccaaaaactgaaaaagaggagacatttccaagctcattttatgagaacagcattatcctgatacaaaagccagacaaggccactgcacaaaaagaaaattacaggccaatatccctgaagaacataaatgcaaaaattttcaagaaaatacaaattgaattcatcagcatattgaaaggatcatacatcataatcaagtgaaatttatctctgggatgcaaggatggcttaacatatggaaatcaaaaaatgtgatatgccatattaatagaatgaagaaaaaaatcatatgaccatctcaatagatacggaaacatttgacaaaattcarcatctttccatgataaaactgtcaacaaattagttatagaaggaatgtacctcaatacaattagtgcatataagaaaagcccatggctaaatcaaactcaacagtgaaagactgaaaactttttctctaagataagtgcccactcttgccacttttattcaacatactattggaagtcttagccagaagaattaggcaagaaaaataaatgacatcc

SEQ ID NO: 243369 - DNA, 555 bp, Homo sapiens
gacatacttctcgtttcctcctgcaaaatacagctaaaaacttggaatgatatacatctatatctgtatagagaactatctatttatcttttatatctatctatctatctatctatctatctatctatctatctatctatcatctatctgactctgaaaagtggagagaagaaggcagaccagctaagaaacacaggactcaaggaacaatatggtggtgacttccttgggtgctggagaaggcagcaaacagaaacaccaatgagaacagattwaaaaaaaacaacaaaacaaaacaaacagaaaaaccaattccaacaaaagcctgttctctgtagccaaaggaccagaaaagaggtgtgtagcaagacagaaaaccattagacaataccactgtactccagccaaatgccacagaaaaaaactgtggctctgccctctactcatgacagcaaaagctgagtggggagcctagccttacactctcatttggctgtaacaaggtgcctcaatccacccacaagctactgggatggtatcagagaaggctgagtg

SEQ ID NO: 243370 - DNA, 516 bp, Homo sapiens
gaattctataacatataaatctaaggttttattagattatgactttcagccaaattccttttcttagttgtaaaaatattgttttttcatggtgagtgtttaggagttgtgcttgcaaatcacaatttatcagacggcctggtccttattaaggttcttctctttatgtaaaaattagactaaaagaaaatcagtgtttctatgatttttatcttttttcctttttagrgacggggtctggccatgttgcccaggctagtctcaaactcctggactcaggcaattctcctgccttggcctcccaaattgctgggattacaggcgtgcgctacagtgcctggccagaagtcaatgtttcaaagaggcttttaagaaacaactatgatgaaagcttttaaaataaagataatactacttggaggctccaagaaggtatttaacaacttttttctgtagttttctaaggaggaaattagaagggaagcagtcatttaatgattacaacttagtttgtct

SEQ ID NO: 243371 - DNA, 422 bp, Homo sapiens
ttgcccagcaagcctcaggaactagtgggtgaagagtcaggaacaattcgttttctgatatttacctactgagaaagagagagtggtcaaacaagttaacataagctcatgggtcctcctstctgttggatggaacgcaggcctgaaatgtacagcgagggaagttctaactgcgcagagaaagagaaacactacgtgcctgaaaggtgcatgcttgtctgaatctgtgagccagaggaagccgcccatgtgagaggattggaagaagggtatgccacacactgcctcccagatgacgatgtcccaacagcacaggacagaaaggaattgtgatagggcctctgactaattagatgactgcaagtattctgctaaaagcagaagagctgataaattttttacttgacccactaataatttta

SEQ ID NO: 243372 - DNA, 367 bp, Homo sapiens
ctttctttgattttgatgacactgagagtgttgaagagtactggtcagatattttgtagaatgttccccaattggaatttgtctgatatttttttcataatgagactgggtgttttggggggagaccacagaggtgccgttctcatcatgtcataccgagggcacatatgatccacatracgcgtcactgtcgaggtcaaccttgctcacctgggctgaggtcattttgccaggcttctccactgtcaagtcagcttaaagttacactacacccctcctttccgtgatgtactgtttggaaggaagtcactacctgcagcccacactacggagtagggagtggtactccagctccttgagggtggga

SEQ ID NO: 243373 - DNA, 581 bp, Homo sapiens
actgtctatgcttggccttgcacagcatgtgggatgggctgcacagatgaggaaagtctcagagaggcaaagtaggaaccaggaactaagctgaagctagaacctagatctgctggtgttctatcaccactcttaggtcagcactgtccaatagaactttttgtgatgatggaaatgtcctgtgtctgtcctgtccaatattatagccactaactatatgtggctcttgarcacttgcagtgcaactagtgcagctcattgcatttttattcatttaacacaatgatttatttatttatttgagacagagttttgctcttttcccccggctggagtgcagtggtgcgatgtcagctcactgcaacctctgccttccagtttcaagcagttctcctgccccagcctcccaagtagcttcaggtgcctgccaccacactcagctaatttttgtatttttattagagtgggggtttcaccatgttggccaggctggtctcgaactcctgacctcgtgatctgcctgacttagcctcccaaagtgctgggattacagatgtgagccaccgtacctggccaacaac

SEQ ID NO: 243374 - DNA, 471 bp, Homo sapiens
ctgcagcagacctacagaaaaggggcctgactgttagaagaaaaatgaacaaacagaaagcaataacatcaacatcaacaaaaacaaccttcacagagaaaccccatccaaagatcatcagactcaaagatcaaaggcagataaatccatgaagatgaggaaaaaccagtgcaaaaatgccgaaaattcatagaaccagaatgcctcttctcctccaaatgatcacaactcctctccagcaagaacrcaaaactgatagattgacagaaggagccttcagaaggtgggtaataacaaactcctctgaactaacagagcatgttctaacccaatgcaaggaagccaagaaccttgaaaaagggttacaggaactgctaagtagaataaccagttaagagaagaacataaatgaccgatggagctgaaaaacacaccacaagcactttgtgaagcatattcaagtatcagtag

SEQ ID NO: 243375 - DNA, 494 bp, Homo sapiens
ctttcaccacggtcttcccagatggagaatgggagcatcttgtcagacaaggacctccgtgctgaggtggacacgttcatgtttgagggccacgacaccacagccagtgggatctcctggatcctctatgctctggccacacaccccaagcatcaggagaggtgccgggaggagatccayggcctcctgggtgatggagcctccatcacctggtgagtgagggctcaaaagatggggttccctgccttctccacaggggcccctggtctgcccaggccttgctggtgttcaggatggaattgtttcaggaaccacctggaccagatgccctacaccaccatgtgcattaaggaggcactgaggctctacccaccggtgccaggcattggaagagagctcagcactcccgtcaccttccctgatgggcgctccttgcccaaaggtatgaagtttccccaccctctcacccaaagtctccacggggacgtgtggag

SEQ ID NO: 243376 - DNA, 521 bp, Homo sapiens
ctccctcttataaggggatgcaaatgatttcattcagggctcaccttgataatccagattaatctcccaatctcaaaatcctcaatataatcacatcctccacgatcwttttttttaaaaagataacatagaaaagtttcaggagttagaacctgacatctttggggatcactactcaggcttccacagtctgccttctgtttcccaaagactcacatccagaccacatgcaaatatactcatcccttcccaacaacccaaaagcctcacttctttatagcatcaactcatgaccaaaatctcatctaaatatcatgagctcaaaagtatcaattttattttctaagtcatctagtgtaggtatatgtgaggctctgggtataaggcatccttggataaaatctctctaaaaatctggagctgtgaaatctaattatatctaatatctaattatctaataagatataatatataataatatccatttatagaatatctaattattctataaatcaatataa

SEQ ID NO: 243377 - DNA, 488 bp, Homo sapiens
ttactaacatccgtttgatctccaaaatgtcaactccagccatcccatgtctccagcccttcagctcacttactttactatccacacagccagcagaaaatcggaccttagttccacaaccacaggaaatgaattctgccagaaaccaacgaggtcgagagggctggagctccagatggaactctagccctagcaayaccttgcagtgcaactgcagcacatggatttcagccttgtgagaccctgagtagaggacccagctactccatgccctgacttctgacccagaaaactgtgagatcctgagattatgttattttaagccacaaagtttatagtaattttttatgcagccatagacaactaatatacctccttagaaaaattttaaaatcttgctcaggaaccactcttcttagaaagtaaaggaagggaaaaatgcaaatacatataatttagtaattttgtccctgtaacaaaattaatgt

SEQ ID NO: 243378 - DNA, 486 bp, Homo sapiens
tttgatctccaaaatgtcaactccagccatcccatgtctccagcccttcagctcacttactttactatccacacagccagcagaaaatcggaccttagttccacaaccacaggaaatgaattctgccagaaaccaacgaggtcgagagggctggagctccagatggaactctagccctagcaacaccttgcagtgcaactgcagcacatggatttcagccttgtgagaccctgagtagaggacccagctactccatgccctgacttctgacccagaaaactgtgagatcctgagattatgttattttaagccacaaagtttatagtaattttttatgcagccatagacaactaatatacctccttagaaaaattttaaaatcttgctcaggaaccactcttcttagaaagtaarggaagggaaaaatgcaaatacatataatttagtaattttgtccctgtaacaaaattaatgttaataatagct

SEQ ID NO: 243379 - DNA, 535 bp, Homo sapiens
caagaagtatggtgtgagcaaaacacttccataagaaatccaacccttagggcagagggcacaggccatggggatatgcacaattaggtttataagaattactagaaataacattcaatttattggcagcattggttggcacatagcaaatgctyagtaaaaatgccataacactcattatctcacttcaacctcataaacattctgtgtggaaagtggaacaggtatgattattctcaatttgtagagaaaatcttgagaggccaatgatgtgtcaacattatacaactcaggccagaacaaaggtttctaactacacaccaaggtccttagaatttggaaccagcttagaatcctaactccatcacttaccaaattatcaatggtcaagggtttccatggtagtaaatgataataataatgctgtttggggaggtttagcaattattagagataatttatgtgaaagatttagcataatgcctggctcaaaatagaggactaatgcaactcatattttatgctaaaccacaaa

SEQ ID NO: 243380 - DNA, 515 bp, Homo sapiens
ttaagttctctttgcatttctaatagtttttgtcttaaatattttgctgctgtaagtacttcaagcacacaggtttacaattcatactgtcttcataaagtatgcctatgccttgtctcagtacctaatgttttcccttcttcctgtttaatacttttaaatggaaattttactttgtctgatattagctcctgcctttacaaattgttttttactgcctattcctctaattaattaatatcctcactattttagatatttttacagtaaacagcatatagccagtttctcgccatttgattcgttttttgagatagagtcttgctttgttgtccaggctggagtgcagtggcatgcagctcactgcaacctctgcctcctgggttcaagtgattctccttcctcagtctcctgagtagctgggattacaggtgcatgccatcacrcctggctaatttttgtattttaagtagagatggagtttcaccatgttggccaggctggtctcaaactcc

SEQ ID NO: 243381 - DNA, 383 bp, Homo sapiens
tctggctccaaaaggctgagctcttcattagaccagtccccttgcccctcgatgccctgtgtaacccactagaagagtgggtaggaggaaagccatcaatcccggagcaccagggagacacacraaaggcccagactccgggactgaagaactgctgctgacaaaaatagttataaacattcctgtccatttgggatcattgtgggttggtattagaacaagctggacatcctaatgttccaggcaagcagaagctctctgcttcagaccgtatactttctaataatgtaactagccaaagctagtcataaaaattctgaatcactggtcaagaaacacattttctcatcatcccctctatagccacccctccaacattttcc

SEQ ID NO: 243382 - DNA, 557 bp, Homo sapiens
ttggaaaacctatttcagggaataattcaggaaaatttctgtggccttgctagagatttagacttcacgataaaagaagatcaaagaacatgtggaagatactttgcaaaatgaacttcatcaaggcatgtagccatcacactatccaaagtcaacatgaaaaaaaaatcttaaaagtagcacgagagaagtgtctaatcacctctaaaggaaatcctatcagackaatagcagaattctcagcagaaaccttacaagccagaagagactggggtcctattctcacttttttcaaagaaaaaacctgtgagccaagaattttatatcctgctaaatgaagaagcttcataaatgaaggagaaatagtctttcacagataagcaaatgctaaggaaatttatcaccactaaactggttctacaagaaatgctcagagttttaagcatgaaaacaaaagggcaatactcatcatcataacaacacacaaaagcataaaatcacaggtcttatgaaccaattacacaactgcaactagaaagcaactaggaaacaattaa

SEQ ID NO: 243383 - DNA, 605 bp, Homo sapiens
gtaaaaaatgaacaaagtcttcaaggaatatagaattatgtaaagtgagcaaaactatgagtagtaggtattcccaagggaaaacaaaaacaaaaacaaaaagtttggaaaacctatttcagggaataattcaggaaaatttctgtggccttgctagagatttagacttcacgataaaagaagatcaaagaacatgtggaagatactttgcaaaatgaacttcatcaaggcatgtagccatcacactatccaaagtcaacatgaaaaaaaaatcttaaaagtagcacgagagaagtgtctaatcacctctaaaggaaatcctatcagactaatagcagaattctcagcagaaaccttacaagccagaagagactggggtcctattctcacttttttcaaagaaaaaacctgtgagccaagaattttrtatcctgctaaatgaagaagcttcataaatgaaggagaaatagtctttcacagataagcaaatgctaaggaaatttatcaccactaaactggttctacaagaaatgctcagagttttaagcatgaaaacaaaagggcaatactcatcatcataacaacacacaaaagcataaaatcac

SEQ ID NO: 243384 - DNA, 555 bp, Homo sapiens
ccccattgattcatatgtttattatttcagctatgctaactgcctcgattaatagaaatttataagtattgcaaacaggtagtgtgacttgtcaaactttagtcttctctttcaaacttgtcttygctattctgggtccttagtatttccatataaattttaggaacagcttgtcattttctacaataaaatctgctagtgtttatattagaattgcattgaaactatagattcaatattaggagagttattatcttcacaaattgagtcttctaaaccatgaatatggaatctttatttatttcaattttcaattgctctcagcaattatctataattttttgtgtaccttgtgcttcttctgttaaaattatttccaagtattttattttttgaaattattattaaagaaagtgttttcttagtttcattttctaattattgactcataatacatagaaatatgaattaattttttgtacaatgatcttgtatcctgcaaacttgttaaactcttctatcagcttttttgcagatgccaccagatttgatact

SEQ ID NO: 243385 - DNA, 597 bp, Homo sapiens
accaaaacttttttgagatttctttgattttaacatctgctttcctctttcttccctgcatagtcctatgcttcygggaggcatggcagttagcctttgatcttggtgcctcttgttagctgcatgctgtaagttatccccctcctcaagctaattcttggcaatgatgaaatctacatccttccttcttcactctctttatcacagcttcctatcaagtttgacatgagtcagaccagctatccccacagagattcacagaactcactaatactttaataggaacaggagcttcatcccatacagagtcccaaagatattatgttaatcctataaaccaaccattctaaaagtcatagaggtcccccaaaaatcaggttatcagtaaaaaataagtgtagtataaatttcaagcataatcaggttaggtaggacaattttctgtgtaatttgcatcatcaccattactgtcattacttgatgtacctcaacttcaaatttggtatgatactgatctaagtgtaggaagagctgaaaaatatactaaaaagctaatttgggggaggctaacttgttataatttagaagactaaatta

SEQ ID NO: 243386 - DNA, 679 bp, Homo sapiens
tgaatctactcattttctaattttatctttatatatcactgtgttttcttccttacacttgaaacttggtctatcttggactattcaaaggactcaatagccagttctttgtaggaagatgcaataagagttcacaaaatgttctcagacttacacattttaaatattatttcctacaggtgtacacatggttagaactgataacctgcctgcctggcctgtagttgaatctagagtttgatatcgcattaacactacactcccctaaagtcaaactgatctttatttttctttttcagttttccatatgaaaaactggttaaagacaaaaacttactgcatactgcaaccaagtagaatatttgattctaatagaaagttggcatagacaacttcaccatggttcaagtttatatccaccaaaattaagggttctttataatttttctgaccactgtacccaagcccagagaagatactgactgggaggaggagagatgccacttctgggcagctagcactgcagggyccttccccaggagcttactgataaaatgtactctactggagctctgggatttaacaaacctgtgtggatcacaatggagattttatacttaaagcctgcaagttgaacatgacagactaaaaaatgtgcccaattggaataaaatacctt

SEQ ID NO: 243387 - DNA, 543 bp, Homo sapiens
gggttttaagcaggaaaataatatagcttggttttgatttttttttttttaatgatcctctggcttctgtgtggaggacaaatggaaaggagcaagggtggaaacctggagactaattagcaagatgtatccactgtgcaagtgggagatgagataggcctggaggttctccagggggaccctggagatggggagaagtggatgagtcaagttatattttggtgatagaaccaatcaattctatagattgagtatatgcctcaggtaagaagagggattcatgttttctagttcacagaagacaatcagctaatgggaatgatttcttccagtcatgcacaggaattgtgatcgttcaaagacagcacagaaactttccctgaaagaacttctgaatcttctccttcttargaaaatgttacaagttccagctctgtggttgttagatacagttgttttttttcctcttttaaaatcctctgaaacaatttcagaaataatatctaaaacattcctgtattgaaagcatgtacttacatctaa

SEQ ID NO: 243388 - DNA, 550 bp, Homo sapiens
ctggttatctaaaattcaaattttactaagtgtcctgtgcttcatctactttctaggaacttgtatttttaaaaatgtgatgccttctccaatgtttttcatgttgtgctatgggtcgaaacaagaaatggccataatgaaagaatgcctgcccttttctgggaagtcactgctcatgactcgtcatagtatttaataccctttgaatacaggattattaagtaaatcacttgcaaatttattttcaagaatacggttcattcttacctaaaagagacagaaaatattccttcatcataaatgtcctttttggctgattctcaaggcaaattacatttgctgctctgtttcagaaatcattctggcataggtccattttttacaaagtctgttctacataaccctatgaaaagagcatgtagtggtatccctctcttrgaagtttatagtactttttagtaaattaaaggatctggggaatttaacaataaaaaaacctgtttagcttttttccacccagagttgcttaatttgtttgattatagaacag

SEQ ID NO: 243389 - DNA, 621 bp, Homo sapiens
aatatcaatatgctcaatacccctgtggctcccactcaacagaagcagctcagacttcccagagcctttgtgctgtaagccttgttcattatcttatgactcacagttccacccctcccaaactcaacccttcaaatctttgcatcgtgtgctttgcaacatatggtctgtcattagcaaaatcccctctaccttagactgttttcagaatgttccsttcaactgtatgctatagcaggaccttccagttccctgaggatactcttttccttgcaaccttttcacccagtgttctgtgttctttcaggtgatgatcggtcaagtgcagccgcaagagggtcacaggagaggcccaggaaaatgaggtttattatactcacagatccttgggagacagagacattgtacatcaagaggaggtcacaggaaagagtgccaagaaagtgggctcaaccaaacaggcagggagctgagaggcagtgaggacctgtgggcaagtgtcttgattggggttcagggtggaggatacagcaaaagtctggagagaatttcattggtgcatttgaatgtcagtcggtcacagtcatgggatgtcaagaagggaaaattgtggcagggcca

SEQ ID NO: 243390 - DNA, 420 bp, Homo sapiens
gaattccaacttccttaagcacatatcaataaacagcaaaagcttcacttggccaaatgtccctctctggattctgccccayatattgttttctttcactgaaaatctcttggaaacatgtttacattcttctactaccttacttcttcctctgaggagtccatcatagtgacatgttggctatgaaaccagactttcagagccagcatttcactgaagctgctcttgtcaaagtcaattgtccctgatgacttgatgtggccaaatgagtagtcaagtctaatttcttatcttctactttctgctgaatttaacacaattaaatattccctccttcttgaaaacttttcttcacttagcttacaggacactgaactcttggacttctctatctctctgaatagtctttttcaatctctt

SEQ ID NO: 243391 - DNA, 427 bp, Homo sapiens
ttagaattttatataaattgaatcatataatatgtactctcattgcttggcatctttcactctgcagttattttgagatgcatccatattgcacgtgtatcaatagtctattctttagattcttttgattcttgagttttagtccattatatgaatatactgaaatttgtttatccattacctattgatggaggtttgatttgtttccagtttctggttattgtacgtaaagttgctctgaacatcatgcataagcctgtgtactttcatttctcttgggtaaacatctmggagaggaaggactaggtcatgtggtaggtgagcttttaaaatatattcgagcttttaaaataacgaggaactgtttcctaaagtgggtgtaccactttacattcccaccagcagtatattttcatattgaggttca

SEQ ID NO: 243392 - DNA, 487 bp, Homo sapiens
tattatttggtcatcttaatgtgtccagtacttttgtttatgctaaatattacagtagatgccaagaagaacatctgctcttaaaaattgccaacattcctaagattgtagagcagtaaagtacagtagaattttcactcaacagtgarccacccacacagtttttttcaagcatatgtcttataataaaaattctcagaatataattgttcatgagagcttctaaaataaaacaaattgacattatatatttgtgaattactgtgttttgagattctacaccataatttcataaattaaactcttgtccaaaatattatcagattatataggaacaatatttcaaactctttctctagcaaaaattcccatggtaattacataagttttaacagttcagccaagtttctttactttctcatatctcttgaaaaatggtgtaactctacttgtataggtagctatatatgtaaaatgataagatgat

SEQ ID NO: 243393 - DNA, 373 bp, Homo sapiens
cgcatgactgaactttactacccattacccccaacttaaggccttttgctccattggtgttatattggaaagaagagttgccaggcacaaggccacaaagaagaccatactgctgggaacaatacacttccttctctacactcttttcttgtttccatttcaaactgtcccactggccaaatgcttcccaactgttgcaaccagccttgcaatcagaccatgacaaaatgckgctggctgggataggcacatagaaccccttaactcctttctgtctgctatttgaagtttatacttaccacctcagaagaagaaaacttgccttttaattatactataaggtagagtaagataagcatcattaagaaaagta

SEQ ID NO: 243394 - DNA, 572 bp, Homo sapiens
gagactgcaatataaagacctacctgctaacttgccccacagatttcagtcttgccagctcccacaattaaacaatcacatgagccaattccttaaaatagatggtagatagatagatagatgatagatagatagatagatagatagatagatagatagatagatratagatagatagatagatagatagatagatagatagatagatagatgatagatagataattgtgtttttctggagcactctaattaaatagacatggcagagcttttggtatccattccagaacatcagtgatccaaacagatcaaagtaggtgtggtgtttctgctaggatagcagatagatagatagatagatagatagatagatagatagatagatagatagacagtatttttctggagaactctgactaattacatagatgtggtagagcttttggtgtccattccagaacatcagtgatccaagcaggttcaaagtaggtgtggtgttcctgctagaatagttcaaggtgtacagagtggaatttttttggcttcatagttcctggacatgttttccagga

SEQ ID NO: 243395 - DNA, 622 bp, Homo sapiens
ccccctaggtgctctgtcccagggagatgagagttttatctataagcacctgactggggctgctgcatttcctatagagatgccctgcccagtgaggaggaatctagagaagcagtctggccacagctgctttgctgtgctatggtgaattctgcccagtccaaacctcccagtctccttagcactgtccggggaaaaccacttactaaagtctcagtaatggtggatgcccttcaccctaccaaactcaatcatcccaggtcgactccagacttctgcactggctgtgagaatttcaagccagtggttcttagcttgctgggctctgtgggagygggacccactgagcaacactgcttggctccctggcttcagccccctttccaggggagtggatggttctcctgtctcgctggagttccaggtgccactggagtatgaaaaaactcctgtggctacctcggtgcctgtacagacagccacccagtttagtgcttgaaacccaggtccctggttgtatatgctcacaagggatctgctgatctgcagattgcaaaaatccatgggaaaagcgtagtactcagggctggcagcacagtccctcatgtttcccttggctggg

SEQ ID NO: 243396 - DNA, 549 bp, Homo sapiens
atgttaaatacattctgagctttatttaatagtactacactaaggttagttttatagattttataaacatttaatatattaacattaggggaagctgggtgaagggtatatgagaattttccatactatattttgcaattctattgtaaatctaaaatattattttcaattaaaacataactatcaaaaaactatatgtgagttgaattttactttatcactgattaccattagaatatcagaaatctgttrtttaattctgattgttctttaaggtacagacaataacatgttagttttccatagctctatcactctggcaattatgtcattatctgtaaacaaacacataattttactagtacaacatgtttgaaagagtcttgcattggtatttttcaaataaatgatatctttcacaaacttgagtctcttccaatgtatacattttgtaaatttaattatttcatatcagatcacgagttaatgagtagctaccaaactgaacatactatgcatgctcacacctctgtatgaaggtgtgaatca

SEQ ID NO: 243397 - DNA, 588 bp, Homo sapiens
gtttagtgtgaaaattctattccttctgtcatatgactggcttaagaatgagtatgtgatacaatatcggccaatgaagtttgaagaaaagtctgttatggggtttctgggacagtttttctcgctcttaaaaaagaacacaagacagatgattccttttcttcctttagatctagttgtgtggagatacaatgcttggtgttgctgcagccatcctgttactaaaagtctgtaagccaagtgacaagggtgacataatacagctgccacagccctatgtcattaagcagttgaattaatcaaccactttgctacccacctctgaactttttgcttttggagataaycccctttttgtttaacctattttgtgttgaatccttacttactcaaaggccacaagcatcttaattgacatatttaaagaaaaatattccattgaaagcttggaaaacaataccaagaaaaagctctcaaaacatagaacgaataggcccaagtgcaatatataaattaaaaagtcagacttaaaaggtcagtctaggacagagttccagaaagagagctcagaaaatgaaaagggggaat

SEQ ID NO: 243398 - DNA, 597 bp, Homo sapiens
aagaccagtctggctggagtcagcaatttttacttgaacctagtaaaaaggagaaaagattaataaagccccctcagaattcagaatgttcattatctatcattttaacagtatttcttttcctccacagagcaacctaaatctacatacattctttaaagaaagcaattgctaactcatctaagtgatcatgcactagtgtattcccagcattcagctgtcaataagtattgattgaattgtttggaattrtacacctgcatgacttgggggaaggtggagtagctataatccagacttgagaaggttttaaatcaacatcaccactgcttctgggtgtgagggattcctgcctagcatccttccacctctccttgaagctagatgatttgaagtaattgggtcataacatttcttgagcagctttcttgggcttcctatagttccatcccatgataggattagctactccaagtcatccaattgtaagaacttttaaaattttaatctacatctgttcccataagcccagtctaattctatttcttcctggctttgttaatggacatcataattttaaattcttgtccaagcttg

SEQ ID NO: 243399 - DNA, 500 bp, Homo sapiens
tggaggttgcagtgaggcgagatcacccactgcactccagcttgggtaacagagcgagactcagtctcaaaaaaaaaaaaaaaaaaagagagagatagaagggaagaaacaaaagcagaaagtgccctgaagggaagaaacaaaaacagaaagtgccctgtcaggaaagtacaaagacctggcttttarttgtcatggagtcttcaactggctgtgcattgcttctcgaattgcacttctacttcctactccatacactgagcaggatcagataataactgcttacacttctgacggtttactgtgtgttggtcagtgttctaagtgctttacatgtgtgttttgtatattcatttaatcctcacaactctttgaggtagagattattattatccccattttacagatggggaaatcaaggtgtagaaaggtttggtaacttgcccaaggtcttacagtgagcaagaagcagagatttaaaactcaggctgtctggctca

SEQ ID NO: 243400 - DNA, 547 bp, Homo sapiens
tgaaactgtaaaatctgcagaagaaaacatagagaaaatgctttctgacattggccttgggcaatgatttcctaggatattataccaaaccgaaggcaacaaaagcaaaaatagacaaactaagaaaaaaactaaaagaaaaagaaacatccgcascacaaaggaaataatcaaccaaatgcaaactacagaaaaggagaaaatatttgcaagccatgtatctgataaagagttaatgtccaagataaatgaaactcctataacttaataataaatgttaaaaacaaaaacaaataacctgattgaaaaatggacaaaggaactgaataggcatttttccaaaaaaaaaaaaacatacaaatgaccagccagtatctgaaaagctgctcaacatcactaatcggtagggaaatgcaaatcaaaaccacaaagaaatatcacttcatatctgttaggatggctattataaaatggaaaaagataaatattgacaaagatgtggagaaaagggaacatttgtacatcattggtgggaatacaagttgat

SEQ ID NO: 243401 - DNA, 569 bp, Homo sapiens
tgttctataactttctgattttaaaacaccaggtaaattctaaaacctctaacttcattttattttctcaaaaatgaaaaactccattgcatactttaaaccgccattgtatactttaaagtttgcagttactctgtactaaaagtgctaagagcctcttcaaaatatgttcatggctggaggatgaaacttagctttactgactagttaactcacggcttattctcttgtggatacaaatgagaccacttcaactttataatataaatttcactggcacctctttgtggaggactttatgctaagtaaccacacaagcacatatgcacatgcaagtgcactcatgcacatgcrtacacatatttctggccgcccactagagagagctcacatgcatccaggagtaaatccccagctgccatgtggagttcctgggtaccgctgatctctctgcctccagcaagtgtcaccggcttccccaggcagtgctgatgttctctccacacccagaaagtgctgccacctctgctggcgctagcgccatcaccaataaggccattcagtccttg

SEQ ID NO: 243402 - DNA, 641 bp, Homo sapiens
gtgattttagttcattagttcatgcaatatttacggaatgcctcccatatacgtggcaatattctcagtgcctgagtacctcaaaaagcaaatcagaatgaccctctgccattgtggagattatattctagtgagaggagacaggtaacaagcaataaacataaaattatggtatatggaaaaaggtgataaatactaaaggcaaaaaagtccaggcagaggaagatattaggagtgcagaggaagagtgccagggtgcaatttatgatggggtgctcaggagaggacttatttttaaaggtgatatttgagcaaatacttgmaaaagtaggacactctatatgaataattgggagaagaatatttcagggagaggtttcagccatgcaaattcccaaggcaaggacatgcctggcatgttcaaggtatatactatgattgccactaacttaaggacgcaggatcagaaacacacaggagtgagttcaaatacctttcccaagtcacagagagagtatatggcctgaagaagtaccacatctaaatttcatttcaaaggaggtctgggaaggaggtctggaaatttgggattttatctgagtcagataaaagccatcagagggtttttgaacagaggggta

SEQ ID NO: 243403 - DNA, 570 bp, Homo sapiens
agactctgcctttcagattttcccaggctccacaactcacagcaatacaatcccattcccaccacagcccagccttttagaatccctcccatccccatttcatactcctcatactcaggccctccctaagtttgtcccgctaggccaccacttttccaagacatctaggcatcactggagaaaacgtagtacagaaagacaatggataggctyggtgttgcccaaaactgaatttgaatcttcattctgctgcttactagctcagtgactcttttttttaacactggaacctctctatcttgtacatgatgatatttactttttagatatattatagggaataaatttagtaatgtatgcaaaatgtgtgtcgatataatataggcactgtgccaatatcaatgtattgcttttcggttttaaattcaaattttattgcctgctctgtaaaaaatggagatgggtcctttaaatatttcttttgccagcaggcacaatgtcaaactttgtcagtagaggatgctagaaggacactgatagacaatggagttttccttcctggttcctttg

SEQ ID NO: 243404 - DNA, 457 bp, Homo sapiens
tgcaacctggtagagagctctcagtagaactaaccatgctgaaaccccgatctcagatttccagcctgcagaactgtgagaaataagatctgttgtttacaagccattcagtctatgttactttgttatagcagcctgaactaagacattaatattgaagaatgtggcatataacttcaggctagtagagtaattaatactgaaaccccaaggttctacccmcctagcctcaggtagtgtgggatgcaggagtagaacctgctcctgaaagctatgacgtgggggagcagggcagctcctgtcttgtccccaagcagctgactcccaaagaggaggaagggcaggtgctggaaagcacaggctaaacttcttccctaaactgcactggtagaatgaatgaagggataaagagaggccaggactgttactctaacagaattctgtctacatggaggca

SEQ ID NO: 243405 - DNA, 551 bp, Homo sapiens
accgttgtctgtaaaggagtatgatcataatacctttgtagagttgttgggtgaattamgtaaaaaagtataccaagtatgtaatgcacctagcatagttcccaaaatgtagaagatacagcagtccctctttattcatggtttcactttttatggtttcagttacttgtgatcaactgcagtctaaaaatattaaataaaaaattccagaaacaaactatttataagtttaaaattgcatgctgttctcagtaccatgatgaaatattgctccatgccatctgagacatgagcaatccctttttccagtgtatatatgctctgtgtgatacgtgcccattataggaataaacagtgtatatagggttctgtacaatctgcagctttaagcatccactaggggtctttgaacttattctttgccgataatgggggactactgtatcgagaatacaacttggaatgtcactgtaacccagatttaattttgtgcctataatacttgcctgtggaaagaaaatgggacaagtaataacaaaatcacatatgga

SEQ ID NO: 243406 - DNA, 595 bp, Homo sapiens
gcttgctaaatgcagagaaattgaagtctgatcatttatgctatcaacatactcatacaatctcagaggtgaaaaaaaattaaaagacttctagtctaaccactgcttttattcactgaataaagtactgcagaatttctttgaaaaactacttggtagggtacacaaaatgcctgaaaatgagcttttatttccaataatttcctttcaataatctgctttttgtatagagcctgatacacctcctgtattgtaactcatggaagagagagctcagctttggaaaaactatgaagataatgcaaatgtagccccatccacagtatccagggcatgtcctggagcacgccaggctcatgtactgactgaacacccatcgcagtagcccagacagcttaccaggatgctgcagtgggggtgctgctattgmcttcctagaggagaaattgttacctacaaggaaagacacattcagttttccagttctcccaaatcacccaaggtcttgttcctcgacagtgagtcagtgggtcgacttcattagtctgccttgatgactagcgttcctatgactggcacaaagaggctacacagc

SEQ ID NO: 243407 - DNA, 568 bp, Homo sapiens
gtgtggtgaccaaggtagtattttcataagtagaaactgatttttcaggaggacacgtaaccatctactgacccgcttcctctgcacgtgattcctctgkatctttcaagctcctgccttccactgctttcctctcattccaactagcctcttagcaatcagaccctttctcccactcctattctccctgccttgtgatagctcccaatgttaatcctctaataaataccttacacttaggtgtatgacccagtgagttcttcaaaacactttcacatacatcctcttgttcttccctgcaaaacaaccttcctctttaaccgaaaaggcaccttcataggtttgcttttccccaaatagtacaaaatgtgaagactgctattttttggcggttttacttgtatgtttctttctgttcattttctcagtctatctgacttactgttgctttattttaggctctgcattactcactggaagaggctagcacataccatgctcaaagcagcaagcactgagaatgctggaaatttgggatcatgttagtcaggagtaaagtttactgtac

SEQ ID NO: 243408 - DNA, 568 bp, Homo sapiens
gtgtggtgaccaaggtagtattttcataagtagaaactgatttttcaggaggacacgtaaccatctactgacccgcttcctctgcacgtgattcctctggatctttcaagctcctgccttccactgctttcctctcattccractagcctcttagcaatcagaccctttctcccactcctattctccctgccttgtgatagctcccaatgttaatcctctaataaataccttacacttaggtgtatgacccagtgagttcttcaaaacactttcacatacatcctcttgttcttccctgcaaaacaaccttcctctttaaccgaaaaggcaccttcataggtttgcttttccccaaatagtacaaaatgtgaagactgctattttttggcggttttacttgtatgtttctttctgttcattttctcagtctatctgacttactgttgctttattttaggctctgcattactcactggaagaggctagcacataccatgctcaaagcagcaagcactgagaatgctggaaatttgggatcatgttagtcaggagtaaagtttactgtac

SEQ ID NO: 243409 - DNA, 548 bp, Homo sapiens
attgctgagccttcttatttaacttatttggtagctgggagatggggggcaggggtaggggttggtggtgacaccttatttcaccaggcctctaaacacagcatcaaaggaaagccagagatatcctttttgatattctctcaaccaccgcacatgtcttttccagttaattatagatcaatctgctgtgaatttgcacaaagtattattgaacacattttaaaattctagcaagtgtgacctcaaactatagactttcatttacatatgtgactctcagagccagtgcccaatgacaaccttatacataagccttacaataacagcttwaaaaaaaattacaggagtaaatacatttttactggcttttaatttcaaaaatcctaataaagttttgtagtagtttattttgtggagatacatttgacccaagattactgaggaattcagaaaaaaaaaaaaagaaaaagaggcatgaaaggagaggagagggcacacaccttttgttctgattgttggcttgaaaacaaagacctttgcaggtgagc

SEQ ID NO: 243410 - DNA, 450 bp, Homo sapiens
tgtggttaggtaactttgagactgcaaattcaagtcaagtccatgatgaaaagctctgcttgtcctggtaatatggcttcctgtgggcagtcctagctggagctacttggaagttcaaaatcttccttctgcaaattctgtttctcacatactgaatgcattctgtcaaratatcttgctgcccatgttttcataacatatctcaaatgtgaccacctcctctgaaggtctcttactgctcttgctgggatcttctcatggagcccccactcttgtttctcaacagtctatttcccacacaaaggccacctgatcctttaacacttgctcccaacccccaggaatttctcatccactagaataacatccacactctttaccatgcctaagagaccgacccaaatgctctgccgtctggttaccattccctcctcctggccagccggctca

SEQ ID NO: 243411 - DNA, 487 bp, Homo sapiens
gtaagtggaatgcaaaatcaccagccaaaagtctccctgacacagaaaatttccagccagctttgtagtgtttaaccaggctttgctattctgcatttgtgctcctctgggcagtttgtgcaggacaagtctatgttgtccagaagtggaagatgttgagcattgttgcctcttggccttagtcagcatgacaattaaaatgtccccagtcatttccaaatgcttcctggaggctggtattgtccctagttgggtgttgtgtcccctaaaaggaycagcatgttcacctgttgttagaagctgacctttggagatttggagcggggggtgtgtcctcacaccttgcacagagggaaagtgagccacagaactaaagcacagtaatgcacagcctactggctggattcacctgcagctagcagaagggagggtggatcagctcacctgggctcgtggactcactgtctgaaaacagagtccacgcctc

SEQ ID NO: 243412 - DNA, 596 bp, Homo sapiens
aacgattgacacatgtatatgactgagtcatctgagcttcatcttgataaagcatatcctcctcaatttcgccttgctttcaccaatatcctgtcaaaagtgcagtcttactgctgtgcagtcctgtgaatggtgattggtcctgacccaatcacatgccggaaggaaaagaaattcctcactcagaattcctcaccttacatttctgcaatgtgcgttgccctggaagagcttctttggcctcagggaatgtcaagaagttgggtaaaatgaaagggagagatctgtcatctgacactgagcttctttgaggaaacttcattcagtcattcaacaaatatgtaytgagcttcagttccctagaggcaacaatccagatgcaatctgctctctggatttatgatttaatggagcacacaggtgagtacatatctctgagactcaactcccctcggctttgatttcgttcctggatttctgcctattcctcattactctacttgctgccatgatgagatgcaccttccagcctaacgcactatttttagtctccaggggaagctctcttcattcagacagaagctccagggagattt

SEQ ID NO: 243413 - DNA, 559 bp, Homo sapiens
cctttctactttcattatggctgctaaaggattcctttggaacacattttccctggcatctcttagggcttagtctggttaaaagaagaaagagaatttaggcatgagcaaaaacttgatgccatttagcaacttgggtcaatctactgacccctgactgccagctgaaaacaggaggccaggactggctgtggttcccaggacagactgacaggcagagggggggccatcccagcaagtgatgccatgaaggtgtctgcccacacatccccttcattctcagtggcagtggggagctggccttctctttcctggaagctttcctccctctatctgtcctgcagcctgctgaagtcttgatggccctgctcttattttgggattaaatcttttgggatttgtcttagtttagttgcacctctcttgatctctcccaccacatttttcttcytctcccctccccctctaacagctgaaatgtctcagcctctggagcagactcatggtgccccctgcttcctagcccttcctgagataagagtcagcgggggcagaggtt

SEQ ID NO: 243414 - DNA, 578 bp, Homo sapiens
ttataaatcattcaatctaaggtattcctgttatagcagcaagaatgaactaagacacaaaggataatacccaaatgactaataaataggaaaagttgttcaacctcattagtcattatggaaatgtaaaataaaaccacaatgagatagtagctctacatttctaccagcatggccaaaatttaaaagactacaaataattagcaatgacaagcatttggagaaacagaatttctcatacactgttgcataaattggtacagccactttggaaaatactttggcattaagtattatagatgaaagtgctcatatcctgtaaccaagccacatactcaacagaaatgcatgcataggagtatcaagagacrtggtcaagaatattcaatagtggctttatttataatacctaaaactgaaaacaacctaagtgcccatcaagagtaaaatgtataaagtatgatgtatatgtacgatgggatattatacaacaatgaaaatgtgtaaactacaagtatttttaacaacacaaatgagtgacttgaaaacagacacaaaagaaaaaaatactgtatggt

SEQ ID NO: 243415 - DNA, 618 bp, Homo sapiens
cattttacctacctttcaaatttatttgcagttgtttatattatcctattattatctaaatctctgcagatctggagttattaatctttttttwttcctgacattggttatttgtgcaatctctctttttcttgattattttcaacagaagttactgatatatttaggtataaatttaccatctcattgtatgttttcaatttagcctacctgttttacatttcttttgttctctgtgatggttaattttacatgtcaacttgactaggccaggggggccccaaatatttggtcaaacattattctgggtatgcctgtgagggtgtaaattggtagaccaagtaaagtagattaccattcttaaagggcagctctcatctgctcagctgaaggcctgaataggacaaaagggttgacccttttgcaagtaaaaaggaactccttcctgagtgcttgacctgggacatagatcttttcctgtttttggacttgaactgaaacatcagctctccttgggtctggagcctgacagcattcagactagaaccccactattagctctcctgggtctccagcttgctgactgcagacctcaggactgtcagcctccataatcac

SEQ ID NO: 243416 - DNA, 618 bp, Homo sapiens
cattttacctacctttcaaatttatttgcagttgtttatattatcctattattatctaaatctctgcagatctggagttattaatctttttttattcctgacattggttatttgtgcaatctctctttttcttgattattttcaacagaagttactgatatatttaggtataaatttaccatctcattgtatgttttcaatttagyctacctgttttacatttcttttgttctctgtgatggttaattttacatgtcaacttgactaggccaggggggccccaaatatttggtcaaacattattctgggtatgcctgtgagggtgtaaattggtagaccaagtaaagtagattaccattcttaaagggcagctctcatctgctcagctgaaggcctgaataggacaaaagggttgacccttttgcaagtaaaaaggaactccttcctgagtgcttgacctgggacatagatcttttcctgtttttggacttgaactgaaacatcagctctccttgggtctggagcctgacagcattcagactagaaccccactattagctctcctgggtctccagcttgctgactgcagacctcaggactgtcagcctccataatcac

SEQ ID NO: 243417 - DNA, 618 bp, Homo sapiens
cattttacctacctttcaaatttatttgcagttgtttatattatcctattattatctaaatctctgcagatctggagttattaatctttttttattcctgacattggttatttgtgcaatctctctttttcttgattattttcaacagaagttactgatatatttaggtataaatttaccatctcattgtatgttttcaatttagcctacctgttttacatttcttttgttctctgtgatggttaattttacatgtcaacttgactaggccaggggggccccaaatatttggtcaaacattattctgggtatgcctgtgagggtgtaaattggtagaccaagtaaagtagattaccattcttaaagggcagctctcatctgctcagctgaaggcctgaataggacaaaagggttgacccttttgcaagtaaaaaggaactccttcctgagtgcttgacctgggacatagatcttttcctgtttttggacttgaactgaaacatcagctctccttgggtctggagyctgacagcattcagactagaaccccactattagctctcctgggtctccagcttgctgactgcagacctcaggactgtcagcctccataatcac

SEQ ID NO: 243418 - DNA, 582 bp, Homo sapiens
gctaggacattgtggaactgctgaaccaataccagcagctacctaactccacatttcttattatataggaaaaataaccctctttttgtttgactttgtgttgttacatgtagctaaagatattcctgactggtagagggaagacaatacattcatttttggatctgctgagttttagatatggtgggaaatccagatgatgtggaaatatgattggattctggagaaaggtttggatggtaagtttagggtaaagattcttcagcaaatggtgataaatagaagccagtggtcttaaaactgttgcccacacatgccctaaaatagttacaaaaatattttstcttgcattttttcccaatattttattatgaatattttcaaacgtacaaaaaatttgaaatagttgggcaaggagcaccatatactcaccatctagatgctacaataaacattttgctttggttgcattacttatctatacatctgtccatttctcaatctatttttttttatttatttccaaataaattgtaggcagtatgtttcactcctaaactcttgagcatgcataacattacc

SEQ ID NO: 243419 - DNA, 583 bp, Homo sapiens
gcagagcccaggactgtgaatgctggccaatggattatatttaggttatactgataggttatattttttgtctcaaatgtccttgccctgtgcatacttcctggaaaccatgtgggtagaaaggagcatttcagttttatgtctacggcagattcctctgctttttccttgtcacaaaatcccaatcttgtccaagtgtcacaggtcctatggggagcccaggcccctccccaggcccaggggagggtgtgagggtgtgaatatcaattagtcagagatccaatcatagtaattcgcttcttggccatgattggtttaggcatgaatacagaatgcaattttgactaataagctgcaaggggaaatgtgttgggagattctgaaaaaggttttactcattcaaaaaagggaccctatgaagcgaaatttgctttgttctcttttggatgttgctgtacgagaatacgatgcctggagccactgcagctatcttttaaggrgagatgtctaaggacactgaagacagcagagagggggaaagaacctgggcctttgatgactttgttcagctctgaacgaattc

SEQ ID NO: 243420 - DNA, 591 bp, Homo sapiens
ataaaatggaagatgatatttgcaaccattcaacaaaaaaccagtatcgagaatattttaaaaattcctacacagaattaagaaaagacagattattttacattttatataaaagtccatccaccttttatatgtacctgttgcacataaaaatgagcaaaaagacttgaaagagtattttgcaaaagagtaaatccacctggacaataaacatacgataatgttctsaatcccagaaaccagggaaatgtagattaaagtcaacaacaaagtggtagcttagaccccaagattaaaacagtgtcagtgagaaaataccagttacagagatagtcaggaacctttaagaaacaagatgctggatgttacattgaaaaatatgtgctgagctgtgctgctctgtaactacctgccctgttgtgaatctgacccacaatgcctgtgagagtggtgttttctctggaggattcaaaggaaaggacagttgccttcttccttgtgttgctacagggcagagagaatactgcaggaggtgaggggcagaacagagtttataacctcaactgcagtgtgaaaatgctggttacctcc

SEQ ID NO: 243421 - DNA, 295 bp, Homo sapiens
ctccactctctctttctgagagccaagagaaaagcagagtgagaatgcaaaatgcaaagtagagatcataactaggcaaaaacagtttaggcatcgataattttttaaaaggagttgaattcattggagctactgtaattctgatactagttagagtagaatttactaaccagttttatcactagtcaatttccctgtggaaacaaagtcacrtcaaatcactgggccacattttgccaaagtgtttggaaagagaatgaaagtaaattgataactgtgaagagacactgatcct

SEQ ID NO: 243422 - DNA, 494 bp, Homo sapiens
caactgatcaggaaatatggctttttgtggtccagcagtgttgaggaaaggtcactaaagaggggctgtttcctattcagccggatcaggctgaggtgggtcaatgttgaaggtccagtgggaagaagagaagcttaacaaaagattggtcaaatcagatcaacaagtgctttgttctgatyggtcagtggagacaaatagttcagctactcacttatgaagcaaagaatggaaatttggaaagcctgagtctggcctggtgctaaataaacaaggggattatccacaaaatttatctaaatcatatgagaatgggtagttctttgcagtaagcagtctcccagaacaacaaaaaaaaaaaaaaaaaaaaagggggaatttctttaatttaaatttctttaattatgttttccaggattacagaactcagacaaagctcaacattttctataaaatattcttattatgttgataagacgaagtgtcactaatct

SEQ ID NO: 243423 - DNA, 494 bp, Homo sapiens
caactgatcaggaaatatggctttttgtggtccagcagtgttgaggaaaggtcactaaagaggggctgtttcctattcagccggatcaggctgaggtgggtcaatgttgaaggtccagtgggaagaagagaagcttaacaaaagattggtcaaatcagatcaacaagtgctttgttctgattggtcagtggagacaaatagttcagctactcacttatgaagcaaagaatggaaatttggaaagcctgagtctggcctggtgctaaataaacaaggggattatccacaraatttatctaaatcatatgagaatgggtagttctttgcagtaagcagtctcccagaacaacaaaaaaaaaaaaaaaaaaaaagggggaatttctttaatttaaatttctttaattatgttttccaggattacagaactcagacaaagctcaacattttctataaaatattcttattatgttgataagacgaagtgtcactaatct

SEQ ID NO: 243424 - DNA, 613 bp, Homo sapiens
gaattcaccagtgaagctatgttagtttgtagttcttatcttccgatgggttacaggattacattatttttaggattctattttatcagtagtgttttatgagtgtatctcttatatagcttttttagagcttgttctacgtaatrtctgtgattcacaggtgccattgttataccagtttgagtgaggtatagaagacctgcctctctttacatgtcattacactccctcgttcataatataattgtctgaaatattttctctacatacagttagagccacagtgttatgatttttactttagccataaagcataatttagaaaattgaggaagagaaagaaagcctaaagtatttaccaatatttttgctgacagggttctttcttccttccaaaaattgcaatattcttttttttaaaattgtttcctttctctttagagaacttattttaattactcttttagggcatatctgccagattagtttttcttaatctgagaatatcttgatttttccttaatttctaaagaacatatttgataggcacacagatttgggttgatagtcttttctttcagcactgggaaaagtatggtgccgctttctttta

SEQ ID NO: 243425 - DNA, 555 bp, Homo sapiens
tcttgcacctatagatcaatgtctcttactaaatgtgcaaagcattcagccattatttcaagtattttttcagccctgctgtttctcctctctttctaacatttcagtatttcaaaatttaaatattttgttacagtcccctaagtccttgaagctctgacattttttttctagttagttttctctatattgttcagttgggtaatttctattattctattgttaggtggctaattcattcttgtatcccctgtattctactgttgagcctctctactgggtgttttagtttgttttcacttctaaaattttcatctggttttcctttgtatcttttatttctttgctggacttcctttgctaaggttttggatattttttcatttgtttcaaaagtgttcataattgytcatgaagtttttttaaaaaaatcatggctgctttaaaatcttttccaagattttaagattctaaaattgtatgactctaagattttatattatcttttttgattctaagatctctggtatttcactgttagctgttgtgtgtttt

SEQ ID NO: 243426 - DNA, 513 bp, Homo sapiens
aagctgaccggggcattgagggcagttcacgctggccttcaagcgtcccttagcacaaagtaatagttataggaggcagacagtctcccaggcagaaaagggcaggtccctggtgaagctctaccttcaggtcggggaaggcctgaagcctgggggtcgggctcccagtcccacagactggagtgggaatttatagtcctttatctgggcttctcatagccaccagatgaaccaatcagcatgcacttcctcccctctgaagcccataaaaccccgaacacaggagactggagagackccatgacaacctgccagcagagaggagctacccactccagggtctcctctctgctgaaagctgaacactcctcaagacaccttggtggggcgaaagagctgtaacacaaacagggctgaaacacactccttgcttgccacgatgcaaatggatgagagggagggaacagctacggccctttggggaacccagacctaggagctcaccaagccagg

SEQ ID NO: 243427 - DNA, 456 bp, Homo sapiens
ttaaaagatccttatgaagtaaagtaaataaacattgctccccagataggaactaagcaactcggcaactggtttgagaaaatgaccactttaggtccaaacagttgaactcagatgggtcttggttgcagctttagttagcttcaacttacctcctgtttcaaatattttcagggtaagatccattctgcatgcattgcaatctcttccctcttgcaagatctaagaactgtgakactacagaaggctattattgctttccagcccagactcttatcttccatgctgccatagccaaatacccaacaaaagtccaatgggaaaaagatcggcaaggagagataattagctttgtgtttgggaatccatagccctaatatgtcagccagcgagcccaccatgtcattaaatcctcttgtttctcattaaccaagaaaagtggctcttcccatggca

SEQ ID NO: 243428 - DNA, 549 bp, Homo sapiens
aataattaccccttctgaaggagctgacttgactggtcaggccatgagatcctctgctgtatgaaatgccttctatttcctatcataggctctacttgagccattttccacctgaggcacccactttcctgaaaaactctcactyacgtcatagtggtttccagttagcccagcctctgtccagtgctttctgaagtgtgttctgctaatctctgtgatacagtttgatggccaatttttggaacaaatgtatgtgtgtgtgtgtgtatgtttaatgacttcagagtatctgagaaactttggcatatattgtcaacattttaaaatgacaatgctagtggtggtgctggtggagaaggtggttggtggtcacagggctgtagatgacgtctatcaaaaatatttgaccatgaaatcttttttcgtgaacattttagtgagggtaggaataaagtgtgagagaagaaaaatggctcagagaagcctgagctctgtgaggaatgcagcccagggggacatgagtataggtcttcagacatgcccccccac

SEQ ID NO: 243429 - DNA, 603 bp, Homo sapiens
atgtttaatcttcttcaggttatattttagggaataatatgaatatatgttgcaaaattgtatggggtttctaaaattctaatgtctgagtatatgctatcaatcacaattaaggttgttattttaagttattgtaaaccacagagatagcaaatttctttatcagttgtgtttctgactgtaactgccctagacattttgttattcacagaaaattgttgtcttgttttgatcctcttccaaagatgatatataatcagctatagaattttgatagacgttctcaaatgcaggtttctgatagctttggagattgtgacattggtataaaggaaaaacatacaggactcatgaaaagcagaaatgtttatgaatatcaagcaaaagaagagttaaatgaatggattgaactaatagaaaacaagtaattattttgacttttgcttagaacattgctgatctttgttttgtttttcagagtcagtgaaacttattttaagctacttatggcctttrttaattgagatatacttctgtgaacaaaattttgagcatattcatccctctctctttctctgcttggcttccccagaatttggaaac

SEQ ID NO: 243430 - DNA, 405 bp, Homo sapiens
accttaaaatcttctgttttaaagacagmtaggtctttattcaaatcctagatccattgcttacctgcagtgtgaccttggacagcttataaaaccttggttatcttatctaaaaaaaataggtaaaattatactgtattataggaatattctaaggattgaattagataatatacatggaatatatatcccaatgtctagccatggtaatcacttaataggcagtggcaaattatatgattattatcacttttcccttcatatccacatggattataatcaacattctaatccttttattaggaaaaaggaagcaaaaataacagaggaaaaaataagcttatgtagctcatggactgaatcaagcttcattaaatatcatatttcaatcatctaatttatatt

SEQ ID NO: 243431 - DNA, 592 bp, Homo sapiens
acccaacagttaagtttcagtcatctagactagtactaatgtggcctggaggatgcaaaatgacgtgaataattggtatctatgagagtacttgtagggaagttttaagctcttaaatattcttagaaagagatagagcattaacattattttaaaatattcagatacaaatcattgaggttttatttcaatatgtggttatacatagatatctaagcaataaaagactctagtccatcatgccccacacttctgccaataaaaaaatctatctatccatctctctatgtacccatctacctggatcttgatcttgatctmtcttgatctttatggatcagagaaaggcgtaaatggagttacaaaattttgaaggtggtatagccatgtaactttctacaaagacatcacactacagataggacagtaaacaagtcacccctcaatgtaaccaaaatagggaggacccagtgaatatgggcaatgtgccttagagcctgtgagtcagagttttgcactaggcaagtaaaaagaggcagagatttaatgacaacatataaacaataggtgaaaaggaagaaaaacatcaaat

SEQ ID NO: 243432 - DNA, 525 bp, Homo sapiens
gctcagagggaatgccatgtgagggacacagcaagaaagcaggtgtctgcaagccaggaggagaggcctcaccacatacaaccrtgatgacactatcttggacttctagaccccagaaatgtaagaaaataaatgactgttatgtcagccacacatattgttatggtggcctgaacagactaagacacttgtcaagtcagactacagcacaagaggatgggggtgggtatcaaactggtgacaaggcaaggggatccaaagcctccttgttaaagacagacaaccccacatagagtctctagtgagcatagggcatggagttgcctcttattctagggaagagatggttaattcactgttgggtgcagtggctctgggcctaaaggaatgaactgaatcctggatccattcagatgtttctagaccaccaaggctgtctatattttgtatcccctataatccaacagaaggtggctctaaataagaatggcacaattaaaatgtagagacatataataaagtggc

SEQ ID NO: 243433 - DNA, 302 bp, Homo sapiens
atcttctgatagtaataccatctgcaggctttattcaattccatatgaagcatcatgatatcacactcaaaatttttatgacctaggaatttatttttcagcgaaataagtaactaatcttctamctttaatatgctttttatgctcattttattgctttcaatgctcaaattttattttctttctgcaaagcatctttgctatctcttcaagagatattttctggaatcaaatatgctatttagccaaataaatatagaaatatgataaaggcaacaagcatgttaaaacatgcattaagt

SEQ ID NO: 243434 - DNA, 302 bp, Homo sapiens
atcttctgatagtaataccatctgcaggctttattcaattccatatgaagcatcatgatatcacactcaaaatttttatgacctaggaatttatttttcagcgaaataagtaactaatcttctaactttaatatgctttttatgctcattttattgctttcaatgctcaaattttattttctttctgcaaagcatctttgctatctmttcaagagatattttctggaatcaaatatgctatttagccaaataaatatagaaatatgataaaggcaacaagcatgttaaaacatgcattaagt

SEQ ID NO: 243435 - DNA, 612 bp, Homo sapiens
ttttgttgtaatttctaaaatgttcacagcatatttaccagaagtagattccatctcaacaaacaactttctttgcccatttattaaaaaagatcctcacaaaaatcctcatgcatttacgtttatcatgaaaaagtttgcagcaattcagtcacatcttcagtctctacttctaattctagttatcttgctatttccaccatatctgcagtgacttcttcccccttgaaccccgaaattcatccatgagggttggaatcaacttcttccaaactcctgttactgttcacattttgaccttctccaatgaattaaaaatgtatttaatagcatctagaatggtgaattctttctaggagattttcaaytgacttcgcccacatccatcagaggaatcactatctgtggcagctatagtcttacataatgtattttgtatgtaataaaactagaatatcaaaattgccccttgacccatgagctacagaatggatgttgtgttaaaaggcatagaaaaaaaacattaatttccttgtacatttctaccacagctcttgggtgaccaggtacattgtcaatgaaaagtaatattttgaaagaaatcttttcttc

SEQ ID NO: 243436 - DNA, 475 bp, Homo sapiens
tcaacaaaaataaccaaactaaagggactgtccatatcagatagaatcaaatggtttattaatatttcagtggttaatgaagttgctggtgggcctttgttatgaaatgtttcaaaatataaagcatgagcttagataaaaagtggattgatgatgttcgctgacagggagaagaagggaaatkaacatgacaaaaatggatgctactaacacatgactaattaacacatgacctctaattagcagaatattgtgacatttaagtgtttttggttgaatttctaaaaatactctggtaatttggagacaggtctctgaagaaaaacagtaaaacagaatatgagatactttagaaatataattattttgaggagcatggcatgagtggcaaccttagcatcatggaatcttcctaccccctaaatctgacctgaacctttgggaggtttttaacatacaaaaaaaataagagatt

SEQ ID NO: 243437 - DNA, 574 bp, Homo sapiens
gtgctgaagtatagtctactgttgctaggcacaagaaggctgtgatgtaccttatagaggaaatacatatgttagatcagatttgttcagktataagttatagtgccattggccatgagtttaatgttgatgaatcaataatatatgctaaataaggtgtctttaaacataaaaacacatgaaacaaggttataaactgactgatgaaaatatggtaccagaagctttcccaaacctaaccctatatttttcctagagtcacagactcaatatttgtgaattcactgttcacagtgaccttaaagaacataggtactgtgaataatgataatcacctatatatcaaaacccacatcatctatggctaatagcaggtttggaagtacaatataaaaatattcaagtgaaaatagcaacacagatatactaatatagcaatgaatttaaaatcattttgatgttattaaatactttgttcttttctttctttagaatttacatggcctgaggacagataatatcagatttattgctacaaccccagatcctgaagagtgtctggcacatataagga

SEQ ID NO: 243438 - DNA, 574 bp, Homo sapiens
gtgctgaagtatagtctactgttgctaggcacaagaaggctgtgatgtaccttatagaggaaatacatatgttagatcagatttgttcagttataagttatagtgccattggccatgagtttaatgttgatgaatcaataatatatgctaaataaggtgtctttaaacataaaaacacatgaaacaaggttataaactgactgatgaaaatatggtaccagaagytttcccaaacctaaccctatatttttcctagagtcacagactcaatatttgtgaattcactgttcacagtgaccttaaagaacataggtactgtgaataatgataatcacctatatatcaaaacccacatcatctatggctaatagcaggtttggaagtacaatataaaaatattcaagtgaaaatagcaacacagatatactaatatagcaatgaatttaaaatcattttgatgttattaaatactttgttcttttctttctttagaatttacatggcctgaggacagataatatcagatttattgctacaaccccagatcctgaagagtgtctggcacatataagga

SEQ ID NO: 243439 - DNA, 681 bp, Homo sapiens
atatgctaaataaggtgtctttaaacataaaaacacatgaaacaaggttataaactgactgatgaaaatatggtaccagaagctttcccaaacctaaccctatatttttcctagagtcacagactcaatatttgtgaattcactgttcacagtgaccttaaagaacataggtactgtgaataatgataatcacctatatatcaaaacccacatcatctatggctaatagcaggtttggaagtacaatataaaaatattcaagtgaaaatagcaacacagatatactaatatagcaatgaatttaaaatcattttgatgttattaaatactttgttcttttctttctttagaatttacatggcctgaggacagataatatcagatttawtgctacaaccccagatcctgaagagtgtctggcacatataaggaacccaattagtggctagtattattgctttctgttggagttttgccttattttattttattttttatactagttttagaattatgaactaaatgatgagatttaaaaattgtactagaaaagggaagtgaatagtgactatagggtcaactttataagagcaatgagaaaaatgtagtgagaaatgcagagcaagttaactcacatgcaggtctacaaattaaaacacacagtacaaaattaattgacaa

SEQ ID NO: 243440 - DNA, 681 bp, Homo sapiens
atatgctaaataaggtgtctttaaacataaaaacacatgaaacaaggttataaactgactgatgaaaatatggtaccagaagctttcccaaacctaaccctatatttttcctagagtcacagactcaatatttgtgaattcactgttcacagtgaccttaaagaacataggtactgtgaataatgataatcacctatatatcaaaacccacatcatctatggctaatagcaggtttggaagtacaatataaaaatattcaagtgaaaatagcaacacagatatactaatatagcaatgaatttaaaatcattttgatgttattaaatactttgttcttttctttctttagaatttacatggcctgaggacagataatatcagatttattgctacaaccccagatcctgaagagtgtctggcacatataaggaacccarttagtggctagtattattgctttctgttggagttttgccttattttattttattttttatactagttttagaattatgaactaaatgatgagatttaaaaattgtactagaaaagggaagtgaatagtgactatagggtcaactttataagagcaatgagaaaaatgtagtgagaaatgcagagcaagttaactcacatgcaggtctacaaattaaaacacacagtacaaaattaattgacaa

SEQ ID NO: 243441 - DNA, 681 bp, Homo sapiens
atatgctaaataaggtgtctttaaacataaaaacacatgaaacaaggttataaactgactgatgaaaatatggtaccagaagctttcccaaacctaaccctatatttttcctagagtcacagactcaatatttgtgaattcactgttcacagtgaccttaaagaacataggtactgtgaataatgataatcacctatatatcaaaacccacatcatctatggctaatagcaggtttggaagtacaatataaaaatattcaagtgaaaatagcaacacagatatactaatatagcaatgaatttaaaatcattttgatgttattaaatactttgttcttttctttctttagaatttacatggcctgaggacagataatatcagatttattgctacaaccccagatcctgaagagtgtctggcacatataaggaacccaattagtggctagtattattgctttctgttggagttttgccttattttattttattttttatactagttttagaattatgaactaaatgatgagatttaaaaattgtactagaaaagggaagtgamtagtgactatagggtcaactttataagagcaatgagaaaaatgtagtgagaaatgcagagcaagttaactcacatgcaggtctacaaattaaaacacacagtacaaaattaattgacaa

SEQ ID NO: 243442 - DNA, 603 bp, Homo sapiens
ttttcattctctaatttcttgggtgtcaccaagaacaaaggcattaggttggacaagcaaagagtgtttgaggcacttagaatctctggctggggtgattagggaggataaccttctacacaagcacagcctaacaaatttggaagagttggtccttttacataatgtgcagaaaccaacacagagaatcaaggaaaatgaaayagagaaatatgtcacgtataaaagaacatgataaatctctgaaatccaaacctaataaaatggaaaaatgattcatcttacagaaaactcaaaaaaaaaaaaacagttataaagatgcttatcgatgtaaggagaacaatgtataaacaatccaagaattttattcttttaataattaactgtttgagtgagggttcttaagttaaaccaccccgattgccctctgtaggcagagcgcagtttacttttgtatattctagggagacatgaaacatcaatcaacatgtgcaagctgaacattggtttggtctggaaaggtgagacaactctaagtaaaagtgggaagacttgacaactctaagtaaaagtgggaagacaactctaagtaaaagtggggaa

SEQ ID NO: 243443 - DNA, 603 bp, Homo sapiens
ttttcattctctaatttcttgggtgtcaccaagaacaaaggcattaggttggacaagcaaagagtgtttgaggcacttagaatctctggctggggtgattagggaggataaccttctacacaagcacagcctaacaaatttggaagagttggtccttttacataatgtgcagaaaccaacacagagaatcaaggaaaatgaaatagagaaatatgtcacgtataaaagaacatgataaatctctgaaatccaaacctaataaaatggaaaaatgattcatcttacagaaaactcaaaaaaaaaaaaacagttataaagatgcttatcgatgtaaggagaacaatgtataaacaatccaagaattttattcttttaataattaactgtttgagtgagggttcttaagttaaaccaccccgattgccctctgtaggcagagcgcagtttacttttgtatattctagggagacatgaaacatcaatcaacatrtgcaagctgaacattggtttggtctggaaaggtgagacaactctaagtaaaagtgggaagacttgacaactctaagtaaaagtgggaagacaactctaagtaaaagtggggaa

SEQ ID NO: 243444 - DNA, 567 bp, Homo sapiens
taggagtggaggtttaataggcagaagagaagagaaagaaaaacagctctctctatagagagagaggggtcttccaagtggaaaaggttggctggcagcggaggcactggatttcatagttcagcttgaggagtcgctgtgtgatttatgtggagctcacwgattggttcgatcaggtgtgacatttacatagtgcgaaggaaagctggttgccccaccctaatcttattatgcaaatgaattatccttggccaccgtcatcttgtctgccccttactgtacaggtgactggcaaataagggatggtggagcccccatcttgaacatgtctagtgcttagttcctgctgacattcacctgtgcaagctggcagcttgcttgtgtatgtctgcagctagactttacagtctgctctttgttagaaaatgatttaaggctgcttttcattaagaagaaaaaccttacccaggactctcatatgtttactatctatctaagtgatttcttcttaactcctatatcattccaccctctggagtggtcaccctaactgttgttaggggttat

SEQ ID NO: 243445 - DNA, 567 bp, Homo sapiens
taggagtggaggtttaataggcagaagagaagagaaagaaaaacagctctctctatagagagagaggggtcttccaagtggaaaaggttggctggcagcggaggcactggatttcatagttcagcttgaggagtcgctgtgtgatttatgtggagctcactgattggttcgatcaggtgtgacatttacatagtgcgaaggaaagctggttgccccaccctaatcttattatgcaaatgaattatccttggccaccgtcatcttgtctgccccttactgtacaggtgactggcaaataagggatggtggagcccccatcttgaacatgtctagtgcttagttcctgctgacattcacctgtgcaagctkgcagcttgcttgtgtatgtctgcagctagactttacagtctgctctttgttagaaaatgatttaaggctgcttttcattaagaagaaaaaccttacccaggactctcatatgtttactatctatctaagtgatttcttcttaactcctatatcattccaccctctggagtggtcaccctaactgttgttaggggttat

SEQ ID NO: 243446 - DNA, 567 bp, Homo sapiens
taggagtggaggtttaataggcagaagagaagagaaagaaaaacagctctctctatagagagagaggggtcttccaagtggaaaaggttggctggcagcggaggcactggatttcatagttcagcttgaggagtcgctgtgtgatttatgtggagctcactgattggttcgatcaggtgtgacatttacatagtgcgaaggaaagctggttgccccaccctaatcttattatgcaaatgaattatccttggccaccgtcatcttgtctgccccttactgtacaggtgactggcaaataagggatggtggagcccccatcttgaacatgtctagtgcttagttcctgctgacattcacctgtgcaagctggcagcttgcttgtgtatgtctgcagctagactttacagtctgctctttgttagaaaatgatttaaggctgcttttcattaagaagaaaaaccttacccaggactctcataygtttactatctatctaagtgatttcttcttaactcctatatcattccaccctctggagtggtcaccctaactgttgttaggggttat

SEQ ID NO: 243447 - DNA, 363 bp, Homo sapiens
ctcatatcttagaagcttttcccccttatatataataggggcatctttgggatggggatatccatactcagaatagtcattcacaatgcgatttggaatcttacatgcaaaattagaagggtccacccaacaaatgaagtttcaaaaaattaacatwatatgccctggccagtatctcagatgatctttgtggcaagggctgttggtacagatgtctccagtttgcccacaaattcgtaggccattactattagcaaacatcatacaaggatctggaattccatgaggggacatgtttggaaaggcccatgtgttattatttacatcataatcaaggtggttacttagagcatgccattctca

SEQ ID NO: 243448 - DNA, 503 bp, Homo sapiens
gcagatctttctcatatcttagaagcttttcccccttatatataataggggcatctttgggatggggatatccatactcagaatagtcattcacaatgcgatttggaatcttacatgcaaaattagaagggtccacccaacaaatgaagtttcaaaaaattaacataatatgccctggccagtatctcagatgatctttgtggcaagggctgttggtacagatgtctccagtttgcccacaaattcgtaggccattactattagcaaacatcatacaaggatctggaattccatgaggggacatgtttggaaaggcccatgtgttattatttacatcataatcaaggtggttacttagagcatgccattctcattgggacttccaaccakatggagcggctagattctgaaagccccccatagggcttctgatccttttagatcatgcttatggcaccttcttcctcaaatcttagaactatcagcaattacaagtgtgatat

SEQ ID NO: 243449 - DNA, 394 bp, Homo sapiens
ggatgtgtactcacaggtaatcttatacagtgctagtgaaaaacttgaattgctatttctgaaacgggtgtggtttgcttcttcagtgccccgctgctcaaacctctaggggagcttacagacgggcaggctgtggggctccaagcccatggtagtgtctaggggtgaatgtttaggcctcctgaagccccagtgggcgtgtgttacagggcgctctcttagtttgcagtctataggcggcttgtgttaaccagctcaattagactctttaccttgttgcaagtacagagggctttccgtatcctrggatttcttcgctgtgctcttttgccggcgctcgtcaaaaagtcctctccatgaccagccacttgcatcttcttcccctatgaattcc

SEQ ID NO: 243450 - DNA, 405 bp, Homo sapiens
cttgtgcctggagagagagagatgcactttcaataaaattattcagagtgactactgcacatcctgcctttagactccttgctctacaaaggagcttccatctgtgaagagggtccaatctggattttctagaaagtttccctgagatctttcctggctgcttaggtctgtaccacaacttgttcacagtcatgtktaggttcaccagttcccttggggagaaaagtggctgagtttaagtgagaaccagtttttaactggatggtggaaccctctaacaatagagcttgatacttaaggaggctgctgtctgtttaccaaaggcttcccttagaggactgtaatcctgccacattatgtggggtataaacagttaagtcatttcccaggttaatttggaggctt

SEQ ID NO: 243451 - DNA, 405 bp, Homo sapiens
cttgtgcctggagagagagagatgcactttcaataaaattattcagagtgactactgcacatcctgcctttagactccttgctctacaaaggagcttccatctgtgaagagggtccaatctggattttctagaaagtttccctgagatctttcctggctgcttaggtctgtaccacaacttgttcacagtcatgtgyaggttcaccagttcccttggggagaaaagtggctgagtttaagtgagaaccagtttttaactggatggtggaaccctctaacaatagagcttgatacttaaggaggctgctgtctgtttaccaaaggcttcccttagaggactgtaatcctgccacattatgtggggtataaacagttaagtcatttcccaggttaatttggaggctt

SEQ ID NO: 243452 - DNA, 622 bp, Homo sapiens
aggtttcatgaatgacttcatattgttcataaataattcttatttttggtgattgtctaaatcaaatggaaaaataaggattgttattacaataagaatctagcaattccaggggcattccatgatggccgaataggaacagctccggtctgcagctcccagcatgatcaatgaaaaaaatgggtgatttctgcatttccaactgatgtacttagttcatctcactgggactggttggacagtgggtgcrgcccacggagggtgagacaaagaagggcggggcgttgcctcacccaggaagctcaaggcgtcagggtatttccctttcctagccaagggaagccatgacagaccacctagaaaaatgggacactctggcccaaatactgtccttttcccaaggtcttagcaactggcagacaaggggattctctctcacacctggctcagtggctcccacacccatggagccttgctcactgctagcgcagcagtctgagattgatttgcaagatggcagcctggctgggggaggggcatccaccattgttgaggcttgagtaggtaaacaaagccgtcgggaagctcaaactgggcagagcccaccatggctcaacaaggc

SEQ ID NO: 243453 - DNA, 622 bp, Homo sapiens
aggtttcatgaatgacttcatattgttcataaataattcttatttttggtgattgtctaaatcaaatggaaaaataaggattgttattacaataagaatctagcaattccaggggcattccatgatggccgaataggaacagctccggtctgcagctcccagcatgatcaatgaaaaaaatgggtgatttctgcatttccaactgatgtacttagttcatctcactgggactggttggacagtgggtgcggcccacggagggtgagacaaagaagggcggggcgttgcctcacccaggaagctcaaggcgtcagggtatttccctttcctagccaagggaagccatgacagaccacctagaaaaaygggacactctggcccaaatactgtccttttcccaaggtcttagcaactggcagacaaggggattctctctcacacctggctcagtggctcccacacccatggagccttgctcactgctagcgcagcagtctgagattgatttgcaagatggcagcctggctgggggaggggcatccaccattgttgaggcttgagtaggtaaacaaagccgtcgggaagctcaaactgggcagagcccaccatggctcaacaaggc

SEQ ID NO: 243454 - DNA, 622 bp, Homo sapiens
aggtttcatgaatgacttcatattgttcataaataattcttatttttggtgattgtctaaatcaaatggaaaaataaggattgttattacaataagaatctagcaattccaggggcattccatgatggccgaataggaacagctccggtctgcagctcccagcatgatcaatgaaaaaaatgggtgatttctgcatttccaactgatgtacttagttcatctcactgggactggttggacagtgggtgcggcccacggagggtgagacaaagaagggcggggcgttgcctcacccaggaagctcaaggcgtcagggtatttccctttcctagccaagggaagccatgacagaccacctagaaaaatgggacactctggcccaaatactgtccttttcccaaggtcttagcaactggcagacaaggggattctctctcacacctggctcagtggctcccacacccatggagccttgctcactgctagcgcagcagtctgagattgatttgcaagatggcagcctggctgggggaggggcatccaccattgttgaggcttgagtaggtaaacaaagccgtcgggaagctcaractgggcagagcccaccatggctcaacaaggc

SEQ ID NO: 243455 - DNA, 569 bp, Homo sapiens
aactggaataaaggctagtcttgctatacaaagagactggcagcattttgcccctgccctggatgtctgtggaactttgaacttaagggagatgatttagggcatctggcggaagaaatttctaagcatcaaaatattcaaaaggtgacagcataaaagtttggaaaatttgcagcctgacaatgcaatagaaaagaaaacacattttctagggagaaattcaagcctgctgcagaaatttgcataagtaacaaggaaccaaatgctaatcaccaatacaatggagaaaatktctccagggaatgtcagagacctttgtggcagcccctcctatcacaggtccagatgcctagagaaaaaaaagtgaattcttgggctgggcccaggcaccccctgctgtgtgcagcctagggactcagtgtcctgcatcccagctgctctagccatggctaaaaggggccaaggtacagctttggccatggctttagagggtataatccccaagtcttggcagcttctatgtggtgttgatcctgcagttgcacagaagtaaagaattgaggtttggg

SEQ ID NO: 243456 - DNA, 311 bp, Homo sapiens
gaattcctaaaggggttctaagggagcaaaaatagaaacaagtctcacataagaccagttagcatggacaacttttcagaactcagctgtagacrttcctcctccttgagcagacagaaaattcaaaatgttggtgacatcaaaaagaaactaaatctctctcaaatggatttaatgggtatttttaatgcataattactcccaccagtctcatctcagccaggtggggttttctctttcatttgatttatcaatactatcatttgttagaagttctcaaaccagcatctattactcttcctagaagactc

SEQ ID NO: 243457 - DNA, 565 bp, Homo sapiens
gataatgacatgtgtagttttgtttgtttgtttttgagayggagttttgctctttttgcccaggctggagtgtaatggtgcaatctcggctcactgcaacctccacctcctgggttcaagtgattctcctgcctcagcctcctgagttgctgggattacaggcgcccaacaccacacctggctaattttgtatttttagtagagacggggtttcaccatgttgaaccaggctggtctcaaactcctgatctcaggtgatacgcttaccttagcctcccaaagtgctgagattacagacatgagccactgcacctggccacatgtgtagttttaagctgctaagtctgtgatactcttgttatgcaacaacagagtactaacacagttggggacattcattatttagttgcaggctacagggcagggaaagcagcacacccctctactccatcctcaccccaacacacgtactcccagctgagcagatgctgagggcatggcttggacccagggactgtgggagaagagaagacactcttgtctcttcaagccccactttccccag

SEQ ID NO: 243458 - DNA, 623 bp, Homo sapiens
tcccttttcatgttcaatctttcttgtaatgaaataaatgtaattaaaataacatttttatcctaccaaactagcaaagagagaaaaaaaacaatattgctgagggatcagctaccccaattccctgctggagtctgattcccctcccaaaaaagtaggctgactayagtgacttgcttgattaataggacaaagcaaaaatgatgtcttaaaacatccatagccagcttttaacaagcctgtagcttctgcctggaccgtttgttcttggcacactctctgtccttcagaacccagccaccatgtgtgaaaagcccaagtcacatggagtgggcaaatggccgggaggaaacatctgcttcctatgtgggtcaagttagggtagcatcctcagctaaagaagtgtgtgttctttcttagacgtgttagtcattcagggtaaatggacctgaaatatctcaggaggcagtcaagccacatgtattatccattctcaggctgtctgggttgttagtggtggtttgtctatatcaactggtccacaaaagacaaaaatgacagccaacagaataacagagaatgacacctaagaaaatagaaaagaggaagaaaaaatgaattat

SEQ ID NO: 243459 - DNA, 494 bp, Homo sapiens
aatgggcctggggaaatgggaagcctctcccttcgatcttgggtgaagggtggggtggggagsaggtgttggcaggtgggtggggggcagggcggaagaaaaatgaagggatttgaatcttcagtctgcagacagggtgggctaagcaggttttatcacactgcaccctcccctacctcctcccattactcactcatagctaattctagtatcaatggcagagagagaagggctgtcctatcccttggagaccacttacattttctgtagctctttatgatgaggaagataaaggctatcagcagcagtgtcagtagaaccccagcacaaaaggcaaggattaaatgttttttgctgttttggcaaagaaaggcaggggatgaactgttgggcttttgaaggcctttcctaaagagtgaaacctttcctgcctatggatggactcctgaaatggttttcacactgattaatgaactttcacccagtggttttca

SEQ ID NO: 243460 - DNA, 476 bp, Homo sapiens
agaattctgagtagttatccatcagagatgactctgtctcattgaccttcagattccccatcaacaaacacttgagggcctgtatgcctgggccaagggatttttacatccttgattacttccactgaggtgggagcatctccagtgctccccaattatatctcccccactccactactctcttcctccacttcatttttcccttgtcctttctctctaattcagtgttttggaggcctgacttggggacaacgtattattgatattattgtctgttttccttcttcccaatagaagaataagtcatggagcctgaagggtgcctagttgacttactgacaaaaggctccagttgggctgaacatgtgtgtggtggtgactcatttccataccattgtggaattgagcagagaacctgctctcggaggatgcctaggagatgttgggaacagaaraaataaactgagtttaagggg

SEQ ID NO: 243461 - DNA, 621 bp, Homo sapiens
taagggacgaaggacttggtggaatctggatggaagggtttcattgcaccccaaaaatgatcttatatgctatacaggtaaaccctgactttctgtatggcctaaataaaaatcattaatatttgcaatatatataatttcaaacatatgcaaaattaaaagaatagtatagcctctgtacctcccccacatactactcactcagcttcaatcattaataattcatggccaattttgtctcatctctgctggctccctccctccctactactagatgattttgaagcaattccaagacattatctactacaggttctttctctccactccagctctaccctcttcatcttcrtctcaaccaagcttgctattgggtggcggaaagagacatgtttccaagggaatgtaaccaccagaggtggcaatacgagccacataactgtgtggctgtagtgacctggaaaggtcttatggagcaggtagagtttgagcagagtttgaagcacaggaaaatcctgatggacaggaatgactagacgggaaggacttcccaggtagaggacagcaggtacagagggacagggtgagtactttaggcagtagtggaggtgctgcaagtct

SEQ ID NO: 243462 - DNA, 621 bp, Homo sapiens
taagggacgaaggacttggtggaatctggatggaagggtttcattgcaccccaaaaatgatcttatatgctatacaggtaaaccctgactttctgtatggcctaaataaaaatcattaatatttgcaatatatataatttcaaacatatgcaaaattaaaagaatagtatagcctctgtacctcccccacatactactcactcagcttcaatcattaataattcatggccaattttgtctcatctctgctggctccctccctccctactactagatgattttgaagcaattccaagacattatctactacaggttctttctctccactccagctctaccctcttcatcttcgtctcaaccaagcttgctattgggtggcggaaagagacatgtttccaagggaatgtaaccaccagaggtggcaatacgagccacataastgtgtggctgtagtgacctggaaaggtcttatggagcaggtagagtttgagcagagtttgaagcacaggaaaatcctgatggacaggaatgactagacgggaaggacttcccaggtagaggacagcaggtacagagggacagggtgagtactttaggcagtagtggaggtgctgcaagtct

SEQ ID NO: 243463 - DNA, 561 bp, Homo sapiens
gggattcttggattctttatccttgggcaaggaacaactgtctcttggtgcttatctccatggcacttcccagaactaacctggtggtcctcttggcagatttgttcctttgtctggggagcgaagaagcactggattgattaccagtatgtcccgtatgccaacaaggggaaagagtgggttggctatgacaatgccatcagcttcagttacaaggtgagaccctggctctttcatgytccagcacatggtttcctaccggtttctatggggtccttatttgtacaatgcatgtatgtgtattgggtggagagtgaaaggtgaggatgattagaccaggggtttcaggcatgcctacattttagttctaactggggctttataatcccatctgttccaagtctctattctgaagagaaagaatctaggttctgagggaataaatagttccctcagttcttacagcttttcgatgatctttttggtctcttcctttccatttggaccagctaatttcataacagataaataccaacacaaagtagatcatggtaagtgctc

SEQ ID NO: 243464 - DNA, 561 bp, Homo sapiens
gggattcttggattctttatccttgggcaaggaacaactgtctcttggtgcttatctccatggcacttcccagaactaacctggtggtcctcttggcagatttgttcctttgtctggggagcgaagaagcactggattgattaccagtatgtcccgtatgccaacaaggggaaagagtgggttggctatgacaatgccatcagcttcagttacaaggtgagaccctggctctttcatgctccagcacatggtttcctaccggtttctatggggtccttatttgtacaatgcatgtrtgtgtattgggtggagagtgaaaggtgaggatgattagaccaggggtttcaggcatgcctacattttagttctaactggggctttataatcccatctgttccaagtctctattctgaagagaaagaatctaggttctgagggaataaatagttccctcagttcttacagcttttcgatgatctttttggtctcttcctttccatttggaccagctaatttcataacagataaataccaacacaaagtagatcatggtaagtgctc

SEQ ID NO: 243465 - DNA, 441 bp, Homo sapiens
tacatcctcccaacataagactacataaaaatagcaaagatcaggacaataattataatatactgcccatttttttgtttgctttaaaaaaaaattcaagccatatcttccattgggattttctgtgcaatgtcgtttcaagtattccaatttatataaagagttaagaacaacaaattgaagtttagagagggaacgtatactgtaggcgtggattttaatacagtactggccagtgctcttgggattataattcaactataggcatgcgaagagttagaatgtcttcaattctccaaatttgtaaaatgtcaactatgaattaataatctgtaattatgaatgccgattatagatactacaattacatgtactgtkaatgtcgatttaatattgaagaaggccagctacataatttacaggcccagtgtaaaatgaaaa

SEQ ID NO: 243466 - DNA, 563 bp, Homo sapiens
attttttttttcttcttttccttctctgtatgctcagctttaaacatttttgcaccataggctgaggctgcactcagctggggagagacgcgtggcggggataaaactagagtagaggaatgttgtttcctgtctgagaaggctcagaccttacaaggggagaaaaaagtctgtaagagaatctaaaactttttttgaggaaataattgaaaaatatatcctaattgaccctcccaccgtatttkggctaaaaatagaaagcctcgactctcaggagactgagtttgaaaactgttaagacatagaaaaggttttattaaaattcagtttgcaaatcatcgtcggcctcagcaattttctcattccagagagggttgtttccgaaattctgtaaacatctgaatttgttcctatgtctaaccagagaagttcaatgtttttacacttttgacttaacgtaagaatttatattgagatatatacacttctgggattggcgtgcaagtgttgtataagggagtgataattaggcagaactaaaaaaaccaaacaaacctggtgaa

SEQ ID NO: 243467 - DNA, 605 bp, Homo sapiens
catatgtagatctttccacatcactttctattttttttttcttcttttccttctctgtatgctcagctttaaacatttttgcaccataggctgaggctgcactcagctggggagagacgcgtggcggggataaaactagagtagaggaatgttgtttcctgtctgagaaggctcagaccttacaaggggagaaaaaagtctgtaagagaatctaaaactttttttgaggaaataattgaaaaatatatcctaattgaccctcccaccgtatttgggctaaaaatagaaagcctcgactctcaggagaytgagtttgaaaactgttaagacatagaaaaggttttattaaaattcagtttgcaaatcatcgtcggcctcagcaattttctcattccagagagggttgtttccgaaattctgtaaacatctgaatttgttcctatgtctaaccagagaagttcaatgtttttacacttttgacttaacgtaagaatttatattgagatatatacacttctgggattggcgtgcaagtgttgtataagggagtgataattaggcagaactaaaaaaaccaaacaaacctggtgaaacccgggatcgaa

SEQ ID NO: 243468 - DNA, 422 bp, Homo sapiens
  misc_feature (1)...(422): n = A,T,C or G
nnnnnncacctaaagcctaacccagattacacctgagtaacctccttccgggacacactaacaacatccagcttgtgtcgttactgagagcaaagcacacttttatagctttagcacaattagtcctcttggcgcaattgaatcccaggcggaaagaattaagggattgttcragatcttttgacagattttctgctagccgaaggctcatggaaaatgcaacccaaattccctgcatctgagtacgttgaatgatgaaatgtaccttgggagctgtcgctcctctcgctctcgaccccgctcgaagaaggaactgtccaaatagatgaaaacgtgaaaatcctgcctgacctttctccccacatgcaatggctcgggccacacataccatctagctcacctgacaccgaagctttatctgg

SEQ ID NO: 243469 - DNA, 495 bp, Homo sapiens
agggattttcatgtctggtttactaacgcatcccaaaagcttggaacagtgtgtagcaactcatagactcaataattatttgttgaataaattccaggaatgtaggctgccatgaataaaagcatgaaggcagtgatgggctcagtaattaggaccatgaggagctgggtttgattggacacaagggaaagagatggggagccaggtgggctggaggggggcaagttggacaggttggatagagccagcctttggagatccagaaagacagattattcmtatgtgaaattatactcaacctgactagcaatcagggacatctaaattgaaacaagatgcagattgtccaaacacttatctgacaataccaagtgatggttagaatgttgggaaacaggcattctcacacactgcctttgggagtataaaatgtacagctattttagaattcaatttgagcctccattaaaatttaaaagggacataccctttgat

SEQ ID NO: 243470 - DNA, 190 bp, Homo sapiens
agatattcttcttatgcctcacaattttacctttaacatcctgatttataatacaccttgagttaatttttacrtatagataagggtcaaggttcatttttttctatataaatacctaattactacagtactgtttatgaaaagatcattcttgctatgttaaattgcagtgatgcctttcttgtaagtc

SEQ ID NO: 243471 - DNA, 290 bp, Homo sapiens
ttcacatgattatagcatgaaccttcccccttattccagaaaagtcccccagcttcccctattgggatgrtttccaaaggggctcataggtgctcttgggccagcccctccgaatcttccctccagccctcccctctggttgctggtgaattccccatccacaccctgctgggcatagcacccctgaggggtgccaccagtgattgcttctccaattctccactggatagctcaggccaggctatgactttatacaggactccatgaaggacattgcaagattaacagaa

SEQ ID NO: 243472 - DNA, 520 bp, Homo sapiens
ccattggttactcagttacaccctatgcacatgaagacctagcccccaaccagtctggctggttgcagtaaggacacagatacagaggcaagaccatggtaggatacagagagaagtggccatctacaagcagagagaggtctccgaagaaatcaaccctgctgatatcgtgatcttggatttctagcccctggaactgtgagaaaataaatttctgttgtttaagccaccaagcctgtggcactttgttatggcagccctagcaaactaacacatatgttatttgcaaggatatctgctattgctacagttttcagagttctctttacttcttactagccaacctcttgatattccaactcgctgttayagtttataatttgttatacagttgagcctccatatccccaggttctggatctgaggattcaaccaactgcagatcaaatatacttaaaaaaaagcaaaaaataacattacaataatacaaatgatataaataaaaaaatacagggtaaca

SEQ ID NO: 243473 - DNA, 449 bp, Homo sapiens
tagatttttgatgtgatatgttaaaattatataaacatgttttttcttttttaccttttagagattcatactgaaatatttacagattacattatacaatacttgaaattggcttcaaaataatatrgaagaggagaattggacaggcatatagatgaagcagggtggccatgagttgatggctgttgaagatgggtgacaggtacatggggattcattatgctatactctctacttttgcatgtattcaaaattttccataataaaaagtttaaaagaagtgggggtcattttctggctgtaataagacatgtgtcacaatttatgaaagtcaaatccttggaggtcagatgtccagaggcctcaaagcagcaatttcaagacccctacatccagctgggcagggacagttacttacatgactcagctgctgggcattgattttggct

SEQ ID NO: 243474 - DNA, 582 bp, Homo sapiens
gttctcacgtgagagcatttctctagattctaatgacgattctaggaaagcaatactgattattacgtccttctctgagagccacagaaatcatgtagtctgaatacagccaggccttcttcctgccttaaggccttttaacacatagggcttcaatcaaaaaaagcagaaattaaactccagaagccttaacaaatactaggagttttcgtggaagtctcaaaaacatgccaaaggcaggataacatcgcacaacacagcgacatttctgaaaagtctattctccatctctgtccacgcaccccaccctgccagcagcggctccagctgcacctctttctctttcctcccgccttcccccagcctctctagtccacctgggtcttttccttgcgcctcctgttctctctcctgctcctatctccaaatgtcragatctttcttctggaagcctcctttccctttctgcatgtgaatcaatttaacctctgtttctcctcccaattctcctccccatctatttctcagatgaggaacccaaagacctgggagctaagcagggagagccaagaaaacactttc

SEQ ID NO: 243475 - DNA, 521 bp, Homo sapiens
cctcctttccctttctgcatgtgaatcaatttaacctctgtttctcctcccaattctcctccccatctatttctcagatgaggaacccaaagacctgggagctaagcagggagagccaagaaaacactttccccagaagatacagagaaggggaagttggaactatggatgctttcatgactaacagctaccactgtgcacttgcctctgagtgcttgatrtatagagactcactgaaacctcatgacaacccagtaaggacgggactaatattggtatcattttaccaatgggacacctggaaacaaagaatttgcccaaggtcacacacctagtaagtggcaaccgaggatcaaacccagaccatttggagcaaatgtctgagctcttactcccctctaacacgattatgctgtttcaactctggcacctagaataacccctacctccaaccccaggatacaatcagcagctcaagtcctccactagctcattcctatgaaagctgtcctcctctcccc

SEQ ID NO: 243476 - DNA, 440 bp, Homo sapiens
tgtccccaagcaacagtatcttgcctcctccttcctccttaaacctctaaaaccttcctcagccttccttacacctgttgccttgcttcctatttcaatttgaaaatagatgcaataaagagagaaccttccctggatcccacccccacatctccccagctgcttgcctctgtgcttccttctccaccttygcttgttattgtagctggagtgtctccactcatgttagggtcgaatttcctccatcatatccacatcatatccacattatatccacagctcaaccctcaggttctttcctgagtgtccgctttgcacactgcctggttccacaatgcggtctcccacccatctcacaccctgcatgcttacttattcatcatctgttctgctctactacagtgaggggcagggattctgggtatcttattcactgcaga

SEQ ID NO: 243477 - DNA, 523 bp, Homo sapiens
agccaagaactattgctaagataaaaaagattttacgatgtcagtcactagaaaagtatgccaattttaaatatgtataaatataaaatatcccttcaagttatttaatacagaaactgatataactaaaagaaaaatggactaatctacaatatagattttaacatacctttcaattaccgatggaaccaacagaaaaaaatccataagagaaagggagattggatgaacacaatgaacaaacttgacataaactgacatatacagaacgtgacactcaacaactactgaatacacatccttttccagtgcacgtatcatatttaccaacatagattatatgtcrgaatttaaagggactcatcagagtattcagtcatgggattttgcctaaacttgtctggccttcaacagggttcaaatacagttaaattcttatttcatctaaagagtcctatccttttttttggaaattttaccgcaacaatctaaatttgcataacaactgaacccagcccttgga

SEQ ID NO: 243478 - DNA, 523 bp, Homo sapiens
agccaagaactattgctaagataaaaaagattttacgatgtcagtcactagaaaagtatgccaattttaaatatgtataaatataaaatatcccttcaagttatttaatacagaaactgatataactaaaagaaaaatggactaatctacaatatagattttaacatacctttcaattaccgatggaaccaacagaaaaaaatccataagagaaagggagattggatgaacacaatgaacaaacttgacataaactgacatatacagaacgtgacactcaacaactactgaatacacatccttttccagtgcacgtatcatatttaccaacatagattatatgtcggaatttaaagggactcatcagagtattcagtcrtgggattttgcctaaacttgtctggccttcaacagggttcaaatacagttaaattcttatttcatctaaagagtcctatccttttttttggaaattttaccgcaacaatctaaatttgcataacaactgaacccagcccttgga

SEQ ID NO: 243479 - DNA, 334 bp, Homo sapiens
attagcacattgtcaataaatatttactaagctgaactgaaagtttttattatgcataaatactaagatgtccatgtccatggtcatgcaggacagcagaagtcctatttttttttttttaccagtgtatctattrctaccaattgcttcaaggtcaggagccaactcatgtattagacatgtaaatcttgtgaaaatattcatattggaaacagcatgtagcaagtgcaaacagaactaaataaatccttaaatttatcacagtcccttcaaagtatgaattcttcttctagcattacatcaaatttgataaaatcaaaaatattttatctca

SEQ ID NO: 243480 - DNA, 334 bp, Homo sapiens
attagcacattgtcaataaatatttactaagctgaactgaaagtttttattatgcataaatactaagatgtccatgtccatggtcatgcaggacagcagaagtcctatttttttttttttaccagtgtatctattactamcaattgcttcaaggtcaggagccaactcatgtattagacatgtaaatcttgtgaaaatattcatattggaaacagcatgtagcaagtgcaaacagaactaaataaatccttaaatttatcacagtcccttcaaagtatgaattcttcttctagcattacatcaaatttgataaaatcaaaaatattttatctca

SEQ ID NO: 243481 - DNA, 334 bp, Homo sapiens
attagcacattgtcaataaatatttactaagctgaactgaaagtttttattatgcataaatactaagatgtccatgtccatggtcatgcaggacagcagaagtcctatttttttttttttaccagtgtatctattactaccaattgcttcaaggtcaggagccaactcatgtattagacatgtaaatcttgtgaaaatattcatawtggaaacagcatgtagcaagtgcaaacagaactaaataaatccttaaatttatcacagtcccttcaaagtatgaattcttcttctagcattacatcaaatttgataaaatcaaaaatattttatctca

SEQ ID NO: 243482 - DNA, 552 bp, Homo sapiens
gactgggcaaatccctggtcctatgggtacaaactattgatcaaacccccaatctcattcctacccctaaaatatagcaacgtgaaagatcttattacctatttggactgagattaacaccatcccttaaactgcatggctttcaatcccagggctatggcgtgtgatgccacatagaatatgcatgaatcttctctccaacaattgagttgttaggataaaggctcttgtctttgccttctttctctcacagccaagaatattaaggaacgtggacacaaagratgagtttggaacagaagtttaataagcaaaagaagaaagctctccccagcagagaggggacccgaaagagggttgccaactaggaggctgaatctgggggttttgtgaactgggaagaggaagaatgtgctcactggtctgtgagctgtcttggagatagcacgacttcgcttggcccgggaccttagcctgggaccaatcagaggctgaagtgaaattttggcccaagaccaatcaggggctgaagtgaaagtttggcccaggacc

SEQ ID NO: 243483 - DNA, 419 bp, Homo sapiens
gacttccctcttggcactgctattgctgtataccataggttttggttatgttgtgtttttattttcacttgtttcaaaaaatgtttaatttccatattaatttctttattgacctagtgactgttcaggagcatgctatttaattcccatgtatttatatagtttccaargttcctcttgctgttgatttctagctttattccactgcagcctgagaagatactcgatatgattttgatttttaaaaatttaagacttgttttgtgacctaacatgtagtgtatcttagagaatgttccctgtgctgatgaaaagaatatatattgggtagaatgttttgtaaatgtctgttatatccatttggtctcaagtccaatttaagaccaacgtttgttaatttttgtcttgatgatctgtct

SEQ ID NO: 243484 - DNA, 419 bp, Homo sapiens
gacttccctcttggcactgctattgctgtataccataggttttggttatgttgtgtttttattttcacttgtttcaaaaaatgtttaatttccatattaatttctttattgacctagtgactgttcaggagcatgctatttaattcccatgtatttatatagtttccaaggttcctcttgctgttgatttctagctttattccactgcagcctgagaagatactcgatatgattttgatttttaaaaatttaagacttgttttgtgacctaacatgtagtgtatcttagagaatgttccctgtgctgatgaaaagaatatatattgggtagaatgttttgtaaatgtctgttatatccatttggtctcaagtcyaatttaagaccaacgtttgttaatttttgtcttgatgatctgtct

SEQ ID NO: 243485 - DNA, 537 bp, Homo sapiens
gtttgtatttctatttggttaccattagtgtgtatttatgtacagtataaagcaagaggtgaaaccataggttacagggtaaacttatcttcagttttactaggtattattcgtttcattccaatgttaacacaccaactgacagtcttacaatgtgataattctcaaatcttcgcattcttcttgacacttaattttgtcaaaattttaatttgagtcttttggtgggtatgtggcaatgattgtgatattaatttactgggccttttcttctctgtaacaggccctggcaagatatatgtgtggtgtggcaggggtaggagcccctagaggtagcatgggctctggaatccttaatcatcctatgtgaaaaagttggtggggcagtgaatatatatatatatatwtttttttttttttgagacagagttttgctcttgttgcccaggctggagtgcaatggcactatctcagctcactgcaacctctgcctcccaagttcaagtgattctcctgcctcagcctcccaagtagctg

SEQ ID NO: 243486 - DNA, 309 bp, Homo sapiens
tcctctggtgaatcatgaatgttcttagtggcatctacaatagtgaatccatttatagagcacgggtagagtagatttrgcataattcttacaaggtgccctaggatttatggaatggcaaatgagcattggcttgtaataagagagtcagtctgtcctataaatcttttttttctcttgagataaggtctcactctgttgcccaggctggattgcagtggcatgatcttggcccacttcagacttgacctccttgactcaagcaatcctcccacctcagcctcctgagtagctggactagtagcatgc

SEQ ID NO: 243487 - DNA, 309 bp, Homo sapiens
tcctctggtgaatcatgaatgttcttagtggcatctacaatagtgaatccatttatagagcacgggtagagtagatttggcataattcttacaaggtgccctaggatttatggaayggcaaatgagcattggcttgtaataagagagtcagtctgtcctataaatcttttttttctcttgagataaggtctcactctgttgcccaggctggattgcagtggcatgatcttggcccacttcagacttgacctccttgactcaagcaatcctcccacctcagcctcctgagtagctggactagtagcatgc

SEQ ID NO: 243488 - DNA, 377 bp, Homo sapiens
ttggcataattcttacaaggtgccctaggatttatggaatggcaaatgagcattggcttgtaataagagagtcagtctgtcctataaatcttttttttctcttgagataaggtctcactctgttgcccaggctggattgcagtggcatgatcttggcccacttcagacttgacctccttgactcaagcaatcctcccacctcagcctcctgagtagctggactagtagcatgcaccaccatacatggcttwtttttttttattcatttatttttggttagagacagggtttcaccatgttgcccaggctggtctcaaactcctaagctcaatccattctcccacttcaacctcccagagtgctgggattacagacat

SEQ ID NO: 243489 - DNA, 620 bp, Homo sapiens
gtgtgtttgtcctctgaaggcgttttcccaggctttgtaaatacatacaggccatttagaaatttgaatgtcaaagagtaaaggagcttagaaagtaagcattggagaagtgtgggagggtggtattatttacaaaacattcctgggtccttgtgagttctatacacccttgatgagcactgattctgggccaggccagacacccagctggacccaggagatactgaggtgagtaaagccaaaatgcctccattcagcaggaggcgggcagtcacaccaaagtgataaaggcacaaaatgcagaggcagcagaggagcaatgactaccttgttccaggactctgtgacctcagggagagctttcagaggaggacatctgtgcaaggcttggaaggatgaacacaaatttgcctagcagaaaagggagccaagcaaatcctgatggagaacagcttgggtgagagtgtgagccacaggattgaggggctcaggcatgtaactggaggagcagaaagaatgaggggagataaagttgggaggtcagcagaggtcagtcacagaaggttttgaatcctggtgaggragcaatgggtgctgcacaagggacatgggcctggagg

SEQ ID NO: 243490 - DNA, 309 bp, Homo sapiens
aaaaatgactaaggggaatgaggagatgagtcatatggaatgcccaagacacagaaggcaggcagagaaaataacaaggataaagacactgaagtaaaatcatgctttctatatttcaaaacagcagcaaggacactagtgtgacagagaaggartgaccaatgggaggctgcagattttgtcagagatattttcaaggctcaggatcatacagggacttgtaagcctggaaagcactttgaattttattcagaatgagatgaaaagccattgaaaagtttttaagcagatgagtaaaataatccacct

SEQ ID NO: 243491 - DNA, 309 bp, Homo sapiens
aaaaatgactaaggggaatgaggagatgagtcatatggaatgcccaagacacagaaggcaggcagagaaaataacaaggataaagacactgaagtaaaatcatgctttctatatttcaaaacagcagcaaggacactagtgtgacagagaaggaatgaccaatgggaggctgsagattttgtcagagatattttcaaggctcaggatcatacagggacttgtaagcctggaaagcactttgaattttattcagaatgagatgaaaagccattgaaaagtttttaagcagatgagtaaaataatccacct

SEQ ID NO: 243492 - DNA, 523 bp, Homo sapiens
agccaagaactattgctaagataaaaaagattttacgatgtcagtcactagaaaagtatgccaattttaaatatgtataaatataaaatatcccttcaagttatttaatacagaaactgatataactaaaagaaaaatggactaatctacaatatagattttaacatacctttcaattaccgatggaaccaasagaaaaaaatccataagagaaagggagattggatgaacacaatgaacaaacttgacataaactgacatatacagaacgtgacactcaacaactactgaatacacatccttttccagtgcacgtatcatatttaccaacatagattatatgtcggaatttaaagggactcatcagagtattcagtcatgggattttgcctaaacttgtctggccttcaacagggttcaaatacagttaaattcttatttcatctaaagagtcctatccttttttttggaaattttaccgcaacaatctaaatttgcataacaactgaacccagcccttgga

SEQ ID NO: 243493 - DNA, 423 bp, Homo sapiens
ctgacacatggcaaatcccttcacaccggttcacagtactaagtaactccttgcttgtagaaaacattattaktatcattattatttttgagatggaatttgactcttgtagcccaggctggagtgcgatggtgtgatctcggctcactgcaatgtctgcctcccatgttcaaaggattctcctgcctcagcctcccaagcagctgggattactggcacacaccacgatggcctgctaattttttgtatttttgtagagacgtggattcaccatgttggccaggctggtttcgaactcctgacctcaggtgatccacttgcctcgaccttcaaaagtgttgggtttacaggcaggagccaccacacccagactagaaaacattatccaacagcaaacagtagcagtatgcttgggggttttag

SEQ ID NO: 243494 - DNA, 567 bp, Homo sapiens
aactaattttaggccaattgtataagatgaattgaagtgaagatagagtggggagggaggaggctcttgagaggcagtggcaattccastaaggggttttctaagagatggtcttaggtattagattgcatgtgccaagattagaatagtggtaatggtgacggaaaagaaaagcatgctactagtatcagatgtttccacatgtttgtttctcacagctatttttggtttggttttatcttctctggtgtgttcttcctttaaaggccagataatgttaaatttacatctatattgaataaaccacaagaaatttgaagtaagaaatgtcatcccatcagcctgggttctgctttgaagagccgtttagtcaaaaaagaaaaaaagaaatcctaaacttcctctgagatttgatcctcaaatcttactcttcccaccaaagaaaaataagttaaaaagggaggaaaattatcaacgaatgctttctgcaaaccaccaatgcccaaacagacaggagaagataagcaaggtcaagagagaaaagcctcaaataagagtagtcatatg

SEQ ID NO: 243495 - DNA, 603 bp, Homo sapiens
acttgaccaaaattagcaatggggaaggactccctattcaataaatggtgctgagatagctgtstaaccatatgcagaagaatgaaactgggaccctacctttcactataaaaattaactgaagataaattaaagatgtaaatgtaagacctcaaactataacaaatcctagaagaaaccctaggaaatactcttctcagcatcaaccttggcaaagtgtttacggctaaatcctcaaaagcaatcacaacaaaaacaaaaattgacaaattggctgttcacaagctctttagctaactaagagatgtttagcttactaagctaaagagcttctgcaaagcaaaataaacgatcaacagagtaaacagaccacctacagaatgggagacaatatttgcaaactatgcatttgacaaaggtctaatatccagactctataagaaacttaaataactccacaggcaaagaataaaaaaccctatcaaaagcgggcaaacacatgaacagacacttctcagaagaagacatgcaagtggctaatgaaaatttaaaaatgctcaacatcattaatcatcagagaaatataaatcagaacaacaagat

SEQ ID NO: 243496 - DNA, 504 bp, Homo sapiens
agtttgtaagaaaaacatgaatattaacagtgtcagaaagtttttaatttaatttaaatttaatagaaaacaagcaagagagccaacttgtgcatatttgctgtcactgaagaagagaatcagataaatggaatataaaatcaatgtttaaaatgattatttataaatcctttctgaaaataagaaaatgttatgtatatacactttaggacactgagtaacaaggaaaaaaaaattaacacagccatcaacaccaaagcacaagctagtaaagtttctmagcttcaaaaataaagcaaaatcctttggatatcctaacaaaatatggggaaagaaactttgaaaactgacaaataaaaaaatctataaatttatgaaatccacttctatctgttccatcactgatagattcactgttgcatctatcagtgtatatgtgtcatgtgtatgtgatatttcaccacaaaacatgtgaaagagctctaatcaattggcttaaagaaa

SEQ ID NO: 243497 - DNA, 378 bp, Homo sapiens
attccattgtatgtagagaccacattttccttatccaatgctcagttgatggacacttgagttgtttcacctcttggcttttgtgaattatgctgctatgaacatggktgtacaaatatatcttcaagacacagctttcaattatttgtagtacatacctagtagtggaatttgcggctcctggggtaattatattttaattttttgaggaatcaccatactgttttccacagtggttgcaccattttatattcacaccaacagtgcacaagggttccattttctccacatcttcatcaacacttacaattttctgggttttgtgtgtgtgtgtgtgatactagctatcctaatagcatggtgtaaggtaatattacc

SEQ ID NO: 243498 - DNA, 409 bp, Homo sapiens
gaaacactgtcatttggaatacaattcacactttgcattttaactgtgttgaattgtacagattctctgtaatgctgcttttctcacagggcataaaacattttggttcttaggcacttagtgaggtacactgcttgagatgtacagatagctttcattagygctaatgggagttatgcttctgcaccaggagagaatagagcctgcagattttaaattatgcttgatgcaaatcttccagatggaataaattatgagagatgcttaggggtaaaaggtctaaatatcccctaaagctatagtttaatagcaaagcaatacttttgagtaatgaaagtagagtcaacagtaatggctttgctgctatcactgttaagtagctgatgttgactcttaaaaaaattcttat

SEQ ID NO: 243499 - DNA, 660 bp, Homo sapiens
gcagcttgtacataattaccgccctagatctcagatattccacagattatttggacagtacctaacaccacaattcattgggaggcaattgggttgggaaatactgtctataacactaagtaatttcaatcaaatgtcagttgatggttgatatattctctacccacaatgaacaagtcctggggtacaccaaagcaagactttgaaaggtgaagttgctattgtttttcataatctgatatggagtatttctcttgctgactgcttgtgagtttgtcttctttataaattatcatgcttcatcttgtcagtgattatgtcctagacctcttgagatatgaggctaagcatgccctggggaacaaactagaatgaaaaatctggtggctgggtgtgatgcttaattttatgtgacaacttgactgggccacaaggtgcccagacatttgatcaacattattctgcttgtatctgtaagggtgtttctggatgarattaacattttaatcagtagactgaataaagcgtgttgctctccccagtgtaagtggggagagcaatctattgcaaacctaaatagattaaaaggcagagtaagaaaggattctttttctgtgcttgaccatcttcaagctgggacattgggcttctcctgccttt

SEQ ID NO: 243500 - DNA, 627 bp, Homo sapiens
tagtcaataagcttttgtgttacaagcccaatacctaccaatgatttgtaataacctactaatgatttatttttggctgctataccctaaggcrttgccatacagaatggcagtgtcttaataccactcatccagaatggtcctgcgccaggtgatgaaatttgtcatacagcaaacatcaggtagatctaaagcagaaaacttagggttgtataagtggcatgcttttcttataagatctgaaaaagcgaaacagcctctgaacatataccatctgctctctagctcttttccaacctataactctaggaaagttctatggcaaagtctagcttctgtgaagggccccagttgtagtctctttggggaaaagaacctgcatttgtaggtataatggacatagggactgttaacagcaattacctctacgaagtcagaccagatgagagaaaacagtacagtcaagaaaacttttctaatatgcactaatctgcatcatttatgatatgatattttagctgaaacaaattcagaaaccaataagtgtaagatattacctctttaaaatgtgacatttccttattcatgactaagtaaaactataccttataggtgacttgttttttc

SEQ ID NO: 243501 - DNA, 627 bp, Homo sapiens
tagtcaataagcttttgtgttacaagcccaatacctaccaatgatttgtaataacctactaatgatttatttttggctgctataccctaaggcattgccatacagaatggcagtgtcttaataccactcatccagaatggtcctgcgccaggtgatgaaatttgtcatacagcaaacatcaggtagatctaaagcagaaaacttagggttgtataagtggcatgcttttcttataagatctgaaaawgcgaaacagcctctgaacatataccatctgctctctagctcttttccaacctataactctaggaaagttctatggcaaagtctagcttctgtgaagggccccagttgtagtctctttggggaaaagaacctgcatttgtaggtataatggacatagggactgttaacagcaattacctctacgaagtcagaccagatgagagaaaacagtacagtcaagaaaacttttctaatatgcactaatctgcatcatttatgatatgatattttagctgaaacaaattcagaaaccaataagtgtaagatattacctctttaaaatgtgacatttccttattcatgactaagtaaaactataccttataggtgacttgttttttc

SEQ ID NO: 243502 - DNA, 627 bp, Homo sapiens
tagtcaataagcttttgtgttacaagcccaatacctaccaatgatttgtaataacctactaatgatttatttttggctgctataccctaaggcattgccatacagaatggcagtgtcttaataccactcatccagaatggtcctgcgccaggtgatgaaatttgtcatacagcaaacatcaggtagatctaaagcagaaaacttagggttgtataagtggcatgcttttcttataagatctgaaaaagcgaaacagcctctgaacatataccatctgctctctagctcttttccaacctataactctaggaaagttctatggcaaagtctagcttctgtgaagggccccagttgtagtctctttggggaaaagaacctgcatttgtaggtataatggacatagggactgttaacagcaattacctctacgaagtcagaccagatgagagaaaacagtacagtcaagaaaacttttctaatatgcacwaatctgcatcatttatgatatgatattttagctgaaacaaattcagaaaccaataagtgtaagatattacctctttaaaatgtgacatttccttattcatgactaagtaaaactataccttataggtgacttgttttttc

SEQ ID NO: 243503 - DNA, 648 bp, Homo sapiens
taaataataacatacttaagatagtaggttttaaattcaacagcaacaactttttaaaaataagggactactcttcaagcacatttagacagaggtgtgtgaagtccagataagagataggaactctagcgccatctagcaaacatgctggggaacatcaccaactttctctactaagacctaacagtgaggttaagtgtccttcagttctatgttgatagttggccttggaaatcccatgtaagcattccttagcctttccagaattctgaacttgctatatagttctttaaaaggcaaaggagaaaacagtttacaactgcatcaggcctggttggtaaagaaatgtgtcttagcaaataaacgccagctaactataaatctgataatacataaatgtcttcgccctcgtaaaagtggtggtatcattccttcttgataaagacataattatgctaaatttgctaatttgtaatctaagctatttttagtaattaaagtaacgaagaaaagaaatattttcctttgccagcttcccatacagcacacacacacacacacacacacacacacacacayacatacatacatacacacacacactttaatatttttaatacatactcatatatattgtttgtcaagcta

SEQ ID NO: 243504 - DNA, 563 bp, Homo sapiens
tgcatcttgattggagtcttggtcacccaaatgtaagcatttgtcaaagctgagggaatgcgtgcctaaaatggatggctttttctctaggaaatkttgcttcattaatgtaaatgaatattgaacactactgagatacacacagaagtgtttaggtgtgaagtatactgacgtctgcacttttatcttgaaacgcattgaaaagtaaaatggatacagggatgggcagaggatagatatgggatgaaggaaacacaggaacatgtgaattttagattttttttttttttgagacagggtattgctctgttgcccaggctggagtgcagtggcgtgatcggctcactgcagcctcaacttcctcctggttcaagtgatcctcctgcctcagcatcctgaatacctgggaatacaggcacacaccaccatgcccagctaatttttaatttttttttgtacagacagggtctcactgtgttgcccagactggtctcaaactcctggccttaagtgatccttctgcctcagcctcccaaagtgctgggattacaagagtgagccac

SEQ ID NO: 243505 - DNA, 549 bp, Homo sapiens
tttttgttgctctgaggaagatttacatcatcctcagtaaaatcctgccagaaaggagggaggtggacagtcagcagcatggggtgggcacctcaccmgtcagtcttcaaaggggatgaagcaggagggtaaggatcagagcaggtggtgaaatggtttgactgtgtcctcatctaaatctcaccttgaattgtaataattccccatgtgtcaaggacagaaccaggtggaaataattgaataatgggggtggtttccaccatactgttctcatggcagtgaataagtctcatgaggtctgacggttttttaaatgggagtttccctgcacaaactctctcttgcctgctgccatgtaagatgtgcctttgctctttcttcgtcttcctccgtgattgtgaggcctccccagtcacgtggaactgtgagtccattaaacctcttccctttataaattgcccagtttctggtatgtctttattagcagcattagaacagaataatacaggtgggcaccggggcaggagtaggcaggcaaagccccaaagt

SEQ ID NO: 243506 - DNA, 549 bp, Homo sapiens
tttttgttgctctgaggaagatttacatcatcctcagtaaaatcctgccagaaaggagggaggtggacagtcagcagcatggggtgggcacctcacccgtcagtcttcaaaggggatgaagcaggagggtaaggatcagagcaggtggtgaaatggtttgactgtgtcctcatctaaatctcaccttgaattgtaataattccccatgtgtcaaggacagaaccaggtggaaataattgaataatgggggtggtttccaccatactgttctcatggcagtgaataagtctcatgaggtctgacggttttttaaatgggagtttccctgcacaaactctctcttgcctgctgccatgtaagatgtgcctttgctctttcttcgtcttcctccgtgattgtgaggcctccccagtsacgtggaactgtgagtccattaaacctcttccctttataaattgcccagtttctggtatgtctttattagcagcattagaacagaataatacaggtgggcaccggggcaggagtaggcaggcaaagccccaaagt

SEQ ID NO: 243507 - DNA, 609 bp, Homo sapiens
aaagcttaaaaatggcagagtattaaaacctcatcttgaggctctgctacatggtaattaaatttctctggagttagcctgtgactcaactaaaccaaggacacctacctaattctttcaggtgttccattcttacagagcatgatttcctgctgtaccttcaatatccactgaaagacgcagtcatttacttaaagcaaggtcggaaaattagaattgaatacttaaggggtaaagaataagtgtttaacagttatcaaatttatttccagagttctaatcctctttatattcacttttattttatttttgagaaagggtctcgctccgtcacccaggctggagtgcagtggcatgatctcagctcactgcaacctctgcctccygggttcaggttttttttccacctcagcctccggagtagctggaactacaggcatgcaccaccaccacactcggctaattcttgtatttttagtagagacgggtttcaccattttgcccaggctggtcttgaactcctgggctcaactgatctgcctaccttggccgcccaaagtgctggggtttcaggcgtgagcaacggcaagcagctcctctttatattta

SEQ ID NO: 243508 - DNA, 609 bp, Homo sapiens
aaagcttaaaaatggcagagtattaaaacctcatcttgaggctctgctacatggtaattaaatttctctggagttagcctgtgactcaactaaaccaaggacacctacctaattctttcaggtgttccattcttacagagcatgatttcctgctgtaccttcaatatccactgaaagacgcagtcatttacttaaagcaaggtcggaaaattagaattgaatacttaaggggtaaagaataagtgtttaacagttatcaaatttatttccagagttctaatcctctttatattcacttttattttatttttgagaaagggtctcgctccgtcacccaggctggagtgcagtggcatgatctcagctcactgcaacctctgcctcctgggttcaggttttttttccacctcagcctccggagtagctggaactacaggcatgcaccaccaccacactcggctaattcttgtatttttagtagagacgggtttcaccattttgcccaggctggtcttgaactcctgggctcaactgatctgcctaccttggccgcccaaagtgctggggttwcaggcgtgagcaacggcaagcagctcctctttatattta

SEQ ID NO: 243509 - DNA, 331 bp, Homo sapiens
aagcttgacagactgaaatggcaccagyggatttctcagcagcaaacccacggggaaaccgtgtggacttttcagaagaggccgctgctggaatccccaccacatctctccttggtctaattacaggagatgttcaagggatctaatgggagctttctttgtaaatcaggttgcagctccagagatgctgagctgagtgtgctgcgtggttaattgtggctaacaggaagagggtggacatatgccaatatttatgcaaatagcagagctgctcggggactgtgccctgggggacttcagctcagcctggccaacatccaaagacttcagg

SEQ ID NO: 243510 - DNA, 429 bp, Homo sapiens
atgaaagcaaaatgatggcctacaaaatgtagtcatttgtctttattaaagatattcatgcctattgcaataaagcacaattttatgcatgttgctatgagtatgactaggtagattctcatttttctcacaatctctgaggtccattataaaaaaaaaaaagtgaagaaccactgcacttctagcgttttataacttttattatcaaaatttccaaaaggaagtatttgcagagcacattttagactatctaaatactatgcactttgaaacaaaagatgacaaagttgccgctgtcctcagagaacgaaggagtgatgcaytgggtttggagtgaatttatgcaagaggcccaggagtccttgattaaaagtgccgctcagccagcactgccctaagtactcatcacctttcctagtgagcgtgttc

SEQ ID NO: 243511 - DNA, 240 bp, Homo sapiens
  misc_feature (1)...(240): n = A,T,C or G
nnnnnnnncttgtgttttttcagggctgaagttttccatgtcttcagccagctaagagccaatcttggctccgagcggctgcctgcaggtccttgccccagggcccccacagtggggcagcttcttcaagccagtgagagaatctccccctggctaaggcagagtcttagacaacacagkgcaacatcgccacgggtgtgacatgggccccgtccacgctcaaggagaggaccacccagg

SEQ ID NO: 243512 - DNA, 526 bp, Homo sapiens
gtgtgcatgaaagcatgtctgtacgtgcgtgtgtatgtttggcaccaatgggaaatacagagacgtggaatgccagctctgccctcaacctcttcccagacgggtgggagatgatattctgtggactgtaattcaaagaagacagactaataacaaagagctatggagaccaggggaggggcaagaattcagatctggagtggagaccaggaaaatggtcctgggaggccagactcttggagaaatgtggacctggcaataagaatttatgagctctttctcmgtcactgctgagtgtatatcttccaaggtattttccagtgggcataaattacctttcgattgcagtattcgccacctccactcatcccccaacaccaggtcttatgtggactgttagggaagcctctaacttgtaccctgcctactcaccctttctgcaccacctcacctcatcgtcacagctgtgaggaatccaacagacacacacactggaccttgtccttgtctgaaaacttttggctgc

SEQ ID NO: 243513 - DNA, 585 bp, Homo sapiens
  misc_feature (1)...(585): n = A,T,C or G
ccatctagtggtcactgagaaatttttgtttcagaaaattgttaactttagaaattgttaataacaaagtagtaggaataacaataactgctgttgctgaagagacttattgaacacctacaattcttcagagctctatgttcagcattttatgttcattatcttgttttatctatacaacaacctaaataggtaccgcagcgcagttatgcaaatgaagaaaccaataacttagtggtattaaatgacatgccatattcagagatctagtaaatatctgactggttttcaaacccaattagtctagtccattgccttcacactcatccagaattntatgcctctactaaacctcggttgtgactatagaatatggttaatagactaacacacatgcacacacacacacactcacacacaaatgttaatgtgtttgaagggaggtgcaacctcacatttccactctacaaccaactcttatcatgttccaattcccaggcttctccttcaagcaagattttaattgcatggggatgtttacatattcraaattcacatatggtatctctaaaatgtgatggattc

SEQ ID NO: 243514 - DNA, 548 bp, Homo sapiens
aattcttggcagttgcatagaaaattggcaaaagaaggggaaaaaaggcagtaagtttgcaaagggtttgagagtagtttgtgcctgcttaagaagatggcagcatcaatcacttgtayattattttgattgccaagacctcctttttatgattcaagcctttctgtcttcttaaaaggcaagagtaggaaatgtgccttaagtctgcataaaatgtgcacattaacctggatttatgtatatctcaaagaccccttcccccaacatacatttttgctgtcttgttccatttctatcccctcttaccacccatctgtaacttctgctcaaaggatgaaaaggttattgtgttagtctagtcttacattgctataaaggaatacctgagactggataattaataaagaaaattggtttattttggcttaagtttctgtaggctgtaaaagaagtgtggtgccagcatctgcttctggtgaggcctcaggaagcttacaatcatggtggaaggcaaaggggagccagcctgtcatatggtgagtgcagga

SEQ ID NO: 243515 - DNA, 507 bp, Homo sapiens
cccttgccttgacccatgtactgccatcacaaaatgggcagagtggggtagggcacaggccttcgcctggaggagaattctsaactcgggggaaagggagccctaaatggcaatttgtttcaccctggcatttctgaagttcaaccatactaagactttttgttctttcacattcttatgatctctttggtagtttcgtttcctctgcttatctttttaaaatcagtgagtgttggcttcttttttctacacataggtctcctggacaatttcatctacttaaaggacattatttactccaagttgatagcgctcaaatctttgtttcctacacaaacctgtcccctgagcttcagatctgaaggtccaaatgcttcatgggtgtcccttctgaagatctcacaggccctcacattcaccacctccaacactaaactctttttccccaaatctgatgctcttctctgattcccactatcactgtaagccaagaatctgggcatcaaa

SEQ ID NO: 243516 - DNA, 411 bp, Homo sapiens
ctcgggagcttattgcacaagatatattcaatctattccctcactgggcccccagagaagcaagaagtaggaagaagttttgacagggaggcaggagacactggtcagttgaagggaaacgctacatcttctctggttgaggggcttggtaacagcaggcaaaatgacgaacccatcagaccgtgtcttgcctgccaactcgatggccgagagccgtgaaggggactttggctgcacagtaatggaactgaggaagctcatggagctgcgttcragggatgcactgacccagattaatgtccactatggaggtgtacagaatctctgcagtagactgaaaacctcccctgtggaaggtaaaggccatatcaggggtggagagttggaggaaggtggctagtgtttcaaaat

SEQ ID NO: 243517 - DNA, 608 bp, Homo sapiens
tatttgcataaaattctagaaaatgccagtgaatctaaaattacagaaagtagataatcagtgcttgccagcagatgaggtaaggagaggaggtgtggcagggaggagttataaaaagacaagaagaaactctagggagtgatggattgtcttaatgtgtggtgacagtttcaaaggtgtatacttttgtgaaaatttatcaaaatgcataccttaaatatatgcattttattgtatataagttataatgccaataaagttctaaagagagaaaaataaataaatgcagtttcaaggaaagaaataaaatagctgtaaatctgacatatcagttattcatcatcactartcattaggtaagtgcaaattgaaaccacagtgagatgccacttcatacccacagatgaaggatggctattattaaaaaatgaaatataagaaatatcagtgaggatgtggagaaattgctggtggaatgtaaaatggtacagctgctatggaaaacagtatggtggttcctcaacaaattaagcatagattaccatatgatctactaattccacttctggatatatacacaaaagaactgaaagcagggacttgaacaa

SEQ ID NO: 243518 - DNA, 608 bp, Homo sapiens
tatttgcataaaattctagaaaatgccagtgaatctaaaattacagaaagtagataatcagtgcttgccagcagatgaggtaaggagaggaggtgtggcagggaggagttataaaaagacaagaagaaactctagggagtgatggattgtcttaatgtgtggtgacagtttcaaaggtgtatacttttgtgaaaatttatcaaaatgcataccttaaatatatgcattttattgtatataagttataatgccaataaagttctaaagagagaaaaataaataaatgcagtttcaaggaaagaaataaaatagctgtaaatctgacatatcagttattcatcatcactaatcattaggtaagtgcaaattgaaaccacagtgagatrccacttcatacccacagatgaaggatggctattattaaaaaatgaaatataagaaatatcagtgaggatgtggagaaattgctggtggaatgtaaaatggtacagctgctatggaaaacagtatggtggttcctcaacaaattaagcatagattaccatatgatctactaattccacttctggatatatacacaaaagaactgaaagcagggacttgaacaa

SEQ ID NO: 243519 - DNA, 608 bp, Homo sapiens
tatttgcataaaattctagaaaatgccagtgaatctaaaattacagaaagtagataatcagtgcttgccagcagatgaggtaaggagaggaggtgtggcagggaggagttataaaaagacaagaagaaactctagggagtgatggattgtcttaatgtgtggtgacagtttcaaaggtgtatacttttgtgaaaatttatcaaaatgcataccttaaatatatgcattttattgtatataagttataatgccaataaagttctaaagagagaaaaataaataaatgcagtttcaaggaaagaaataaaatagctgtaaatctgacatatcagttattcatcatcactaatcattaggtaagtgcaaattgaaaccacagtgagatgmcacttcatacccacagatgaaggatggctattattaaaaaatgaaatataagaaatatcagtgaggatgtggagaaattgctggtggaatgtaaaatggtacagctgctatggaaaacagtatggtggttcctcaacaaattaagcatagattaccatatgatctactaattccacttctggatatatacacaaaagaactgaaagcagggacttgaacaa

SEQ ID NO: 243520 - DNA, 608 bp, Homo sapiens
tatttgcataaaattctagaaaatgccagtgaatctaaaattacagaaagtagataatcagtgcttgccagcagatgaggtaaggagaggaggtgtggcagggaggagttataaaaagacaagaagaaactctagggagtgatggattgtcttaatgtgtggtgacagtttcaaaggtgtatacttttgtgaaaatttatcaaaatgcataccttaaatatatgcattttattgtatataagttataatgccaataaagttctaaagagagaaaaataaataaatgcagtttcaaggaaagaaataaaatagctgtaaatctgacatatcagttattcatcatcactaatcattaggtaagtgcaaattgaaaccacagtgagatgccacttcatacccayagatgaaggatggctattattaaaaaatgaaatataagaaatatcagtgaggatgtggagaaattgctggtggaatgtaaaatggtacagctgctatggaaaacagtatggtggttcctcaacaaattaagcatagattaccatatgatctactaattccacttctggatatatacacaaaagaactgaaagcagggacttgaacaa

SEQ ID NO: 243521 - DNA, 433 bp, Homo sapiens
ggaaaagaaacaaatagtccaaatgtctttagacagtttatgcaggggcttaatgtttgcatcagtttcccttgttctgtaagtcacatrgggttggtgcacacatgggcccaggaaaatatggtacacataggatatgtgtcactgctgagaaaccctgagtttaaaaaccctcaagctggtaaggggctgctggtaaacctgtccaatctttcctctctaggaaaacattatctttattatcttggaatgtaagcaaatcccccatgaagaaggcagggagactttattatcctgaagtgactaaataaatctgctctgtgaccaggagagtgacattctctctagcttctatagctgtctgttatgcaaatatccttgaacaaaattgttattgagcaatcattgatgtacaatgcactgggtttaacac

SEQ ID NO: 243522 - DNA, 433 bp, Homo sapiens
ggaaaagaaacaaatagtccaaatgtctttagacagtttatgcaggggcttaatgtttgcatcagtttcccttgttctgtaagtcacatggggttggtgcacacatgggcccaggaaaatatkgtacacataggatatgtgtcactgctgagaaaccctgagtttaaaaaccctcaagctggtaaggggctgctggtaaacctgtccaatctttcctctctaggaaaacattatctttattatcttggaatgtaagcaaatcccccatgaagaaggcagggagactttattatcctgaagtgactaaataaatctgctctgtgaccaggagagtgacattctctctagcttctatagctgtctgttatgcaaatatccttgaacaaaattgttattgagcaatcattgatgtacaatgcactgggtttaacac

SEQ ID NO: 243523 - DNA, 457 bp, Homo sapiens
ggaaaagaaacaaatagtccaaatgtctttagacagtttatgcaggggcttaatgtttgcatcagtttcccttgttctgtaagtcacatggggttggtgcacacatgggcccaggaaaatatggtacacataggatatgtgtcactgctgagaaaccctgagtttaaaaaccctcaagctggtaaggggctgctggtaaacctgtccaatctttcctctctaggaaaacattatctttattaycttggaatgtaagcaaatcccccatgaagaaggcagggagactttattatcctgaagtgactaaataaatctgctctgtgaccaggagagtgacattctctctagcttctatagctgtctgttatgcaaatatccttgaacaaaattgttattgagcaatcattgatgtacaatgcactgggtttaacactgaggaagaaatgatagagaccat

SEQ ID NO: 243524 - DNA, 457 bp, Homo sapiens
ggaaaagaaacaaatagtccaaatgtctttagacagtttatgcaggggcttaatgtttgcatcagtttcccttgttctgtaagtcacatggggttggtgcacacatgggcccaggaaaatatggtacacataggatatgtgtcactgctgagaaaccctgagtttaaaaaccctcaagctggtaaggggctgctggtaaacctgtccaatctttcctctctaggaaaacattatctttattatcttggaatgtaagcaaatcccccatgaagaaggcagggagactttattatcctgaagtgactaaataaatctgctctstgaccaggagagtgacattctctctagcttctatagctgtctgttatgcaaatatccttgaacaaaattgttattgagcaatcattgatgtacaatgcactgggtttaacactgaggaagaaatgatagagaccat

SEQ ID NO: 243525 - DNA, 433 bp, Homo sapiens
ggaaaagaaacaaatagtccaaatgtctttagacagtttatgcaggggcttaatgtttgcatcagtttcccttgttctgtaagtcacatggggttggtgcacacatgggcccaggaaaatatggtacacataggatatgtgtcactgctgagaaaccctgagtttaaaaaccctcaagctggtaaggggctgctggtaaacctgtccaatctttcctctctaggaaaacattatctttattatcttggaatgtaagcaaatcccccatgaagaaggcagggagactttattatcctgaagtgactaaataaatctgctctgtgaccaggagagtgacattctctctagcttctatagctgtctgttatgcaaatatccttgaacaaaattgttattgagcaatcattgatgtayaatgcactgggtttaacac

SEQ ID NO: 243526 - DNA, 614 bp, Homo sapiens
agagtgaatatagttaacaataatctatggaatatttcaaaatagaagagaataatttgaatgttcctagcataaagcaaagataaatatttcatttaaatatcaaaaaattggataycccagtctccatgatttgatctttacacattatatgaatgtataaaattacatgtactcagaaaatagggacatctattatatatcaataaaaaaacatataaaacattaaaaaagttgaagtcagaagtaaaagtagaatagagtatactagaggctgagaagggtgtggggaataggcagagactttttaaagacacaaaagtacagctagaaaggaggaataagttctagtgttctatagcactgtaggatgactatagttaataatatatactttcaaacagctagaagaaagattctgaatatttccaacacaaagaagtggcaaatgtttcacaggatggatatgctaattattctgatatcattactatacattgtatgtattgaaacatcactatgtaccccataaatatgtataattattatgtgtcaatcacaaaccatttttaaaggaaaaaataaaatatgaatttacatttactatggttaac

SEQ ID NO: 243527 - DNA, 614 bp, Homo sapiens
agagtgaatatagttaacaataatctatggaatatttcaaaatagaagagaataatttgaatgttcctagcataaagcaaagataaatatttcatttaaatatcaaaaaattggataccccagtctccatgatttgatctttacacattatatgaatgtataaaattacatgtactcagaaaatagggacatctattatatatcaataaaaaaacatataaaacattwaaaaagttgaagtcagaagtaaaagtagaatagagtatactagaggctgagaagggtgtggggaataggcagagactttttaaagacacaaaagtacagctagaaaggaggaataagttctagtgttctatagcactgtaggatgactatagttaataatatatactttcaaacagctagaagaaagattctgaatatttccaacacaaagaagtggcaaatgtttcacaggatggatatgctaattattctgatatcattactatacattgtatgtattgaaacatcactatgtaccccataaatatgtataattattatgtgtcaatcacaaaccatttttaaaggaaaaaataaaatatgaatttacatttactatggttaac

SEQ ID NO: 243528 - DNA, 569 bp, Homo sapiens
aagctttaggaatatgttttacttcttgtacatagaaatctatttctgtctgcatattttgactgatgtatgagtacatatgatctgtgagcatagttctcttttatcctctcattcttatccgtctacttcttgatacrtgtttaatttcaatttggtatacatacatccactgattaacttgatacatcataaatattgtaggtattggtgatattaaaataaatatagcatgattcctgtgtgcatatataatttgtaaacactgtaggagtgaaatgaattttttcttttcccctctgaaggtttcaatctgctgaaataaactgacaatacattaataggcaaaaaggcatacaaatttgttaatgtgcaagtgtgcatgggagccatgtaagatatgagactcaaagaagggaacagagatggttgaaggttaaaatagcatgaaggaataggggcttcagacttttggtggactttacaggtggctgtaagttatgggagggaaaggggaggaatctcatggtgaccaaagtttatcttactacacagataaaagtctctta

SEQ ID NO: 243529 - DNA, 541 bp, Homo sapiens
tttctgtctactgctctgtctggataatgggtatacctgctgtgtgtgagtggagagaggagcctattgtattatttctttgctttgtgattagcaaattactttttgcttaaactgggtcatcccatctcttttttcttgcctgagctatttatctgcctctatcatttcctagatgttgatatcaatgtcactttaccttagatggtgtcccctgcatccttagagttcctgctgtcttctctttgattatttgacatccactctgcagaatggcttcactctsctcctgctgtccatcctcatcatataagcaatatggttcagctgaacttccatgagcctttcccactgggcttcagagaggaagcagaaaaatttcctatgggattgtcagagacctttagaaggtacctccatttactcctgatagcacaagacagagcctcaaggcaaaacatacttattgctgtcagttttactaagtagattttatgagatgacattgacttcaaaagtaatcatgaaggagggaaaagac

SEQ ID NO: 243530 - DNA, 409 bp, Homo sapiens
atctcttgtcacagatgatataattctacacctaacaagccccacagtctttgtccaaaggctcctagaactgataaacaacttcagtaaggtttcaagatagaaaattgacatacaaaaatcagtakcatatctataacaccaacaacgtccaagctgagagccaaatcaagaatgcagtcccattcacaataaccacaaaaagaatcagatacctaggaatacagctaaccagggaggtgaaagatcaatgcaacaagaattacaaaacaccactgaaagaaatcagagatgacactagcaaatggaagaacattccatgctcacggattggaagaatcaatattgttaaaatggccatactgccccaaacaattaactgatttgatgctattcttatcaaaaggcc

SEQ ID NO: 243531 - DNA, 409 bp, Homo sapiens
atctcttgtcacagatgatataattctacacctaacaagccccacagtctttgtccaaaggctcctagaactgataaacaacttcagtaaggtttcaagatagaaaattgacatacaaaaatcagtatcatatctataacaccaacaacrtccaagctgagagccaaatcaagaatgcagtcccattcacaataaccacaaaaagaatcagatacctaggaatacagctaaccagggaggtgaaagatcaatgcaacaagaattacaaaacaccactgaaagaaatcagagatgacactagcaaatggaagaacattccatgctcacggattggaagaatcaatattgttaaaatggccatactgccccaaacaattaactgatttgatgctattcttatcaaaaggcc

SEQ ID NO: 243532 - DNA, 409 bp, Homo sapiens
atctcttgtcacagatgatataattctacacctaacaagccccacagtctttgtccaaaggctcctagaactgataaacaacttcagtaaggtttcaagatagaaaattgacatacaaaaatcagtatcatatctataacaccaacaacgtccaagctgagagccaaatcaagaatgcagtcccattcacaataaccacaaaaagaatcagatacctaggaatacagctaaccagggaggtgaaagatcaatrcaacaagaattacaaaacaccactgaaagaaatcagagatgacactagcaaatggaagaacattccatgctcacggattggaagaatcaatattgttaaaatggccatactgccccaaacaattaactgatttgatgctattcttatcaaaaggcc

SEQ ID NO: 243533 - DNA, 409 bp, Homo sapiens
atctcttgtcacagatgatataattctacacctaacaagccccacagtctttgtccaaaggctcctagaactgataaacaacttcagtaaggtttcaagatagaaaattgacatacaaaaatcagtatcatatctataacaccaacaacgtccaagctgagagccaaatcaagaatgcagtcccattcacaataaccacaaaaagaatcagatacctaggaatacagctaaccagggaggtgaaagatcaatgcaacaagaattacaaaacaccactgaaagaaatcagagatgacactagcaaatggaaraacattccatgctcacggattggaagaatcaatattgttaaaatggccatactgccccaaacaattaactgatttgatgctattcttatcaaaaggcc

SEQ ID NO: 243534 - DNA, 572 bp, Homo sapiens
taaaatatctgcatgcttaaatcaaatatattctacaacaaacatattcccactatatgttactagtatctgggaagaytgatgcctatctaccctttgctcaggtaaaacttcgaaaagagcctccttttaaatttaaagagctcctaacacattgttcatacttttaacctgcagaacttagggcaatcctagccttcttctgctcccaaaacttttgaaacaaaacatcaaatagaaaaacacaacagttctcacattcctttcagggtaacagagtggctgagccttgttattactccccagataatactagcttctgtcctcccaaagccacttaatcctgctcaattcaaaaatcaagtcctctgggagagtgagcagagcctgtgagctcattctgaaacctgtcattgtcttttccagccctgcctcccaacaacctctgctgactccagtgcgtggttggatgatacatgttttgatagctggatctctgagtcattttttttttcagaaatcctcttaacaggcttcctaaggatgccatggagaaaagtaagcaagtagaa

SEQ ID NO: 243535 - DNA, 572 bp, Homo sapiens
acctggcacatttcctatatgttataagttgaggtggaaatttaggagcttttaatcattctctttataaaataatgtcatatattgttataaataatacatataattttaagatagtaaaatatctgcatgcttaaatcaaatatattctacaacaaacatattcccactatatgttactagtatctgggaagactgatgcctatctaccctttgctcaggtaaaacttcgaaaagagcctccttttaaatttaaagagctcctaacacattgttcatacttttaacctgcagaacttagggcaatcctagccttcttctgctcccaaaacttwtgaaacaaaacatcaaatagaaaaacacaacagttctcacattcctttcagggtaacagagtggctgagccttgttattactccccagataatactagcttctgtcctcccaaagccacttaatcctgctcaattcaaaaatcaagtcctctgggagagtgagcagagcctgtgagctcattctgaaacctgtcattgtcttttccagccctgcctcccaacaacctctgctgactc

SEQ ID NO: 243536 - DNA, 299 bp, Homo sapiens
gaaattccacgctttattttgtggtcatatctaccacagctgaactgctatcccttctatagtatctaaccctttgaatacttttctttaaatgactctcattatgtccaatacctaggccaaatcaaccactgaagtgtataataattttcccacattttctgattggtgcattttactgtgacaaatattgcaaccagtattcagctgcagcaaccagtaatgtaacagtctttataccatgttccaaactaatcaagatgcttaatggyttttaaatacatgctgatgcaagatca

SEQ ID NO: 243537 - DNA, 626 bp, Homo sapiens
aatctcaaattgttaaccatctgcagggaatgagtggatctttttttttagaagccaagtagttaaaatggaaaaatgtgtttagtgtgaaaagaaactggagtgtttctatattagataagggaacagtccgtgaccacataatgtcaatgatgtgatcggaaattatgtggtcttttaatttgctttatttccctcagcagaatattaatttcaggtgagtaatttaaattgcattaacagcagcctccttaagatgacacttcatttagttttgaaagttgctgctgtttaagatatcccccagcctgccatttcacactggtgctaacttgtgccagattgtatattgtttctttcaaaataccatgggggtgtcaaatgctttattgcaaacctgctgctttatgggaatatgcaatgtaaataaaccagagagacacttctgtaaattgccctattttagatggaaaatgtttcaattagatgtatgaaatcarctgacagttttatgaaccaaaccattttgaaaatatccttcacatgcactaggtatcgtcatattttcagagaccatatgttgtaaagtagatccacaagatcttcaaggacaggcaaacttatac

SEQ ID NO: 243538 - DNA, 573 bp, Homo sapiens
  misc_feature (1)...(573): n = A,T,C or G
aagcttactaatatgggagcttgggataatgttatttaatagagaaaaggaacacncacaacagaagggagtaggtttacagggaaaaatagtgactttggtatttttctgcattggggatgcactgccaasaggacttccaaaaagaggggttttgtttgcaatttgaggttggaactgcagaggaggggaactgaatacaaattattaatctcatcaaatttttgagaggcaaagtctgagcttttgaggccagggtctttctttgaccttcaagtccctgcctgaccctagtgccttgtacactgtttggcacagagtaggcactcaatacacatttgttatttaattacctttctgtaggaattagcaaaataaataaataaataaagcactgagaataggaccttataaatataattgggcacgactatatttaagggacaggaatgaggttctaaaaaaaaaggagaatgagagaacatcaaaggagagggagagaccgaggaatgaaaatcatcttagaagcatagagagcacagtaatatgtagggaagaaaataaaagagaact

SEQ ID NO: 243539 - DNA, 573 bp, Homo sapiens
  misc_feature (1)...(573): n = A,T,C or G
aagcttactaatatgggagcttgggataatgttatttaatagagaaaaggaacacncacaacagaagggagtaggtttacagggaaaaatagtgactttggtatttttctgcattggggatgcactgccaacaggacttccaaaaagaggggttttgtttgcaatttgaggttggaactgcagaggaggggaactgaatacaaattattaatctcatcaaatttktgagaggcaaagtctgagcttttgaggccagggtctttctttgaccttcaagtccctgcctgaccctagtgccttgtacactgtttggcacagagtaggcactcaatacacatttgttatttaattacctttctgtaggaattagcaaaataaataaataaataaagcactgagaataggaccttataaatataattgggcacgactatatttaagggacaggaatgaggttctaaaaaaaaaggagaatgagagaacatcaaaggagagggagagaccgaggaatgaaaatcatcttagaagcatagagagcacagtaatatgtagggaagaaaataaaagagaact

SEQ ID NO: 243540 - DNA, 573 bp, Homo sapiens
  misc_feature (1)...(573): n = A,T,C or G
aagcttactaatatgggagcttgggataatgttatttaatagagaaaaggaacacncacaacagaagggagtaggtttacagggaaaaatagtgactttggtatttttctgcattggggatgcactgccaacaggacttccaaaaagaggggttttgtttgcaatttgaggttggaactgcagaggaggggaactgaatacaaattattaatctcatcaaatttttgagaggcaaagtctgagcttttgaggccagggtctttctttgaccttcaagtccctgcctgmccctagtgccttgtacactgtttggcacagagtaggcactcaatacacatttgttatttaattacctttctgtaggaattagcaaaataaataaataaataaagcactgagaataggaccttataaatataattgggcacgactatatttaagggacaggaatgaggttctaaaaaaaaaggagaatgagagaacatcaaaggagagggagagaccgaggaatgaaaatcatcttagaagcatagagagcacagtaatatgtagggaagaaaataaaagagaact

SEQ ID NO: 243541 - DNA, 639 bp, Homo sapiens
ttgccatccaagcagtgtcattttcaggtcacgttaggtggccagtctgagaatggcccagaaaccgagactttttgttccaagtgtgtcaagctcttaggagagtttgtctatcttagcctatttgggggaatctttgaaattgcttcttcactgaagaggctattggattgagtcattattggaataagcrcactgttggaaattctaattaatcagtggacaaaagatggatcctttaaattagaaagcttcctgaattaaaaaaaaaagaagaagaagaagaagaattttagagatcacttattctaaacaactgatgggaagattaaattagaagaaagacacgtaatagtacaatggctagcctttgaaattctcttgactaaattaaagagcaaaaatctgacctaaaacaaagttaaaatcctttgtattctcaaaccacctgctttagcttccccgtgggagtaacaataaaggtcactccactttgtgacataatagttaaaattctgtgctttcactgccatggcctgggttcaattcctgttcaggaaaccattccctcttgatttttgatatttgtgtggcttttaacttttcagggtacctatttgttcttgatccttttcccat

SEQ ID NO: 243542 - DNA, 586 bp, Homo sapiens
cacacatacgtacacacgtcctcttcaccttctcccctgtctttaacagtctccctaggtccattttcaccacctttttacagtcttgatgtgaatgtgagaccccctacatgaggggctcatgaggtgttaaatttgatattttccatttattttgtaaattctctatatggtaatctagcatcttacttttaaatttcagatatagtataataatttttactggtgtggttcccaaaacttgaattttactccctgtttgtccttctctatgacttacgccatctcaattatgttatgctaagctgtggcactgagctaaaggttacttttcctctaagtatctgcaattgtttccttgtaagtccagggaagccrgccaataaatctgggctgcttcccacaattattcacttaaacccaagtaactctcttccacatcagagcttaacgggaggaagggaattagacatactgttgactgactctcccttctccttctttctgtccacaatctatcagaatcagaaaggatggccttcctctagtcctcttcccaaggggctatgactgccttctcattaca

SEQ ID NO: 243543 - DNA, 428 bp, Homo sapiens
caatgcatctgtgcaaattttcagcaccccttgcttttgcctcaattaggcaatgatgattacttcctgtgtcaaagcttataaaacagactagtgttttcccaaagaacataggatcacaaagaaagaattcactgtctccctatcagatgtttggcttccttgcctcttttgctcttccagattttgtgacctgggttagagtttagaaagaaccccctagaaacttttctgatgttctctggtttgatgatgaaggcgtctaataaaacacatcaactctaagcctctacctctacttctctaaacctgaagtttaraaatgaaagtcatgcctggaaatgtttcacatcattagcactgacagcgtttacagggaaatagagaaaacgtatatggattaattttcttttagatcaagggtgtgg

SEQ ID NO: 243544 - DNA, 576 bp, Homo sapiens
ctttttaccaacctgctgctcagattatatcttttcgtttctgattttcatctgcagattcctaccaaatatgctcttcttttcccaggaagatcgtgttctaacaggtcaacagtagtttattttctgctagtagaaatgggtttttattcttctacctgagctttgttgagaaatagctgaaatgattraccagagttaaaggtgaggtctgaccacagacttcctatataaactagctcctatagaaactagctggttggcaaaagagtaaaaccagcaaacctcgttagctcttgttttctaactggctgagctgtgtggtccagttgctatttttaatcatgcccattatctgttataatcccttgcctccagcccttcgtgtctatataactgttccctaagttacatatcatagttcatatccattttcaaaatgagttcacagattatatctcattaaaatcatacttcctaataaatgccacccaaagccattccacacatagatagtcattttcctggacagcaaaaagagttttgtaaaatgccatattcccttttactgctgcc

SEQ ID NO: 243545 - DNA, 576 bp, Homo sapiens
ctttttaccaacctgctgctcagattatatcttttcgtttctgattttcatctgcagattcctaccaaatatgctcttcttttcccaggaagatcgtgttctaacaggtcaacagtagtttattttctgctagtagaaatgggtttttattcttctacctgagctttgttgagaaatagctgaaatgattgaccagagttaaaggtgaggtctgaccacagacttcctatataaactagctcctatagaaactagctggttggcaaaagagtaaaaccagcaaacctcgttagctcttgttttctaactggctgagctgtgtggtccagttgctatttttaatcatgcccattatctgttataatcccttgcctccagcccttygtgtctatataactgttccctaagttacatatcatagttcatatccattttcaaaatgagttcacagattatatctcattaaaatcatacttcctaataaatgccacccaaagccattccacacatagatagtcattttcctggacagcaaaaagagttttgtaaaatgccatattcccttttactgctgcc

SEQ ID NO: 243546 - DNA, 464 bp, Homo sapiens
tattgacatatggtgataatgggacaaagcatacgggttaaaggttgcaggaaccatggcttggcaattagcgatgtaaatgaaacattcattatccatcatgctgagaagttgatgaactgtacagtaaatctgagcccacagtcaggactgagataagtcatttcagacaatacrgtggagaatttatgagcaccagggacaatgtttcagattcctgtcatggaggtttctttacctatttagttgaataaagaccttataaagtccaagccacaatgctgtccttccacaggaataaatatgagattctaaaactttctcttaaaatgaaccattttgagagctaaagtgactagatgttgacagccaccatttttcataagtgcatcccataagaaagatgtactatagattatttgtcttgaagaagagctttgatatgtttcaaaattcgacgttgg

SEQ ID NO: 243547 - DNA, 578 bp, Homo sapiens
atccacctttgattaaggattgcttttttttttttttttttttggatacagagtgttactctgtagcccagctggagtgcagtggtgcgatcttggctcactacaacttctgcttctggattcaagtgattctcttgcctcagcttcctgagtagctgggattataggcactgccacaacacctggstaatttttgtatttttagtagagatggggttttgtcatgttggccaggcaggtcttgaacacctgacctcaagtgacctgcctggctttggcctcccaaagtgctggaattacaggcgtgcgccagcacactctgcccttgattgaggattaaatgagatgatgcaggtgaagtgttcaacactgtaaatgctcccaaatgtttgctgctcttattcactattgataatgaattcagcaagggggacacttttatcctgtctgacttggaaacttggtttaactgattcttcctgggcaagtggacttaatccctcagacctcatttccctcatctgtaaaacaagaggataatgctaatctcattgaattgtgaaataagatgagttatg

SEQ ID NO: 243548 - DNA, 315 bp, Homo sapiens
ctggctcaggattataaatgactaaaatcagattttaaaaaatgattaggtatagcatagctttctcgaacttcagttacttagaaggctaagttgggaggataatacctccttagaaaaactgctctgaggattaaataaagtaatgccttcrcagcacgtggcaccaagtgtctgtttaatagatacctagtcttcctctctttagcagaagttgttaacgttagctaattgtcagttatgatttaacaactgctagcttggcgcaggcacattgctaaggagcttacatttataatttcacaaaaataacat

SEQ ID NO: 243549 - DNA, 564 bp, Homo sapiens
agtcagtctaagtataattataggtatcagcaacctatagaacagctggttcaatttaaagtgccctaaggatcacaagcatggtcctgtttacatttacaagctgataggccagttgctgtggctcatgcctgtaatcccagcactttgggaggccgaggcgggcggatcacaaggtcaggagatsgagaccatcctggctaacacagtgaaaccctgtctctactaaaaataaaaaaaaaaaaaaattagccaggcgtggtggcaggtgcctgtagtcccagctactcgggaggctgaggcaggagaatggtgtgaacccgggaggcggagcttgcagtgagccgagatcgtgccactgcactccagcctgggtgacagagagagactccgtctcaaaaaaaaatttacaagctcatttttttgcccacttactaagtttcaagcccatttccatcttctttcactgctgttccttgaggccacctctttaagccacttgcttgggtgcttataaatacaatgtccctcagatgggtacctttaattgtccctcctaatatc

SEQ ID NO: 243550 - DNA, 436 bp, Homo sapiens
agaagtgtgagaaagcccacctraaatgatgatcacagagctgctgcattatgggtacagattttactaacagccataatacacaatttaattttaattattagcgaacttcattatctgttttataaatcctcaagtgataagacacagccaattcccattttcctcatctgctaggtgatatctcatcacatctaagatcccattgattgtaagacacatcactcttttacgtaccacaaagaaaagacactgcccgtaaaactgtttcacaagagtttgctatcactttgaatttgtattttgtacatatcaaaagagctctttgtcatttaaacatattgttttgtttatcacatcaatctttaatttacctggcatacgggatcagatacattaatgcatgtttaaatagtttttttaatctctggaattt

SEQ ID NO: 243551 - DNA, 559 bp, Homo sapiens
ggatggatcgcttaaacccaggagtttgagaccagcctgggcaacatacagaaaccctgtccctacaaaaaaaaaaaaagaaaaaaaagaaaagaaaaaattagccgggcgtggtggtgtgcacctgtagtcccagctactcgggaggctgaggtgggagcatcctgtgagcccggggaggtcaaggctgcagtgagccatgatcacgctaatgcacttcagcctgggcaacagagtgagactccgtctgaaaaaagaaaaaagaaaggaccaagaaagtccccctagccctgcttggggaaagcagagaaagtggcatttgagctggacgttgcaggataggtgagattgccacatagagaagggggaaaggatatagcaggcaaagggaactgtatgtacaaagggcacaggagaatgaaacacgaaagcatttcatattttggagaaaagcaaatcacgtgaagagagaatagggtgttacagtgggaggtgaggacrgagccagattatgagaggccttgatggctgttcaggagccgtggaaagtgtatgaaca

SEQ ID NO: 243552 - DNA, 628 bp, Homo sapiens
attcatgagattgtgtcagcattttcattagaaacccctgttttcctaggcacatgtgtcttcagttttggagatatgttggaaaaatcagtttggttatttctaaattaaagcagagacatcagaaaatatcccttttagtcaaagtcattatgccaagatgcaatgtaaaataaattgcaatgagaacatgaatcaacttccaggggcactccaaccacaaaaagaagtttggagtcctctcatgctttgaattgggaaagagcctgccagtcagtgacaaatcagcacctgatattrcacctgatggatggcccccagaaactcactggttctaatttcctgaaatgtactaggttttcaggaaaaaagtggagaatgtgtcttacactatggaaacttctacatgaaccctgtggaggaaaagcaaacagggtacacctgacaagcaaatattctccatccaaatatctgccaaggtcactgatttgacatccagccacatcagttccaagtcacaccttaagcactggccagccaccctgcaaatgtgtaaactgggacagctaaatgccatctgagagactgttgattgttcagtgcactactaaaaaacaaagcaaaaata

SEQ ID NO: 243553 - DNA, 595 bp, Homo sapiens
aagtaaagttgttcagtgagaaccatttaggccaatcctagtttctgctgggagccaaaaaattcccatgatcctccttcctaatcaaaccaacagtgacggcaacctacataagggcatagacattcagattctgaggtaacaggcaaatatgtgctgtggcagccatcttaaaatggccccaagtgatccctgtctaataatattcatgcctttggtagtctcctcactgagtgtgggctggacttagtgacttacttgtaagcaagtatgtttatttgtaataaatggaatatggcaaaaagtaatgggatgtcacttgataaattaggttatagaaagaccccgactttcatcttgctctccatctcttgccctctcattagcttgctctgatggaagccagctgccatatttgtgagccrccctatcaggaggccacatgacagggaaccaagggaagcctccggcaaacagcctaagaagaactgagacccccagtccaacagcatgtgaggaactgaggtccaccaacggccccttgagtgagcctggaaacagatccatcccgggtgagcctcgcaatgacgggagc

SEQ ID NO: 243554 - DNA, 586 bp, Homo sapiens
cattggtgagatgatatgaagtttcatcctcacagaacataacactcaagttctgtgagttgctgctgctatgattaactcaagtacttaattggtcactttaacttgaacaggccttaaaagattcaaaattgctcctcaaaaaaaatgggctggggggaagcatgaacttcatgagcacttggtagacatcattaatcatggcacgtttttgcacatcttattcaactctgtaccagcagtgttttaaaatagtgttttgcacagagcacatgttcaatatatatttgttgagtagaaggaagaaagatgtatgtatggcatggtggattggattgatggatgaatgagagcccaaatgaaatctcatcaatttccagaacacagcagcaactgytgatcaatccattaacactcaagatgacatttactttgcatgctgcactgaggttttattctgggctcattcttgcagactgttcaatgaaagacatgtatattaaataaaggacttcgggtggaaaagcctatcttgcttaatgttctcatcaaaataatatatttatttttggatcatgatataatt

SEQ ID NO: 243555 - DNA, 459 bp, Homo sapiens
tgttcacccttaccctctagaataaaccagctaatgtaagtagagtactttcctgagttctgtgagccattctagcaaattatcaaacatgaggacaaggttgggaaaccctctacatttatagcctatcagtcagaagttcaggacttgtcactggcatctgaagggacagtcttgtgggcctgagccctcacttgtggaacctgatgctaactccaggtggatagatcagaattgaatrgaattgttggacacttcagtgtccagagagttagagaattagtcagtgtgaggaaaaaccccacatatttgatgtcagaaatgtcgggtgagtaaaagcagtttgtaggactatgtgggaagacactgcaggtagactgtacgagctgaacaaaacccctgggtgagagccagcgagaaaatgaggacctggtcctacagtagcaaataactgaattc

SEQ ID NO: 243556 - DNA, 618 bp, Homo sapiens
gacatagtctttagactcacatgctgggctagcagatctgtgctttgtggaaggggaactgaatagccttgcccactcccctccacctcaatgggcttggctcagtttatccagatactttacgcacatacatttccatctccrggtatttgatcttctctttctaattccgggaagaccttctcctctttttcttctccatgcttgcttgtttttatccttcctaacttacagggcactgtggaggggtctctccagccccctacttaaagtatgttgttccccaatttgattgttctctatttcaacttcctgttcgtttccttccaagctcttggacacagacagtgtaatttttatctactggcttgctcatcttcccagggactgtactggtctcattcaccttgtatatcagcaaccagcgtataccagagcagtgcttggcacacagtagggtctcactgagtatttgctgagtgaatgagtaagtgaatacttggatgcttggatctgggatgactcagtatcgtgttttctacagtaggatgctctcggggagccttgccttgctgcactcccatacaaagcatgggctggctgctcacagttgctgtg

SEQ ID NO: 243557 - DNA, 636 bp, Homo sapiens
acaaatgatttttactacatgttcgttatgccacaaagttcataagatgttaacagtctagtttcaccagagcttgctttgcagtgttttggttggcctgtcttttcctcctgccccatctcatycctccttggatggccaatgctagccagggtgctgctgggagagaggaagtctgagctgcagcaacatttgaaggcttgcttttccattcacttctgagggatgaggttacagtgtgtaaacacaatactgtatttcatagctatcccggggctttgggcttgatccttccatgatagtggtgtcctcattaccaattcatgatgctgccaggcagtcatcatgaataatcagcttccccctaaatctggaccatccgttctgagtttctggcatgttgcttcaatgagaagtgagagatttttatctcatttcagggaggaaactctgtgtatgactttatatccaactctgggactaaataaatgcatttaatactgtgaccctaagaataaaaggtggtgaagagttctagaggttgtttgtactcacactcataaggccaggaaaaggggtgatgggaagatttaacatgatcttctgtcaatcatacctcaggacccagaacattct

SEQ ID NO: 243558 - DNA, 589 bp, Homo sapiens
ggccttgaatcctgtctctactacttattagctgcttgtcatgggaagtacctcagcctctcaaagcctcagtttcctcatctttaaaatgggtatagtggtgtacctaccttacagagtggttatgagaactggaggcacacgccctgtagaagattagccaattccatcccacggggtttgggtgaagaggaccatgaggcccatggaagaatatcacacaagcttgtagagcacaagaggagaagccaagagcaggctggaacagagagtgtttccttggcctcagtgagtcatggtcaactctagtttctctcagtatttctctgaggtccagcctcttccctatgcctcagccatcagcccaacctgcttgtcttgtaggctccttamactcaacctgttgaaaactaagctgttgctttgccagtgccttgggttctgttttcgagattggcaccatcatccattcagtcacccaaattgcaagcctaggagtcattgcagatgcctcctccttccataaccccatgtagttaatcatcgactaagtcctgtgattttgccatcaagatagttctcaaacacg

SEQ ID NO: 243559 - DNA, 617 bp, Homo sapiens
gtggtgcacctgtagtcccagctacttgggaagctgaggtgggaggatctcgcttgagcctgggaggcagaggttgcagtgagctgagatcacaacattgtactacagctcgggcgataaagcaagactccatctcagaaaaaacaaacaaacaaacaaaaaaactcacctcaagtgtttagcctgctggttcatcaagtgccaatcagctctcatagctgacttgcttaaatcagctcacagcatgaggtgaggctcttggccactgtaaatccctccaattgaaagggagggcagagccagggaaatgctattttgcctttttgttttgtgatcagtaagaagaagcccatcagaggtagtaatcagattctagagtttgtcatttatgcatgaattcagcagtgtgtttgacagaaaattccagtgaatccagcagagttggggtaaggagtcaagatctcactgggtttttatgacatttattgaagatcttcatatagtattaaattaaaaaaaggcaagaaaaaacaaarcaagacttttcagtaaaacttctctgtcatttcttattttgaagactgggaaatttccaaagtaacttagaacacatttgc

SEQ ID NO: 243560 - DNA, 413 bp, Homo sapiens
gtttcattattttttatggccgattaatatttcattgtgcatatgtaccacactttatccattcatccattgatgggcacttaggttgattccatatcttggctattgtgaacaatrctgcaataaacatgggagtacagatatctttttgatatacagatttcctttcttttggatacgtattcagtagtggaattgctagatcatatgttaattctatttttagttttttgaagaacctccatactgttcttcatagtggttgtactagtttacatttctaccaacagtgtatgagggttctcttttgtccacatcctcacttgcatctgttattatctgtttttttaatacaagccattttaactggggtgaaataacatgttgttttaatttgcatttctctaatgatt

SEQ ID NO: 243561 - DNA, 413 bp, Homo sapiens
gtttcattattttttatggccgattaatatttcattgtgcatatgtaccacactttatccattcatccattgatgggcacttaggttgattccatatcttggctattgtgaacaatgctgcaataaacatgggagtacagatatctttttgatatacagatttcctwtcttttggatacgtattcagtagtggaattgctagatcatatgttaattctatttttagttttttgaagaacctccatactgttcttcatagtggttgtactagtttacatttctaccaacagtgtatgagggttctcttttgtccacatcctcacttgcatctgttattatctgtttttttaatacaagccattttaactggggtgaaataacatgttgttttaatttgcatttctctaatgatt

SEQ ID NO: 243562 - DNA, 413 bp, Homo sapiens
gtttcattattttttatggccgattaatatttcattgtgcatatgtaccacactttatccattcatccattgatgggcacttaggttgattccatatcttggctattgtgaacaatgctgcaataaacatgggagtacagatatctttttgatatacagatttcctttcttttggatacgtattcagtagtggaattgctagatcatatgttaattctatttttagttttttgaagaacctccatactgttcttcatagtggttgtactagtttacatttctaccaacagtgtatgagggttctcttttstccacatcctcacttgcatctgttattatctgtttttttaatacaagccattttaactggggtgaaataacatgttgttttaatttgcatttctctaatgatt

SEQ ID NO: 243563 - DNA, 538 bp, Homo sapiens
ttctataaaagagaaggaattcatatctatgtataaaaaatgtgaagatgagcaaagatttgcataaagtacttgatgtctggtacatattaagaattcaaaaagggccctttatatcattggcattatatctctatccatgatctcatgtaatgctcatagtaatcctgtgggattcaaagagtagtaaatattatgcctgtttgttaaaggtataactatgattttgagctggcaaccatactttgaaaattctaaaccttacaggagcaattatagcacacagatttggataaaccaaggagtggatattgctcggagatcaggcacacgagtgggcctccatcrtctaggagaaccaggtgcagaactggctcaggtatggcagtaggatcagttggaacttaacattttgtcctaagacatgggtcccaggtatgaagtctttcttgtccaatccttcccagatagaactgtcactcttttgcttgtagcatgtcctacacctaccctgactccatcacaggacctgtgtctt

SEQ ID NO: 243564 - DNA, 538 bp, Homo sapiens
ttctataaaagagaaggaattcatatctatgtataaaaaatgtgaagatgagcaaagatttgcataaagtacttgatgtctggtacatattaagaattcaaaaagggccctttatatcattggcattatatctctatccatgatctcatgtaatgctcatagtaatcctgtgggattcaaagagtagtaaatattatgcctgtttgttaaaggtataactatgattttgagctggcaaccatactttgaaaattctaaaccttacaggagcaattatagcacacagatttggataaaccaaggagtggatattgctcggagatcaggcacacgagtgggcctccatcgtctaggagaaccaggtgmagaactggctcaggtatggcagtaggatcagttggaacttaacattttgtcctaagacatgggtcccaggtatgaagtctttcttgtccaatccttcccagatagaactgtcactcttttgcttgtagcatgtcctacacctaccctgactccatcacaggacctgtgtctt

SEQ ID NO: 243565 - DNA, 428 bp, Homo sapiens
tagatatccagagaaaccccctattagttaaaatgtaagtagaacgatcatcaaggctggagccatatggggatttgaattttggctatctcaaataacctctctagagtcaccagcaaactagacattgtgacttagcttaagggtttctgtgatgacaagaggcttctagtagatattggataacagaagtgaaattgaattgtttgtaagttcttggatataacrcatttgtaataccatatctcccttagactccaagctccccgaaggcatacaatttgtcatataaaaattaaaccagctaacatttatagagtgcttactacatgtcaaacatgataataggttatttattttctcagtcaaaccttcagcaactttatgaagctggtactattattttccccactttgaagatggggaaa

SEQ ID NO: 243566 - DNA, 378 bp, Homo sapiens
aaagttaagcttgagaactgagtcaatgcgaaaaytgccttcctttcattcccaaacacatagctgtaatttcacatgcttattttgtcttatgtgaaatgtagatttactgagccaagaggactgcataactgactcctcccctttctcttcacatgtaaaatgtagattcacagagtgctaatcagagtttcacaagaatataaccacttgcctcattgcctacccctcctttttttttcactttcttcatcctcctgtttgctctttcctatttaaatactgaagtttccaaaactctcttggaaaaaagcacaggacacagatcctactgtgacttgtgtttcttgccccccagccccaggcacatcctcaacc

SEQ ID NO: 243567 - DNA, 506 bp, Homo sapiens
ggctttgcaactcttcctcccctccctgtcacctcctccactgagggcaaggaccacatctctgctgcctctgctttccctagtaaagggcaggggtgagcragtaacaggggcaccagaaatgttatcaatgatcaatttgaagattggaactcccctcgcatttgaccttaattcctctttcaccaaaaacaccaaacatatagatgtcatttgctctgcctgccactatccacccaacaaatacagctcatggagcagctaaactttgctggtaataacaaccacttgatatgttccaccatcatgttctgaaaccaactgactaaggaaaacatacctggactgaataatgaccacctgcacgttgggtgtaactcagcactttgctgactgttgtatgccactttggctacacaaagaatcacccaggatctctctgaaaatactgacgcctggctccacgccagaaatcatgattcattcaatctgaagtgatgcccagg

SEQ ID NO: 243568 - DNA, 456 bp, Homo sapiens
gagctggcttctctccgacagtgaataacgtgatagcagcatttctctctccccttcctcttccccttccccttccctttcctcttcccttctcatcccttctcttcctttcttcttctttttttgagacagagtctcactttgtcacccaggctggartccagtggcgtgatcttggctcactgaaacctctgccccctggggtcaagtgattctcatgcctcagcctcccaagtagctgggattacaggtgtgtgccaccagacctggctaattttttgtatttttagtagagacaaagttatggcatgttggccaggctggtcttgaactcctgggctcaaatcatccgcctgcctcagcctcctaaagtgagcatttcttttgttgaggcagtgctaatagtccagtcttcagagaccacaactgtggtgtccttatgctaccaattctggg

SEQ ID NO: 243569 - DNA, 511 bp, Homo sapiens
taaactaataagtaacacaatgcaataggactatctactgaacttaatagccatgctaacactttgctacttggttcacctgcgaaaaatycaggaatataatgtaaaattagttacagagggatttttatttagtcatttttcttcttcctcttttttttttttttttttttgagaccagtctcactctgtcatccaggctgcagttgcggtggtaaaaccatagctcactgccgcctccactgggcccaggtgatctttttgcctcagcctggcaattagctgggactacaggcattgcgccaccacgctcaactaatgcagaaggattttaaaacaaactttttcatatttttttgctctgactatgtcctttagttactctctagtttggttcagattctcccagtcattggtctcatacagccaaatagagcaagaacttaacttacaaggtaataagaggtcatattcaacagaaaacccaatccacctgttctcagttgaccta

SEQ ID NO: 243570 - DNA, 511 bp, Homo sapiens
taaactaataagtaacacaatgcaataggactatctactgaacttaatagccatgctaacactttgctacttggttcacctgcgaaaaattcaggaatataatgtaaaattagttacagagggatttttatttagtcatttttcttcttcctcttttttttttttttttttttgagaccagtctcactctgtcatccaggctgcagttgcggtggtaaaaccatagctcactgccgcctccactgggcccaggtgatctttttgcctcagcctggcaattagctgggactacaggcattgcgccaccaygctcaactaatgcagaaggattttaaaacaaactttttcatatttttttgctctgactatgtcctttagttactctctagtttggttcagattctcccagtcattggtctcatacagccaaatagagcaagaacttaacttacaaggtaataagaggtcatattcaacagaaaacccaatccacctgttctcagttgaccta

SEQ ID NO: 243571 - DNA, 578 bp, Homo sapiens
ccccgtcctgcttcctttacctccctaaacacattgatctcaagagcactccctaatgaactttctacttgcaaatctctgagtaagaccctgcttcctaagaaacctggaatcagaaatagttaaagaaaggcctgaaaagaggaatttcgagctgtgccaaccaccagctcaccagcaatcagagccctaccactrgtgatagtccataatgaagcataaggaaatattaaaatttttcattatgaatagcccatagcagattgccatgctgcaactttacagcttcagctggaggtcaactggggtaatagatcaagtggaagagaatgaactgacaagcagaatattttcagcatttgataaatatgaggacaattgtaataatgagtatggaactgggacatttgacatattgagagataaaatgaaaagccaggaattcttaataacaaataaaggtagaaggcctcctagacagcattaaaaagactctaatttccttcaagcagaagatagaaaaatcttgggattttatggagaaagaaaatcttaagctcattacttaatagtaaaag

SEQ ID NO: 243572 - DNA, 578 bp, Homo sapiens
ccccgtcctgcttcctttacctccctaaacacattgatctcaagagcactccctaatgaactttctacttgcaaatctctgagtaagaccctgcttcctaagaaacctggaatcagaaatagttaaagaaaggcctgaaaagaggaatttcgagctgtgccaaccaccagctcaccagcaatcagagccctaccactggtgatagtccataatgaagcataaggaaatattaaaatttttcattatgaatagcccatagcagattgccatgctgcaactttacagcttcagctggaggtcaactggggtaatagatcaagtggaagagaatgaactgacaagcagaatattttcagcatttgataaatatgaggamaattgtaataatgagtatggaactgggacatttgacatattgagagataaaatgaaaagccaggaattcttaataacaaataaaggtagaaggcctcctagacagcattaaaaagactctaatttccttcaagcagaagatagaaaaatcttgggattttatggagaaagaaaatcttaagctcattacttaatagtaaaag

SEQ ID NO: 243573 - DNA, 578 bp, Homo sapiens
ccccgtcctgcttcctttacctccctaaacacattgatctcaagagcactccctaatgaactttctacttgcaaatctctgagtaagaccctgcttcctaagaaacctggaatcagaaatagttaaagaaaggcctgaaaagaggaatttcgagctgtgccaaccaccagctcaccagcaatcagagccctaccactggtgatagtccataatgaagcataaggaaatattaaaatttttcattatgaatagcccatagcagattgccatgctgcaactttacagcttcagctggaggtcaactggggtaatagatcaagtggaagagaatgaactgacaagcagaatattttcagcatttgataaatatgaggacaattgtaataatgagtatggaactgggacatttgacatattgagagayaaaatgaaaagccaggaattcttaataacaaataaaggtagaaggcctcctagacagcattaaaaagactctaatttccttcaagcagaagatagaaaaatcttgggattttatggagaaagaaaatcttaagctcattacttaatagtaaaag

SEQ ID NO: 243574 - DNA, 477 bp, Homo sapiens
cttggaatctacaaaagctaatctcatcaaagtaaaatttagaatagtggtagccagaggcagcagaaacaaagatggaagaaaagattggaagaggttgtttgctgggtagaaagttacagttagaaggagtaagttctggtattttgttatatagtaggatgactataactaataacaacatgtttatatttttgctagaaaagaggattttgaaaggtatcatcacaaagaaatgataaaggtttgtagtgatggacattctaactaccctratttgatcattatacgatgtatacatgtattgaaacatcacactgtagcccataaacacgtgtgatcattaggtgtcaattatgaataaaattaagaatctatcaagtaaacaaaaaatctgtgtggaagaatgttgttgaatcagactgcctgatgtggaatcctctgactagctgcacgcccagagaaagttacttaacc

SEQ ID NO: 243575 - DNA, 351 bp, Homo sapiens
gaaccttcgtaattctttcatatattgagtaaagatgccaaagtcactgattaaagctccctaacctcttaactcattaccacaaaaccaccctgggggccagggatcctgggttttcactgccttctttatgaaactttctttcatcttagckgaaataataactcaaaatcagtatgttagtcggtcaaagcattgttaatccaatagcaaatgtcttgactttttagattacaggcaactagggaaatacttataatagttaaggtttttttaaaaacaaacaaacaaatcttccatgaagtctatatgaattatttttttttgttgctttacagagcaaaaattgtc

SEQ ID NO: 243576 - DNA, 591 bp, Homo sapiens
gctttgtggttaggtacacatacatcttggattgttatgtactcttggagaactgacctatttatataatgctctttatcccagataattttccttgttctgaagtcagtttcgtttaatacactacttctgtttcttttgattagtaggagcacagtaaaattttttccatctttgtttttaagccgaatcttgatctttaagtgggttttcttgcagatgacatggagttgtgttttgtttttgtatttttaattcactttaaaatgttcyataattactgcatttaaccataaatatttaaagtaatattgataaaactggattaatatctaccatatttgaattgttttatatttgttacatttgttcttggttcttttctgccctctctagatttagttgaatatttatatgattcaattttagctcctcttttggaatatcagttataccttattaaattttattaaaaattaaattttgcaatatacataattcactaataaagtccaatttcaaataccactatattgcttgatatgtggtgcaggtattttaacagaatatccttgaaatttctccctccca

SEQ ID NO: 243577 - DNA, 358 bp, Homo sapiens
tataaagcttgcattttggatccatctctgcaactaaatgcctggaaaacyttaagcaagttcttatattttcaagtcagtcaatacatcttactgtttcttatttttttgaggtatcccctccgttccttccctctgccctgtttctagatggaagcattgtaacctcacatttgaactactgtaaccacatccttattatcttggctaccattatctgctccttgaactatttattttttattgccagttataagtgcctcagatgtcattatgactaaactttgcccttgtctaaaaatgttgaagatctcagtattcaaggctttttcacgacctagatatacctgtgtgtgtt

SEQ ID NO: 243578 - DNA, 563 bp, Homo sapiens
ctttcaaatagtcatagtaggtacaagctattgtgaataaaggcttggaaaacaggctagtgaacattttttatgcttattagtgataaaaagggatcaaactcgtatggctctttatggtttgggatgcccaatttatcactgatactgtgggttgtaagtgtctgtcaaatctgaatttggcttatttttaagctgctcaattttttttttaataacccctttcccttcccagctgcagtctctcacattgatccttgttttgaaactaattaaacacatacagcatatttaaaataaaattactgatccgtttgccctcttctcccatctgtaatatcttgcaaatgttttcttgcttaaggcaattttgagttttaaaaaataaagatctcttaaatgaattcatcttttacctcatttctggcagctagggatccccctctctggtttgtgtttttcaatcagaattaatacttgaatttaaaatattattgttatttccacctcagcyttccaagttactagtttcccacatggctgttttgatctctcattcaagc

SEQ ID NO: 243579 - DNA, 518 bp, Homo sapiens
aagcttcccactcccatctcactcagaatcaaaaaagtctttgcagtggccagtaaagccccacacaacctcgctcccactctcctgctgactgatttgcccctcgttcactgctttcctgctactctggtctgctctagcctgatcactgttcctcagacacrctggtgtgtttctcatctcagggcttctgcgcttgctcttccacctgcctgaccatttctagatgggccttgtccggctttgaggtcagctagaggtgagtgttacactcggtgcttctgctttgccataaggaaatttatgattccagctaactggtctcctgcacactaaatcagttattctgctggccaggactacctagagcttggtcaggtccttaccagaaaaaaataaccagtaagtcagtgactcggcccctggagtaaggaatttgagaacaaggtatgtatggttgtgctggttgtacactacacaagggcacaagtcaaggtggccaacaggggctggaatac

SEQ ID NO: 243580 - DNA, 518 bp, Homo sapiens
aagcttcccactcccatctcactcagaatcaaaaaagtctttgcagtggccagtaaagccccacacaacctcgctcccactctcctgctgactgatttgcccctcgttcactgctttcctgctactctggtctgctctagcctgatcactgttcctcagacacgctggtgtgtttctcatctcagggcttctgcgcttgctcttccacctgcctgrccatttctagatgggccttgtccggctttgaggtcagctagaggtgagtgttacactcggtgcttctgctttgccataaggaaatttatgattccagctaactggtctcctgcacactaaatcagttattctgctggccaggactacctagagcttggtcaggtccttaccagaaaaaaataaccagtaagtcagtgactcggcccctggagtaaggaatttgagaacaaggtatgtatggttgtgctggttgtacactacacaagggcacaagtcaaggtggccaacaggggctggaatac

SEQ ID NO: 243581 - DNA, 550 bp, Homo sapiens
attattctactataaagcttcaagatgggcagagagcttataatttcctaaccttatttaaccaaaaaatgctgcttttctctccccagccttaytattttttaaattatttttttatttttttgagacagagtttcattctgttggtccggctggagtgcagtggcatgatcatggctcactgcagcctcgacttcccaggctcaggtgatcctcccaccccagcctcccgagtaactgggactagggcacgtgccaccatgcccagctaatttctgtattttttctggtggagatggggtctcgccatattgctcaggcttgcctcctactcttggggcttaagcgatccgcccactttggacttccaaggtgctgagattagaggtgtgacccactacaccgtgccttcctttttctttttttaacagagtatccagggcagcatacctcaaagtgtgagttcccaaagcactgacatcagaaccacctaagaggcttcctaaaaatgagactcttggtctccactctgactctcatatcctgcatc

SEQ ID NO: 243582 - DNA, 400 bp, Homo sapiens
cctcggccccgcggagctcgcctggaagcgccggttgcctggctctggtgggtggcccggccgcgagcatctccgcgccctgggtctgtagccctagggctgagccccagaaagccgcgcctcckctctgcgccatggcctctgctttctgtacccgactgggtttccccacttccactgggacagggtctcttcgcccctgggagggcgggtgggagggacttgcacgtgggcatgtgtttgggggtgtgtgtggtagcttaacccctaccgagtggagaaagtccggctccatttctcacctttttcccaagaggacacacataccccgctcaacttgacgcctaaagcagccgcttccaggcctggggtttcggataggccaagccggctgctgccg

SEQ ID NO: 243583 - DNA, 400 bp, Homo sapiens
cctcggccccgcggagctcgcctggaagcgccggttgcctggctctggtgggtggcccggccgcgagcatctccgcgccctgggtctgtagccctagggctgagccccagaaagccgcgcctccgctctgcgccatggcctctgctttctgtacccgactgggtttccccacttccactgggacagggtctcttcgcccctgggagggcgggtgggagggacttgcacgtgggcatgtgtttgggggtgtgtgtggtagcttaacccctaccgagyggagaaagtccggctccatttctcacctttttcccaagaggacacacataccccgctcaacttgacgcctaaagcagccgcttccaggcctggggtttcggataggccaagccggctgctgccg

SEQ ID NO: 243584 - DNA, 337 bp, Homo sapiens
tggccgggcgcgatgactcacacctgtaatcccagcactttgggaggctgaggtgggcagatcacctgaggtcaggagttcgagaccagcctgaccaatgtgatgaaacctggtccttactaaaaatacaaaaattagctgggcgtggtggcatgcgcctgtaatcccagttactcaggaggctgagacaggaggactgcttgaacccgggaagcggatgttgyggtgagccgagattgaaccattgcactccagcctgtctcaaaaaaaaaaaaaaaaaaaaattctagctttacctccattcacctataagcttaaattccattggacagcatgg

SEQ ID NO: 243585 - DNA, 576 bp, Homo sapiens
tactaataacttgtggatcccctttgaacttttgtttatataagttatcttcttatattatatatttatcataggtagtataaaaattcttattttaggttcaagttttaccacttagaccctgacattagtgtgttaaattggcagcccttattttaactataaaatgttttctaaattaaataaaatctaaaattaatacctgaataaacattcattgtccaaaattcaaatgatacacagtatgtagaataaaaagtaaatgtccttgtrtagccccaccataggtaaccagttcaactgcaaactcttgaccacaagataataatgataaggaccaaggagtgcaaaatttattatcacataatttttgttttatttttaaatttttattttcacattttattatctacataccagtgatcttttcattgggaacatcttattttataatgccaaatgctcacacagggactaattctagtacaatagcttatatccactttgagatacagttttgaactattttctctggaagtgaacagagtgccatcttcgaatattctgattgctgag

SEQ ID NO: 243586 - DNA, 572 bp, Homo sapiens
gatcccctttgaacttttgtttatataagttatcttcttatattatatatttatcataggtagtataaaaattcttattttaggttcaagttttaccacttagaccctgacattagtgtgttaaattggcagcccttattttaactataaaatgttttctaaattaaataaaatctaaaattaatacctgaataaacattcattgtccaaaattcaaatgatacacagtatgtagaataaaaagtaaatgtccttgtatagccccaccataggtaaccagttcaactgcaaactcttgaccacaagataataatgrtaaggaccaaggagtgcaaaatttattatcacataatttttgttttatttttaaatttttattttcacattttattatctacataccagtgatcttttcattgggaacatcttattttataatgccaaatgctcacacagggactaattctagtacaatagcttatatccactttgagatacagttttgaactattttctctggaagtgaacagagtgccatcttcgaatattctgattgctgagtagtttattcc

SEQ ID NO: 243587 - DNA, 452 bp, Homo sapiens
aaccattactaataacttgtggatcccctttgaacttttgtttatataagttatcttcttatattatatatttatcataggtagtataaaaattcttattttaggttcaagttttaccacttagaccctgacattagtgtgttaaattggcagcccttattttaactataaaatgttttctaaattaaataaaatctaaaattaatacctgaataaacattcattgtccaaaattcaaatgatacacagtatgtagaataaaaagtaaatgtccttgtatagccccaccataggtaaccagttcaactgcaaactcttgaccacaagataataatgataaggaccaaggagtgcaaaattkattatcacataatttttgttttatttttaaatttttattttcacattttattatctacataccagtgatcttttcattgggaacatcttat

SEQ ID NO: 243588 - DNA, 572 bp, Homo sapiens
gatcccctttgaacttttgtttatataagttatcttcttatattatatatttatcataggtagtataaaaattcttattttaggttcaagttttaccacttagaccctgacattagtgtgttaaattggcagcccttattttaactataaaatgttttctaaattaaataaaatctaaaattaatacctgaataaacattcattgtccaaaattcaaatgatacacagtatgtagaataaaaagtaaatgtccttgtatagccccaccataggtaaccagttcaactgcaaactcttgaccacaagataataatgataaggaccaaggagtgcaaaatttattatcacataatttttgttttatttttaaatttttattttcacrttttattatctacataccagtgatcttttcattgggaacatcttattttataatgccaaatgctcacacagggactaattctagtacaatagcttatatccactttgagatacagttttgaactattttctctggaagtgaacagagtgccatcttcgaatattctgattgctgagtagtttattcc

SEQ ID NO: 243589 - DNA, 572 bp, Homo sapiens
gatcccctttgaacttttgtttatataagttatcttcttatattatatatttatcataggtagtataaaaattcttattttaggttcaagttttaccacttagaccctgacattagtgtgttaaattggcagcccttattttaactataaaatgttttctaaattaaataaaatctaaaattaatacctgaataaacattcattgtccaaaattcaaatgatacacagtatgtagaataaaaagtaaatgtccttgtatagccccaccataggtaaccagttcaactgcaaactcttgaccacaagataataatgataaggaccaaggagtgcaaaatttattatcacataatttttgttttatttttaaatttttattttcacattttattatctacataccagtgatcttttmattgggaacatcttattttataatgccaaatgctcacacagggactaattctagtacaatagcttatatccactttgagatacagttttgaactattttctctggaagtgaacagagtgccatcttcgaatattctgattgctgagtagtttattcc

SEQ ID NO: 243590 - DNA, 471 bp, Homo sapiens
agatctttattatacttaagactgggtacagcaggrtagtgtcctggcaggcagtctgtctttccatcagtcagggtgagtccagaaactttgcctttctatagatcaccatagattccaaagcatgttgcttaatttcttccaactttgaagctcacatacctagaggcaggcaaaaatgcagctgtggttttacttgaactgcttttctattcttggtttttgagacagaatatacatagtagatgaaattacatatgcaaaattctatagcctatgatattaggccattcttgcattgctatacatacttgagaccaggtaatgtataaagaaaagaggtttaattggctcacagttctgcaggctttataggaagcatggtgctggtatctgcttggcttctgggaaggcttcaggaaggtgaagggggagcaaacaagtcacatggccagagcaggagcaagatgg

SEQ ID NO: 243591 - DNA, 468 bp, Homo sapiens
gcaggatagtgtcctggcaggcagtctgtctttccatcagtcagggtgagtccagaaactttgcctttctatagatcaccatagattccaaagcatgttgcttaatttcttccaactttgaagctcacatacctagaggcaggcaaaaatgcagctgtggttttacttgaactgcttttctattcttggtttttgagwcagaatatacatagtagatgaaattacatatgcaaaattctatagcctatgatattaggccattcttgcattgctatacatacttgagaccaggtaatgtataaagaaaagaggtttaattggctcacagttctgcaggctttataggaagcatggtgctggtatctgcttggcttctgggaaggcttcaggaaggtgaagggggagcaaacaagtcacatggccagagcaggagcaagatggagcggtggaggcaccacacacttttaa

SEQ ID NO: 243592 - DNA, 655 bp, Homo sapiens
gaaattacatatgcaaaattctatagcctatgatattaggccattcttgcattgctatacatacttgagaccaggtaatgtataaagaaaagaggtttaattggctcacagttctgcaggctttataggaagcatggtgctggtatctgcttggcttctgggaaggcttcaggaaggtgaagggggagcaaacaagtcacatggccagagcaggagcaagatggagcggtggaggcaccacacacttttaaatgaccagatctcagaaaaactcactctctattgcaaaggtagcacaaacccatgagggatctgccccccscaccgccccaaacacctcccaccaggccccacctccaacactggggattacaattcaacatgagatttggtggggccatatattcaaatcatatcacctactaagcccaaagctctaagaactgtccttttctcttacaatggagctacaagattttgctttggtgattaagagaacaatacaatcttatgtaggcagggccccataatgttttaaagttactgaaaatattccaattcatagtaaaataataatattagctattatttaatgagcgaaacacggttaaagcatttcctcaaaatcatctcatttagtcttcaataagaagtt

SEQ ID NO: 243593 - DNA, 456 bp, Homo sapiens
tagcactaatgctcacaactctacacaaagtaagtggtgtcggcccaattattatagacgaagaagctgaaacactgatttctcttttaaaatgggagtggagaatagtcatgtaactaataaatgccagagctatgattcaaactcaagccttttgtgacttcacatacttcctaagaagattcatttcctagagcacatttttcccaccttatgctttaactckctctagcatagagttctcatcaattttttttggaagaggcctttcagccttagagattcccttccccctgcctttcctccacagctagttgcatattcaactatgatgttgaagaaatactaggaccacagcgcagagttacagactgaaactaaaagcttgtttgttactatgttggcatctcttttagaagatcactcaatgtcatggcttcctaaattcagtttagc

SEQ ID NO: 243594 - DNA, 456 bp, Homo sapiens
tagcactaatgctcacaactctacacaaagtaagtggtgtcggcccaattattatagacgaagaagctgaaacactgatttctcttttaaaatgggagtggagaatagtcatgtaactaataaatgccagagctatgattcaaactcaagccttttgtgacttcacatacttcctaagaagattcatttcctagagcacatttttcccaccttatgctttaactctctctagcatagagttctcwtcaattttttttggaagaggcctttcagccttagagattcccttccccctgcctttcctccacagctagttgcatattcaactatgatgttgaagaaatactaggaccacagcgcagagttacagactgaaactaaaagcttgtttgttactatgttggcatctcttttagaagatcactcaatgtcatggcttcctaaattcagtttagc

SEQ ID NO: 243595 - DNA, 456 bp, Homo sapiens
tagcactaatgctcacaactctacacaaagtaagtggtgtcggcccaattattatagacgaagaagctgaaacactgatttctcttttaaaatgggagtggagaatagtcatgtaactaataaatgccagagctatgattcaaactcaagccttttgtgacttcacatacttcctaagaagattcatttcctagagcacatttttcccaccttatgctttaactctctctagcatagagttctcatcaattttttttggaagaggcctttcagccttagagattcccttccccctgcctttcctccacagctagttgcatattcaactatgatgttgaagaaatactaggaccacagckcagagttacagactgaaactaaaagcttgtttgttactatgttggcatctcttttagaagatcactcaatgtcatggcttcctaaattcagtttagc

SEQ ID NO: 243596 - DNA, 456 bp, Homo sapiens
tagcactaatgctcacaactctacacaaagtaagtggtgtcggcccaattattatagacgaagaagctgaaacactgatttctcttttaaaatgggagtggagaatagtcatgtaactaataaatgccagagctatgattcaaactcaagccttttgtgacttcacatacttcctaagaagattcatttcctagagcacatttttcccaccttatgctttaactctctctagcatagagttctcatcaattttttttggaagaggcctttcagccttagagattcccttccccctgcctttcctccacagctagttgcatattcaactatgatgttgaagaaatactaggaccacagcgcagagttacagactgaaactaaaagcttgtttgttactatgytggcatctcttttagaagatcactcaatgtcatggcttcctaaattcagtttagc

SEQ ID NO: 243597 - DNA, 483 bp, Homo sapiens
tgttttagaggtttatttttgtgtactttgtagaattagatagctgatagaaaatacttttctaaataagggacatcttggtatcacctccattttgtattgttcagagcctagaaacttccaagaaccacaagttgagaacttttattgaagcctcaaataaaagttttttataaaattgccagtctaacatgtaaaacttaatctcgaagaagcaagttaaatgaacagattcttagctcccagagaatctaaaggcggcaggctattttatattttatcaaaaaataagcagacgagtcatcaatataaaatcataggtaccttaaattagaaattcaaaatattccaagttagttctraagacagtgtttcgttgtgcagtaaaagtttagaaaagggtatcacacaagagaagttctctcatttatttaaaaaaatggaaaatggtaaaagatgtctaatgtcttgtatggaccttgt

SEQ ID NO: 243598 - DNA, 549 bp, Homo sapiens
tattaatgcacaggaagtctgcatttaaacagaaaatctggaaataataaattgatattaaaattactgagggtctaagatgatgaatcataacaccaactgtctctgaggaaaagtactattgttttagggcagaagctgagctcttgtcacaatttctaggggaaatacgaaaaaaaccttccacttttcagtaagtaaaatttgggctctttggagatttgaatwtaactattttagacgtatcagaatattattaaagtaccttaataaaaatatctgtgaaaactgtggggaaaaaacataataaataatatacaagatatatactgtgctctatctgccttggcactccttttctcgtagtatttaagagttcttagcagtgctcctccaatgcagtccacgaacctgcagcatcactatcacctggaaacttgttagaaatgcaaattcttaagtcccacctatacctcgtaatttctttctctggagttgagctccacaatctacatctttaaaaagctattcaggggatttcttttgcac

SEQ ID NO: 243599 - DNA, 549 bp, Homo sapiens
tattaatgcacaggaagtctgcatttaaacagaaaatctggaaataataaattgatattaaaattactgagggtctaagatgatgaatcataacaccaactgtctctgaggaaaagtactattgttttagggcagaagctgagctcttgtcacaatttctaggggaaatacgaaaaaaaccttccacttttcagtaagtaaaatttgggctctttggagatttgaatataactattttagacgtatcagaatattattaaagtaccttaataaaaatatctgtgaaaactgtggggaaaaaacataataaataatatacaagatatatactgtgctctatctgccttggcactccttttctcgtagtatttaagagttcttagcagtgctcctccaatgcagtccmcgaacctgcagcatcactatcacctggaaacttgttagaaatgcaaattcttaagtcccacctatacctcgtaatttctttctctggagttgagctccacaatctacatctttaaaaagctattcaggggatttcttttgcac

SEQ ID NO: 243600 - DNA, 506 bp, Homo sapiens
cttcttccttggtgactctgtcagatagatcttctttaagatggaaaacctccttcatctctcctacaatgatcttgctacttattcctgagcagtgktccctaagtatatgtgggtgtccacagatgctgctagtcttgcctgatatttttggagttgccattttcatgtttcagagctcagagcaccgctgtcatccctaaggtggtttgcctcactataggagctgtctgcaagcaagaaaatgaacactgctaacagtgcttgtgcttggttctttccctgaaagcaagactctagccctggtacccctgggtaaacataagggcaggattccagttctctatagaacatcatacgttttctttcattcatgggttttatagattccatccatcattcgagtcattctgctgtgttgtcttctaaaccatcatcaaccagtgcatctcagggggctaaggccgaatccaacagcaaccccatcagcttgccaactccccaga

SEQ ID NO: 243601 - DNA, 506 bp, Homo sapiens
cttcttccttggtgactctgtcagatagatcttctttaagatggaaaacctccttcatctctcctacaatgatcttgctacttattcctgagcagtggtccctaagtatatgtgggtgtccacagatgctgctagtcttgcctgatatttttggagttgccattttcatgtttcagagctcagagcaccgctgtcatccctaaggtggtttgcctcactataggagctgtctgcaagcaagaaaatgaacactgctaacagtgcttgtgcttggttctttccctgaaagcaagactctagccctggtacccctgggtaaacataaggscaggattccagttctctatagaacatcatacgttttctttcattcatgggttttatagattccatccatcattcgagtcattctgctgtgttgtcttctaaaccatcatcaaccagtgcatctcagggggctaaggccgaatccaacagcaaccccatcagcttgccaactccccaga

SEQ ID NO: 243602 - DNA, 506 bp, Homo sapiens
cttcttccttggtgactctgtcagatagatcttctttaagatggaaaacctccttcatctctcctacaatgatcttgctacttattcctgagcagtggtccctaagtatatgtgggtgtccacagatgctgctagtcttgcctgatatttttggagttgccattttcatgtttcagagctcagagcaccgctgtcatccctaaggtggtttgcctcactataggagctgtctgcaagcaagaaaatgaacactgctaacagtgcttgtgcttggttctttccctgaaagcaagactctagccctggtacccctgggtaaacataagggcaggattccagttctctrtagaacatcatacgttttctttcattcatgggttttatagattccatccatcattcgagtcattctgctgtgttgtcttctaaaccatcatcaaccagtgcatctcagggggctaaggccgaatccaacagcaaccccatcagcttgccaactccccaga

SEQ ID NO: 243603 - DNA, 506 bp, Homo sapiens
cttcttccttggtgactctgtcagatagatcttctttaagatggaaaacctccttcatctctcctacaatgatcttgctacttattcctgagcagtggtccctaagtatatgtgggtgtccacagatgctgctagtcttgcctgatatttttggagttgccattttcatgtttcagagctcagagcaccgctgtcatccctaaggtggtttgcctcactataggagctgtctgcaagcaagaaaatgaacactgctaacagtgcttgtgcttggttctttccctgaaagcaagactctagccctggtacccctgggtaaacataagggcaggattccagttctctatagaacatcatacgttttctttcattcatggrttttatagattccatccatcattcgagtcattctgctgtgttgtcttctaaaccatcatcaaccagtgcatctcagggggctaaggccgaatccaacagcaaccccatcagcttgccaactccccaga

SEQ ID NO: 243604 - DNA, 479 bp, Homo sapiens
tttccagttgtgtctgatttaagaaaatattttagaaaataagtaatccacatcaggttttgatctgcataccagttctgaccagtaggtggctaatcatttaaaaagaaacatttttattggttttctctcattttatcctgggagcaaagaggcaaaatgtttctcccaggattacaacagccataggatgaaaagaaattcacatctattgatccactgtatgtgttacccattaaatctgcatggagatcctctgcaagaggtagtgctacttgtagccaaggatggtgagaacagcctcagacaaggttctgttcatagtacgttaccattaatggatgtatgaatggattggcagtcctycatatgtacatagtgcatatcttgggggcagttaaaggggtgcatttcatttacaagttcagcttagttgccggagggtacactgctcattcacagccctgtaccagggatgg

SEQ ID NO: 243605 - DNA, 479 bp, Homo sapiens
tttccagttgtgtctgatttaagaaaatattttagaaaataagtaatccacatcaggttttgatctgcataccagttctgaccagtaggtggctaatcatttaaaaagaaacatttttattggttttctctcattttatcctgggagcaaagaggcaaaatgtttctcccaggattacaacagccataggatgaaaagaaattcacatctattgatccactgtatgtgttacccattaaatctgcatggagatcctctgcaagaggtagtgctacttgtagccaaggatggtgagaacagcctcagacaaggttctgttcatagtacgttaccattaatggatgtatgaatggattggcagtcctcsatatgtacatagtgcatatcttgggggcagttaaaggggtgcatttcatttacaagttcagcttagttgccggagggtacactgctcattcacagccctgtaccagggatgg

SEQ ID NO: 243606 - DNA, 479 bp, Homo sapiens
tttccagttgtgtctgatttaagaaaatattttagaaaataagtaatccacatcaggttttgatctgcataccagttctgaccagtaggtggctaatcatttaaaaagaaacatttttattggttttctctcattttatcctgggagcaaagaggcaaaatgtttctcccaggattacaacagccataggatgaaaagaaattcacatctattgatccactgtatgtgttacccattaaatctgcatggagatcctctgcaagaggtagtgctacttgtagccaaggatggtgagaacagcctcagacaaggttctgttcatagtacgttaccattaatggatgtatgaatggattggcagtcctccatatgtacatagtgcatatcttgggggcagttaaaggggtgcayttcatttacaagttcagcttagttgccggagggtacactgctcattcacagccctgtaccagggatgg

SEQ ID NO: 243607 - DNA, 583 bp, Homo sapiens
gctgcaaaagcttgggtgtgcatagacactgaggttgagtggtgtctttgggcattttgagcattgacaccaaagttccagcatcaaatcttagaatatcaagcagccagatggatcacctgaggtcaggagttcacgaccagcctgactaacatggtgaaaccccatmtctactaaatacaaaaaaattagccaggcatgattgtgcatgcctgtaatctgagctacttgggaggctgagacaggagaatcgcttgtgtacctgggaggtggaggttgcagtgagctgagatcacaccattgcactccagcctgggcaatgagagcaaaactctatccccccgcaaaaaaaaaaaaataaaagaatatgaagcagccaaagaagcaggaaaacatgacacataatgaagaatctaataatctagttgaaattgacagacatgttggacatagaagaaaaggacattagagcagttagtataattgtattttaattaaatggggaggttgaagattttttaaatatcaaattctgtagataaaaagtatgatttacagtctgaaatggaagaaggcagtggat

SEQ ID NO: 243608 - DNA, 583 bp, Homo sapiens
gctgcaaaagcttgggtgtgcatagacactgaggttgagtggtgtctttgggcattttgagcattgacaccaaagttccagcatcaaatcttagaatatcaagcagccagatggatcacctgaggtcaggagttcacgaccagcctgactaacatggtgaaaccccatatctactaaatacaaaaaaattagccaggyatgattgtgcatgcctgtaatctgagctacttgggaggctgagacaggagaatcgcttgtgtacctgggaggtggaggttgcagtgagctgagatcacaccattgcactccagcctgggcaatgagagcaaaactctatccccccgcaaaaaaaaaaaaataaaagaatatgaagcagccaaagaagcaggaaaacatgacacataatgaagaatctaataatctagttgaaattgacagacatgttggacatagaagaaaaggacattagagcagttagtataattgtattttaattaaatggggaggttgaagattttttaaatatcaaattctgtagataaaaagtatgatttacagtctgaaatggaagaaggcagtggat

SEQ ID NO: 243609 - DNA, 583 bp, Homo sapiens
gctgcaaaagcttgggtgtgcatagacactgaggttgagtggtgtctttgggcattttgagcattgacaccaaagttccagcatcaaatcttagaatatcaagcagccagatggatcacctgaggtcaggagttcacgaccagcctgactaacatggtgaaaccccatatctactaaatacaaaaaaattagccaggcatgatkgtgcatgcctgtaatctgagctacttgggaggctgagacaggagaatcgcttgtgtacctgggaggtggaggttgcagtgagctgagatcacaccattgcactccagcctgggcaatgagagcaaaactctatccccccgcaaaaaaaaaaaaataaaagaatatgaagcagccaaagaagcaggaaaacatgacacataatgaagaatctaataatctagttgaaattgacagacatgttggacatagaagaaaaggacattagagcagttagtataattgtattttaattaaatggggaggttgaagattttttaaatatcaaattctgtagataaaaagtatgatttacagtctgaaatggaagaaggcagtggat

SEQ ID NO: 243610 - DNA, 583 bp, Homo sapiens
gctgcaaaagcttgggtgtgcatagacactgaggttgagtggtgtctttgggcattttgagcattgacaccaaagttccagcatcaaatcttagaatatcaagcagccagatggatcacctgaggtcaggagttcacgaccagcctgactaacatggtgaaaccccatatctactaaatacaaaaaaattagccaggcatgattgtgcatgcctgtaatctgagctacttgggaggctgagacaggagaatcgcttgtgtacctgggaggtggaggttgcagtgagctgagatcacaccattgcactccagcctgggcaaygagagcaaaactctatccccccgcaaaaaaaaaaaaataaaagaatatgaagcagccaaagaagcaggaaaacatgacacataatgaagaatctaataatctagttgaaattgacagacatgttggacatagaagaaaaggacattagagcagttagtataattgtattttaattaaatggggaggttgaagattttttaaatatcaaattctgtagataaaaagtatgatttacagtctgaaatggaagaaggcagtggat

SEQ ID NO: 243611 - DNA, 514 bp, Homo sapiens
ttctcttcttcttgtctcttgtctattttctaaggtgcctctttgttgcttggggcaaaaaaagtccattttwaatccacacccaacaaacatctacccttacgtatcctggtttttagggttttgagtttgttgtttgttttctcagcttctcatatttggaatactggaaattcctaaagtggaaaatgacagaacgtgaatcacagctatggtgaagccacaggctctggatgaaaaacctaatctgccagggtttgaagttaaacacatgaatcttctgtgcctctatttctatctgtccaatgggctaaatcagaacacttaggttgtccagtgtttaaatgagcagtgcaggaaaagcctggagccaatgcctgtcatgtagtaattggtcaacacgcatgagctcctatcagcgccatggtctccagcatttccatcaggctttgatctttgaaatgtccttcttgatatgaatggatcattcctcaaacattctctaactgatggc

SEQ ID NO: 243612 - DNA, 514 bp, Homo sapiens
ttctcttcttcttgtctcttgtctattttctaaggtgcctctttgttgcttggggcaaaaaaagtccattttaaatccacacccaacaaacatctacccttacgtatcctggtttttagggttttgagtttgttgtttgttttctcagcttctcatatttggaatactggaaattcctaaagtggaraatgacagaacgtgaatcacagctatggtgaagccacaggctctggatgaaaaacctaatctgccagggtttgaagttaaacacatgaatcttctgtgcctctatttctatctgtccaatgggctaaatcagaacacttaggttgtccagtgtttaaatgagcagtgcaggaaaagcctggagccaatgcctgtcatgtagtaattggtcaacacgcatgagctcctatcagcgccatggtctccagcatttccatcaggctttgatctttgaaatgtccttcttgatatgaatggatcattcctcaaacattctctaactgatggc

SEQ ID NO: 243613 - DNA, 408 bp, Homo sapiens
gaattcagcaaactttcagcaaacaatcagttgtgttagcaatgaacaatctgagaagaaaattgacacaatgatttcatttataatagcacttgtaagaataatatgcctgrgaataaatttgttcaagaaggtgccgtacttgtacacagacaactacagaacattgctcgaggagattcaggaagacctaaatcaatggacagacatcttgtgtccatgggttggaagttgtaacatggttaagataaaaatacaactcaaagcaacccacagattcaatacaatcctatcaagaagtggccttttttacaggaatgcctaagaagaacttcatattcctaaaaaatagtgtgtccccccaaaacaaaagcaatcttgaaatgcaagaagaaacattttctattc

SEQ ID NO: 243614 - DNA, 603 bp, Homo sapiens
ctatcattgtaggagtgactgttttatgtacttgatacttcacaagaattcattatgttgttggcttagtgggacttgctaagtgctctttcagcagactgttacctgcaaggacacttttctgagatgcaaaatagtaaattattacaaataaagaagaaacaaatatcttccaacttttaggtcagtacattatttatagaaaaagaggtttcttattattattcatgtcaagattgattcatatgagattcaaatacattatgtattttcctgtggcattctttggctttaaagttgctgttcgaatatatgttatatacagtcttatttctaagagagccactaaaggcycgtttttgtttgtttttattgttcttatttgttcattaaacaaaaacttttgatctctgcagtattcccggcattatggtaggcaatgggtttatagaaatgagagatacattcccaacctgagtggaaatccagttcagtttaattggatctttttcctgatttcccatgaaaccttggactaattacttctctaagtttccatttccttgtatgtaaaataggattggatcagatggttagtttata

SEQ ID NO: 243615 - DNA, 621 bp, Homo sapiens
atatggtgtactttaccattgtgtagtttacastaggaattcacacatacatgatctcatactctctcccacatatcaataagtctatgagatagattttatgactggtagaagacatgacctatgcaaaactcaccataatataaaatgtcctgtgatcacagaccaggaagcaatgcattctgcagggcagtgaagagaggcagagaagaggccatgtttgaactggatttagtaaactcacctaaaggctaggtgatgtgccaaagatccaaagaaactaaagactgttctgcctctagcacattcctatcactacgttccatactcctatcactcactttttcactgtctaccagatgtgatgcttcatagcaaagatctgttactacctaaaagttaagacctacttggttggtaatgtagacagtcatagtcataaaacaagttattatttccttaaaaccaagagagataaagtagtatggaggggagaacaaaggctaagggacctgttggggctgagttatagactggattggcaataagctgtgtgtctttggtcaagctacttattctccctgtacttctttttccttcaactgttaaatgaaagcaagt

SEQ ID NO: 243616 - DNA, 621 bp, Homo sapiens
atatggtgtactttaccattgtgtagtttacactaggaattcacacatacatgatctcatactctctcccacatatcaataagtctatgagatagattttatgactggtagaagacatgacctatgcaaaactcaccataatataaaatgtcctgtgatcacagaccaggaagcaatgcattctgcagggcagtgaagagaggcagagaagaggccatgtttgaactggatttagtaaactcacctaaaggctaggtgatgtgccaaagatccaaagaaactaaagactgttctgcctctagcacattcctatcactacgttccatactcctatcactcactttttcactgtctaccagatgtgatgcttcatagsaaagatctgttactacctaaaagttaagacctacttggttggtaatgtagacagtcatagtcataaaacaagttattatttccttaaaaccaagagagataaagtagtatggaggggagaacaaaggctaagggacctgttggggctgagttatagactggattggcaataagctgtgtgtctttggtcaagctacttattctccctgtacttctttttccttcaactgttaaatgaaagcaagt

SEQ ID NO: 243617 - DNA, 450 bp, Homo sapiens
tggtggtggtggttggaggagacagaatcataacttaaaataactgccaggtaaaatatacagctggcctaattagcatttacattgaccaacactttatacttcttaacttccctgtcactgctcaagcccctgttaatccccctcctttctcytattctctcattctccctctaaaatgccccgtcacctctgtacaaattcaagttgagtttagttcacactggactctcttcccaactgcaatagtatattactgattaaaatctatccttatcactttcactagtgtctggctttgtttattttgacattgcacagtttaagggaaacttacattcccttctactcctcctagttttaacttccagaacaattgagagtgggtaggtaaaatcctggtgtaaagcatttggaaatacacttggctgctggtcaaagctgcattct

SEQ ID NO: 243618 - DNA, 680 bp, Homo sapiens
tcaattgggaaaaaatttgaagtgggacttctcctgaagcagtggcaggtctgttctagacaagcatacatagtaaatcagagttttcatatttcattgcctgaaactaactcaaactgtcagtatttggccaggtgtaaatcatgcagttaagatagaggatagcaaacaacctgagcttcaatattagatactggaaaagaatttgaagatcaggctctttgrgaaataatcaattgagaaaaatcaaagttaatgccactattaagaaggttataatgccaagtatacaaattataatattaaaatagagccaaatagtaattaggttgcataaaaaataattattattatgagtgaatctcttttaatgtattaatttgattaaaagagttgctgagtatgtgagttacaaaggcttacatttagagatagcaatccataaatacttatatgaacataaaataatctgaatatctactggtagttataggtcctcttttattgccactgatttttaatagatagaaaatttacattggtactagcaatacagaggtctctgcagtctagtgcaggatccctatttatgttctttcttaagggaaggcttatgagtccacctgagggtaaggacacacacatttcttttctctcacctagatagtgctgaatattta

SEQ ID NO: 243619 - DNA, 483 bp, Homo sapiens
aaatattgtaatatcacacttgtaattgctgatagttctaagatttgaggaagaaggtgccataagcatgatctaaaaggatcagaagccctatggggggctttcagaatctagccrctccatctggttggaagtcccaatgagaatggcatgctctaagtaaccaccttgattatgatgtaaataataacacatgggcctttccaaacatgtcccctcatggaattccagatccttgtatgatgtttgctaatagtaatggcctacgaatttgtgggcaaactggagacatctgtaccaacagcccttgccacaaagatcatctgagatactggccagggcatataatgttaattttttgaaacttcatttgttgggtggacccttctaattttgcatgtaagattccaaatcgcattgtgaatgactattctgagtatggatatccccatcccaaagatgcccctattatatataaggggg

SEQ ID NO: 243620 - DNA, 596 bp, Homo sapiens
acttggttgcctttttgaaatggcattttattaagctaatagtaagatcaagctataactgtaggatttgcaacagaatccctacagaggcatatttttttttttttgagacagagtctcactctgttgcccagactggagtgttgcggtgcaatctcggctcactgcagcctccgcctcccagsttcaagtaattctcctgcctcagcctcctgagtaactgggactacaggcatgagctaccatgccgggctaattttttttatttttagtagagatggggtttcaccatgttggccaggatggtctctatctcctgacctcatgatctgcccgcctcagcctcccaaagtgctgggattacaggcgtgagccaccacattccattttatatatttgggatggaacaatgtgttactactatttgatctagagtcagtgtttaatggagttccaggagttctgttcctacagagccatccaagggctgaaggatcactgtcttatatcacatcccttccctacacagctgtaaccctaccacagcacaccttctctgatgctctgctcctgtatccctattagttaattttcaa

SEQ ID NO: 243621 - DNA, 596 bp, Homo sapiens
acttggttgcctttttgaaatggcattttattaagctaatagtaagatcaagctataactgtaggatttgcaacagaatccctacagaggcatatttttttttttttgagacagagtctcactctgttgcccagactggagtgttgcggtgcaatctcggctcactgcagcctccgcctcccaggttcragtaattctcctgcctcagcctcctgagtaactgggactacaggcatgagctaccatgccgggctaattttttttatttttagtagagatggggtttcaccatgttggccaggatggtctctatctcctgacctcatgatctgcccgcctcagcctcccaaagtgctgggattacaggcgtgagccaccacattccattttatatatttgggatggaacaatgtgttactactatttgatctagagtcagtgtttaatggagttccaggagttctgttcctacagagccatccaagggctgaaggatcactgtcttatatcacatcccttccctacacagctgtaaccctaccacagcacaccttctctgatgctctgctcctgtatccctattagttaattttcaa

SEQ ID NO: 243622 - DNA, 515 bp, Homo sapiens
gaactgctttcagacattgaaatatatatttctatcatgtatcatttttgtgcatatacagaataagaaaattaattggttaaggtatttctaaaatttctttacattaagaatctcagtcttctgaatcacttttcaacatagtcattaatttctgtatttttccatacaacattattatccatcatcaagacatagctaatataatgttttctaaaagagtgcttcactattaactctggtatttttttcccaaggcaatattctgccagctttttctcaagatgcatagaaacgtgaagcaagtgacagccacatcaccaattttatccataattacaaaatgcagccctatttcagtgatgttcaaaggtaacaaagaaaagtytatcttagacctgataaaatatgataaattcaatatgcttaacagcttgtatgacaggtctgctgatgatcagctttgcctgcatattcattatagcttgtgtttacatagttcattttgtgtgagg

SEQ ID NO: 243623 - DNA, 515 bp, Homo sapiens
gaactgctttcagacattgaaatatatatttctatcatgtatcatttttgtgcatatacagaataagaaaattaattggttaaggtatttctaaaatttctttacattaagaatctcagtcttctgaatcacttttcaacatagtcattaatttctgtatttttccatacaacattattatccatcatcaagacatagctaatataatgttttctaaaagagtgcttcactattaactctggtatttttttcccaaggcaatattctgccagctttttctcaagatgcatagaaacgtgaagcaagtgacagccacatcaccaattttatccataattacaaaatgcagccctatttcagtgatgttcaaaggtaacaaagaaaagtttatcttagacctgataaaatatgataaattcaatatgcttaacagcttgtatgacaggtctgctgaygatcagctttgcctgcatattcattatagcttgtgtttacatagttcattttgtgtgagg

SEQ ID NO: 243624 - DNA, 625 bp, Homo sapiens
tcatttcaagcctttcagtctccattttagaatgaaatcaaaccaaacactgggctcccttcagccatttaaaaaggattagtgtgactgtcagccttacaagacttggaagacaggcttgctggggagaacatggagaatcacccagcacccacgggttgctgggcatattgaccatgtttgaaccagctttctttcatgaaggacttagctgtcacatggggctggaagaagttttggagcaactgaggatttctggctggagccaacccctggtgttatccaaaggcttctggactgaccccagtctccaaccacctgatagggtgtcagcaacaagatctccaacttttctatcataatttcttcctttcctgtctgtaatcattatctctcctctcctctctgtgtatgcaatgtgtgggaaattttacagttcagggaagtaatcctgtttggcaagtaaatggagatatggctcaasggatggtgtctttgtaattttctagaaacagagggtcccctacagagtaagggtcactgtctgcccttgctctggagatcacttggcacttccaggcctctctctgcccttggtctggagagcacatggcactttcaggtc

SEQ ID NO: 243625 - DNA, 562 bp, Homo sapiens
aatcttcagctgcttataagtgatgactttgtagaagtagcttcagcaggagataagcttgtggcccctaagcctttctcaagtgtgtcaccttaagaatgagttttcagtcagacagtgtagtcagcttagcccaggtatagaaggtaatgatttgatgtatgtatacattttaaaataattgccacaaccaagttaatgagcatatttattatttcacatagttacctttttgtgtggtgagaatacttaagatctactctcttaaccaatttcaagtatataatacattattactaactagagttaccatgctgtaaattaggtctacagaacttaatcatcttataactgtagggtttgtttttaccctttggccaatatctctccatttccctcacccccaaacactggtaaccaccattctactctgtttctaatgcattcakggattccacatataagtaacatcatgcagtatttgcctttctatgtctggcttattttacttagcacaatgccttcaaagcttacccacattgttacaaattcaaggagttac

SEQ ID NO: 243626 - DNA, 238 bp, Homo sapiens
taaatagcgtattagtttctttaatattttctcacaaatatctcttttacataaactctaatacattgcctttccctgctcatcaagaatgtgaaagaaatactgaaaatagacctgcatttgtttaaccaaaagctaatatgtaawaaaaaaaaaaaaaaaaaaaaaaaaaaaaaaaaaaaaaaaagataaggaaagccactggctgtggctttgtacaaacctgctgggatacatg

SEQ ID NO: 243627 - DNA, 578 bp, Homo sapiens
ggcccaggagtttgaggctgcagtgagctatgcttatgccactgcacttccaacctggatgacagagtgaggccatgtctcttaaaaawtttttttaaaatttagcaaatggagtgtattttttaaatgtggcaacagggcaaacaattcgttttaggaaaaacaaaatgtaaaaagaagaaaacgcaataataatatactgttaggctctgcaataaacaatatttacatactcatagtaaacagaaacactgattactatttatcataaactgtgatgtacacagagggtgggagaaagggagacagaggttgtgtgagagctaaacactcatctatgccaatggtaacaggaaattaatagaaatgatgattaattttaaagaggaaatataatcagtcacattttttaaaagatatatgaagacaaataccagaatatacagctagtaaaaactgaaagtggggaaaggcccaggtagggcggtgggctggatgttttctcttagaagccttttaatgctctctgatccttgtctctgttttgattttttaaaatactattattgtaaaaagtt

SEQ ID NO: 243628 - DNA, 533 bp, Homo sapiens
ccatttcagcttcagcattttctttttcaaatgccagtgttgtggtttcaggttccctttgatgtcagtagcccagagcctttgcagagcgggaacccactgcacgtggcagatgtgttcagtgttttctgtagaaagagaygcggggatgagttctccaccattgaagaggccagtgaatgtgtagggccctcactgttgagcagctggctcaggatccttccactgatgcattttgcctgatacaatctctgcagagaggtccatttactgttctttggtcaatctttgaaagagacacattccctacctctctgtagatcagcatagttatgagaatgatgaactcagcattgcaatccctgcctgccagtttgctgagtgaccttgaatgtgagttaccaaggactgcaattgcctgtcttccttcagaacatgcctcgaggaagatatgctcaggtaaagtaatctgttgacaagccaagcaaaaggcaacctttgataatctacccaatggaaacatttaatggaat

SEQ ID NO: 243629 - DNA, 536 bp, Homo sapiens
tttagcataattcttaagggcctgaggattttcagaatggacaatggcttccacttaaagtccagttagagagtcagcctgtcctttgatgctttgaagtcaggcattgacttctctctagctatgaaagtcctagatggcatctccttccagtataaggctgctttgtctacactgaaaatctttttagtgtagccaccttcatcartgatctttgctggatcttctggataccttgctgcagcttctccatcagcacttgctgcttcacctcgcacctttttgttgtagagatggcttctttcctcaaacctcatgaaccaacctctacttgcttccaacttttcttctgcaggttcctcacctctctcagccttcttaaaattgaagagagttagggctttgctctgggttaggctttgacttaagggaatactgtgtctggtttgatcttctgtccaggccaataaaattttctccatatcagcattaaggctatttcactttcttatcatccatgtgttcactggagtagc

SEQ ID NO: 243630 - DNA, 508 bp, Homo sapiens
gtaatgtttcaatatatcctaaaagacagctatttttagcgacagcaatgagacctgggaagatttactcccaaaatgagaaaaaacccatgatttgataccttgaacatattccaacaacctactgaagatcaatttatctaatttcattttatattttgatgttgtgttaagacagttgacaaccaatttctttccccttgttaactgaaaatatcatactttgaaacagtccamtctaggctggcaaaaacatatatatatatatatatatatatatatatataaaacatattatctatctatctatctatctatctatctatctatctatctatctaaatatatttgagacagtgtctcagtgtccacattgcctaggctggagtacagtggtacaatctcggctcactgcaacctccgcctcctgggcccaaatgatcctcccatctcagcctcctgagtagctgggactacaggtgcacgccaccatgcccggctaattttt

SEQ ID NO: 243631 - DNA, 508 bp, Homo sapiens
gtaatgtttcaatatatcctaaaagacagctatttttagcgacagcaatgagacctgggaagatttactcccaaaatgagaaaaaacccatgatttgataccttgaacatattccaacaacctactgaagatcaatttatctaatttcattttatattttgatgttgtgttaagacagttgacaaccaatttctttccccttgttaactgaaaatatcatactttgaaacagtccaatctaggctggcaaaaacatatatatatatatatatatatatatatatataaaacatattatctatctatctatctatctatctatctatctatctatctatctaaatatatttgagacagtgtctcastgtccacattgcctaggctggagtacagtggtacaatctcggctcactgcaacctccgcctcctgggcccaaatgatcctcccatctcagcctcctgagtagctgggactacaggtgcacgccaccatgcccggctaattttt

SEQ ID NO: 243632 - DNA, 554 bp, Homo sapiens
tacacacaaacaaatcagactcaaatctctgcctgtgtgtggagcttatatttcagttctacattttggaactctctgctacttcataagaagccagttaaatgtcaaaatcctgaaaatgatctgttgaaatcctgagcacaggcgccagacatatgctacaagtgttatttaaaaactaactagaggcagtgttacatatgatcatagctctccatcaggttcttttaaaacaacacactagcgagaaagctctttttatccgmctccatctgctgttggtggtgatcagcatactgtgggcattgtggtatcatccgagattaggctgtgaaataggaagtggggttacaggcagatccgcaagtgtatgcaaactgttgagttctatctcttgctaaaaccaagggtgcccaattcaggtttggagagtagggaaagtaaggttatcagcgcattcctatcagggtcgttttcttttttgcactgctcttgttctggttttataaggagaacacaagcagagtctatggaaaatagttgccaaagcatac

SEQ ID NO: 243633 - DNA, 573 bp, Homo sapiens
cattggtatatggctttgctgtgattcagccatttccctattactttcattgacttcatggacttaatgaatattctgcagtttcgttttgtaattgattagctctttaattgaactgaactgccaaatggtgtagtctctaagcctccttcccctgttgataatctagtgcttctcaaattttaacgtgcataggaatcacctgcacttctaatatccacttggtcatatggatgctgttctgccagaccacagaccactgctgtccaatagaaatgtaatgcctatataaattacttgtgcttaaagtttctagtattcacattataaaaagtaagcacgtggaaaaaaagtgaaataaatgaatatattttacttagtatattcacaatatcattttaacatgtaatakgaaaattattaatgagatattttatgttctttacattggaccaggttttttgaaatatcaagtgtgttttacacttagagcatttctcaatttgcattaggcacatttgactagtgactgctgtatcgaacaacagttttggagtctaaaagtgtagacca

SEQ ID NO: 243634 - DNA, 605 bp, Homo sapiens
atcttttaaagttggctgaaaatttcctatattttgctacataatatatatttttaaatttcagttttattaaagtgtaatgtacatacataaaataaactaacattcaacaataaaaaagaatgatctatggagacaacatgagtgaatctcaaaagcattaatctaagtgaaacatgtcagacacagaaggctacatactatatgatttgtatttctctattacagcttttgcttccttgagtaagcagtgattaatgtgataccatctatcatgctttatatctaagtgctttttttcgygttttctctttccgttcttacaaggatcttttgaggtttgtactgtttcctattttagagatggattgtaccacagtttgtattcacaagttcataggcctttgagttttcaatttctggccattatgaatgttcatgtaaggcctttgtgtggacttatgttttcatttctcttgggtaaatacctagaagagggattgctggatcatgtagtaagcgtatgtttaactttattagaaattaccaaattattttccgcagtggttgtaccattttgcatttccaccagcaatgaagagaat

SEQ ID NO: 243635 - DNA, 182 bp, Homo sapiens
ttattttcttagggctgccgtaacaaattgccacaaacttcayggtttaaaagaacagaaatttattatctcacggttctggaagtcagaagtccgaaatcacagtgtcacagggctgtgctccctacttaggctccaggcaaggttcttctttgctttcctgcttccagtagctccaagct

SEQ ID NO: 243636 - DNA, 571 bp, Homo sapiens
ccaaataaggttatagtcacaggatccaggagtttggacccagaccaaccttttgtgggggccacaattcaacccactccaggattttaataataactattccataacaaaagacagaacaccatgactgtccctccattcrcctgcatggcctctgaaacctaaggacaccttagaagtggcatctctagctcggcgtggtggttcatgcctgtaatcccaacactttgggaagccgaggccggcagagcacttgaaatcaggagtttgagacaagcctgggcaacatggcaaaaccccgtctccactaaaaatacaaaaattagccagatgaggtggtgcacgcctgtaatcccagctatgtgggaggctgaggcaggaaaatcatttaaacctgggaggtggaggttgcagtcagccgagatcgagccactgcactccagcctggaagatacagtgaggttctgtctcaaaaaaaaaaagtgtcatctccaccactggctccctgggccacagacaggcagggaggaaaaggactcagatccctcgtgtgccttccaccgacggcttc

SEQ ID NO: 243637 - DNA, 571 bp, Homo sapiens
ccaaataaggttatagtcacaggatccaggagtttggacccagaccaaccttttgtgggggccacaattcaacccactccaggattttaataataactattccataacaaaagacagaacaccatgactgtccctccattcacctgcatggcctctgaaacctaaggacaccttagaagtggcatctcyagctcggcgtggtggttcatgcctgtaatcccaacactttgggaagccgaggccggcagagcacttgaaatcaggagtttgagacaagcctgggcaacatggcaaaaccccgtctccactaaaaatacaaaaattagccagatgaggtggtgcacgcctgtaatcccagctatgtgggaggctgaggcaggaaaatcatttaaacctgggaggtggaggttgcagtcagccgagatcgagccactgcactccagcctggaagatacagtgaggttctgtctcaaaaaaaaaaagtgtcatctccaccactggctccctgggccacagacaggcagggaggaaaaggactcagatccctcgtgtgccttccaccgacggcttc

SEQ ID NO: 243638 - DNA, 571 bp, Homo sapiens
ccaaataaggttatagtcacaggatccaggagtttggacccagaccaaccttttgtgggggccacaattcaacccactccaggattttaataataactattccataacaaaagacagaacaccatgactgtccctccattcacctgcatggcctctgaaacctaaggacaccttagaagtggcatctctagctcggcgtggtggttcatgcctgtaatcccaacactttgggaagccgaggccggcagagcacttgaaatcaggagtttgagacaagcctgggcaacatggcaaaaccccgtctccactaaaaatacaaaaattagccagatgaggtggtgcacgcctgtaatcccagctatgtgggaggctgaggcaggaaaatcatttaaacctgggaggtggaggttgcagtcagccgagatcgagccactgcactccagcctggaagatasagtgaggttctgtctcaaaaaaaaaaagtgtcatctccaccactggctccctgggccacagacaggcagggaggaaaaggactcagatccctcgtgtgccttccaccgacggcttc

SEQ ID NO: 243639 - DNA, 554 bp, Homo sapiens
aaatctagcattaagtaaggtataattaacaatgttcggtgtcatataagaaatacagacatgtaaaratgcacagaagtgcaactcctaccaagagaaaaaccagtcaatagaaacacactcaggaatgatggatgttggaaatagcacacaaaggattgaaaacaccaattacagatatacacacgaatttaaaggaaacatgaaagtaatcatcaaagaaggagaaaaattaaaaaggaaatacaagggccaaaaataaaaatcttaaataaaaaaatttctttatgaaatgaacagattagacgtgaagaagaaaagatcagtgaacttgaaagttgcaatagaaactttcaaaactaaaattcagtcaaaagagactaaaaagaaaatttaaatgaatctttagtaacctgtgggaaaatattcatgcaagtatatggatcacatacttgtaattggaagctgagaaggaaaggaaagagggaagagaaaaaatatttgaataatggtaaaaaatgctccaaatttgatgaaacatacaaaaccaccca

SEQ ID NO: 243640 - DNA, 518 bp, Homo sapiens
tttcagacagcccagtggcctcccactaaactcgaaggtaatgagtctctgctcagtctcacctcctggacttctgttccagtgtgagtctcacctccattcaacttcttcctgggccttttcagctctaggtgtaaaggttcartgtgaactcgtagaaagaagacaggcttttcagtcaacagatctgaattcttataaggactgtctcatagtccttggtctcagtttccatatttgtacagtgaggatcatggtacagcgttagggctggacagaaagccctcagactggcttaggacagatggagtggtcatttgggttctatatactccatttcactgtgaataaaagctgctctaaaaaatagtgagagtaaaacgaaaagattgatgttgattttcatactttaacccaatatatctaaaatattgctatttcaacatataatcaatatacaaaattattaatgagacacttcacattctttgtaggggctgtctttgaaattcaatgtg

SEQ ID NO: 243641 - DNA, 503 bp, Homo sapiens
ctctaattataagctgctattatacctcatttggatctgggaattttctcatgtgatgtatgtacacacacacacacacacacacacgactaatattgcaatattcttttttgtctatgtttgtgtgtccttgtagaactttctatagcccagtctggaagtgtagggaaactgtatctgtttcagagtgaaactgctctaggggatgggaaattttgagtttattatttccatgagaaaatggaatggggcttcttttgggggaagatttaaaattatctgtggaaaaaagtgagttggacttggtaatgtaagatgagaaatttttcattattatattcaatgagatagayacaaatactggtttccttaatatttctgaaattgtatcattgactatgatagatgagactactgttcaaacatattcactcttctacctctccatttcactggaagagtgtagttactggttctattaatgttgggcatggctctgactt

SEQ ID NO: 243642 - DNA, 451 bp, Homo sapiens
taagctcaacatgagagactttaaataatataaacaaatgacacactttttactcaactttttgttgtagaaaagttttttttcaatgaaaaacttctgttaacaatactgttctcaaggaatattttctgtttttataamctgggtcatgggttactactgacatctagttggtagaggccatgaatactgctaaactctctgcaatgcacaagacagtcctcacaacaaagcattatctagcccataatatcaacagtggtaaggctgtgaaatctaaactaaaaatagattttgaaaaaatttcaattgtataattctaccacactaaatatcaatataatcaatataaacatatactctttgagattctcaatcatttaagaattatgagagtcttaaggaacaaagaaaatacaaataatttgcttcgatattttagtaggcacaa

SEQ ID NO: 243643 - DNA, 590 bp, Homo sapiens
ggcctctgctgcagctgtagctatacacgggccaattgtcatgtctgcaaaatcaggctgtaattctgattctaagttagaaaaagggcaattctctatcatttgcatcaatgtaagcttaataaacatttttatcacttattcatttttagtagaaaaaataactttctttggtattttccatatgttaggatatgctagatatggaaaacatatctagtttttgaatcaaagaaaatatttgattttagattgaaaaggttaaacataatataccacactttctgaagcacagccgattttaagcagatctaaaaaaatagatttaaagaaacaaataaaactctctttatttatgtgtgcaactcgaataasaaggctaaatttttcagatatgcagaaatgatttatagcttgcaattacccactccattcaatataaacaggatcataattcatattacataatctagagctcatttgaaaatacataatgctattctgtaaaaaatagtttcttatgtcatcttgcatgtctagcgccatgcccttaaagtgattttttaaaaagaaataagtaatttatatta

SEQ ID NO: 243644 - DNA, 494 bp, Homo sapiens
ggccctgttggcatggctcacgtggggatctcctgatgcaaatgttgcaaagatccatgggggaagcattgtttcccaagcagggtctcataatcactcaccacctcccttggcttggggtggggcttcccttggctatgtgccactctcaggtgaaatgttgccccaccctgcttttcttcattctgcatgggttgacttctatgcctaatcactcccaatgcaagaacctgaatatttcagttaaaggtgtgtattcactcaccactttcattcctctctgtgagtaccrtggaccacagctgcttctagttggtcatcttaagaaagtgaatgctaggtatttttgtatgttgattttgttattctgaaaatttgctgaagttatcatctgaagaagattttgggccaagattatggggttttctagatatagaattatgtcacctgtaaacagatagtttgactttctctcttcctatttggatgccctt

SEQ ID NO: 243645 - DNA, 390 bp, Homo sapiens
gagtctctcatggggatttttcttcttccaattctaaactgagacactggctcccaccatcacacctccccccaaattccttttagtttaaggatgcccatscctttcagtctttacttgcaacatcataggatctctatttgatgagtgaatgtttgttgagagaatgaatgaatgagttttagtggaaatggcatgggtattatagttagacagactaggttcacattccagctctgtaactgactaaccatgtgacctctctgagcctcagtttactcctctgtaaaatgaggataataacgtctaccttgcagggattttgtgaggatgaagagagctaactaaaaatgtaaagtacctggcattttataggtacttaacctatgg

SEQ ID NO: 243646 - DNA, 615 bp, Homo sapiens
aatcgctccgttttagtggctcaggctgatgtagcctcaattaatttgggaggagagataaacggccattcctctttgtctcccatcccttcctcccttcctgccctctctgtcgtctcccccacagcctctctgtctctctctgcctcaggctcagtttttctttctccctttctgagtctcacctttctcrtcctgattgtgggggtctctttctctctctcttgaaatttctgtctttccaactctttctgtgtcttgttcaaagtctgtctgagtttttttttgttctctctctgttttgttctgcctttcactcactctgtctctcactcttcccaactctttctttttcttcatccatttctctgtctgtccgggccgctgttcttttgtctttgtcttcctgccgtgtttctctgggccccctgcttctggtcactttgcccattgttcactcggctttggggctagtttccatacccctgagtgcactgtgtgttttgtcttgctctgtttctgatacagttttcctggctgtctctctcctcatctctgtcttctttgccgtctctgtctctttgtctccgccgcaccacctccggatctctcttt

SEQ ID NO: 243647 - DNA, 456 bp, Homo sapiens
cagggaggggacagcagagagctgaagctgaagctgaagctttgcactctatccatacctgggggtgtgtgtgggaagcaaaagagacagagaaggagtgttagagctgagagaggrgtgggcgggagcgaagggcgaggcagccaagggaggagtgagctttagggggtgacggtattcccaagggttcccacaggatggggcctgagaatcagatgtagggtctgttggtcaggaggctggacaggaggccagggcaaccttgtgcagggaactatgggtggagttcctgagagcaggagacaccccagggcataacattcatagacactccattgcctgcccactgctcagaccaggccccagacttgccgtttccccagaggcccttctgtccctctcttagatggagtggctgccaagctggcctggacaggaaagtggagatcaatgaga

SEQ ID NO: 243648 - DNA, 478 bp, Homo sapiens
gagagtctgcagggaggggacagcagagagctgaagctgaagctgaagctttgcactctatccatacctgggggtgtgtgtgggaagcaaaagagacagagaaggagtgttagagctgagagaggggtgggcgggagcgaagggcgaggcagccaagggaggagtgagctttagggggtgacggtattcccaagggttcccacrggatggggcctgagaatcagatgtagggtctgttggtcaggaggctggacaggaggccagggcaaccttgtgcagggaactatgggtggagttcctgagagcaggagacaccccagggcataacattcatagacactccattgcctgcccactgctcagaccaggccccagacttgccgtttccccagaggcccttctgtccctctcttagatggagtggctgccaagctggcctggacaggaaagtggagatcaatgagatgaactgctctct

SEQ ID NO: 243649 - DNA, 478 bp, Homo sapiens
gagagtctgcagggaggggacagcagagagctgaagctgaagctgaagctttgcactctatccatacctgggggtgtgtgtgggaagcaaaagagacagagaaggagtgttagagctgagagaggggtgggcgggagcgaagggcgaggcagccaagggaggagtgagctttagggggtgacggtattcccaagggttcccacaggatggggcctgagaatcagatgtagggwctgttggtcaggaggctggacaggaggccagggcaaccttgtgcagggaactatgggtggagttcctgagagcaggagacaccccagggcataacattcatagacactccattgcctgcccactgctcagaccaggccccagacttgccgtttccccagaggcccttctgtccctctcttagatggagtggctgccaagctggcctggacaggaaagtggagatcaatgagatgaactgctctct

SEQ ID NO: 243650 - DNA, 578 bp, Homo sapiens
cagttaatggcaagttcaagatgttaactccaatctcataactcccacaatagtgctttttcctgtggccagagtccttccctctcggtcttcctttcagtcccctgtgccaagccctctgcactgactctcagaaacattcaaatagaggaagtcgctcttggaaagaccggcagccgggtaagtggaacaagtatgcatttggaatacaaaaagagcctgagcaggaatatcaaatagcttgtaggcttagagagaatatatgtaaaacacttggtacaaagtagcaactgtgaacacttgttgggcacttactatatgctaggcactatgccaagaactttatatattatctcatttaagttttatgaacttttaaagtacgattatttcgctatcasagaagaaggaagtgaggtccagagaagtaagtcacttgcctaaggccactcagctagtgaattttgagaccaagattatgccctgctctggttttcatgcattatattatgcttcttccttcaataacaaaggtcactctattgaatccttactttgtggcagactgtgtgctatat

SEQ ID NO: 243651 - DNA, 609 bp, Homo sapiens
agtgtgagcaagttaattcagcagataagtaaaaaggaaagagtggatgacagctgaaaggaaaagtgaaagtgaaggaattagtaaggagacatcagagaaaggaaggtcacaggtggggagtgaakaaattaaataatgtaataatgtactgtgtacaaagaccctctacaacagaatgaagtattcagtcctacacaggggcagggggcaagagtgagagattaagggaaaggaataagactcttccagtaatgacataatcacatatacaactttaaaaaagcaagagaggatgaaaccaaaaaacaacctgaactttgaatataaaataacatttttaacagatccagagggtaagggacattttcaagagtctactgacattacattcactttttttgagacatggtcttgctctgttgccaacgctggagtacagtggtgcaatcacatagctcactgcagtcttgaactcctgggctcaagcaatcctcttgcctcagcctcccaagtggctagaactacagctgcatgccaccacgcctagctatttatttattttttgtagaggacagggtttcactatgttgcccaggctggtctcaa

SEQ ID NO: 243652 - DNA, 458 bp, Homo sapiens
gaaaatgccaacagaagcagatttaaccgtaacaaaagcttgctgctgcagcccaaggatcaagaaaggggcagcttagcgagacaaaaaacccttttagatagtaactgctctactccagccaaacatgacagaaaaaactgtggccccaagccctacccataacagcaarggcccagtgagaagcctagacttctaccctcaccaggctccaatggtaccccaatatctccactaagttggtgtcaataaaggccatgtggagagcatggactcctaccccaatttggcaaaaacaaggcactcctcctcttctccattggactggtgtcagatgaggcctactgaaggcccagggcttttactattacccaccagtaatgaggtcatacccatgaccatagcatcagtataaaccacatggggaattggaactcccctccacccaaaaataatga

SEQ ID NO: 243653 - DNA, 529 bp, Homo sapiens
tcgcatatgcttaattgcacaagctgctaggctgaatgtagtacaaagcaagctaaaaattgttgcctgtcttccatataaggcagattataacaagcaagtatagtgttagtgctttcataagcccagcttaactgagtttgatttttgtctttaagacaaaactaattttgaaccttttctacaagaccatctaagakgccataataaaaataaatgaaaatttataagtttattgtgcatacaggctggtctctgggcatggttagcaggatttctcacacttactaagcaaacatgtgtttggcttcagggctaaaagcaagcatttctagttttaaatattgtacagaaaagccaccatttcatttaggaagctaccttttggctctcagggtatatccaaataaatggttgtttactgactactgacatagacatatctcattaaaaatgttgccaaatgagaatgactgccagaaacaaggatcactagatagtgtatgtggttttggttattaccacccat

SEQ ID NO: 243654 - DNA, 453 bp, Homo sapiens
aatttcttatttggtttctcataaaggggattctttatgtaataaagagctcaatgtttccctatgcttctttatactgcatataataacacttttcacgttgccctttcagatgaagtctttcaatgtggttaaataacctagtactaaatcataattcagtaaaagtaagcttaagagggtgttgaaataatcctggccaatacagtatatagacccttgtgattatacttgattcaaaggtaacactcaggacacctagaagaacatatgctgtgtggccttcaggaaatatttcaaaaatgtgatatctcaaaatgagcatttaataatcaaacatcaagaaatttgagtttatatttgacaagaacctggaaaaagaaacttctgttcttcggattaaagcacatttcttacattcaytaacaatcaatcgagaaggataagcataaa

SEQ ID NO: 243655 - DNA, 246 bp, Homo sapiens
catcacacataaaggagattagtctacgtgaccatagagaacrtcttgaatgttgggtcaaggataaaactcagggaacgtcagaagaacaactcagtaagaagactgaaagagtcagtcagaggagtatgagaaaatcaaaatttatgtttaccatgagagtgcaggagtttccaacctatctttctatcttctttttcctgttccatatataaaaatatatgtatatattccaatgttttagtc

SEQ ID NO: 243656 - DNA, 246 bp, Homo sapiens
catcacacataaaggagattagtctacgtgaccatagagaacatcttgaatgttgggtcaaggataaaactcagggaacgtcagaagaacaactcagtaagaagaytgaaagagtcagtcagaggagtatgagaaaatcaaaatttatgtttaccatgagagtgcaggagtttccaacctatctttctatcttctttttcctgttccatatataaaaatatatgtatatattccaatgttttagtc

SEQ ID NO: 243657 - DNA, 486 bp, Homo sapiens
taactgtatttttctgttatgtgagtcgttaaagtcacttttaaatttaagctagacttcataagatacaatcacatagaagaggatttcttaatgccagcactatttacattggctcaggtaaatctttgttgtggggatgggtgctgtcctgtgcattgtaggatgtttagcagaatccctagcctttgccctctacatgcttgtagatgcctccagtgactacaattaaaactgcttccagacattgccaagtgtttcctgtagtamaacatcactctctattgagaaccactaccacagagtgctaaaagacatcacgtgtgccttctcaccaaacattctctttttaactacaatgattttcattcacggatccacatattctttgtttgatgcctaaactaagccacatgactttactctttgaccatagatttgttaggagactgataaatgatgaaatttgggctgataaattttatg

SEQ ID NO: 243658 - DNA, 486 bp, Homo sapiens
taactgtatttttctgttatgtgagtcgttaaagtcacttttaaatttaagctagacttcataagatacaatcacatagaagaggatttcttaatgccagcactatttacattggctcaggtaaatctttgttgtggggatgggtgctgtcctgtgcattgtaggatgtttagcagaatccctagcctttgccctctacatgcttgtagatgcctccagtgactacaattaaaactgcttccagacattgccaagtgtttcctgtagtaaaacatcactctctattgagaaccactaccacagagtgctaaaagacatcacgtgtgccttctcaccaaacattctctytttaactacaatgattttcattcacggatccacatattctttgtttgatgcctaaactaagccacatgactttactctttgaccatagatttgttaggagactgataaatgatgaaatttgggctgataaattttatg

SEQ ID NO: 243659 - DNA, 584 bp, Homo sapiens
tcacattgaaacacagaagcacctggagtggggatagagagaagattggttgcaggaattccagatgaatttcaaagtaacamatcagcccctgacaagaacagcactgaagagtttgataacataaatatgtagaggttatgctccagcctggagaaggtgtagaaaccaacactatctaaatctaatgtgatttcaatataaaccatatctttgccttctgtatatctctatggaattacggaatttaaaacggcaaattccatctacactaacctgatcattttttccccagacgcttgcaaatgatacttcttcagaattgttaaactcacttccctagggataagaaattaaaatatgcttacttctgattctaatataaattatcaaaatttacataatctttaaggaatgatatctaggtaaatattcagtgaatatatgcaaatttaagaataattcattatatatttgtttattaaaatttgactcaaatcaagatatgtataatagtagcatgaaaaataacattttttgatagagcattttcaatctattaatgaataatctccaaggtggat

SEQ ID NO: 243660 - DNA, 577 bp, Homo sapiens
gatcattggtcaggtatgttccaccccatgatttaracactcacctatgtcctcctaagttttaaacacaaacaaatgaagatatagatttccgcttcctgaacaagggccaaagttagttgtcagaagcatgctgtcttgctggtatttactcacttatcttttcatgcctatttttttttttaatgaagtaaacttttattattgagcaggaaaccactaataaggaatttcatgaataaggaactcaagctatcatatttgggcaccataacatttgggttgggggaaatggactgtaagattggtctggagttgttaattagcagggtggtgagactgaaggaaggctgaaatgatgagggtgtggagaggtagaccaagcgtcaacctatatagggaagtaagaagagccagaaattaaagacttaaatgtaaaacctaaaactataaaaaaccctggaagataacctaggcaacaccattcaggacataggcgtgggcaaagatttcatgacgaagatgccaaaagcaattgcaacagaagtaaaaatcaacagatgagatcaaattaaac

SEQ ID NO: 243661 - DNA, 579 bp, Homo sapiens
ctccactagacagcgccccagtggggactctgtatgggggctccaaccccacattttcctttcacactgccctagcagaggttctccatgagcaccccacccctgcagcaaacttctttctggacatccaggtatttctgtacatcctctgaaatctaggcagaggttcccaaactccagttcttgacttctgtgtagtcacaggctcaacaccacatggaagctgccaagacttgggccttgcaccctctgaagccatggcctgagctctatgttggcccctttcagccacaactggagcagctgggacacagggcaccaagtccctaggckgcacacagcccagggaccctgggccccaccctgccatctcctaggcttctgggcctgtgatggcaggagttgctgtgaagacctctgacatgccctggagacattttcctcattgtcttggtgattagaatttgaatcctcattacttatgcaaatgtctgcagccgacttgaatttctcctcgaaaatgggattttcttttatgctttgctttccttataaaactgaatgcctttaacagcaccc

SEQ ID NO: 243662 - DNA, 569 bp, Homo sapiens
gttagaaaagaaatgtttcgggagctgtttttattaaaagaaaaagtcttatcaagaacttttaccctctatatctgcctagaattatttcttaataactcctgtattattcccccctcaagagaagtaaacctaactgttgttagtgggtgttgcacgacaattatttctggctacttcgtgatgaaaaggggcagtcatgtcggggaacagcagttgggtcttctcctgaggtggatttaagggcactaggaagaayggcttgtccatgtggggctctgtttgcagcaccattttgagtttgatcgtttcaaggtgaaaagagataaattttacaagaaggttaaaaatatagggttggattatgagtattaaaattatcactgttagtgggggtcctatagactataactaacagtgtaatttgactcttgttagttacacccatgtattgcaacaccagtttgcctccactagatgtttatgtacattaccagaaacattaatataaaagcaacattttccttgagaagagcatacatttcccccttgacttgccattggagaat

SEQ ID NO: 243663 - DNA, 563 bp, Homo sapiens
ccagtgtcttgaaaactgttgttctataggttttgtctgttttgggttgtttcaagtgacaaggtagatttgctccctgctacyccatcttgataaagaagtcctatccatgccgaagtcccatgaattcgttatgtagttatttcaaacttgatgttctgtcttatatttatttacattctatttacctttaacttggaaagttgtttctacaatccagataaatcagatcgtcacttatttttctttttttcttttcttacagcttattttcataatcctgaaattaattttagggtaagacatgagcctgtaatttttttctctcttttttttgtgttcctagtccctcaattagttaattagttcattgctaatcaactttttgttttttattatttttttagacaggttctggctttgtcacccaggctgcagtgcagtggtatgatctcagctctctgcaacctccgcctcctgggctcaagccatcctcccacctcagcctcctgagtagctgggaccacaggtgctcacaaccacacctggcttattttttgtgt

SEQ ID NO: 243664 - DNA, 563 bp, Homo sapiens
ccagtgtcttgaaaactgttgttctataggttttgtctgttttgggttgtttcaagtgacaaggtagatttgctccctgctaccccatcttgataaagaagtcctatccatgccgaagtcccatgaattcgttatgtagttatttcaaacttgatgttctgtcttatatttatttacattctatttacctttaacttggaaagttgtttctacaatccagataaatcagatygtcacttatttttctttttttcttttcttacagcttattttcataatcctgaaattaattttagggtaagacatgagcctgtaatttttttctctcttttttttgtgttcctagtccctcaattagttaattagttcattgctaatcaactttttgttttttattatttttttagacaggttctggctttgtcacccaggctgcagtgcagtggtatgatctcagctctctgcaacctccgcctcctgggctcaagccatcctcccacctcagcctcctgagtagctgggaccacaggtgctcacaaccacacctggcttattttttgtgt

SEQ ID NO: 243665 - DNA, 587 bp, Homo sapiens
tgccatataaaatagcccattgctgcttggtcttctggtatgattgggaggcttcatgattcctcctaggagcaggagcctctatgattcctttaaagcctgcagagccatgagccagttcaacatcttttctttatgatcttacagaaaattagtgctctgaagtggaggtatgaaatgccttcaaggtcttttccttcttgtcttggtaatcagctctcagcttcttttcatgcaaatatctgtagcctgcatgaattttccccctgtgaatggacttttcttcttttaccacactgacaggctgcaacaaagagagctgaaaatgtagaagcaggttgagaattgtctaacagccagaggttggagagtttggaggacttggaagaagacaggaagatgagggaaagtckggaccattgtagagacttgttaaatagttataattaaaagggtgacagaaggatggacagtaaaggccaggcttagaaggtctcagatgaaaatgaggagtttactgggaacaggagccaaggttacatttgttttgctttagcaaagaatgtcactgcatgatgcccctaacc

SEQ ID NO: 243666 - DNA, 587 bp, Homo sapiens
tgccatataaaatagcccattgctgcttggtcttctggtatgattgggaggcttcatgattcctcctaggagcaggagcctctatgattcctttaaagcctgcagagccatgagccagttcaacatcttttctttatgatcttacagaaaattagtgctctgaagtggaggtatgaaatgccttcaaggtcttttccttcttgtcttggtaatcagctctcagcttcttttcatgcaaatatctgtagcctgcatgaattttccccctgtgaatggacttttcttcttttaccacactgacaggctgcaacaaagagagctgaaaatgtagaagcaggttgagaattgtctaacagccagaggttggagagtttggaggacttggaagaagacaggaagatgagggaaagtctggaccattgtagagacttgttaaatagttataattaaaagggtgacagaaggatggacagtaaaggccaggcttagaaggtctcagatgaaaatgaggagtttactgggaacaggagccaaggttacatttgttttgctttagcaaagartgtcactgcatgatgcccctaacc

SEQ ID NO: 243667 - DNA, 447 bp, Homo sapiens
ctttctgccagtgaagtccccttattatacacggcataatggagagcagtgttgccgtagatatcctcaatgtttggattggcgccacattccaggagaacgatggcacaagcctcttcctggctgtgtacagcctattagtgttagayaaaaaactagactataaattctaagaattcaaaatacatattccacaggtttcaccaactagctatatttaaatgagacaaattcattttaattctatgtatttaaatcaaatccatttcatgctgaaagagttggctactatataccttcattaaaggtgtcctgtttagtctgtcacagatgtcgatctggcatcttctgtgcagcaagagagtgaccacttgcacacggccatgggcacaggccaaatgtagaacagtcctaggagagcgagaggggttttcagcaaatgtagtg

SEQ ID NO: 243668 - DNA, 282 bp, Homo sapiens
agataacttataataagagaagcagcaaaggaacctcttttatagttgaactttttttcttcaaagccaggaactctacttgtaacaagccyatctcattcttaagcctttgcatatcttgctgtaagtcttcttctagacatgcttttgatgttctgtcatcactatgtggtggagaataactcacattttctaattcaggtttcatgcttttatagatattagcagtgggactgtcatatgtgggtccctgaaacacacttgccaaacaccttctaagct

SEQ ID NO: 243669 - DNA, 282 bp, Homo sapiens
agataacttataataagagaagcagcaaaggaacctcttttatagttgaactttttttcttcaaagccaggaactctacttgtaacaagcctatctcattcttaagcctttgcatatcttgctgtaagtcttcttctasacatgcttttgatgttctgtcatcactatgtggtggagaataactcacattttctaattcaggtttcatgcttttatagatattagcagtgggactgtcatatgtgggtccctgaaacacacttgccaaacaccttctaagct

SEQ ID NO: 243670 - DNA, 282 bp, Homo sapiens
agataacttataataagagaagcagcaaaggaacctcttttatagttgaactttttttcttcaaagccaggaactctacttgtaacaagcctatctcattcttaagcctttgcatatcttgctgtaagtcttcttctagayatgcttttgatgttctgtcatcactatgtggtggagaataactcacattttctaattcaggtttcatgcttttatagatattagcagtgggactgtcatatgtgggtccctgaaacacacttgccaaacaccttctaagct

SEQ ID NO: 243671 - DNA, 282 bp, Homo sapiens
agataacttataataagagaagcagcaaaggaacctcttttatagttgaactttttttcttcaaagccaggaactctacttgtaacaagcctatctcattcttaagcctttgcatatcttgctgtaagtcttcttctagacatgcttttgatgttctgtcatcactatgtggtggagaataactcacattttctaattcaggtttcatgctttyatagatattagcagtgggactgtcatatgtgggtccctgaaacacacttgccaaacaccttctaagct

SEQ ID NO: 243672 - DNA, 564 bp, Homo sapiens
agggtctcatccagagatctatttttcatcacttattgtgtttttatattgaaacttgagataaaccagtgcaagtctctttagagcaaaacctaggtaacagacatctgggttgcttggcaaaggtcatgtgtaatcctaagttatgaacctgtcacaatttaattaattgttctgcctctgtatccgtgctttcacaccactgtaactgtaagcctgcttcaagctagcccaccccatttttgaagtgtgtataaaagtcaagtgctrtctttgttctgggcccagtttgtcagatgttgagtccgctgggtctgagtacactcgataaagatatcttcctgtgtacaccccaaggtctctctctggtcctcctgattctgcaacaccacctcacccagctaattgtttgtatttttagcagagatggtgtttcacaatgttggccacgctggtattgaactccttaccacatgatctgccctcctcggcctcccaaaatgttggaattacaggcgtgagccaccatgcctggctgctactcctctttttaaattctctcag

SEQ ID NO: 243673 - DNA, 580 bp, Homo sapiens
tcatctcagaatggtgtccaccaaatgtcttaatccaggtagtctcctgcttaggaattcatgaaataagaaccttctggagaagttagaggctattgattgagatggtttaaagctgccccttattatatgttttactcccaaggcagacatcaaagcggctaataattctatgcctgatgtctaactcaattctatgggaatctatacaaaamgttttatttatgagacagagcttgctctgttacccaggctggagtgcagtggcttgatcaccgctcactgcagccttgatattctgagctcaagcgaccctcctaccacagcctccaatgtagctgggattacaggcatgcaccaccatgccccagctgtttaattttttttttttttttggtagagtcagggtctcacttatattgctctggctggtctcaaattcctgggctcaagcactgttcttgcctcagcttccccaagtgctagaattactggcatgagccacctcaccaaccaggtgttccatggaatggtttgagaggcagttctacacagaagccagaagggctgggtctgaatc

SEQ ID NO: 243674 - DNA, 584 bp, Homo sapiens
gatcgagattcttcatctcagaatggtgtccaccaaatgtcttaatccaggtagtctcctgcttaggaattcatgaaataagaaccttctggagaagttagaggctattgattgagatggtttaaagctgccccttattatatgttttactcccaaggcagacatcaaagcggctaataattctatgcctgatgtctaactcaattctatgggaatctatacaaaacgttttatttatgagacagagcttgctctgttacccaggctggagtgcagtggcttgatcaccgctcactgcagccttgatattctgagctcaagcgaccctcctaccacagcctccaaygtagctgggattacaggcatgcaccaccatgccccagctgtttaattttttttttttttttggtagagtcagggtctcacttatattgctctggctggtctcaaattcctgggctcaagcactgttcttgcctcagcttccccaagtgctagaattactggcatgagccacctcaccaaccaggtgttccatggaatggtttgagaggcagttctacacagaagccagaagggctggg

SEQ ID NO: 243675 - DNA, 607 bp, Homo sapiens
gagaaagcttcaagaagaggaaattgcctgccaggtctgaatgaatgaggctagatgagcaggaactgagaaggcaggaaagacagcatgggtaaaactggtgctgatatctgcccaattaactctgaggatagagtccaatggcagggaaataaaaacatatgtccatacaataacctgtaaatgaatgtttgcaacagctgttttcataatagccaaaaagtggaaacaacctaaaggtccatcagctgatgaatgaatggaaaactggtgtagccatgaaatagactattatttgacaataagaaggaataaactactgatatgtgctacaacatggataaaattctgaaaacattctgctaagtgaaagagccagtcagaaaggacttcatattgtatgactctatgtatttaaatatgcagaccatgcaaatctgtggagacaaaagtggatggtggttgcctacaactggggtaggtggagagacatggagtggggttgcagtcatggctaagagatgtagggttrcttttcagagtggtgaaaatgttctaccattgattatgctgatgaccacacagcactgtgaatatactaacagac

SEQ ID NO: 243676 - DNA, 573 bp, Homo sapiens
gctctgggtcgctcccttcttccatctgatggtctttaccacatgttccctcttccctaaccatgaccagttgtacacatctcccaggtggcttcctggtataagtggccaagaactagagtcattttaacttgaatgaatcatggataataatacaagtcctggcatcagacctcccagactttacatcttggctccattgtttacttgctgaatgacttaagccaagttagctaaccagccttcacctgaaaatgggaccagtaacagcaattatctccmaagggtatgttggggattaaatgagaaaaatccatataaactgcttagagctcagctgatcaactagcctcagaaccaacctttaacagtacaggacacaaaacacttcaattttcagaagcagcaccctggtgggagacaagaacatgctttgcatttctttaaagccaaaagtttatggtcagtctcctaactcagcaataggcactgggaacagttccagacacctgcaaagtgaccaaattctagttcttagatttgtagagacctggatgaagttaagaggactgt

SEQ ID NO: 243677 - DNA, 573 bp, Homo sapiens
gctctgggtcgctcccttcttccatctgatggtctttaccacatgttccctcttccctaaccatgaccagttgtacacatctcccaggtggcttcctggtataagtggccaagaactagagtcattttaacttgaatgaatcatggataataatacaagtcctggcatcagacctcccagactttacatcttggctccattgtttacttgctgaatgacttaagccaagttagctaaccagccttcacctgaaaatgggaccagtaacagcaattatctcccaagggtatgttggggattaaatgagaaaaatccatataaactgcttagagctcagctgatcaactagcctcagaaccaacctttaacagtacaggacacaaaacacttcaattttcagaagcagcaccctggtgggagacaagaacatgctttgcatttctttaaagcmaaaagtttatggtcagtctcctaactcagcaataggcactgggaacagttccagacacctgcaaagtgaccaaattctagttcttagatttgtagagacctggatgaagttaagaggactgt

SEQ ID NO: 243678 - DNA, 550 bp, Homo sapiens
gcagtgagaatatgaggtgttggagtctgttgctcacttttatgaactggcctgcttgctttttttattttttttttttttaattaactatttcctgctttccaaggcaattggacagactatttgtaggtcaaaccagaaggcagaaaataagttttctttttttttaattaaaagtttaacaagttattttaacatgattttagcmaaattttagcaactatttttacataattttgtcttgaacttggattatttcatgtgcatgtcaatggagccaggcctcttgtcgaaatgctaattggggtctcacagggaagtcccaaaacagttttatacagccacttttttcctgttttgtatccagaacattctcagttactgctctctgaatgttgtctgaacacgtgacctacaaaaagaccattactgtggccgccatgttaatgctgctatgtaattctcctttaatgcatatccttgggggtcactctataacctgatttagcctttggcttcaccatccctacatctatatttttcttaagaa

SEQ ID NO: 243679 - DNA, 392 bp, Homo sapiens
ttaatggtgctgtgttgtcctctagaatcaatggaactttcactataaccagtggaactgtctgtgctgatgagaatgttttatttctgcattgtccaatacagccaccactagcctcatgtggctgttgaacatttgaagtgtgtttagtgtgaaatgtgtttagtgtgattgaggaactaggctttaagtttttttttttttttttttttttgagacagagtctcactctgtcacccaggctgcagtgaagtggcgcggtcttggctcactgcactgcaaccttkggctcctaggttcaagtgagtctcgttaggctttaactttaattgtaaatagtaataatttaagtttaactagcacatgtggctagtggttactgtacttggtag

SEQ ID NO: 243680 - DNA, 260 bp, Homo sapiens
tgtctcatatgtttagagcaaaatgctaattgggtaagtacttggagatgaagctggaaagagaagctgagcttgaagrgccttgcttgcggaggtgagagagtggactcttgttgagccagtgggaagctggcagtggttttggagaagaaggataaattcaccagagtgtaaatatattcttattactggattaaatcacttcaaataatttcatctggtaaaaacttgaatttattcctagttctttgtgacaagct

SEQ ID NO: 243681 - DNA, 215 bp, Homo sapiens
gaatatgtttaagaatatctgaaaaatttctcagtaaaatccttaaatgcagatttttctycaacttaggttttctgttttttttttaaatttgattcttgggagacataaaagaaaaatatctgtaattttgacttggccttttatttaccttattcttggtcctgccccagttttcttcttttctgaaagcatattacagagagtatgatgga

SEQ ID NO: 243682 - DNA, 215 bp, Homo sapiens
gaatatgtttaagaatatctgaaaaatttctcagtaaaatccttaaatgcagatttttctccaacttaggttttctgtttttttttwaaatttgattcttgggagacataaaagaaaaatatctgtaattttgacttggccttttatttaccttattcttggtcctgccccagttttcttcttttctgaaagcatattacagagagtatgatgga

SEQ ID NO: 243683 - DNA, 596 bp, Homo sapiens
tctggtgcttcttccaaggtcatctggagcaggaaacaaacttgaggcctgtgcttgctgaccgcagaggcagttattggggacgaggcctcttcccactggatgaagtctccacccgcttatttctcacaaccacaggagcccctgcaaaggataacagacttcagccttcattggacaggttttgtaagtttgcaatccaaagtgaaaaggctcctaattctattctggaactcattgatgagggaaaatgtattgaatgctcacaggcgatatacagctggtggtagaagtttaactttaaattttggactcctccaaaattccagaaagtgcccccatgaacagagagaagcctaccttctttgatgcagagtagctctttcctggtgccctcstgggctgaggttccctcagggtgttgtataataagtctgaacctcagcccatggcccttgcggggtcctgccctgtaccttctctcagccttctgggacctcagcagcactgggtgcagggttaatgctccagttccactctgtcagcctctttgagtggcttcctagcaggtgagttttctctgggtgagaagcagg

SEQ ID NO: 243684 - DNA, 596 bp, Homo sapiens
tctggtgcttcttccaaggtcatctggagcaggaaacaaacttgaggcctgtgcttgctgaccgcagaggcagttattggggacgaggcctcttcccactggatgaagtctccacccgcttatttctcacaaccacaggagcccctgcaaaggataacagacttcagccttcattggacaggttttgtaagtttgcaatccaaagtgaaaaggctcctaattctattctggaactcattgatgagggaaaatgtattgaatgctcacaggcgatatacagctggtggtagaagtttaactttaaattttggactcctccaaaattccagaaagtgcccccatgaacagagagaagcctaccttctttgatgcagagtagctctttcctggtgccctcctgggctgaggttccctcrgggtgttgtataataagtctgaacctcagcccatggcccttgcggggtcctgccctgtaccttctctcagccttctgggacctcagcagcactgggtgcagggttaatgctccagttccactctgtcagcctctttgagtggcttcctagcaggtgagttttctctgggtgagaagcagg

SEQ ID NO: 243685 - DNA, 574 bp, Homo sapiens
ttcataaccattagccagccctcaaaagtgtctgaagtccagattcattattatcagacttctctaaaaagtcctaagtcaaaaatgtagttataaaaagatcccacatttgtagcataccctatcactttcatatcctctctaaaggtacccatcttcaacccaggcataaaataattcccacagatatattctaaggagtgtcaacttggagtaagttttttwaaaaacaaatcgcaaaatagtagaagaaaacaaggtaccatgagtgagagtcagtagaaacaacaacagatcaatcagatttgtcaaggcttcagtgatagaattatcagtcacaggttataaaataagtatgctaaatctgttttaagaaataaaagtaagaattaaaaatgtgagtaaggagcaagagactatcaaaattaccaagaaaacttgaaaaagagtgaaatagaatttctagaaatcaaatataattgaaattttttgatggctttcattttcagcagtatggtggattacatacctgaactaaacctcccatcaactataattcacaatgctagataaa

SEQ ID NO: 243686 - DNA, 474 bp, Homo sapiens
gacatgtcctgcctactccccacactccctgtctagacattgtgacatttgcttatgctgcactcaatttagcactttgtcatatcctggtttagattgttttcacttgttgcactttggacttgagccccctaaagagaatatagactttttgtagaaagtttcacctggagcctgtgctcaggcaacacttgttgaattcagctgaatatcctagcactgaaatgagtcacttcttcaagaccctcatgccagtgtttcatctccatttcaggtgccgagccccttttccatgacctggatagcgacgacacctccctcagtaacctgggtgaytgtttcctagcaacctcagaagctgggcctctgcagtccagagtgggaaaccccattgaccatctgtactccatgcagaattcttacttcacatcttgagtcttcccctagagttctgtgactaggctcccatatgga

SEQ ID NO: 243687 - DNA, 566 bp, Homo sapiens
agatgttcaagtcaaacttcacctggagccaacccctctcttcactcttgcaaaaacacacccatccagccaagtgcatttctttcttgccacctctaaagatgaatttctgatgatgacatatttgatttcagtcactgtcttcacagctgaaagtgaactgcccagtaactgtctaacattcttttcaaagcccaccacagcatttccttctcatcagatatcctatcaggctcttgttagctatactggctttcaacacatccctgtccatgtcagcttaaccttaatgcctttctacatgcaaagtgaccacttgtgctttgggcccaccctgtatcctatagaggcttccatcccaacaattgattgaaattacttacttatacaactgtctcccacaaaatagtctatgagcttcttgagrgcaggaactttactttggctttggttttggcttagtatttgcaggatccagtataatctctgacatgtaggacacactcagtcagcactgataaactccttttaacagtccaaaaaagtggtgagtcaatgtttttgat

SEQ ID NO: 243688 - DNA, 562 bp, Homo sapiens
gaaatcacaattataacactaactaagtgacaatactttgcagggttgggaaaaaaagttatccataaggctgtgtatgctctgaatcagtgtccaatatatggtactgtttctcccatagccaggattcacaggtcgaggaatcaaggtgtggtagtggagccagcatcactcactatcacccctagtgacccactagcaaaatttttgcttcctattttcacattatgttctgctggcctagaggtcttagttccagagagagtagtgctgccaccaggagacacaacaacgattacattaaactgaaagttaagatttccactcagccattttgggctcctcctgcttcgaagtcaacaggctaagaagggagttacagtgttgcctgtggtgattgaaccagactatcaggaggcaatcagtataytacttcacaagggaggcaaggaggagtatgcatggaatacaggagatcttttaggccatcttttagtattgccatgccctgtgattaaggtcaatgggaaactacaatagcccaatccaggcaggaccacaa

SEQ ID NO: 243689 - DNA, 590 bp, Homo sapiens
ctaggcaaattataattattttatatgcttttgttcattcatttattaattcattcaataggtatttgcttattataagcactgttgtgatgatataacaggacataaaacagaaaataaccctgcttttttaacttacataataataataaagaagttatagcattaaaaatttaggctttttaaaatgtatgcttctaattcagtgatatagagattactgttaaaataagtatgaatgttcaaaacataattagaatgctgagcaaagctataataaaatttgttacatttttagaaattatagtatgatttataaaatttcataaaaatatgccatatatatacatatagtaagttctgagttaagatcatctgtagtttgtgggaaattgactttaagtgaaatgatgtattacaaagcaattgtttttctcaacaacrttataaaaaatgtcattgaaagaaacaaatttaatctagaaccttctgtatataatttcatgtaagctcatagttttcaaaaactatccacaaggttaagtgaggacttacataccatttcatataaaaataattagtatataaat

SEQ ID NO: 243690 - DNA, 560 bp, Homo sapiens
ctctccttcccacaggccttgaactttgattcaccctcagtctgagcttacatacaacttatctttatgcctcctcctaagaataggctaacttcagggtgaaatatcctctgatctgggatctaattttgccacactccatactgccctccagctttcatcttttttcaaatcttttttgctcctccctgtaaaaggaaccccttatcttcttaacctttcaaatacttgcagatattttgcttggtgcttcccatctattgcaatacccctttagataaagtcaattcttatctaaaatcaaattcattttatttgacaatgtttacaaacaaccccaggacgataacaattacactctcaatactrgcatcacaccttcacaattacactaaccccaaccatatctgcctgttggtccctaactttccagggctccatagcttctctcagtacaaaggctctgccatggctggtgtgagccagctagcaaacctgcagaaaacatccccagaaagaattaactgggccttcagtgatcttttgcaagctcaagattg

SEQ ID NO: 243691 - DNA, 632 bp, Homo sapiens
ttgtctttgtgtctgtctttatgccaatgccatacagttttgatttgtaatatatagctttgtaatatactgtaaaatcagagtgtgaggtgtgaggcttctagacctttgtctttctcaagatggtgttgggtatttgaggtcctttgagatcccatatttcctgtattttccaaaaatgcaactagaattttgattgggattggattgaatrtagattatttggagtagtatggacagtttaacaatactgagtctttcaaatcatggaaatgtgatacctttttatttatttgtatcttttttcatttcttcaacaaatgtcttatagttttcagtgtacaagtctttcaccccttacatttattcttaagtatttcattcattttgaggctaatgtaaatggaattgcttaattacatagctttttgtattgttcattgttagtatagaaatatgactgacttttgaatatgattttttttttttcagacagagtctcactctgtcacccaggctggagtacagtggcccaattttggctcactgcaacctctgcctccagggttcaaacaatctccctctgcctcctgagtagctgggattacaggtgtgcaccaccgcacttggct

SEQ ID NO: 243692 - DNA, 528 bp, Homo sapiens
tgttccttgcctctctccccaaatttttgagagaaagatctatcatttctatcttcagatcaacttttccatggcaattcaacagagaaaagttaacttttccaataaatggctctcaagcaattgaacattcagaaggggacagaataaagctcaatctaagtcttgcaccttataaataaaataaatcaaaaatgaatcacatataaatgagaacttaaaactaaaatgaaattaaaaaatggatttaaagctaggcaaagaggtcttagacttgacacccaaaaactttctataaaaggamattttcataaattggagtctatcaagattaacttttactgtgaaaaattctgttaggaagatagaaaatgagaaagtaatgagttgcagacatttcaccaaaaaatatacgtaaatgacaaataaacctgtgaaaagatgttcaacatgattaccaattaaggaaatattaataaaatgtaaaataagagatcatgacagagtaactaaaatgaacaatagtaa

SEQ ID NO: 243693 - DNA, 453 bp, Homo sapiens
caaacttctttctgattagttaggaaactgaatacaaccagtatgttaattagttatacaataccaaggggaaaaaggcaacgtaagcgctagcattaacaactgctaaatgaatgtgtatgaccagaaggaagagcaggaatgacaggcaggcatattaagtacaaaaaggttcatgcagagttaggttgagggactgactcacaggacattgagcccaatttgctcagggactctgggttacttttcagttactaagccagtcagattcctcctaagtaagccaatttgggttaggtctaaatcatcgggggraaaaaaaaaaggctcctcactaaaccaggataaagaagactccatcagaaagttctctgggataagatatactattaattgaaattcccaataggaggtaacatataaacatacccccacataaaactgtacgtattt

SEQ ID NO: 243694 - DNA, 517 bp, Homo sapiens
agagccagagcagggagcaaggcaaaagagaaaaatatgttcacggtgacttttgaaaacatatggatgaaactcctgaggaggctgaggaactaaaccttttcttttggcagtaggcacagagtgcagattcatctctctgtaattactctagctcctgctgtgtgagttctattttagcccagtaatgcaaaaagaaagaaaaactaagttctgacaagcacttacatttcttgaatttttgttgaaggtcccagaggtcattgtaagcagcctgaacaggtagttagggctcctggattctagtctcagcttggctactaatttaccgtgtgacgttaggcaaattactattctgagctttagtcatcttatctttaaaatgaagggtttattctttagaggaagctgagtgaatggcataygggaacactctgtactatttttataactttgctataagtctaaaattatttttaaataaatggttttcttaaaaagtgaaaggattatgtag

SEQ ID NO: 243695 - DNA, 584 bp, Homo sapiens
ccccctttccgtccttgactcctctcactgctaacagagacagaactcatttacttactcttytgactgtacctttgctttcacgagggctctttcctggaatgatatgtccatacaactattgttgctgttcttacttttagctcttttcttagaagcccacttgtacccaggtttgatcacaccccctactctcctgccctggaagtaactactattctggttatagtctcttaatatctatatctatatatatgcatccacagataatgtgtagtattgtcttgaaaaaaatatacataaatggtatactttgtctccctctgtgattagttttttcactatcatttagtttttaagatttatccctattgacataaatagctatagtcttttcaattactgtgttgcatttcattttataaatataccatacattattcatccattcctctaagggtgggcatttatgttgttttcaaggttttgctattacagtgttacaacgaatatccttagcttagctggtctccttgtcttatacaaattttactgacctttcaagatcctgctttcatcccagc

SEQ ID NO: 243696 - DNA, 584 bp, Homo sapiens
ccccctttccgtccttgactcctctcactgctaacagagacagaactcatttacttactcttttgactgtacctttgctttcacgagggctctttcctggaatgatatgtccatacaactattgttgytgttcttacttttagctcttttcttagaagcccacttgtacccaggtttgatcacaccccctactctcctgccctggaagtaactactattctggttatagtctcttaatatctatatctatatatatgcatccacagataatgtgtagtattgtcttgaaaaaaatatacataaatggtatactttgtctccctctgtgattagttttttcactatcatttagtttttaagatttatccctattgacataaatagctatagtcttttcaattactgtgttgcatttcattttataaatataccatacattattcatccattcctctaagggtgggcatttatgttgttttcaaggttttgctattacagtgttacaacgaatatccttagcttagctggtctccttgtcttatacaaattttactgacctttcaagatcctgctttcatcccagc

SEQ ID NO: 243697 - DNA, 584 bp, Homo sapiens
ccccctttccgtccttgactcctctcactgctaacagagacagaactcatttacttactcttttgactgtacctttgctttcacgagggctctttcctggaatgatatgtccatacaactattgttgctgttcttacttttagctcttttcttagaagcccacttgtacccaggtttgatcacaccccctactctcctgccctggaagtaactactattctggttatagtctcttaatatctatatctatatatatgcatccacagataatgtgtagtattgtcttgaaaaaaatatacataaatggtatactttgtctccctctgygattagttttttcactatcatttagtttttaagatttatccctattgacataaatagctatagtcttttcaattactgtgttgcatttcattttataaatataccatacattattcatccattcctctaagggtgggcatttatgttgttttcaaggttttgctattacagtgttacaacgaatatccttagcttagctggtctccttgtcttatacaaattttactgacctttcaagatcctgctttcatcccagc

SEQ ID NO: 243698 - DNA, 402 bp, Homo sapiens
ggccagcaaagaccctgttttcatggagcttacaatctactggtttagatagataataagtaaaggaataactacaatatgccagatggtgataagggcgataaagataagtgaagcatgtcaagggagcatcccagcaagacaaccctctttttatagaagagaaaacagagtcttagaaagattaaataataggcagtaagagaagcaagttcctaggtacaatgaaactggagtttcacttgatgaaacactgttcaatagaatttataaattcaaattgttgtttagyacaacagaggaacctaataggcagaagtgtggcttggatggatgttcctgactacccaggctgtccaagtaaactgttgtatatacagaatgaaaagatctgaggtggag

SEQ ID NO: 243699 - DNA, 607 bp, Homo sapiens
aactatggaattaactgtgggtagcatttctacacatatcattacagaacaagcataaagacaagcttgtttttttccttttctgtggatttgttttttcttattaccatatcttttgttactgaaaactggtggtcatctgtactaatagataagagaagtgtgtttgacaccaatacctaatcttagattatccctgctattttaaaacacmgtccttcacctgcatgctcagacatgtgggttctttcaaacatactggacttcctccttaggttttagttgtgttagtcaatagttgaatgttgaaggagaggatgccaagggatattaaagaaggtaaaagagataagtgacagcaaacattatttatttttaattatctctcagaatgacttttagatacccttccctactacattttgatttttgctttagcatagctggtgagttttggaatcagagagactgggctctgatttgtactagctaagaatattagacaagccacttaacttctttaagtctcagtacccgtatttatataatgggaataatagtaatatctaacttgcaggattgtttgtaaagattgaaagcaacatat

SEQ ID NO: 243700 - DNA, 416 bp, Homo sapiens
catggacatacatcactgttataccttgacctgacatagccttaactcgaattcacttcagtatgctatcagcacagccatcttttgtagctcatctttcttccagattttccacccttaggatccttaatgctgaaattatacttcttgaccacaggtcaagtcccccacttcctcrttctttctgaatgttgtttactgcgtcatgtattccagttcctcaactctctgtatcttccaggccatctgctgtttattcacctccatactgaacctagacgtcagagtcagctctttgaatcgtgttctcaacgctgctttagaatctctaactgccttaaccatctcccggcttggtaacccttagtcaattttattttaaaatcctagaggattctatgagtgttgttttagta

SEQ ID NO: 243701 - DNA, 563 bp, Homo sapiens
gaattcacttcagtatgctatcagcacagccatcttttgtagctcatctttcttccagattttccacccttaggatccttaatgctgaaattatacttcttgaccacaggtcaagtcccccacttcctcgttctttctgaatgttgtttactgcgtcatgtattccagttcctcaactctctgtatcttccaggccatctgctgtttattcacctccatactgaacctagacgtcagagtcagctctttgaatcgtgttctcaacgctgctttagaatctctaactgccttaaccatctcccggcttggtaacccttagtcaattttattttaaaatcctagaggattctatgagtgttgttttagtatgttataaaaccgcactgagaagaragactctagattcattcttgctaatcctcaacaggtctataatgctgctgagaaattctcctcctcctcccacctgcctctttctcctgctcctccttccctgactctttctcttcctctaaaaatatattcctcacaacctttgatttccgtagtgtaaataaaagcaa

SEQ ID NO: 243702 - DNA, 423 bp, Homo sapiens
ctcaacaggtctataatgctgctgagaaattctcctcctcctcccacctgcctctttctcctgctcctccttccctgactctttctcttcctctaaaaatatattcctcacaacctttgatttccgtagtgtaaataaaagcaagatgcagaactgttayattcaatattatttccatttgcagaattcacacaggcaaataaactgaagaacaactaaatacataaaaatctttatcaatgttgccttcaggtggtagaattttaaaaattatttttatgtttctctgtacacttttctcttttccaaaatttctacgaggcatgtacttcttttaaaatcatcaaaaatagacattgtaaagaaaagaaactgaaagattatgtgaatataaaagtaggtggaaaggggaaaaaatcacct

SEQ ID NO: 243703 - DNA, 423 bp, Homo sapiens
ctcaacaggtctataatgctgctgagaaattctcctcctcctcccacctgcctctttctcctgctcctccttccctgactctttctcttcctctaaaaatatattcctcacaacctttgatttccgtagtgtaaataaaagcaagatgcagaactgttatattcaatattatttccatttgcagaattcacacaggcaaataaactgaagaacaactaaatacatamaaatctttatcaatgttgccttcaggtggtagaattttaaaaattatttttatgtttctctgtacacttttctcttttccaaaatttctacgaggcatgtacttcttttaaaatcatcaaaaatagacattgtaaagaaaagaaactgaaagattatgtgaatataaaagtaggtggaaaggggaaaaaatcacct

SEQ ID NO: 243704 - DNA, 423 bp, Homo sapiens
ctcaacaggtctataatgctgctgagaaattctcctcctcctcccacctgcctctttctcctgctcctccttccctgactctttctcttcctctaaaaatatattcctcacaacctttgatttccgtagtgtaaataaaagcaagatgcagaactgttatattcaatattatttccatttgcagaattcacacaggcaaataaactgaagaacaactaaatacataaaaatctttatcaatgttgccttcaggtggtagaattttaaarattatttttatgtttctctgtacacttttctcttttccaaaatttctacgaggcatgtacttcttttaaaatcatcaaaaatagacattgtaaagaaaagaaactgaaagattatgtgaatataaaagtaggtggaaaggggaaaaaatcacct

SEQ ID NO: 243705 - DNA, 424 bp, Homo sapiens
aggtctataatgctgctgagaaattctcctcctcctcccacctgcctctttctcctgctcctccttccctgactctttctcttcctctaaaaatatattcctcacaacctttgatttccgtagtgtaaataaaagcaagatgcagaactgttatattcaatattatttccatttgcagaattcacacaggcaaataaactgaagaacaactaaatacataaaaatctttatcaatgttgccttcaggtggtagaattttaaaaattatttttatktttctctgtacacttttctcttttccaaaatttctacgaggcatgtacttcttttaaaatcatcaaaaatagacattgtaaagaaaagaaactgaaagattatgtgaatataaaagtaggtggaaaggggaaaaaatcacctgtttctt

SEQ ID NO: 243706 - DNA, 519 bp, Homo sapiens
caagtgtctacccctccccacaatgttatgagaaactagactagtgggaccaatgagatgcttgaatcttgaaaggagctatatcagtggccagtttcaagtaaagcaaaactgagtgttttggataaccctggcyataaatgaaactaccattcttagaaaattactggaagaaatcatcacaggacagtttgagaatgtcagaatatcagggggtggcagatggccttcagagaagcaattatttcctgatcattctcaacttaatcaccctggaaagccatagaaaaaccaagtaatatgggatattgaatgttgatgtattatttgagtctaatatcttaatagctacttatcagcaactcaagaaaatatgagtgatataccatgcagaaatcaagcaggtgaacagcttgtgagtaggttgtacttggaaaatgcttggtacttccaaaagcaaaataatgtcctggtgagaatattaatatatgtggttttagtggaattggtattgtcatt

SEQ ID NO: 243707 - DNA, 638 bp, Homo sapiens
gctgatatgtattgctgtgttgtagcttgctcttgacctataatgtgcaatctgcagagcagagaagattgagtgagatcatgtctggaaggtaccctggatccttggacagtattaaaatgggttttatgyttaagcatctattagaatagagttgcataattactgcaaggaaccttagaaagtcatgtccttcttttataaatattagagaaaactaatgcccagagaggtgaaagtgacatgcaagccaatatagtagcttgttgccacaaattaattaattgtgtgtgaagccaatgggtttctcaagactgtgtcttaataaagcagaaatgaaattctgtctgcacttggtctatactggggtaacagcatcagaaacctgcaagatgccaggcaagtatcataattaagtgaatgagggacgacaaggacagggagtggcagggactgtggcaaactggaaaacacatccctgtcctgtgtaaagggggcaagttctcccgctgtgtgggaaggcaggcccagtgttggcagacccactcatttcccaagagcagttagaagtgggtcaaacttgtgtgggctaaataaaacatgtcggatgggctgaatttggcccgagggttgacctt

SEQ ID NO: 243708 - DNA, 638 bp, Homo sapiens
gctgatatgtattgctgtgttgtagcttgctcttgacctataatgtgcaatctgcagagcagagaagattgagtgagatcatgtctggaaggtaccctggatccttggacagtattaaaatgggttttatgtttaagcatctattagaatagarttgcataattactgcaaggaaccttagaaagtcatgtccttcttttataaatattagagaaaactaatgcccagagaggtgaaagtgacatgcaagccaatatagtagcttgttgccacaaattaattaattgtgtgtgaagccaatgggtttctcaagactgtgtcttaataaagcagaaatgaaattctgtctgcacttggtctatactggggtaacagcatcagaaacctgcaagatgccaggcaagtatcataattaagtgaatgagggacgacaaggacagggagtggcagggactgtggcaaactggaaaacacatccctgtcctgtgtaaagggggcaagttctcccgctgtgtgggaaggcaggcccagtgttggcagacccactcatttcccaagagcagttagaagtgggtcaaacttgtgtgggctaaataaaacatgtcggatgggctgaatttggcccgagggttgacctt

SEQ ID NO: 243709 - DNA, 638 bp, Homo sapiens
gctgatatgtattgctgtgttgtagcttgctcttgacctataatgtgcaatctgcagagcagagaagattgagtgagatcatgtctggaaggtaccctggatccttggacagtattaaaatgggttttatgtttaagcatctattagaatagagytgcataattactgcaaggaaccttagaaagtcatgtccttcttttataaatattagagaaaactaatgcccagagaggtgaaagtgacatgcaagccaatatagtagcttgttgccacaaattaattaattgtgtgtgaagccaatgggtttctcaagactgtgtcttaataaagcagaaatgaaattctgtctgcacttggtctatactggggtaacagcatcagaaacctgcaagatgccaggcaagtatcataattaagtgaatgagggacgacaaggacagggagtggcagggactgtggcaaactggaaaacacatccctgtcctgtgtaaagggggcaagttctcccgctgtgtgggaaggcaggcccagtgttggcagacccactcatttcccaagagcagttagaagtgggtcaaacttgtgtgggctaaataaaacatgtcggatgggctgaatttggcccgagggttgacctt

SEQ ID NO: 243710 - DNA, 638 bp, Homo sapiens
gctgatatgtattgctgtgttgtagcttgctcttgacctataatgtgcaatctgcagagcagagaagattgagtgagatcatgtctggaaggtaccctggatccttggacagtattaaaatgggttttatgtttaagcatctattagaatagagttgcataattactgcaaggaaccttagaaagtcatgtccttcttttataaatattagagaaaactaatgcccagagaggtgaaagtgacatgcaagccaatatagtagcttgttgccacaaattaattaattgtgtgtgaagccaatgggtttctcaagactgtgycttaataaagcagaaatgaaattctgtctgcacttggtctatactggggtaacagcatcagaaacctgcaagatgccaggcaagtatcataattaagtgaatgagggacgacaaggacagggagtggcagggactgtggcaaactggaaaacacatccctgtcctgtgtaaagggggcaagttctcccgctgtgtgggaaggcaggcccagtgttggcagacccactcatttcccaagagcagttagaagtgggtcaaacttgtgtgggctaaataaaacatgtcggatgggctgaatttggcccgagggttgacctt

SEQ ID NO: 243711 - DNA, 622 bp, Homo sapiens
tactttctaaacatatctcaaatttttaaaatttcccctttgttaaaccatcacaacttcctatttggaatatagattctcaccatccatttttgcccctccacagtctcactgtgtagagccagaatgcagctggaatgacctatctaaaatataaatctgatcattrccattctttccttaatttaaaatccttcattgatttcccatagcttttcacattagactcagtggccttaccccataccacaaggtcctgcgtggcctggttgcaacattggctttctttgttcctctaacaggccagagtcctttctgactcagggcctttgctgttctctcatgatggaacactcttccactcccattctcccattctacacctggttgacatcctcccatctacgtttaaatgttcctttccctgagtttctctgagtccctgtgctagttaagttccctctgcattttccttcacaacatttactacaatagtagttaattcttgtgaaattatttaatggctggctctcatgtacttattgagaataggaactcttctgtggtgtttgcctttgtatccctagcacttgacacggtccctgatacataatagaagctt

SEQ ID NO: 243712 - DNA, 622 bp, Homo sapiens
tactttctaaacatatctcaaatttttaaaatttcccctttgttaaaccatcacaacttcctatttggaatatagattctcaccatccatttttgcccctccacagtctcactgtgtagagccagaatgcagctggaatgacctatctaaaatataaatctgatcattaccattctttccttaatttaaaatccttcattgatttcccrtagcttttcacattagactcagtggccttaccccataccacaaggtcctgcgtggcctggttgcaacattggctttctttgttcctctaacaggccagagtcctttctgactcagggcctttgctgttctctcatgatggaacactcttccactcccattctcccattctacacctggttgacatcctcccatctacgtttaaatgttcctttccctgagtttctctgagtccctgtgctagttaagttccctctgcattttccttcacaacatttactacaatagtagttaattcttgtgaaattatttaatggctggctctcatgtacttattgagaataggaactcttctgtggtgtttgcctttgtatccctagcacttgacacggtccctgatacataatagaagctt

SEQ ID NO: 243713 - DNA, 226 bp, Homo sapiens
aaagcttttagtacagaggctatcaaggaataagcactctgtatcttatctattgttactattaatgtattcctaacaacagcacaattattactrcactaacattagccagagatctacctgaattgcaaaaccaaagggaagataacattcttttggggtctattttccacaaaacttgttctcgacctgagggttttacttccttgctaagttctttgccttt

SEQ ID NO: 243714 - DNA, 452 bp, Homo sapiens
attatgtgtgtgtgcatatatatatatrtagatctgttcataaactaaaaatatatatatatatatataaaaataaatcaacagcttttctaaatctaagggtaaaaaaaccaaagacgtataccaaaaaattaatggcagcatgattgtggacattttatttatgcttttctagattcttcaaacatccttaactactttttcaaacataattactttttattttacaaaaataaaaaaatcttgtaaaggtgccagagaaaatcagcaaagtataaatacgagttaattatctgtaaacataacgaataattctgttgctacgtaaacttaccttaaactgtttcaatgtttgtttttagttacaactattttccttaactctcttagaaagaatatgtcagagaagccactacatattacttactttaaatagtaacataatgccaaag

SEQ ID NO: 243715 - DNA, 452 bp, Homo sapiens
attatgtgtgtgtgcatatatatatatgtagatctgttcataaactaaaaatatatatatatatatataaaaataaatcaacagcttttctaaatctaagggtaaaaaaaccaaagacgtataccaaaaaattaatggcagcatgattgtggacattttatttatgcttttctagattcttcaaacatccttaactactttttcaaacataattactttttatwttacaaaaataaaaaaatcttgtaaaggtgccagagaaaatcagcaaagtataaatacgagttaattatctgtaaacataacgaataattctgttgctacgtaaacttaccttaaactgtttcaatgtttgtttttagttacaactattttccttaactctcttagaaagaatatgtcagagaagccactacatattacttactttaaatagtaacataatgccaaag

SEQ ID NO: 243716 - DNA, 593 bp, Homo sapiens
ggtgctaatgaaggtgttggcttatttggaaatggaatcactagttcctcctatttagattgatgcagattgaaattctaccagattcctgcctctctaggtaaactgtaaatccacttttgtcttccaatattctctattacatgatttttactctattaattctgaactgcttgcaattcaaagctgtttcatactttcatttatttgtacctgctgttccctctgccttgaaaaccttttctctcctattgtttatttggttaaagtttactcatccttcaagattcagctcaggtgcctttttaaatttatttattttttaattttaggatgccttctcttactctctaatcccagaatatataccaagactctaagctccttgagggcagaaaacacctcttgcccattcttttctagtctctagaatatagcatratgtagtacatagtaagtgctcagtaaatattcatcaactaaactagctgaaaagtattaaaaattagatatcctattggatttgtatctcttctgcctctacctggtattcacaataagttgaacagttttaaggagggtattggtgtgtt

SEQ ID NO: 243717 - DNA, 426 bp, Homo sapiens
aacaccttattcatcaagcacaactgtattttaaaggaatgctatttgttaaaaagacaacatatttaggataaggtatctaactccaaccacaatattatcatcatgttttccttacttcacaaaatacacacatacattcatcatatgaataaacatatataataagggtgagagagytactcttaacccagaaacaggttctgcaacacccatagatccaacctgtctttatgcaacaatgagtccatcttggcaagatgtttggctgatgtattcaaataacccagagttctgccagctgccagtatcctgcagaaggaactgactcggagaccagaaactgccctaggcaagcctccagggaaaggtgcttcagtccaatgggaagaaaaacccagcccctcactgcctggccagaggacc

SEQ ID NO: 243718 - DNA, 426 bp, Homo sapiens
aacaccttattcatcaagcacaactgtattttaaaggaatgctatttgttaaaaagacaacatatttaggataaggtatctaactccaaccacaatattatcatcatgttttccttacttcacaaaatacacacatacattcatcatatgaataaacatatataataagggtgagagagctactcttaacccagaaacaggttctgcaacacccatagatccaacctgtckttatgcaacaatgagtccatcttggcaagatgtttggctgatgtattcaaataacccagagttctgccagctgccagtatcctgcagaaggaactgactcggagaccagaaactgccctaggcaagcctccagggaaaggtgcttcagtccaatgggaagaaaaacccagcccctcactgcctggccagaggacc

SEQ ID NO: 243719 - DNA, 460 bp, Homo sapiens
atgaatcaatacaccttgggaggcagggtgtgaaatatttgatgccatttcctttgcttgtaaattgttcatttcatttgaatataaatataaaaggacttctaccaagaacatgaaactaacattttgccaagctaaattttaatgaatttatttggacgtttttataatcacttaatattttcagttcatgtgctaatattaactctacttactggagagaaagaaatggtattcaatatgataactgccttgttactgcagaaatgtagaagtttsgcattttaagtatcaaatattttaagtcaaaaaattaccagtgtcccacagcacagagagagaatatatgtttgcttgtgtccctttaatctttcccctgtaaaattaagcctaggggccttacactattttaaattttcaaaattaggtcatgtaaatgttgtgtcagatttccaattca

SEQ ID NO: 243720 - DNA, 624 bp, Homo sapiens
tgacaacacaccacaatgctcccccaatacaccactaagacagcagagctacaaagatagcaaatgttagtgccaagggctagtgatcctaccagtgaattacatggaaacctatgtatttacatacacaarttaatacaataattcctttgcttttcttattccaagctatggctttatcatccccctttcttggctttactctcctttttaagaccacaacgtatgttgtgccatacagataatattctcctcaaaaaagagagacaggagaaaaaacagatctacggcaaacctcctaccactaccagtgatgcagtttgtcccgtctcaagcctatgagcatatcctttcagatctgaagccacttccttcttcctatcaaggacagtattatcaagtgtctttgtgagaggagcaatcctgtgccccttcttgcagattgttttgttctgctcaagaagccctagattcctcctttattttcctttccttatttcatttgctgcagcagcccagaaaccccaaaagcaggactgccagaaatgagtgacctttatatctctccacactaacacatctgagggaaactgccgacaccaaatatgtgttcatgagctaatg

SEQ ID NO: 243721 - DNA, 624 bp, Homo sapiens
tgacaacacaccacaatgctcccccaatacaccactaagacagcagagctacaaagatagcaaatgttagtgccaagggctagtgatcctaccagtgaattacatggaaacctatgtatttacatacacaagttaatacaataattcctttgcttttcttattccaagctatggctttatcatccccctttcttggctttactctcctttttaagaccacaaygtatgttgtgccatacagataatattctcctcaaaaaagagagacaggagaaaaaacagatctacggcaaacctcctaccactaccagtgatgcagtttgtcccgtctcaagcctatgagcatatcctttcagatctgaagccacttccttcttcctatcaaggacagtattatcaagtgtctttgtgagaggagcaatcctgtgccccttcttgcagattgttttgttctgctcaagaagccctagattcctcctttattttcctttccttatttcatttgctgcagcagcccagaaaccccaaaagcaggactgccagaaatgagtgacctttatatctctccacactaacacatctgagggaaactgccgacaccaaatatgtgttcatgagctaatg

SEQ ID NO: 243722 - DNA, 624 bp, Homo sapiens
tgacaacacaccacaatgctcccccaatacaccactaagacagcagagctacaaagatagcaaatgttagtgccaagggctagtgatcctaccagtgaattacatggaaacctatgtatttacatacacaagttaatacaataattcctttgcttttcttattccaagctatggctttatcatccccctttcttggctttactctcctttttaagaccacaacgtatgttstgccatacagataatattctcctcaaaaaagagagacaggagaaaaaacagatctacggcaaacctcctaccactaccagtgatgcagtttgtcccgtctcaagcctatgagcatatcctttcagatctgaagccacttccttcttcctatcaaggacagtattatcaagtgtctttgtgagaggagcaatcctgtgccccttcttgcagattgttttgttctgctcaagaagccctagattcctcctttattttcctttccttatttcatttgctgcagcagcccagaaaccccaaaagcaggactgccagaaatgagtgacctttatatctctccacactaacacatctgagggaaactgccgacaccaaatatgtgttcatgagctaatg

SEQ ID NO: 243723 - DNA, 508 bp, Homo sapiens
ggtggagcaggaaaaagagagtgaggcgggaagtgccacacactttgaaaccatcaggtctcatgagaactcactctcactatcatgagaacagyctgggggaaatctgcccccatgatccaatcacttaataccaggtctctcccccagcagtgggaattacaatacagcatgagatttgggtgggaacacagagccaaatcatatcaaaggccaaagttgagggctaccaaagtgcctctgattgagggcaaactccaagaggggagaattgcagaggagctcaacaatctatgcaaattgccatcatgatagtgatctaagttcctacactcagcatgcacaaagaaagatgccaaaaaaaaaaaaaatcagtaaacagcagtttagggtctaatgaggtaagtgaagatttcagcatccaacagaagttggacttcaagccttgataaggtacctagatacccagggttttcagttgagatctcagcacatccttggagtaaga

SEQ ID NO: 243724 - DNA, 508 bp, Homo sapiens
ggtggagcaggaaaaagagagtgaggcgggaagtgccacacactttgaaaccatcaggtctcatgagaactcactctcactatcatgagaacagtctgggggaaatctgcccccatgatccaatcacytaataccaggtctctcccccagcagtgggaattacaatacagcatgagatttgggtgggaacacagagccaaatcatatcaaaggccaaagttgagggctaccaaagtgcctctgattgagggcaaactccaagaggggagaattgcagaggagctcaacaatctatgcaaattgccatcatgatagtgatctaagttcctacactcagcatgcacaaagaaagatgccaaaaaaaaaaaaaatcagtaaacagcagtttagggtctaatgaggtaagtgaagatttcagcatccaacagaagttggacttcaagccttgataaggtacctagatacccagggttttcagttgagatctcagcacatccttggagtaaga

SEQ ID NO: 243725 - DNA, 548 bp, Homo sapiens
tggtggagcaggaaaaagagagtgaggcgggaagtgccacacactttgaaaccatcaggtctcatgagaactcactctcactatcatgagaacagtctgggggaaatctgcccccatgatccaatcacttaataccaggtctctcccccagcagtgggaattacaatacagcatgagatttgggtgggaacacagagccaaatcatatcaaaggccaaagttgagggctaccaaagtgcctctgattgagggcaaactccaagaggggagaattgcagaggagctcaacaatctatgcaaattgccatcatgatagtgatctaagttcctacactcagcatgcacaaagaaagatgccaaaaaaaaaaaaaatcagwaaacagcagtttagggtctaatgaggtaagtgaagatttcagcatccaacagaagttggacttcaagccttgataaggtacctagatacccagggttttcagttgagatctcagcacatccttggagtaagagcaatataatactgaaataaaatagatctaacaaagctt

SEQ ID NO: 243726 - DNA, 387 bp, Homo sapiens
taaagtgatgggaaatttgaagccattgtagaagatacgaattggagatggaactacccaaaattaccttctataaggatcttctagattaaatgcaagctaacttattcttaaaattgttttgttcattatgatatgaacagagtctatatcagaacctggaacatggcaggcactaaataaatattttatgaatattgaattagttgttctaacaacatcgtggagaatagcttgagaagggtaaaggctagaatcagaaaaagyggctaggaagactttaaagactgtctagacataggttgatgggtggattagcctagtggatacagagattcagaaaatatgaatctaagaaatattgggaggaacttccagtttttccca

SEQ ID NO: 243727 - DNA, 622 bp, Homo sapiens
acagtcttatgcacctaagaggctacattatttgccaatttgttgttgttgaattatctatttcagaactactctgaattattaggttgagattgaatgagaggagcaggactggaagtggagaggacatttagaaagtttcctcggtaatccagacagtagatggtggtgacctcaacaattgcccagttaccttcaggacaaagtccaagttccttataatggtatacaaasctggcacaatcagacacctattctcaaaacagcttacctctcacttgtcttctcacttgctccagttatgtacaattatttaaagttcttgaaatactcctttccctgtgtcttccctccatagtttctccttctgcatagaatatttcctttccctatccactttctacctatttattctacctcctattcatccttcaaagctcagctcagatttcacttcctctaggaaaccttcaatggcattatcttagtctttttgggctgctataacaaaacaccataaactgggtggcttataaacaacggaaatgtatttctcacagttttggaggctgggaagtcctagatcaaatcactgacaggttcaatgtctggtgaaggttca

SEQ ID NO: 243728 - DNA, 466 bp, Homo sapiens
ggaatgatagccctgtcttttcaggatatcctttaaagttattattttatgaacactaaatagcattaccagatttagcaaataaaaatataagatatctacttcaatttaaatttcagataaacaacaaataatttgtttcattagaagtatatcctttgyaatatttgagacataacttaaacgctaaaacattgtttgttgtttatctgaaatttaaattgaattgagtaccctgtattttattctgcaatacaaataccaaaagattaacaaatggaaacacgcatatttcaattttgtatgaagaacaagtctaagatctctatatcagttccatggcctggcactgcaagaataattcatctgtaccaattgatgaatcagtaaaatagaagatttgctaaacagttgctatgtccccagctttgtggtcaatacttaaaggaattcaaatgtcttcata

SEQ ID NO: 243729 - DNA, 573 bp, Homo sapiens
cttttgttcctctggaatctactactgactcatgtgattgatttagtttggatgtatgtccttgcccaaatctcatgttgaaatgtaatctccaatgttacaggtrgggcctggtggcaggtaagtggatttctcataaatggttaagcaccatcctcttggtgctgtctttgcaatagtgagttctcctgagatctgaccatttaaaagtgtgtggcacctccccctctcttgctcccacttttaccatatgagtgccgtagccactccccctttgccttccaccatgattgtaagcttcctgaggccgttccagaagctgagcagatgccagcatcacgcttcctgtacagcctgcagaaccgtgagccaattaaatctcttttcttataaattacccagtctcaggtatttctttccagcaatgcaaaaacggactaatatagtgatcttgaccctaggcttctccctctgcaaaccaaaagccaagataaccacgagagtcagtatcaacaaaatcatccttccagctgcagcacttcttccccatgccaccaggcaccctcatcaaac

SEQ ID NO: 243730 - DNA, 401 bp, Homo sapiens
tgatcatggttttattagggagatacaatggggactagaagaaaggaagcatgggtccataaaatgctgtttgaaaaccctgctctagaagtcagcccatatgggtccccagctagagaaataaaatgtcaccatttccattttcactgagaaccatgggattccactctccagttgcttttytaggtggtgggattttctcagccccaaggctctaacagtggctgttctgttgtatttccctaactgtgtgcccaccctgcacatgagctagacaattctgagggcattgtccaaatgtgaaacacacaagctggcatggcaaagaggctggaacataaaccctgccacttacctaatttcactgctgtcttctcatgagaaattactatgtaatccaa

SEQ ID NO: 243731 - DNA, 585 bp, Homo sapiens
tcatatcctaggtgtatggttaacttttgaagaaactgccatattatttttcaatacaattgttccattttataatcctagcagctgctcatgattgttccgggtgctccaaatcctcgtccacatttggtgttctgacagcaacakctaaatgaaagacaaatctttccatgagtgaccatgccactccttcacttaaacttatccatgatttctcagccaaccttccttagggctgtttgcaagctcctgcctcccagtacaaatgcatctcccgtcaggattccctttccacattcccagcccgtagaccttttctacctatatcacaatgcttcctcgggcttccataatcacacggcacctttgcctgactctgggtctttatacaagcatttctgcattccctcactgttctgggctacactgtgtcccctgcaaaatttgtaagttgaagtcctaacccgcagtacctcagaatgtgactgtatttagagagagggtcttagaggaaagttaaaatgaggtcattagggtaagccctaatctgatttgactgatgtccttataagaagaagaaatttg

SEQ ID NO: 243732 - DNA, 584 bp, Homo sapiens
attcaatttaattattcttggtatacatcccctttgatatgttttcccttcttttcctaataaaattaagaattaaaatagggccaggtgcagtggctcacgcctgtaatcctagcactttgagagtccaaggcaggaggatcacttgggcccaggaattcgaggttgcaggtgagctataattgccactgcactccagcctgggtgacagattctcaaaaaggtaaagytaagaaaataatgaaatgctacctacacattagaattaaaattcagcttgcctacagctagcaacggatgtgggaaggggacaggtggactccaaggttcaccttcttggagtcttagggcgatgtccaccaccagcaccactcttctcagggacttgtacttcccctttatactctcgcccagatatgttctctctgccagttccatgtgacaaagcagagacccagccataaaatttttagaaagttaaactaatggctaagggatcaaaaaagataaataaacagaaaataacaaggaacgagatcatctggtttacacaatgtagtttattcatttttatttagtaaggg

SEQ ID NO: 243733 - DNA, 584 bp, Homo sapiens
attcaatttaattattcttggtatacatcccctttgatatgttttcccttcttttcctaataaaattaagaattaaaatagggccaggtgcagtggctcacgcctgtaatcctagcactttgagagtccaaggcaggaggatcacttgggcccaggaattcgaggttgcaggtgagctataattgccactgcactccagcctgggtgacagattctcaaaaaggtaaagctaagaaaataatgaaatgctacctacacattagaattaaaattcagcttgcctacagctagcaacggatgtgggaaggggacaggtggactccaaggttcaccttcttggagtcttagggcgatgtccaccaccagcaccactcttctcagggacttgtacttcccctttatactctcgcccagatatgttctctctgccagttccatgtgacaaagcagagacccagccataaaatttttagaaagttaaactaatggctaagggatcaaaaaagataaataaacagaaaataacaaggaaygagatcatctggtttacacaatgtagtttattcatttttatttagtaaggg

SEQ ID NO: 243734 - DNA, 532 bp, Homo sapiens
gatacagtcatccaaaagcacagaagcacgcaacacacaccagcaaggtttccaactactgcactgattaactagatactctcaatagcttttctatagctcgtcctagaaaaaaaaattaaattttcattttctcacaagttccaggcttaaacaaaggcaaaaattrcatgcaacaactgatacactcataagttgcacatatgctccaaggtctttattagataacaataaatgctagcactttgtcactgccatcagattttcttatagtcttagagtcatgtaaataaaagttcataatgaaattaaagaaaattaatttttctaatcttagatcagttccatagaaaactattaatttttttaaagtaggcagtagaagggggttggtggggggtggaattggttagtaagtctggttctaatcttctgagctgcctttggaaggaagttatgaggtagaagattctactgacttttagtaaggtggacaatgagagaaaagaaaaagcaggtgcctcatctacag

SEQ ID NO: 243735 - DNA, 532 bp, Homo sapiens
gatacagtcatccaaaagcacagaagcacgcaacacacaccagcaaggtttccaactactgcactgattaactagatactctcaatagcttttctatagctcgtcctagaaaaaaaaattaaattttcattttctcacaagttccaggcttaaacaaaggcaaaaattacatgcaacaactgatacactcataagttgcacatatgctccaaggtctttattagataacaataaatgctagcactttgtcactgccatcagattttcttatagtcttagagtcatgtaaataaaagtycataatgaaattaaagaaaattaatttttctaatcttagatcagttccatagaaaactattaatttttttaaagtaggcagtagaagggggttggtggggggtggaattggttagtaagtctggttctaatcttctgagctgcctttggaaggaagttatgaggtagaagattctactgacttttagtaaggtggacaatgagagaaaagaaaaagcaggtgcctcatctacag

SEQ ID NO: 243736 - DNA, 532 bp, Homo sapiens
gatacagtcatccaaaagcacagaagcacgcaacacacaccagcaaggtttccaactactgcactgattaactagatactctcaatagcttttctatagctcgtcctagaaaaaaaaattaaattttcattttctcacaagttccaggcttaaacaaaggcaaaaattacatgcaacaactgatacactcataagttgcacatatgctccaaggtctttattagataacaataaatgctagcactttgtcactgccatcagattttcttatagtcttagagtcatgtaaataaaagttcataatgaaattaaagaaaattaatttttctaatcttagatcagttccatagaaaactattaatttttttaaagtaggcagtagaagggggttggtggggggtggaattggttagtaagtctggttctaatcttctgagctgcctttggaaggaagttatgaggtagaagattctactgacttttagtaaggtggmcaatgagagaaaagaaaaagcaggtgcctcatctacag

SEQ ID NO: 243737 - DNA, 490 bp, Homo sapiens
aattcccaacttaaccccaagcaggtgaaacaagtgtgtttaaatcagcaggagccagtagtgacttagcttaacacctgtcttttaagataatgcacatgtgaaacaaatgcattcttgggcatttaggctyatgatcttccattttatgtttccttcagcctacatactaaagaccccaaatctttgtccatggtacagacatcttccctcagttccagaaacatgttcatccgcctgttggtatcgacagctgaatgttctacaggtatctgaaactctgtctgtctcatgctgtctcagtttgtctcattatacttcctctactcatcctttaacttacagaaagttggaaatcctgtgagatgcccccatctccctaagactccataattattaagtgatcatagaggaatacaggaagtagtcttgtatgacattttgccaaattgttttccaaaaatagttttaccagtttatattcctatca

SEQ ID NO: 243738 - DNA, 576 bp, Homo sapiens
gttctaatgttttgacaatttgaagacttgatgctaataaatcaactaaggaaaagcagtccttgtgattgaaacagctataataattcaatcagatttcttttacttgaaaaataacctcccctggtgaagagtcatctagcattctttctttcctttttttcctttatttttgtagacagagtcttcctctgtggcccaggctggagtgcagtggagcaattgcagttcactgcagcctactcctcctcagctcaagcgattctcttgcctcagcctcctaagtagctggcatgacaagtgtttgccaccacacccagctaatttttgtatttttagtagagatggtgtttcagtatgttgtccaggctggtctcaaattcctgacctcaattgattcatcygcttcggcttcccaaagtgctgggattacacgcatgagccactgcacagggccctagcattgtttcttgatagtaatgatctaatccattgctaccaggattaattttcatattcaaggaattttgcatgccaccataacctcaaattgcttcctttcacttaacatgacat

SEQ ID NO: 243739 - DNA, 628 bp, Homo sapiens
gtcatggtaagcaatatactgcctgacagtacccagtgaagttttgaatgaattaataaaaacatgaaaatatttttctattttacttgtctaaaaatataagttcagggtccttgtaaaactctctcttttttttccccttttctttgactttcatcagtgatagctcctgggtaatctggtgtcactgaataaccttaaatttaattctgtcatatcagcctctgcctagagtgaaataaattataaaaaagatcatcgggttcttaatagatttgaatactttcctagatagttcacagcttgacaggcatttgtcataatcaacaggagacacttttgtgctcgtaattactttaaaaacacatcaaataatctaattgtccaatgaagtgagaaaatgcaagtgacaacagcaaagtactcacattasattttgagggtttataaagctgcaaaaactgttgatggatgagcttttttcatgatttctctatacacacaaattctctcaaagtcaaacagagaaatatatatgcagggatacaaaagggggatcttcagtctcctctaagaagggaggtaatgagctatcatgtggctttgtttaattactttactgaccttt

SEQ ID NO: 243740 - DNA, 580 bp, Homo sapiens
tcaatcatgttctttagaaatataaagttaaataactgaaaacaccgtgaaatatctgtgattgattccctagggagaatgagacttaggattggaaaatatttttacctatttttaattagctttctcttttaaacgatatataagtacaaatttaaaaaaaaaagcaaaaaaaacttctattagtatttggcttacttctcatttttttctgtctgtttaaattccacagaaattaaatttaacattttttcaaatatagcttttatatagtatttatatttatcactctaacacaataccaaattgttagtcagaggagcttggattttcaaattcttgtcaaaccaatagacatgcatgtttgagtatctaaaaacttgaatcatttaaatttattgtgacacagaaaattcacatgaagaaaatgtaaagcacaacaatagctattctatgaactattctaatgtragtgcttatttttcctaatttcacagatcagaatcactaccttaaagtcaaaacatctaagcaggctatgtttagtgtattaatattttgatgtatcttggagaacagt

SEQ ID NO: 243741 - DNA, 494 bp, Homo sapiens
tgaaacacatatcacatactactttctctcactatttttcaaactgacatttctctgattgtatctttggcctttgactgactttagttctgcttctgtagctgtaggaatgtgtctcagactgaatggccccctgtggtcagttragttttgttaggtctctggatactttatggtttcttggaaaattatatatatatatatatatttgttgttgttgttgttgttttgttttgttttgtttttgtttttttgctgtgtaccctttcaacatttggccatcaataaacagcctttattgtataaccttcttagggcaagaacataatttgtctagccctcctggagatagtctgttttcttaattttattttttaattattattttttctcagtgtttgcctctagggcatgaatctcactttcattcatacaacctggctaggcccagatttttctatatcaacactgaatctttggaatgaccttaaaac

SEQ ID NO: 243742 - DNA, 574 bp, Homo sapiens
gcctttccagaccaatcatgctattcttttttgaagggtgatgactctccaggaacacatatttcagtatggaatatggtataatttttatgtcagatcagcctgccaagtagasagtttcgaagttaccagcctgcatagtggcacattcccccttatgtggtgaggcaaaccactggcttactactaattttaaaatttcaagttaaatattagagaaagtcaaagaacccagaaggtagactctctcaaaacactgatttgagcattatcacatattacactatacaattataccaaaatttttgtttcctgactcagaatttattttattttattttattttattttacatttaggggtaaaagtgcaattgtgtttcgtgaatatattttgcagtagtgaagtatggccttttaatgtacctttaaccaaattgtgtacattgtacccagtaggtaatatttcatcccttatttcccttccacctctcaccttttggagtctccagtgtctattattccactctgcatgtccatgggtacccattgtttggttcccctttataggttgc

SEQ ID NO: 243743 - DNA, 439 bp, Homo sapiens
tctagctgtctacactagaaaagcagcctggataaccagaacacttcatgttcacccagcaagacagtacagcaaggcactaaggtacaagacagagggccatctcttgacacttcttgccaggtgaaattaaaacacaattacagtatctgaatggaaactgtctttctttaaactacctacaaaatgttcagggaatagttactcatttcttctcccaaacaatatttttacttaacttccttaactaaagtcctacacaggaataagcttcaacagcttattcaatgratcagtcaataaacactatgttgtgaccaaccgtttcacgcttggtatcaacagtatagaagggtgcccagctaaaaagaatgcctcaaacatatctttggtgcttataaaccttcaatgccaagtttcaataaacagtttacctcct

SEQ ID NO: 243744 - DNA, 366 bp, Homo sapiens
ctctctttgttctcatgaccctcagaaaagtcattcttgcagtctttctagcatttatcacaattgtgaataactatgattctgtgcttctatttaacgcctggctcckctatgagactaaagtttcatgagggcaggaatcacatctgtctttttcactactctatctcctataagaagggagctgagaaaatgtctgttgaaaagaagaaaatactatttcattgttgtggtgctgtgagaagtccttcttgcagtctaacctccaacagtcttgctgcagtaccagttcctctcactctatcctctatggagctagaacccttgctctcccaactgcccctgaagatttggacaccacctacc

SEQ ID NO: 243745 - DNA, 417 bp, Homo sapiens
agatcttttacttatttggctaaattgatttttatatgttttatattctttgtacctattgtaaatttgatttctttcttgatttcttttttagattgtttgctgttggcatatagcaatgctacttttctaatatttctgtgttggttttatatcctgtaactttactgaattcatttatcggctataacagttttctttctttcttttctttctttytctttctttctttctttctttctttctttctttctttctttctttctttctttctttctttctttccttctttctttctttccttccttttcttttccccttccttccttccttcctttcttcctttctttttttttcctttttttctcttgactaattactccgacaggacttctggtacatgttaaataaaagtgg

SEQ ID NO: 243746 - DNA, 601 bp, Homo sapiens
gacatagaagaacaggctaggaaaagagagatttcaccagatattactttttctgttctcttattttcaccacatatttctttatcctctctgtataataaatagaactgtatactacccaagtgcctaatgtgttgaatgcttaatttgattaatctatttaaagtagaaaaaagcaaactaacttcagtacttctagagatcaaagaaatcactcataatagagaaagtattccttatttcatgtgtaggtctcactggtcttgatattcttttttggtttctaccttctctggtcttaacttattcttacttttttatatttctttcttggattatgtatgttcttagaaggctctgtacattttcttgtaaaattaggcaggaggtaartagatggatgggtcaatggctaaatgtatgaatggcagaagggcagacacaaactgtcaggtcaatggcagtattgttaaatggttgaaataactagtaagtaaagggattaaatggtattggatctttcctactcaaccacaagtggtttcaatacaagtcctaaacacttgattaattctctgaatgcacgcatgtacacacacac

SEQ ID NO: 243747 - DNA, 370 bp, Homo sapiens
aatgccaggcttgggtgaggtgtataattatttctgcccacatatggttggccagacctcagccacatggctccagctagatgaaagaaagactgaaaaatgcagacctgagcttggcagacaccttcccaagtctacttttttttttttttttttgagacagagtctcactctgtcaccaggctggactrtagtggcatgatctcggctcactgcaacctccacctcccagattcaagtgattctcctgcctcagcctcctgagtagctgagattatagatgtgcatcaccaaacccagttaatttttgtatttttaatagagacggagcttctccatattggccaggccagtcttgaactcctggcct

SEQ ID NO: 243748 - DNA, 609 bp, Homo sapiens
tggcagttatataaagcacttaataatactatagaaaatagatgtgttttttcttaatatgattttggtattttccacagatcagaagtgtaaacagagagataatgtaacagtatttggaagagataatgacacaaggatatagtgatctgggagcatgaattagaaacagggtactatgtttctggtgtaaaatctaaattgtgctttctactagcgttactttttcaaatgggatgatataaagcactgtgggctataagcaacaatcttgggttggtaggcaaatagaccaattgatctttattattattattattattattattattattttttgagatgaagtcttgctcttgtygcccaggctgggtgcagtggcatgatcttggcttactgcaacctctgcctcctgggttcaagcacctgagcctcccgagtagctgggattacaggcatctgccaccacacctggctaatttttgtattttttgtagagacagatgtttcaccatgttggccaggctggtctcaaactcctgacctcaggtgatccgcccgcctttgcatcccaaaatgctgggattacaggtgtgagccacagcaccc

SEQ ID NO: 243749 - DNA, 620 bp, Homo sapiens
cctgttcagaggattttggcaacaytgtcagtgggaaaagcatagctgagttctagtgatgagttctagtgattggtgctgctctattaacaacagggatgtgaacaatttcaggtaggagatcagtgctaatagaaaagcgatttctttttatttcttcaatgtttatagactctgagcaaaattgctaacggaggcatctccaatttgcaggaataacaccttggtaccatgttggaatagagactcttgatacataaatgtgattgggacacaaatgcacagcaagttatggcatctctttcagttttaacaataatcaagcagcaaaacaccactacttggggggctgaatgttgaaacagcatgcttccaattagaatgccttcctcttacaggatctcaattgtgcccaggtgtgtgaagtgatgttacaaaggctgcccagacaggggagaaatatctagggtgacttcagcctttggtttgggcctgaggattaattgtcttaatgattttccaaatggacagtaacacagttggagaattccactctccagagagcttctcaaaacaacctcttttctgttatcaaaatattaaatcacacctgctcagga

SEQ ID NO: 243750 - DNA, 535 bp, Homo sapiens
aagttataggatttgccctagtccatgraagtagtaaggggcagaacaaagacattaggtcaggtctgtgcaccattccaccacatgctggtgcaagagacatctcaggagtgtgggggagctggaactcacagaaatcccagtgccccaggtactctcccggactgcactgctggcatctgtcgcccctggttagtctgcactgcagaggcacctgttagagctgccattgtttctgccctgaagagtctggctttcactactctaagagatggggttgaggccactgcacatagtggtttttattcttgacaccttgtttcatatggtcacctgctgcctgcctatctcctggcagtggtcgtgttgagtggaatcaggccccatctagaaatggaagagctggggcaaatttgcttacattcactcactcaccaaatacattttgagcacttttttttttctttgataatgcactggagcctggaatattatggggaaattgatcagacttggtctctgcctttgcagaggt

SEQ ID NO: 243751 - DNA, 508 bp, Homo sapiens
tcacgttacaaagtcaatgcayacaaatcagcagcactggtatacatccaaaatgaccaagctgagaatcaaatcaagacctcaatcccttttacaatagctgcaaaaaaataaaatacctaggaatatacttagccaaggaggtgaaagatgtctacaaggagagttacaaaacaatgctgaaagaaatcatagatgacacgaacaaatggaaatacatcccatgctcatggattggaaaaatcaatatcatgaaaatggccgtaactgcccaaagcaatttatagattcaatgcaattcctataaaaataccaacatcatttttcacagaattagaagaaaaaacaatcttaaaacttatatggaaccaaaaaaagaaccccaatagccaaaacaatcctaagcaaaaagaataaatctgaagacattacacttcaaattgtactattaggttgttgcaaaagtaatgcaaaaacctcaattatttttgcaccaacctaacacaag

SEQ ID NO: 243752 - DNA, 519 bp, Homo sapiens
tgccggtgagccaggtggaacagagccatatttctcttctttcaaaagcaaatgggagaaatatcgctgaattctttttctcagcaaggaacatccctgagaaagagaatgtgtccctgaggggaggcctctaaaatggctgctttggggtggctgtcttttacggttgtagcrgtgggatgaaataagccccagtttcccatagcgctcccaggcttattaggatgagaaaattcccacctaataaattttggtcagaccggtcgtctgctctcaaactctgtttcctgataagatgttatcaatgacaatggttgcccgaaacgtcattacaattttaatttcaccacggtcctgtggtcctgtgatctcgccctgcctccatttaccttgtgatatcttattaccttgtgaaacatgtgatctctgtgacccacaccctattcgtactctccctccccttttgaaatcactaataaaaacttgctggttttacggctcagggggcatcatggaacc

SEQ ID NO: 243753 - DNA, 582 bp, Homo sapiens
tctggcatgtaaggtttctgctgagcgtcagtgtactttagtccttctaaaggatgtagatggtatctctagcccttgtagtgggtgttgatggtatctcattgtagtgataactaatgataagcacctcttcatgttcttcttgactcttcttttatcttcttttgtgaagtgcataagtcctttggccattttaaaaacaactttattgaggtataatttacatatatacaattcatctgttttaagtatacagttcaataatttttaataatttactgaattgtacaaccatcaccacaatccagttttaaaaygtcttcataactccaagaagattcctcatgctgttaacagttaatctctattcttatccttagcccaaggcaaccagtaacctattttctgtttccacagatttgcctattctggacatttcatacaaatagaaccatacaatatctggcctattatgtctaatttctttcacttagcatgtttttgagattcatacatatagcatgtatagtattttgttcctttttattgctcaatagtattccattgtaggttatagcacat

SEQ ID NO: 243754 - DNA, 582 bp, Homo sapiens
tctggcatgtaaggtttctgctgagcgtcagtgtactttagtccttctaaaggatgtagatggtatctctagcccttgtagtgggtgttgatggtatctcattgtagtgataactaatgataagcacctcttcatgttcttcttgactcttcttttatcttcttttgtgaagtgcataagtcctttggccattttaaaaacaactttattgaggtataatttacatatatacaattcatctgttttaagtatacagttcaataatttttaataatttactgaattgtacaaccatcaccacaatccagttttaaaacgtcttcataactccaagaagattcctcatgctgttaacagttaatctctattcttatccttagcccaargcaaccagtaacctattttctgtttccacagatttgcctattctggacatttcatacaaatagaaccatacaatatctggcctattatgtctaatttctttcacttagcatgtttttgagattcatacatatagcatgtatagtattttgttcctttttattgctcaatagtattccattgtaggttatagcacat

SEQ ID NO: 243755 - DNA, 401 bp, Homo sapiens
atttcacactatagaggacttacgtttcattagaggttaatttctaggtatttttwaaaaacttatatgctatggtaagtaatattttcataaactttcattttctaaatattgatggtatgaaagaaataatttacctacaatagaatgcactaattctaatagtacaattatgtgaactttggaaaccattatcccccaaagtttccttgggcctctttgtagtcctccactctgggcagttactgacctactgtcagtatagttttgcctttaatataatttaatacaaatggaatcatacattaatttgattccagtagttgtctggcttcttttacttagcataatgcttttgagattcacccatgttgttcaaattctttttacatttaagatgt

SEQ ID NO: 243756 - DNA, 420 bp, Homo sapiens
atttcacactatagaggacttacgtttcattagaggttaatttctaggtatttttaaaaaacttatatgctatggtaagtaatattttcataaactttcattttctaaatattgatggtawgaaagaaataatttacctacaatagaatgcactaattctaatagtacaattatgtgaactttggaaaccattatcccccaaagtttccttgggcctctttgtagtcctccactctgggcagttactgacctactgtcagtatagttttgcctttaatataatttaatacaaatggaatcatacattaatttgattccagtagttgtctggcttcttttacttagcataatgcttttgagattcacccatgttgttcaaattctttttacatttaagatgttatctgcaaagagagatct

SEQ ID NO: 243757 - DNA, 507 bp, Homo sapiens
gcttttactatattccataagttttagtatgttgtatctttttaaaaaatttatctccaggtatttcctaaattctctcatgatccactggttgtttaagaacacactgtttactttccatgtatttgcaaattttcctgttttctttctgctaattaattttagtttcattccattatgggcagagatgatactttgcataatttaaatcttaaatttattaagacttgttttgtggtctaatgtggtttatcatagagaatcttccatgcatgcttgataagagtgtatattctgctgttattggatgaaatgttctgtatgtcggttaggtccatttggtcttgtattgttcaagtcctctgtttcctcattgatcttttgtcttgttttattcarttggtattctactgtatgaatataccaaaattaattatccattcaccaatgatggaaatttgggttgtttccacatttgggctataataaataaagctgctattaact

SEQ ID NO: 243758 - DNA, 446 bp, Homo sapiens
ttttctatgacaaagaaatatgtaattcaatgtaagtgtcctatggtatctatacataagaggtagtatacgaactgcctcccacacacccttggatatattccctttaaatattaacatcaaagagtatataacatcagtttaacaagtgacttacatgaagcatcaactatagagattacaaacaagtttaccgcyaaaagaactgcagtgatcaattaaaggctctgtattaggaagtaaaaaaagaacattttcttttcccttaaatcaagaacatataaattcccatattgggaaagattcatggtctccaatcctactgtttagcatttttaaatgttaacagacttaattttgtgggatagcaaagctgatatcaacattaaaaggctcaacggtgtgatgagttcccttaggaactcctaaaaattagatgtgaattc

SEQ ID NO: 243759 - DNA, 448 bp, Homo sapiens
aacatttaacatgaattctttggaagtttgactttcagcagtaattgtcattaaaataatgaagacaaaacaataaaatgaaactaaaaaacttttcaatgacatcctgtctctccctactcacctactcccttgtttccaaatccatatttgaaatggagttactccagtcatacagatggatgcaaagatttgtatgaaaacagactaaactttctgcaaactttctagctcagaagtaaagcaaagaaccaatgaaaaagccagtcacgcttctctggggcagccggcacagaaatacaccaaacagagatttggctggggattaggaggttcgagggtctctatttttcctgaattatgcccattaatcasagtatcaaggaaactggatataccatgacagaaataaaaagtccactttttctaagtaaggtagtagtactac

SEQ ID NO: 243760 - DNA, 448 bp, Homo sapiens
aacatttaacatgaattctttggaagtttgactttcagcagtaattgtcattaaaataatgaagacaaaacaataaaatgaaactaaaaaacttttcaatgacatcctgtctctccctactcacctactcccttgtttccaaatccatatttgaaatggagttactccagtcatacagatggatgcaaagatttgtatgaaaacagactaaactttctgcaaactttctagctcagaagtaaagcaaagaaccaatgaaaaagccagtcacgcttctctggggcagccggcacagaaatacaccaaacagagatttggctggggattaggaggttcgagggtctctatttttcctgaattatgcccattaatcacastatcaaggaaactggatataccatgacagaaataaaaagtccactttttctaagtaaggtagtagtactac

SEQ ID NO: 243761 - DNA, 403 bp, Homo sapiens
tcaggcgattatcctgcctcagcctcccaagtagctggaattacaggcaccagccactatgcctagctagtttttgtatttttagtagagacagggtttcgccatgttggccaggctggtctccaactcctgacctcaagtgattcgcctacctcrgcctcccaaagtgctgggattacaggcatgagccaccgtgcccggccctcaaattttttaggaaaacagccataactcatagctctggacaccccaacagcctgggatgggtgggaaaatgtcttcgaggctgtcaggtgctaacagagggaaacagctcccgttcagccctctgaacttcctgggttccatcgagggggctgagggtgggaaggggaagcctgtgggccccagtggacctagtgag

SEQ ID NO: 243762 - DNA, 547 bp, Homo sapiens
gggcctctctacacgcccttggccttccaaggtctcagggctcccctgcagctcccagggccctttctgggtgtgacgtattttctctgtggtcccacacctcctgcccctccaggaattgagccctcgtgggcaggcactatcccccagaatagggatttgtcccatactgtgagagagttttttgtgtgaatggtgctggatttccagctgctggtgaacactcaggtgtgccaacagtgccctgattatgcgaggacaacagcaaccatccccgtcgtgggccaccgtgccagaccctgtcctgcagatcccctctgaggcagagctggggcagtgacagcctgagcctcagtttctctgctgtgaagtgggccmacgacagctcctccttcatgggatgaccccgtttggaggatcagggcaagcgcaatcctgctgccctgcccatgcccactcactcctacctcctgtcccggtggcagcctgactggacagagcctggggtctgagctggccttccttccactgcccttctggaaataga

SEQ ID NO: 243763 - DNA, 607 bp, Homo sapiens
agttttttctttcaacactttaaaaatgccctgctgctttcttctgtacaccacactttctggcgagaaatctatagtcactcaaatcactgttccaatctaggtaatgcataatttttgtctggctgtctttacttttcagcagattgatttgcatttaacctatttggggtctgcttagcttctagaatctgtagacttacgtctttcaccaaacttgsgaaatttttagcattatttcttcaaatgtgttttcagcactgcattctttctctttcccttttgagactctaatgacacacaagttagccctttagttattgttccgcagttccctgaagctctgtttatttttctctatctttctcccctgttttccagtgggacaatttcaggtattttaactttcaatgttaaaaattccatttgtttcttctttgcatcttctgtttctttgcagatactactttatcatttgtttcaagaatgtttgtcattgctttttcagttatatttataacagttgctttaaagtttttgtcagatcatcccaaaatctacatcgtcttgtcactggcaccatggctacctttttccatgcaagtta

SEQ ID NO: 243764 - DNA, 521 bp, Homo sapiens
ctctgccaccactcacggagaaagtcagactccatcaaacaacaaggattccttgttttccacaaagcttcccaaggagtgaatggtagaaaaaaaaaaagtactttagaagcctcrtgatactttcattcacctttcttttaaccttgcacaatgcacagcatttatgtcaagatccggctctcgcattggactagaggtacgtttacctcggaatgcaccaggcccagcactgagcttatctctcagtggctgctcaggaaactcatgctcaatggaactgaacacaaacctcttgtctccctgccagaagtcttgtttatctttttcttttttttttttattttttagagacagggtctcactttgccactcaggctggagtacagtgggtgatcatagttaactgcagcctctgactcctaggctcaagctgtcctcccatttcggcctcccaaagagttgagattccaggtatgagccagggtgcccaggccaaaagtcctgtttttcaggggtgg

SEQ ID NO: 243765 - DNA, 459 bp, Homo sapiens
agaaaaatttgaaagcaactattaacaagtgaagcagacttgtaatgtttggattgtttagtgattaaaaaaaaagaaagaagagaggaagaaagaaggatgagaccattggcacmtggagagaggatgtcagaattaccggagcagagcagtgtggtacagccgaaagaacactgacggttaggagaccttgtgctggtccttgctttgctgataactgtctgtgttttgctgagcaagttaccacccctctctgggcctcagtttcctcaactgcaaatgaaaggcaaagacagtagtttccagctcccccaggtacatgatttcagatgagctacttatagggtactcaagtttttaaatgcaggaacctcctaatatcaggtgagggttacacatgaaaatataacaaagtgagagaagagcaaaaagttgaggttctcatagcaaccagaattc

SEQ ID NO: 243766 - DNA, 555 bp, Homo sapiens
ggcatttaggaaaccgatcccagcctgaatgtgttgaagattttaagtattcagcaaggagtgcaaagatgctgtgaattcctttggacagcttctcatcaggattgtttatattgcagcatgctcagtatgtgagcttaagaagagctacaagataatttaaaaaagtaaaagaaaaagaaagcaccacctttagaatatccaagagaaccacaaccactctaatcttttggctaccaatttacatccctctccaagcctcaatgttctcatctataaaatgggaatatagtatccatcaaagtgggttactgcgaggatgtgaaaatgccctgtaaaccttaaaacaatttataaatgagattattgctttttgtagaatacttttttatgtgaagccctctacttcccttatctcwttttacacatacattcattcttcaagaatttaaaaatacatacacagctaccatttgttagagtacttagactatgcaagatccatattttgctatatttgacccttgcactggccctatgaggcaggtgccattc

SEQ ID NO: 243767 - DNA, 517 bp, Homo sapiens
aagcaccacctttagaatatccaagagaaccacaaccactctaatcttttggctaccaatttacatccctctccaagcctcaatgttctcatctataaaatgggaatatagtatccatcaaagtgggttactgcgaggatgtgaaaatgccctgtaaaccttaaaacaatttataaatgagattattgctttttgtagaatacttttttatgtgaagccctctacttcccttatctctttttacacatacattcattcttcaagaatttaaaaatacatacacagctaccatttgttagagtacttagactatgcaagatccatattttgctatatttsacccttgcactggccctatgaggcaggtgccattccccacctcacctgtcccatatttcagttgaagaggaagctcaatgaaaggttaaggaatacaaccaaggtcagtaataagcagagtcagtatcaaagactgctctggagtggacacttggtctagattctgagtgctgatcac

SEQ ID NO: 243768 - DNA, 585 bp, Homo sapiens
tcgagtcagagcttagagtccatggctgattctggggacaatagggacagtaattactgagagtgtgtggtagtggttggagttggggttggcatggcaagcttgccatgaactttaaatagcattatgaactttaaatagcattccaagcagtttgaacttgatttatggatgaagggattcaatyaatggttgctctgaggagagtgccttgatctgatatgtattggttagatgatgactctgagtaaatagaaatctagagaccaagactggacagagaggcactggtcaggcaaggtcaaaataatctactcaagatatgaacaagtcctttctttttgttcataaaatagaggaattatagaataatagaagtgtgtaaattttagggggagctcagaagagggtttaaataaattccactgacattagggatctaaagaaggaattaggggaatcaaaatgtattgagtgggacacataaccaacctgcaggaaggctaattttatccccattttacagatgagtaaaatgagacttaggtgggttatcaatgtacttaacataatgtagatagcaag

SEQ ID NO: 243769 - DNA, 596 bp, Homo sapiens
tgaccttgggttgggcaatgacattttagctgtgacagcaaagacatggtttacaaaagaaagaattcattagttagactttactaaaattaatttctgctctgtgaaagacacttgtgaaaagaacaagaccaaaacatggactgaaagaaatttgcaaaataaatatccatttatgaacatatttgaaacacatttgttatccaaaatatgcaagaagtcttaacactcaataagaacacagacaacccagttaaatatgagccaaagacctttacatacatctcaccaaagaagatacacaaatggtaaatacacatatgtaaagatggtccacattgtataacaaaggagaatacaaatcgagacaatgagataccactgcacacctattggcatggtcaagttcagaactcagggactactaaatgctggagaggatttgcarcaacaaaaactctcatttattcctggtgggaatgcaacatggtatagccactttggaagcccgcttggcagtttttttacaaaactaaacatgctcttagcatttgacccagcaattgtgctccttgacttttactcaaatgagttga

SEQ ID NO: 243770 - DNA, 529 bp, Homo sapiens
cctctatttgatatcggcaggaaattcctggttgagctcttttatacaaaactgtgaaaagcctgtagacctcctttcctgttccatctctttatagacagaagagtcagcttcaggatgatgacttacttgacatggggttattctagggtttcaacctgagtctccagtctctctctccattttctaaattgtcttccccctttctgtccagacaagcagaaggaaggcaaggaaaaggaggcaggcagggagggagggagggcaggaagcaaagcaaagggaggaagagaagcaaaggaatagaaaagcagctgtagtcaaaaagagattaagaatataawgagaaatagggtctttaaaacttttcaaatctttttttttttttttttttttttttttttttttttttttgagacggagtctcgctttgtcacccaggctggagtgtagtggcgcgatcttggctcactgcaagctctgcctcccgggttcatgccattctcctgcctcagcttcccgagtagct

SEQ ID NO: 243771 - DNA, 529 bp, Homo sapiens
cctctatttgatatcggcaggaaattcctggttgagctcttttatacaaaactgtgaaaagcctgtagacctcctttcctgttccatctctttatagacagaagagtcagcttcaggatgatgacttacttgacatggggttattctagggtttcaacctgagtctccagtctctctctccattttctaaattgtcttccccctttctgtccagacaagcagaaggaaggcaaggaaaaggaggcaggcagggagggagggagggcaggaagcaaagcaaagggaggaagagaagcaaaggaatagaaaagcagctgtagtcaaaaagagattaagaatataatgagaaatagggtctttaaaacttttcaaatctttttttttttttttttttttttttttttttttttttttgagayggagtctcgctttgtcacccaggctggagtgtagtggcgcgatcttggctcactgcaagctctgcctcccgggttcatgccattctcctgcctcagcttcccgagtagct

SEQ ID NO: 243772 - DNA, 366 bp, Homo sapiens
aacccacaacccttaacaagccacacttgttttgtactattctagctgctgttgctatgtactattctatcatggccaccagatacctgtgctttttgagaaacatctgccctctaccctaaaggagcctcctgcactctcttcgatgatgtcttgtaagtttggaaatgcctctgtatcacgtraaataggcattttttttttaaaggaaaatagacctggttcccaagacacttcctttaaagtgaagagcagcaccatggctgaatcccaattgctttgttctttgtgataattcctataattgggtcagagggctaatgacttggcttcacgaatctaaaccatatgcctccatgatttgca

SEQ ID NO: 243773 - DNA, 284 bp, Homo sapiens
ttagcgttaagcaataaatctatattggttaaatcggctgttgggctgcttgttgaaaaggacatcagtggagtcctgtcaggttaatgggtttagctaatgtatgggcacaaggatgagtaactccaatcaggcatcatagccaaaggmaggagggtggaggtctcccagagtcatcagagcaggggactcaaagatacacttctggggacctgggcgctgggctggtaggagggaagtttcaataaatctgttttttgggagcaattctgttaaaagaagga

SEQ ID NO: 243774 - DNA, 643 bp, Homo sapiens
caagactagataagaatactgaacaagacataaatagcaagatcttttttgatccttcaggtcacaggagcttaactgcactccagtcaaattggttaattaataataataatagtgatgatgacaatagctcccattgtttaaaaattaatttgaggcaaggctttgtgctaagaaatatatgtcccattcattatgatatttaattcttacaacaactctttaaggcaggtacaattattgttcctcctttttccaaaaggaaactaaggctcagagaggttaagagacccgcccaaggacatacaataagcagattttaagcagaatttgaaaccaaggctgtttggttggcctgtgctttccccaattaacacagcagtggcaaaatagsactactattgattgatgtgtgaccccatctattttttcactcaacttctctgggagtcccacgaaggcttggggccatgtccatttctgttcactgttgaatcttaggcatctagttcagtgcctggcatccagaggtagtcaatgaatatttatcaatttaacattgttgagactctatcatgtgagataaaaagacactagaatatcctgcctttattacttagagattgagtgactggcaagttac

SEQ ID NO: 243775 - DNA, 615 bp, Homo sapiens
ttaggtttactcagcttacctcaaccacgatgttctctctcatcttcaaaacttttagacactgttcattctttcagaaacaaatttccgttcaatttcatcagctctctattcttgctttcatctaaccaactcttccttgtccttaaagtctcagcctagcggtaatttcttcccagaaatcttaacaatccaagttgggggaggcagagtccatggcyttgccccaaacctagacttaatctccccactaggctgcaagcttcttgaggatgttgaacaaatttgtgccattctccacaaagcaagtttatccccttttacagatgcagaaagtaagaccacatgtagccaaggaacacaccccagcatgtattcagtaaagaatgaggccagctttcccactgaggtctcattagggccaagcctgtattcttaccactgctctgtcccaccacctgcaactgcatctaaagagaacattaaggcctaaataaatgttgaatgaacaaccagcttcccaaaaaattttaattttgtctacctggtgtgaatctaacacaacactataaagggagggaatatgactgcgatttttacagaaggccaaaccta

SEQ ID NO: 243776 - DNA, 601 bp, Homo sapiens
tttttaaaattattttggatggacacaataattatatatatttatggggtacagagtgatattttgacacatgtatacaatgtgtaatggtcaacttagggtatttagcatatttctcacctcaaacatttattattaatttgtgttgggaatgtttaaaatcctttctatttgaaattatgcaataaaatattatctatagtcacccaacagtgctgtagaacactagaacttttttctcctatctagctgtaattttgtatccattaaccaaattcactattccctcctccctccatccttcccagccgctagtaaccacagttctactctccacttctatgaaataagcttttttagcccccacatacgagtaagaacatgtgatgtttgtcttcctgkgcctggattatttcatttaatataatgtcctccaggcgtatccattttcctgtgaatgacaggattttgttcttttttatggttgaatactattccattttgtatctatatctcattttttatccattcatctgttgatgaacacttaggttgattctgtcttggctatagtgaatactgctacaataaacatgggagt

SEQ ID NO: 243777 - DNA, 418 bp, Homo sapiens
ccattttcctgtgaatgacaggattttgttcttttttatggttgaatactattccattttgtatctatatctcattttttatccattcatctgttgatgaacacttaggttgattctgtcttggctatagtgaatactgctacaataaacatgggagtgcagacatctcttcatctatgtcatttttgtcctgggcacatagctaagctacatttacattcccctaacaattaaattgggccatataactgaattctggccaatggaatatgggtggaagggctgtctgccatttccagaaatggtccctaaayatctcccaagtatgatcttcctctctctttccccatcttcaaagaccttagaggccacatgttgaagatgatggtgacacagataagatggggaaacctagctt

SEQ ID NO: 243778 - DNA, 627 bp, Homo sapiens
tacactgaaaactaactgcrctctcactctgctggaccattcactattctacgttttgcagcttccctaacatactggatgttaccctgtctccctcaaccactgtcggtgtgaagactctcaggtctgcaagtctaacccagtccctcctgttgagctcaaggctcactttcaactacaaccaacacaggcatggccaattggcccctcaaactcagggtgcccaaaagcaaattacttttgggctagtttccccagtgtggctgaaagccacagaaatgatcttatatccttctctcctcctcacctactctatccccattaccactaattaatactattatggataactccaaaatgtccctcaaatgtgactattttccatttctgctcccctagtttggaggtaatgaatgctggttgacatggtttggatggattccattatccttcatgcaatccatcctaccaccaattcgtgttctccaaataccactcacctcaatcctcagtgaagatggtaacttcccactgcatgaagagtgaagcccaagctcagtctagtggaaatcaacatgatacacaatttgacccactttcctctcaaactatgaagcctccacctgg

SEQ ID NO: 243779 - DNA, 627 bp, Homo sapiens
tacactgaaaactaactgcactctcactctgctggaccattcactattctacgttttgcagcttccctaacatactggatgttaccctgtctccctcaaccactgtcggtgtgaagactctcaggtctgcaagtctaacccagtccctcctgttgagctcaaggctcactttcaactacaaccaacacaggcatggccaattggcccctcaaactcagggtgcccaaaagcaaattacttttgggctagtttccccagtgtggctgaaagccacagaaatgatcttatatccttctctcctcctcacctactctatccccattaccactaattaatactattatggataactccaaaatgtccctcaaatgtractattttccatttctgctcccctagtttggaggtaatgaatgctggttgacatggtttggatggattccattatccttcatgcaatccatcctaccaccaattcgtgttctccaaataccactcacctcaatcctcagtgaagatggtaacttcccactgcatgaagagtgaagcccaagctcagtctagtggaaatcaacatgatacacaatttgacccactttcctctcaaactatgaagcctccacctgg

SEQ ID NO: 243780 - DNA, 627 bp, Homo sapiens
tacactgaaaactaactgcactctcactctgctggaccattcactattctacgttttgcagcttccctaacatactggatgttaccctgtctccctcaaccactgtcggtgtgaagactctcaggtctgcaagtctaacccagtccctcctgttgagctcaaggctcactttcaactacaaccaacacaggcatggccaattggcccctcaaactcagggtgcccaaaagcaaattacttttgggctagtttccccagtgtggctgaaagccacagaaatgatcttatatccttctctcctcctcacctactctatccccattaccactaattaatactattatggataactccaaaatgtccctcaaatgtgactattttccatttctgctcccctagtttggaggtaatgaatgctggttgacatggtttggatggattccattatccttcatgcaatccatcctaccaccaattcgtgttctccaaataccactcacctcaatcctcagtgaagatggtaacttcccactgcatgaagagtgaagcccaagctcagtctagtggaaatcaacatgmtacacaatttgacccactttcctctcaaactatgaagcctccacctgg

SEQ ID NO: 243781 - DNA, 608 bp, Homo sapiens
ctggcctctgtaccgcagagggaattaggattatctggataattgtcttaacctctgctactccttgcttcctgagacccagccagtgggtctgggtctcaaycccacccccagatctcatgcacccaaaggcatccaatactttcctaccaggtgctagaaagccaagtcccacagagggttatcacccagccatgcacagccactgagacacagctccatccaattaaagagagattgggaaacagtcaggcccggaaggatctaagctcaggctaacgcacctgagagacccacataagaatcacaggcctggagagcaatttctccaccagcctggttaatcttcctcctcctccccctcccagaaacgcccatatgaaccctataaaatcattccacccaaaactacaggcagtttggatgcagtcactcagctcttagaaaaaatccaaacatgcaaaggcagttgcagcagctttgctctagtgcagggacgcacaccccaggaggaggggtacagcagggtgggccaccttccctgctgtggacagtgaaaatgatcaggaacgtccaaaagcttagaggatttcctccttgcctgtgca

SEQ ID NO: 243782 - DNA, 364 bp, Homo sapiens
tttctgaagatgatgaaagaaaaaaaarctgtgaaaagcaaaaatgcccaaaagttcatcttctgccctgacccatcacccttcttcagaggtacccagtacctccaattcccaagtctttctggggttctgctgaaccaacacgtagccgtttatcccttcatgtaagcttagggttctacattttccaatatgctaactaagccccatccattagccttacagctcctaaaatgttatctttcatttgctgtagtctcctctattgttattcttgttatctgagtgatttgaagactttttatgtctttgctggcattttggtggggttttagaagagcgtcgaggctgcatagatgtgttc

SEQ ID NO: 243783 - DNA, 553 bp, Homo sapiens
tttttcagttcttccaatgcacccttgatgctattaacatgcttattttaaacacaagttcctgggtgaaaatgttaagataactgccctcctcatagagtccactcctcgtatcaaggcagattcatgcagggatgaaaagtrtgcactctgtttaattccagcactgtttcctagtagctgttgatcttgggcaagttacttaagctttcaatttctctctcttaacctcatctataaaatgggcataatagaactcacctactagaattgttgtgaggcccaagtgcctagaatagagcctcatgtatagaaagtgctaaatagctacattagctttgtttgttgtagatacactaatggataaggaccttgttgaaactgtcttttagttcagagaacttctgattttgaccagccatattccagctttcaggacttactagttgcctagatgttagaagttggaacatttgctattcagattatcctatctcccacaattttttgattacctcaacatttcttgggagttacagggatgtaaaatgaa

SEQ ID NO: 243784 - DNA, 590 bp, Homo sapiens
taatgcctcaagatatgagagagtgtataagaaaaactccttggtcagtatactatagtaggcagttaactgaccccctatctcagagcctgcatttatttaatgtgtagagatgaacaaccataaatgtgataaatggctacagcaggaggcagaatagaatttttcaaagaaaagaaaagggaagttggggagttctagagatccttagctgcctcttttactcccattctttttaaagtatcagttttgaagttgaaataaaaactcgataataggcakggtatactaacgcatgttccctaactagcggatgttcctcttaacaaaaaataaaagtgcaattggaaagtatttcctaagcatccctaatgcttttaggacaagacagatcccatttttcagctactagcaccttttaatttctgaaagagccacggttgaaaatcttaattaattgttccatactgcttcaggatcattatgcaatgtaataaaggccatgtaattatgaaattttacagccattatcaaggctgatggctcgtaattcatcctcagctggacccaatggcttttaggcactaggc

SEQ ID NO: 243785 - DNA, 476 bp, Homo sapiens
ttataccaggtatttaatggtagtttatagctcttgggctacaagttagaggtcttcatcatctgtaatatttagctatctttggagagaaacctctttcccaagtgaaataaaatatgctttgcagttgtgtcgtttgaacttcatgttttgtacatcctgggaccttaatctttggtgtgtgacaggttatagttttaaagtgttcagccatattacagctttttaaaatgcactgataccatggcacattttttcttccmcagctatagcccattccctgcatatcgctgacaactcggatctctcttcatctctgtcccagagtcagtgccatttaatgtatctcaggcattttgcttgcagaatgactctctaccttgacccgcagttaaatagcatgtttatctgcaatacagtgtgctccaaataaaccagatgacagttgggaataacatcatttggaaggattgaaa

SEQ ID NO: 243786 - DNA, 476 bp, Homo sapiens
agggaaccatcataaacagagaaaacaccccttagaagagcggcaggaaaagaagcaaaggcagattaccgagtatcagacacagcagtggcaattttagtgccagcctctgatggggttctccttcgggacaatatcctgagagagtgtaccagtttaacctagagtagctgtgcatacttacaggcttctcagtaagaggagtagtgaacattatttgtatattcacacgtatactccaaggaggatctaagcatattaaattcttgaggatcatataagataattaaagaaaccaaacagtagatattttctctaactatattgcctgttctcaaaatagattatgatattgttaaatatggttcattatttagcctctttcttcctatttcaacagtctttaactcatcatacctacctcctctccctaccaagcaaygtctttgttgttaaatgaattaatcaatttgtgc

SEQ ID NO: 243787 - DNA, 519 bp, Homo sapiens
agttaatgcattgattttaactggaaacccaaaaggagacagtgctgtagtcagctgaactcttaaacagtcctgggagaccagagtgatttgcacattrgaaaatagctaatgggccagagaagcagaggttagttgcagggcctttactactgtctcttttcgatcacaatgagagagatcactgaaaaaaagtatctaacacgaagtgctaaggcataccttattctttttctttattttggcttttatttttcttcagggctgggtattttaaagaaactcaagcctgagaaaaatggaggaaaaaattatggtcattaatttcttctcccattgcaaaatttcagtaagtagtataatatcttacaaagttacaggttaaatacagttgaaaaatgaagaggatgcatttggaattgtattgtaaacacattattccacatagcatactagtaagatcatagaatttgctaatagacagccctgagttgctattaagtcgccaattactggcaa

SEQ ID NO: 243788 - DNA, 353 bp, Homo sapiens
gaggaacattaattctcctctgccatttggtgtattgcagcatytacacacttgattagagtctgctctggtgaaaaaaagttagcattcctatataagagccaaattctccccagggagtgacttagatataggagttcataagtccaatagggaaattttacttatttttcataggtattccattctgacttgacttgctaactatgtcttaaatttgcttctcagggtggtgtcttatatccatataaacccaatgggcaaaattatgtggcttttatactttatgcttaagaaaaaaaaatctttccttcccacttttgtctttaataaaacaacctgaaattttccac

SEQ ID NO: 243789 - DNA, 453 bp, Homo sapiens
ctcaaactcctgacctcaggtgatctgtccacctcggcctcccaaagtgctggaattacaggcrtgagccaccacacctgggctggtgttaccatcttgttataatctggcagaggtgataatttgaaggaaatttgtgtactgtttttcaggttatgaagcacttcatctagcttacctcatctgattcgcatatttattgtatgagataggtattactatgtttctcattttaaaaatgaggaaggtgaggcagattcaatccattacaaggtttgtgaattacagtgagtacttctaacatcagtactacacagctgtcttccctacatacaggggactgtttgcatttcagcattatcaaaaagaagaagaaatctattagagaaagaacagccaccgaaataagttggtattgttcaggttgctcaatgtgaatgaataacagtcact

SEQ ID NO: 243790 - DNA, 568 bp, Homo sapiens
gtgggttgttccatatgaacaatttctttcagcgatttttgttgaatattctatatagagaagttcccattaatgcagttcaagagatttttattggcactcccacaaatgccacatctatttgcagatacatgtagcagccacagtccactcagccaccaraggttccaagctaaacctgcttagagcttaaatttagctggcaggatgaattgcaccatagattcaacctgtctatgtgtttctctacagtttttctattcacagttctatatttcctataaaacaatataaatggaggattaaattgaactattggtctttagaagtcaacatgtatctcaaagatgcccttccattccttgatcttggtaagttaatatgtatgaagtattcagggcagtgaatgttccacaatatacatttaataaatgtaaattattgttattattattcactgaaacaataaagaagggaaaagcctatatgggttgataggtatactgtggaatattgtatgtgaatgtggatgtacatatgtgtcacccttcacactgtaggttgaatg

SEQ ID NO: 243791 - DNA, 568 bp, Homo sapiens
gtgggttgttccatatgaacaatttctttcagcgatttttgttgaatattctatatagagaagttcccattaatgcagttcaagagatttttattggcactcccacaaatgccacatctatttgcagatacatgtagcagccacagtccactcagccaccagaggttccaagctaaacctgcttagagcttaaatttagctggcaggatgaattgcaccatagattcaacctgtctatrtgtttctctacagtttttctattcacagttctatatttcctataaaacaatataaatggaggattaaattgaactattggtctttagaagtcaacatgtatctcaaagatgcccttccattccttgatcttggtaagttaatatgtatgaagtattcagggcagtgaatgttccacaatatacatttaataaatgtaaattattgttattattattcactgaaacaataaagaagggaaaagcctatatgggttgataggtatactgtggaatattgtatgtgaatgtggatgtacatatgtgtcacccttcacactgtaggttgaatg

SEQ ID NO: 243792 - DNA, 535 bp, Homo sapiens
aatgataaaaacaaaattaaaatagtggtttaggraagcacattctcaattattcagaaaattttacaactcaagataattaagttgaacaaattacacatggcagagttttatacacagatttatgtattgatgaaaacacggtacacacatacaacattatggtgtgtgtctatgtgtgtgtgtgtagacaattcttgggatatgaagattacaggaaaggatgggatgctaagtagcaatttgtccttatttgacataaaaaaaggaactctaaatggtgtgtgattattaacagttttattttgtacaagaagatgccatattaccaaaggcaaccaaatcatttatctcttcacaatatatatcagactgctcaggagctgaacaggagaagaggataggggtggggaagacagaggatgaagcaccagcccacctccttcccactgcatgaagtttaatctgtgaacatgaattcaaatctctagacctctcctagaattgccttggctctcgaggtcaaatttgggca

SEQ ID NO: 243793 - DNA, 446 bp, Homo sapiens
tatagctttggcatgttcatgagtgagcacccagaatgtgttgaaccaaccccccacccctaactactgactatgactgcagtgggtttttatggggaaaaaaagtgtgaaaagcaaaaagaaaggaacagagattttttatcacctttattgtaagacagtccatttatgaattgagtataaacacatacaaagtaacaagagattcctaagaaacgcaaatccttgagtttcacgcacttcatgttcaaccatttgctgtaatccagaggcagcctgtgaatcattctcatgccctgttttttttttttttttcctataatgttctgggtttaaaagccatcttttccacattttctgtaaataatggataatcattttaaaaawttttatttttagtgctgttttaacaatgtagatagatcataaatgtacttgctgaattc

SEQ ID NO: 243794 - DNA, 594 bp, Homo sapiens
acaacatacatgtgcagagttcagctgcacaggtgctcagttgagaggaatgtcactggtaactggaaatctttccgtaaattatgaaagtgaattgggtccttttatcggctttgcttcttcctaggtagtactgtgggaggatttacctgaatacaagtaagggggtaatatcagattacctgctttctattaaaaatatccaaacttgagtttttttctcagtttcaggttaatatctgtatggtcactaggctctgaaaaattgaccttatctgtcatagtttagacaaagagcagaagcaataaattataaataatattaacaactggctgggtgtggtggctcacgcctgtaatcccagcactttgggaggccraggcgggtggatcacttgagatcaggagttcaagaccagtctgggcaacatgatgaaaccccgtctctactagaaatactaatattagccggtcacgatggcaggcgcctgtaatccaagctactcggaaggctgaggcatgagaatcgcttgaacctgggaggcagaggttgcagtaagctgtgatcgtgccactgcactccagcctgggtgg

SEQ ID NO: 243795 - DNA, 512 bp, Homo sapiens
ctccaaaacaaaaattggtgaagaggaatggaccaattggatgtaatgacagtcctcataacctttacttccgcttgggatgcagacactagacgaggtggcagacactctgttctctacttggaggaaggatggggaagttcgacctcaagacagcggcagcccagtccaagggggtgccagtcacagcgtgtgaggatgtgaggcaggcattaaaagagagcggcccagcaaaccaagatccccgtgtaatgtatcttgagagtgctgggccttgcagactctgccatttccccagccagcaggctaatgtggaaggacaggtgctagcagatcttcagatgtcagcaggaccccagacaccaagccagcgcccttccccatctgttaatcactggtagcctggctagtaactgagaaagagaaaagaccytcccagactccagatactaaatcgatcactttgggtcccacatttaagaattgaacttagctctggttagtttgggatt

SEQ ID NO: 243796 - DNA, 524 bp, Homo sapiens
caacaacaggcttcactcttgaattccattgcatgtgacattggtactgcgtttaaattcattttaacactgctgtggtataaccatttccaaataacaggagctgccacttagcagtgtgatgttgagcaggcgtgatacatacctatagatagatattgatctagttatgtcacattagtgggcaaaaaatataaaacaggtactgtgatgggaagatttttaataaaataggttcaatgactctgaagacaaaatgtcagcttagctgaaagcatgcatgtaaaaacaaaacaaaacaaaaagatcctacctcttggttaatctacacattttttttaatgtcccactatttgtgttcttagraccctaagggcatgatggtttaatatatagatgctaaaagatacaccatttttgaatgatatggtaaaccgttgtttcagcaagttgtgtgttgctaatcacagtttattcaccacattatttctatttttaaaaaatagacgcacgtaacttcagct

SEQ ID NO: 243797 - DNA, 578 bp, Homo sapiens
taatattatttgttgaattagtcccggattagttctgaaagaaaaatgaaattgaccattaggaagtgcaacccagtgaaaagttgcatagtcaacttctgtgacatcttgtcagatttacatgtgtgaattctcactcatcatggctcttgctgtctcctcaagggccaaagaaactttttcccatagacgagtgtgtaaccagttggtgggcagcagtttttaggaagctgaatctcaaaggtccgtagcaggccagatctcgcatgaccacccctgtgttcttctcccgtaactgtacattcagcttcccctgcactttcccaagagcaacagaaaaaaagcaaatgccaggtgagttgtttattcatttctcatgtttccaatgcataaaatgataaaagattaacatgataaaaattatcaaggaatttatagttaacagatctaaaatasggaaaagtcaacatattataaagatatcaagataattataatagttttagtgtgtatatattatacattgtgttgtataactgtaattattagtaacgtgcagacttatctctgatactctg

SEQ ID NO: 243798 - DNA, 437 bp, Homo sapiens
aattatagatctaaaacataaattacctaaaataaaaaattcactagatgtggccaagtgcagtgggtcatgcctataatcctaaacttttgagaggctgagataggaggattgcttgagaccagaaattcagggccaacctagacaacatagtgagaccttgtctcttaaaaaaaaaagccaggtgtagtggtgtatacctgtagttccagctrctcaggaggctaaagcaggaggattgcttgagcccagtaattggaggctacaatgagctatgatcgtgctactgcactccagtctgggagacagagtgagaccctgtctctaaaaatagaataggtagggtgccaacagtggaggagtgtgcagctgcatagaggggaagcctgaccctttcccacccatcagagtcagatttacccaaaacacacgaggcc

SEQ ID NO: 243799 - DNA, 612 bp, Homo sapiens
ttggtgtcatacttcaaaatgagaatattctttagcaatcttacagttaaaataatcccaataaaataattgtcaagtgattctatacattagtcagttgtcagagaaaaggcttacataaatatgaagscttccttggttcaaaaatctgcagggtaggccagcagggaagagttgcagtctgagtcaccgtgcagtccactggcagaatgctctcttgcttaggggaggtcagtctttgttaatcttttctattcaacgttcaccaatttaaatgttaattttatccaaaaacaccttcacagaaacatccagactaatgttgaccaactatctgaacactgtagtctaacgaaattaatacataaaattaaccatcacatataccttgcaaatgagttcataacaacaaacaattgaaagcaatgcaaagacaaattatgatagagcagtagatcaccattaaaagtatggatgtggatgtactaactcacagttgcgggtggttttccacagcatgttttaaaatcaaaattgtaagttcaaacaagaatatgtaaggcaggctgggtgcagtggctcacacctgtaatcccagcactttgggaggct

SEQ ID NO: 243800 - DNA, 520 bp, Homo sapiens
gtttctcccttgtacttctctgatgcactttgaggcctgagctgcaactgaagcttttcccacactgattacattcatagggtttctcgcgcggcatgtgttataaaatgtccagtcacatctgacatatgatagaaggacttcacgcattcattacatttataaggtttttcccctgtgtgtattctctgatgcacagtaaggactgatttctcagagaaggacttcccacactcattacatccatagggcttctcccctgtgtgtgttctctgatgtgatttgagccctgagttgcaaataaaggttttcccacatttattacagtaataagatttmtcccctctgtgtgttctcttatgtactgtatagtctgccttatggtagaaggttttcccacattttttacacacatagggtttgtctcctgtatgcattctctggtgtattgtaaggtatgaattcctagagaagaatttcccacattccttacattcacagggcttctcacctgtgtgtg

SEQ ID NO: 243801 - DNA, 361 bp, Homo sapiens
atttgcaaatattttccagactgtgtgttgtcttttctccattgtgacaatgttctataatgcacaaacatttcaaattatgatgaagtaaaatttatttttcttttgtttgygcttttggtgtcatatagaagaatccattgccaaattcaaggtaggctatgttttcttctaagagttctacatgtttaactcatatatttaggtcattgatccattttgaattgatttttgcatatgatgtgaggtagagttcccatttaactcacgcatgtgggtattgagttttcccagtattatttgatgaagagactattcttttcccactgaatggtcttgacagcctcgttgaaaatcagtt

SEQ ID NO: 243802 - DNA, 627 bp, Homo sapiens
gttaccaaaccaaacttgggtcctctcaccaagcacacagaaaaagctaaaactgacattgggatttgcagcaagagaaatggaggcatttattgcagggcattgggcaaggagaattaggtggttaacgcctaagacctgtgatccctgatggcttataagcaagggtttttaaaggtgatggtacatttcaggaaagcagaagttacaggcaaaaatcatacatcagtacatgaaggttatacattgatttcgccagctgcccaaggtttgtaccagtttactttgccagcagcagtgcgtgcatgttcttattccacayattcatcctgagacttggtattttattttttatttttgctcttctgttgggtgtgttgtggtactcttttgtggttatcctagaagttacagggagcatttttgacatattacaatgaaatacaaactattcattgtactacctaaacctgtaactttgaaacatgttgactccatttatcccccttcatttctaggcttttcactccttcctgccttttcatagttctagtttgggtcatttttccttttcatgaaaattccctttgatgtttcttataatgcatatctgttgtttgtcattac

SEQ ID NO: 243803 - DNA, 589 bp, Homo sapiens
tccttggttatctcctgtctctgtcacttttatgaaagcagaagagaagtttttgtatatctctgttatcctgagcacccactttcacaagaaggtgtttcctaacatggccctggtggcttcatggggacaatcgccctggcatgtcatatctacaattgataagagtaaaaggaaaaagtattcttatgctcagtctgaagtattcattaaatactttttaaatgtattctaaacacctttcaactcatctatcttatagttacaccaagggcctctcagaaggcgacgtttttacctgtttatcttcagcctgggcttttctgtgctccacttctgccgtggcaakgggttgctagatatccatagtttcatttagctaacatttattgatcacatactatatgccaagcactgtgctaggtttttaggaaacaaagtcatagccagtgtggcaaaatgctcatgatctccccaaaggaaaaggctactaaaccagagagactataaaaacagagtagaaacagcataggctgtggagtcataatttctagcctggtctcattcttactcagctatctgatgtcca

SEQ ID NO: 243804 - DNA, 548 bp, Homo sapiens
  misc_feature (1)...(548): n = A,T,C or G
ggttacatgtacactctaaaatctgttaatgatatttcacaaatctccagaaatagatactttactttctgaccaatgttgtattctctttaagcgatgcctctctttttgtaatatgtatattttaattggcacaataattgtrcatatttatggggtatatagtgtgatattttcagacatattcaatatgaaatgatcaaatcagagtaatcagcatatctgtcacctcaaaactttatcatttctttgtgttgataatattcaaaatgttagaaaagatttctaggtagttgagaaaatataataaattattgtttactatagttactctaaagtgctatagaaggctagaacttattcctgctatctgtaattttgtatctgttaacgaatgtctctctgtactccccccgtcaccttcctattcttcccagcctctattctactctatttacatgagatcaagtttttaaaaatgtccgtatctgngtgatattgaaattaaaaattgaaattctgtgcctgacttattacacttaatgtaa

SEQ ID NO: 243805 - DNA, 548 bp, Homo sapiens
  misc_feature (1)...(548): n = A,T,C or G
ggttacatgtacactctaaaatctgttaatgatatttcacaaatctccagaaatagatactttactttctgaccaatgttgtattctctttaagcgatgcctctctttttgtaatatgtatattttaattggcacaataattgtgcatatttatggggtatatagtgtgatattttcagacatattcaatatgaaatgatcaaatcagagtaatcagcatatctgtcacctcaaaactttatcatttctttgtgttgataatattcaaaatgttagaaaagatttctaggtagttgagaaaatataataaattattgtttactatarttactctaaagtgctatagaaggctagaacttattcctgctatctgtaattttgtatctgttaacgaatgtctctctgtactccccccgtcaccttcctattcttcccagcctctattctactctatttacatgagatcaagtttttaaaaatgtccgtatctgngtgatattgaaattaaaaattgaaattctgtgcctgacttattacacttaatgtaa

SEQ ID NO: 243806 - DNA, 584 bp, Homo sapiens
ttaatatccattcccatgcctgttctccagatttctgtttataaaaattagaaaactcaagcacttcaagtgtagtgcacctcctcatgggtcacactctgaacctcacctgtaggggcctgccaggacttgttatagatctgaaagcaaacaggggtgttggaggtggctcctgaggagaatcaacattattttgcctaacaactgcctcaggggaggccgttactgttgcctcaggcagcataggatttatctcctcagacaaaggtggaaaggcttatggcagcatgggtcggagaggggatgttgccactgctggggatggggaagctgtttcttctggcagaaaaggttcatcagagtttacaaactcagtgaccccagcttcatctgggtcctccatatgttcccattccaagttgcagggtctcattcttttccaatcaatgccctcagtttaacaatagaygcctagtgaggctgtccatgcatttttcattacaggtcagccacttgcatgataagaacttgtgtctgtttttccacaatttcaactctttctctacaggagataagactctcag

SEQ ID NO: 243807 - DNA, 482 bp, Homo sapiens
tgaatcctgccaggactgggtytttgccttctgggtattgggttgccttctggcacagggtgggtctagaaatgcttgtccagaaactagggcctggaatcaggggcttcaggaatctgcctgatgctttagttcattgtggctgagctggtacccacgttgcaaggcaaagtcctctgtaatcttccctctcttttctgcaagtggaaggagtcgacttgagctgtactgcttggagtttttggaggggtgatgtaagccttcccttaactgtagcagctgatgtttcactgggttgctgcaccccaagtccactagtccactgacttcgagcccagtgcagcaccaggacttgcttagagactgcagtccttgtggcctgcctgcctttcaaatatattcaggactctaggtcactgtagtgagtccatggtggagctagctggaacttctttggggcagaggattctactctggctgag

SEQ ID NO: 243808 - DNA, 594 bp, Homo sapiens
atccttcccccttggtgcgaatcatcagcaatgacttttcattattcgtaagagttacaaagccatttctggctcttactgactgtgatcattggggaaaggtagagaaaaaaggaaatggggagatccgggagggaggggctctctgaatttcttccaggaagaaaagaaccatttgttttaccagttctgggacagctttcagaaagacagccaaatcctttcagatttgattaatttggccaaccaactaaattaaaaygtccttgataagaaatgggtgaaggaatgtatagaggaagaattcaggaggtttccaatatgctcaatttcaaaccaaaacatactaaagatttttttttgtaagacaggatctctctctgttgtccaagctggagtgcagtggcatgatcatggctcactgcagccttgacttcctgggttcaagcgatcctcccacctcagcctccctaagtagctggaactataggcacatgccaccaggcctagctaatttttgtattttttgtagagtaggggtctcatcatgttccccaggctggtctcgaactccttgactcaagggatccaccc

SEQ ID NO: 243809 - DNA, 536 bp, Homo sapiens
tttagacccatattcaaaagtttccagacatctctatttggaaactctccaggcactgtaaacatggttatacaagactgagctccatccttgcggtcctgttcctccctctctctgctcctcccttccactctcccaccactacttatatctactcctcatttactggttagattaaatgacacttttatactctccattgtccaagccagaaacatggtcctgtccctcttctttactttctgatccattcaatcatgttcratcattgctacttccttgagagctctggaatcttttctttctattccacctatctccatcctagtgcaggctgttattttcttccccagttaccacagtaactgcagtagtccattctcaccctgctgtaaagtagtactcaagactggataatttataaaggaaagatgtttaattgactcacagttcctcataactgggtagacctcaggaaacttacagtcatggcaggaggcaaaggagaaataaggaccttcttcacgtggcggcag

SEQ ID NO: 243810 - DNA, 411 bp, Homo sapiens
tgaacccaacttgtagtcttttatccctcacccccttcccaccctttccccctgagtcctcaaagtccattatgccattcttatgcctttgcatcctcatagcttagctgccacttasggttgagaacatatgaatataatgtttggtttcccatccctgagttacttcccttaggataacagtatccaatcccatccaggttgctgtaaatgccattaattcattcctttttatgtctgagtagtattccattgcgtacatatcgcacagtttctctatccactcgtttattgatgggcatttgggttggttccacatttttgcaattgcgaattctgctgctataaacgtgcatgcaagtatattttgtataatgtcattcacatttaaatacaggcgctatcgcttct

SEQ ID NO: 243811 - DNA, 411 bp, Homo sapiens
tgaacccaacttgtagtcttttatccctcacccccttcccaccctttccccctgagtcctcaaagtccattatgccattcttatgcctttgcatcctcatagcttagctgccacttacggttgagaacatatgaatataatgtttggtttcccatccctgagttacttcccttaggataacagtatccaatcccatccaggttgctgtaaatgccattaattcattcctttttatgtctgagtagtattccattgcgtacatatcgcacagtttctctatccactcgtttattgatgggyatttgggttggttccacatttttgcaattgcgaattctgctgctataaacgtgcatgcaagtatattttgtataatgtcattcacatttaaatacaggcgctatcgcttct

SEQ ID NO: 243812 - DNA, 534 bp, Homo sapiens
tctagagtttggttctttgtctctcttgttcttcacaatattcttagtgcctagagcaaagcctgatgcctcacaagtgctctataaatgtttgctgactgcctgcctgattcaaccaacaaatgtaattgaatatccactgtccacacatcctcaaaacagacccttaacttttactgttaagagtgacctaaggactagagaaatccacctaagtgattaccaaggggctaatgtccagttcgtttctaatgttcattattatccacttaattcactggatcaactgttgttttttttttcatgcctagaaaaatttttggtttgtttttgtatttacgcrtggaggaactgaagcttggcgagaacaagagtgaattttggcccaaggtcacacagatggtaagtggcacatcaggggttagaacccagtctggctgtcaataaaactgtacccacccaggtgcttctccaagggctgaaaatctgcctcatttgtctaacaggctgcccaagtccccttagatcatgaga

SEQ ID NO: 243813 - DNA, 602 bp, Homo sapiens
taacaatgtcacaaagagagccaatgttctaccatgtagtattagttcattctcatgctgctaataaagaaatatccaagacttggtaatttataaagaaagaggtttaattgactcacagttcagcatggctggggaggccttaggaaacttacaatcatggcagaagagaaagtaaacatgtccttcttcacatgatggcagcaaggagaataagcaaaagggggaaaagccccttataaaaccatcagaattcactcattatcacaggaagagcattaaagtaactgcccccatgattcrattacctcccaccaggtcactcccacaacacatggggattatgggaactattaatcatcttaatacaattcaagatgagatgtgtgtggggacacagccaaaccatatcacatgttatatgactattgtaccctgaaccttcactacttgaggggaggggccattgctaatcatgtagttcataaaagtgccatggcccaaggttgcagtctgtctctaggagtctgctgtctggccctgttaagcctctgtgctctgccctagaatgcaatggattacagggccctgcacaactgcta

SEQ ID NO: 243814 - DNA, 602 bp, Homo sapiens
taacaatgtcacaaagagagccaatgttctaccatgtagtattagttcattctcatgctgctaataaagaaatatccaagacttggtaatttataaagaaagaggtttaattgactcacagttcagcatggctggggaggccttaggaaacttacaatcatggcagaagagaaagtaaacatgtccttcttcacatgatggcagcaaggagaataagcaaaagggggaaaagccccttataaaaccatcagaattcactcattatcacaggaagagcattaaagtaactgcccccatgattcgattacctcccaccaggtcactcccacaacacatggggattatgggaactattaatcatcttaatacaattcaagatgagatgtgtgtggggacacagccaaaccatatcacatgttatatgactatygtaccctgaaccttcactacttgaggggaggggccattgctaatcatgtagttcataaaagtgccatggcccaaggttgcagtctgtctctaggagtctgctgtctggccctgttaagcctctgtgctctgccctagaatgcaatggattacagggccctgcacaactgcta

SEQ ID NO: 243815 - DNA, 602 bp, Homo sapiens
taacaatgtcacaaagagagccaatgttctaccatgtagtattagttcattctcatgctgctaataaagaaatatccaagacttggtaatttataaagaaagaggtttaattgactcacagttcagcatggctggggaggccttaggaaacttacaatcatggcagaagagaaagtaaacatgtccttcttcacatgatggcagcaaggagaataagcaaaagggggaaaagccccttataaaaccatcagaattcactcattatcacaggaagagcattaaagtaactgcccccatgattcgattacctcccaccaggtcactcccacaacacatggggattatgggaactattaatcatcttaatacaattcaagatgagatgtgtgtggggacacagccaaaccatatcacatgttatatgactattgtaccctgaaccttcactacttgaggggaggggccattgctaatcaygtagttcataaaagtgccatggcccaaggttgcagtctgtctctaggagtctgctgtctggccctgttaagcctctgtgctctgccctagaatgcaatggattacagggccctgcacaactgcta

SEQ ID NO: 243816 - DNA, 573 bp, Homo sapiens
tcatcagacctcttcctaggatccatactggatcttgacacatgcctcctaaacatgtccactggctttccattatcacgaaaataaaacccatacaccttatacaaaagaccctacttgatctggtccaaattcctctcaattgctctctcccacaacttgtattccagtgatttccagtcactaaacatgtagcattttctgagtttgctcatttttaataatatacatttccttctgtctaaaaaggctatcctcaggtcttggcctggcaaagtcatcttttaagaccagctcaaatatcatctattctgagccaggcagaggacatgttctcttaaggcattctgttcacccctctggcataatctagccgagagtgacaagagattacgataataatcccttatgaccttgccttgytgttaacaaagttatctcgtttgaaccatataatgactcagatgaggcaagaaggcatcccatttcatagatgagaaaatgggctcaagacagcaagtatcctccccagtgtcatgtggacaggatgggatccagattttgtagccagaa

SEQ ID NO: 243817 - DNA, 584 bp, Homo sapiens
atcctccatgatgtcatcagacctcttcctaggatccatactggatcttgacacatgcctcctaaacatgtccactggctttccattatcacgaaaataaaacccatacaccttatacaaaagaccctacttgatctggtccaaattcctctcaattgctctctcccacaacttgtattccagtgatttccagtcactaaacatgtagcattttctgagtttgctcatttttaataatatacatttccttctgtctaaaaaggctatcctcaggtcttggcctggcaaagtcatcttttaagaccagctcaaatatcatctattctgagccaggcagaggacatgttctcttaaggcattctgttcacccctctggcataatctagccgagagtgacaagagattacgataataatcccttatgaccttgccttgttgttaacaaagttatctcgtttgaaccatataatgactcagatgaggcaagaaggcatcccatttcatagatgagaaaatgggctcaagacarcaagtatcctccccagtgtcatgtggacaggatgggatccagattttgtagccag

SEQ ID NO: 243818 - DNA, 573 bp, Homo sapiens
tcatcagacctcttcctaggatccatactggatcttgacacatgcctcctaaacatgtccactggctttccattatcacgaaaataaaacccatacaccttatacaaaagaccctacttgatctggtccaaattcctctcaattgctctctcccacaacttgtattccagtgatttccagtcactaaacatgtagcattttctgagtttgctcatttttaataatatacatttccttctgtctaaaaaggctatcctcaggtcttggcctggcaaagtcatcttttaagaccagctcaaatatcatctattctgagccaggcagaggacatgttctcttaaggcattctgttcacccctctggcataatctagccgagagtgacaagagattacgataataatcccttatgaccttgccttgttgttaacaaagttatctcgtttgaaccatataatgactcagatgaggcaagaaggcatcccatttcatagatgagaaaatgggctcaagacagcaagtatcctccccagtgtcatgtggacaggatgggrtccagattttgtagccagaa

SEQ ID NO: 243819 - DNA, 586 bp, Homo sapiens
cagctctgttgagatcttacttgatgacatggttggactcaggcaacacattttatttgccaatgaaactgtatttggataaatagttaatttgcctgtgtccctcactgcaaaagagaagctcttatttccttctcagtttgaatcagatttgaatcagaattttatcaatagaagattcagcattaattttctctggctctttccaataggccctcctagttactatctcttagttcatacctggcatccttatatttttsggaaaaaagccaatactattaaggataagccatacaataataaaaattatattaataataatgcatctctcactatttagcacttactctgtgccggaagctgtggtaagtaatttacattcattgtctcaattggtcttcacaatgaaacaacaaaatctgtaattatcattttctccattttagagatgggagattgagatttagacatggcagggctaggattcaaactctggcagatgaactctgagtgtgcccctcttcagaaatgggtcttccattcagacccattcaggggttaactcagcctgaactcgcccaca

SEQ ID NO: 243820 - DNA, 577 bp, Homo sapiens
aagctttttctcctcgtctcctgttgcttctcatgtggagattgcttcgagggctcagggtaatggattgggttgacttcagtcagtgggatgaggtttacaggtctatctcagtgaacacctcaccatgttttaacttggtggttcccttccctatgagttcctcacactaggacacacatcagacacgtgggggacctggcagaagagcattcctgacagctctggtaaaggcaacgtcagtggcagccaaggaacctaccctcctatgccattcagcaccagccacgctttggacagacaagaagcctcgtcctgaggacacacacaagggctgctaatcaggcagccactcagcttgcaccccaggacaggtgaatgagtagggtggtgattgaatgaggaatcaggtggcagctttgttttgtttatttttctcaaayaagacattagtttatattatctacccactccctttcaaccctgctgctcttaagtgctgggttttttttgttttgtttgtttatttgttttgttttttggtttcagttctttcagatcctcttcagcagcaagg

SEQ ID NO: 243821 - DNA, 597 bp, Homo sapiens
taaccacatttttgatgaatgaatgaagagataagttggagtagctttcaagtattagtgaagagaaaaggctaaatagctttaactttttaaaaataaaaggtagcatctttcttatttgagacactgatgaaacttagaatgttgaaaataataccattctgtgtcttgggtcagaaatacagatagattagcagaacattagctgcaaagtgctctcctaattattttagagaagagacacaaatgcactcttgagtttycttttagtatgattcttgctagcaactaatagtgcattttgggcagttgcagggctcaaaagcagtatatatactgtaaaacaattttaaaaagccttgaattatagtaaaaagagaactaatgaaaagggacctaagaaatataatgaaaataaatagttcttcctcttccaacttccctccagggagcaggttatgaaagatcgctagaatagtagaatagtggaataaaattattccagggtagaaagtaattaggggtgagtacatgaaagcccaggtttaattgttctttttaatacagtgaaaaaagtcattcatcatacaactttaa

SEQ ID NO: 243822 - DNA, 597 bp, Homo sapiens
taaccacatttttgatgaatgaatgaagagataagttggagtagctttcaagtattagtgaagagaaaaggctaaatagctttaactttttaaaaataaaaggtagcatctttcttatttgagacactgatgaaacttagaatgttgaaaataataccattctgtgtcttgggtcagaaatacagatagattagcagaacattagctgcaaagtgctctcctaattattttagagaagagacacaaatgcactcttgagttttcttttagtatgattcttgctagcaactaatagtgcattttgggcagttgcagggctcaaaagcagtatatatactgtaaaacaattttaaaaagccttgaattatagtaaaaagagaactaatgaaaagggacctaagaaatataatgaaaataaatagttcttcctcttccaacttccctccagggagcaggttatgaaagatmgctagaatagtagaatagtggaataaaattattccagggtagaaagtaattaggggtgagtacatgaaagcccaggtttaattgttctttttaatacagtgaaaaaagtcattcatcatacaactttaa

SEQ ID NO: 243823 - DNA, 561 bp, Homo sapiens
gcaaagtgcatccccaaatctctctgctgcttgcagagtgtactgcttctcattgtccatcagggtctgattcaaaaatgacataacgtctccccaggagatttcaaatatttgggtgaaattccagaatttcacccaatatatctatccctatatctattatagagatatatctctatgtctatatatatatatatatcatagagatacatctctatatctatcacaatatatcgtctctgtatctatcatggtcatccggaaacttaccaagatcccccttgatttgctttaagtactattgggagaagaggacctggaacttactggtcccaaatttactgggcatctgttggaggggcaagagtgagactggggcttctttagggtgaggatttctaggagggggcaagtgagaagctgaaagtrgatagggaagtcagggtggacccagaggagcagggctggtgggagctggcttctcaactgggagtgcctcggatttgtatctttaattccctgggcttgccccttgcagccttccctgagacagcaaacagg

SEQ ID NO: 243824 - DNA, 468 bp, Homo sapiens
ctacccactcctggtctcctctccactgagagctgcatagacaccagcacaacctgcctgcagaaaggagctacccactttgggtctcttaagagctgtaatgacactcaataaagcatctcttcaccttgctcatgctccagttgtctgtatacctcattattcctggacatgagacaaaaactcaggacctgccatacagcaggactgaaagagctgtaacacaaacagggctgaaacatrcctccaccgccactcaccacgttgtgggtgacaagaaggagagaagagctgtggcccttcagggaacccagaccaaggagctccctgagccagggctttgacaccctctttggggctctgcagttcctggcatctccaagcttctgggcaccactttatttcccagtgcccacagtggaagctgcctgcctcattgcagacagcatgcctgcaactatggagact

SEQ ID NO: 243825 - DNA, 474 bp, Homo sapiens
tttcttaaatatctacagaatgcattcaatctaccaaggttttctattttttggtttaaaacaaaataacatttcagaggaaaaaaataaggcataataagtatcatccaatcaggttgcccttaaaagttgtgcaataataatagttcctgtttgatgtttaggtaagyagccaaatttctgaatatagagaattatacagcatcaaatttagaatgatctctttgcactaagaaggaaatcattgtaatgaacacaaataatgataatctactgaaatctctcctactaacagtatgagtgactgaccaagtaatttaaattcattaaaacacagttttcacatttgtaaaatggaaagactgaaagatacttcaaattctagaatttcttgtattctttatgagttaaagttagttttaaagataatatatgaaatacacatgaagagtgagtaaaaatggccaagaattc

SEQ ID NO: 243826 - DNA, 580 bp, Homo sapiens
actactcttgtgttatcttgaattatctatgtctatcatatgaaattgaccaaaatgtaaaggtccttacatataggctattccaggtcacctaaatattacattttattattatacaagtattaagtgattggtcatcaattaataacactactatggaagcatgttttttttttttgagacagagtcttactctgttgcccaggctggagtgcagtggcgtgatcttggctcactgcaacctccgcctcccaagtttaagtgattctcctgcctcagcctccccagtagctgggactacagttgygcgccaccatgccaggttaatttttttgtattttttttagtaaagatgtggtcttaccctgttggccaggctggtcttgaattcctgaccctaagtgatatgcctgccttggactcctatagtgctaggattacaggcatgagccacccctcccagactaggaagcatgaatttaaaaataattttgtatagctggtgagatactcatggaatagattgccacaaaagagcaatgtacaggtagaatttatatgtgtgtatatgtgcacatat

SEQ ID NO: 243827 - DNA, 598 bp, Homo sapiens
ccctggtaaatgcttccatggaaatcccattagaacatcaaagaagaaagccccatgcctttcctagaggccagtttcctggaaggatatttattcgggaagttaatgttcctcttacttccggttttctaaaagtaataagcatttttttcacaatacaccccttacaaaaattgttctaacttttagttaccagtgtgtggggggaggtataaaacctatatttaataatggaggttattaacttgttagaggctaaaataataaagytgcatttaatgagtagttaaaagattaaaaatattaaatatttttgagaaaaataatgtctgcaagaaagttatgaaagtaatggtaaattctgcaatatgctgaataataatttagtttatttgaaaaatattttactaggaaaaattaatgttatagaaaagatgaactattcatcagttatcaaagaaaagcattaaacttttaaatttttattagttactggggtcttcagtattaaacttaaaaaataccaaaacaagaattatacaatattcatttcagcacagagtagagccttagggaaaaatcctgcaataatagttat

SEQ ID NO: 243828 - DNA, 594 bp, Homo sapiens
attgcattctgcttcacccagtaatgattacaaaatttcagccattatggcagaaccacttgggagaggcagcctgtcctccaggctgatgcagcccgtgtcaaggtgagcaacttggtgaagggaagagcaggctggatttcacctcccactcaggtgatcttgggggccactgtgggcaggacacaacctgggcagctcaagaatggctttttgtttaggtcttcaatcctactccatttatccaggctagttttgttttcactgataaagacatttcacttatggaagtcataggtgtgggtaactagataaagtagatcagttaaatgatacgtcttgaaaataatgacacctttcaaagtaaagtattaacataatgataatttgttatcttggatttaaccatattttgtatctttaaaaaatacttgtatattawttattagttatggctttctaaacacaaagttacctatacctacattaaaaaaaaaattcatggtggtgagagggagttatatctttaaccttaaccaagttatgtaatttacataattattgtgtgtgtgtatgtgtccatacacataatca

SEQ ID NO: 243829 - DNA, 614 bp, Homo sapiens
tggtattaatttgaagtcagctaatgtgatttctccagtttccttcctttttcccaggatgactttggctattctgggtcttcagtagtttcatataaattttagaattttttttatatttttgtgaagaatgtcatttatattttgataggaattacattatcttrtattgctgtgggtagtatggacattttaacaatactgattctttcaatccatgaatgtggaatatctcttcatttttgggttgtgtctcctttgatttcttgtgtcaatgttttatagtttttattgtagtttttatagttttcatttgtttggttaagtttatttctgggtgtcttgttttatttgtagctattgtaaatgggattactttcttgagttctttttcagattgtttgctgttttcatgtagaaatgctacagatttcattgtattaattttgtaccctacaacttaactgaatgtgtttatcagttctcattggttttattgtatgaagtctttaggtttttcccacttataagattatttcatttgcaaacagggataatttcactcttttgttttcaatttatatgccccttattcctttctcttgtctgattgc

SEQ ID NO: 243830 - DNA, 614 bp, Homo sapiens
tggtattaatttgaagtcagctaatgtgatttctccagtttccttcctttttcccaggatgactttggctattctgggtcttcagtagtttcatataaattttagaattttttttatatttttgtgaagaatgtcatttatattttgataggaattacattatcttgtattgctktgggtagtatggacattttaacaatactgattctttcaatccatgaatgtggaatatctcttcatttttgggttgtgtctcctttgatttcttgtgtcaatgttttatagtttttattgtagtttttatagttttcatttgtttggttaagtttatttctgggtgtcttgttttatttgtagctattgtaaatgggattactttcttgagttctttttcagattgtttgctgttttcatgtagaaatgctacagatttcattgtattaattttgtaccctacaacttaactgaatgtgtttatcagttctcattggttttattgtatgaagtctttaggtttttcccacttataagattatttcatttgcaaacagggataatttcactcttttgttttcaatttatatgccccttattcctttctcttgtctgattgc

SEQ ID NO: 243831 - DNA, 589 bp, Homo sapiens
gcgccaagtggaaggggcctggctgattcttgtggtcccaagcagggcaagatgggttagtgcagaagtcttgggtaggcagatttcccctcagtgtgcaaagggggtgctctgagaggccttcatttgtttaaaaaaaatgtgcttggtgtaatgcactgtatcaggcatcagagaggcattagaatttctctsgaaaaacagggagtttgtaaatagagcctgggaatgaatcaggataaataaaacaatgagcatgaaacagggggctgatggtgtgggcacctcttctatctccctcaagctgctattcacattcttcctgtgtcatcattgttcttgaaagtactttcttctctgctggagtttaacttattttcctttgtttttccctttcacaacccctggcacattagactggaaaatgtccattgactgcagaatgagcaaagcccccgtgccgtatcttggccagctctcatgcttggtggatgctgcccttcctggacatacttcctcctctgcacagggctggggagactcagaagccagaccacccaggtgtgaatcttggctccctctcttacta

SEQ ID NO: 243832 - DNA, 589 bp, Homo sapiens
gcgccaagtggaaggggcctggctgattcttgtggtcccaagcagggcaagatgggttagtgcagaagtcttgggtaggcagatttcccctcagtgtgcaaagggggtgctctgagaggccttcatttgtttaaaaaaaatgtgcttggtgtaatgcactgtatcaggcatcagagaggcattagaatttctctcgaaaaacagggagtttgtaaatagagcctgggaatgaatcaggataaataaaacaatgagcatgaaacagggggctgatggtgtgggcacctcttctatctccctcaagctgctattcacattcttcctgtgtcatcattgttcttgaaagtactttcttctctgctggagtttaacttattttcctttgtttttccctttcacaacccctggcacattagactggaaaatgtccattgactgcagaatgagcaaagcccccgtgccgtatcttggccagctctcatgcttrgtggatgctgcccttcctggacatacttcctcctctgcacagggctggggagactcagaagccagaccacccaggtgtgaatcttggctccctctcttacta

SEQ ID NO: 243833 - DNA, 467 bp, Homo sapiens
atatataatccagtgactcaggctggcagtctccaccttccttctttgactttccagcaattctatcatcattggctctgaatctctgaccccygctgaatgattggctccttccattttcctttgattgctctcttcttgagttgcctcatctaattttatcaaaagtttatttcccctctaaagcatttgtatgttaacgaaaaagatctgtaagtgaagatagtttttattttctgtgttttgttctaacagatgattatttttcttgtctgggcttgaacagagaaaagcatcagcaaggctcttgttgaaaaattcatcttgtcgctggtggcaagagccacactgcaagaaataataagcccagctgcagccgctgttcggatcacagtagaggcggcaacaccccttcccccaattcttcctttctttgcttgctctctgagcagctctccatgaagctg

SEQ ID NO: 243834 - DNA, 575 bp, Homo sapiens
gggaaatgaaaggaaatcagtgagagcaggagatggggcctgggaattaagcactttatacaccagaaaaggtcagttgtgaaataccaagaaagctggacttcatcctaagtgccatgagaagccactgatggatttaagcaatgtttaagagtctaggtgacctcccagggtgctctcatcactaatgcttgcaataacagacttcattaagcccaaccaagaaattcttccacattaattgggccattcagcaaatatttgctaaatgtaatttaaaygtgattatttaaatcacaaagatttagcgacacaccttttagggaaaaagagataaaggtaaacatttctggcagaaaacccaatttatatttctcaaagagcagcatcacgtctccagtaggagagaaaaggaaagcagaagattaagatgggtacacctaagaaaaagggcactggtgcctaaaactaagcaggtaaagactgggatactgtgagtctaagaaacaaaagacagcagaagagcaagagaactgcaaagcactcaacaggaagatcgattgggaagctgaagg

SEQ ID NO: 243835 - DNA, 625 bp, Homo sapiens
attagtgcatccatgtttacagcacagttactcacaacagygaaaaggtggcagcaacccacatatccatcaactgacgaataaagataatgtgctagatacatacaatggaaaacattattgtcctttaaaaaggaaggaaattctggcacatgctacaacattaaataagccagtcacaaaaatacaaatactgtatgactccacttacacgagatacctgaaacagacaaattcatatggacaaagtgtgtgtgtgtgtgtgtgtgtgtgtgtgtgtgtgtgtgtgtgtgtgagctcttattgttgataccattattgtatgtttgattgttagatattctgatactgcttctcacctgtttttcactacatgaagcagagctagatctaaagaggagaacaaaactgtcttattctctcatgcctttaaaatcttgtctccatatcttaaaacgtatttgccacgtatgcataaacatgtctattaatggaaatcgtagagtgttctgacactactgggattgttttgatgatgatttgatgacattctctgcaaaactctgctcagcatactgagaagaggggacaagaagggtccaggtaaatgcttccagaggatgta

SEQ ID NO: 243836 - DNA, 625 bp, Homo sapiens
attagtgcatccatgtttacagcacagttactcacaacagtgaaaaggtggcagcaacccacatatccatcaactgacgaataaagataatgtgctagatacatacaatggaaaacattattgtcctttaaaaaggaaggaaattctggcacatgctacaacattaaataagccagtcacaaaaatacaaatactgtatgactccacttacacgagatacctgaaacagacaaattcatatggacaaagtgtgtgtgtgtgtgtgtgtgtgtgtgtgtgtgtgtgtgtgtgtgtgagctcttattgttgataccattattgtatgtttgattgttagatattctgataytgcttctcacctgtttttcactacatgaagcagagctagatctaaagaggagaacaaaactgtcttattctctcatgcctttaaaatcttgtctccatatcttaaaacgtatttgccacgtatgcataaacatgtctattaatggaaatcgtagagtgttctgacactactgggattgttttgatgatgatttgatgacattctctgcaaaactctgctcagcatactgagaagaggggacaagaagggtccaggtaaatgcttccagaggatgta

SEQ ID NO: 243837 - DNA, 388 bp, Homo sapiens
aataagggacaggagagcccttctgtgacagcagagtgagggtttgccaggagctcccctctacaccagtcctcccaggcatcacagtgtctgcccaggtcagacactgtgtttagaattgctggtgattttgkagttcagaattactggtgattctgtgtctccatccttcttcattccaaatggagcgatgaatgctgtgaaccggcccatttcaccactgtatgatgatgcaggtggaaggcaaatgacttgtctttgccattaataggaccgaggaccaagaggagaccggtctgatggagagactattgccctcaccttgagacccaggattgtatttggattcagtgactggaggttgcttaaggatttcatcctaggtaaa

SEQ ID NO: 243838 - DNA, 589 bp, Homo sapiens
gatgaaccatttttgccagaagaaacagcttccccatccccagtagtggcaacatcccctccccgacccatgctgccatcagcctttccacctttgtctgaggagacaaaccctgcgcggtctgaggcaacagtgatggcctcccctggggcagttgtcaggcaagataatttgattctcctcaggagccaccccaaacacccctgtttgcttctagacctataactagtctaaagtcctggcagacccctagaggtgaagttgagggtgtgacccatgaggaggtgtgttacactcaaaaagaaccacttgagtttcctaatttatataaacagaaatctggagaacaggcatgggaatgaatattaagggtgtgggataagggtggaaggaacatagagttgaatcaggctgaatttattgamttgggcccactaagtagggactctgcatttatcatttcagctttgggagttaaacaaggttctaatagtttatttgtttggttagctgaaatatgaattaaaagatggcccactctgagtgagctagaaatgcctgatctcccttggtttaatgtagaggaagg

SEQ ID NO: 243839 - DNA, 539 bp, Homo sapiens
ccaagaagaattccagctttttaccagggtaactgtgcattggggaaagggaaatgatcagacatttcagggactactgacactggccctgagctgacgttgattccagaggatccaaaacattattgtggtcctccagttaaagtgggggcttatggaggtcaggtaattaatggaattttagcttaggtctaacttacagcaagtccagtgggtcctggactcatcctgtggtcatttccccagtgccagaattaataattggcatagacatacttagcagctggcagaacccccacattggctccctgaatggtagggtgagggctactatggtggaaaggccaaatggaagctattagagctgtstctacctagaaaaatagtaaatcaaaaacaatattgcatccctggagggactgcagagattagtgccactatcaaggacttgaaagatgcaggagcagtgattctcaccacatccccattcatctctcccatttggcctgtgcagaagacagatggatcttggaaaatga

SEQ ID NO: 243840 - DNA, 521 bp, Homo sapiens
atctggtaaagatgaatccacaaatgtatacatatgcaaaaattggtactgaggaatttttaaaatatttaatatttagtatgttaatttttatcatttatgtatattatgtcattatatttttaaaagagctatattttccaaaacaaaaaatattcgccaggcttgatggctcacacctgtaatcctagcactttgggaggccgaggcagatggatcayaaggtcaggagttccagaccagcctggccaacatagtgaaaccccatctctattaaaaatgtaaaaattagccaggcatggtggcacatgcctgtagtcccagctacttgggagcctgaggtaggagaatcgcttgaacctgggaggcagaggttgtggtgagccaagactgcaccactgcactccagcctgggcaacagagcaagactccatctctctctctatatatatatatattagtaagagtgggactgtttaatatttttacaaatctctttaatatctggcttaaaacagctg

SEQ ID NO: 243841 - DNA, 521 bp, Homo sapiens
atctggtaaagatgaatccacaaatgtatacatatgcaaaaattggtactgaggaatttttaaaatatttaatatttagtatgttaatttttatcatttatgtatattatgtcattatatttttaaaagagctatattttccaaaacaaaaaatattcgccaggcttgatggctcacacctgtaatcctagcactttgggaggccgaggcagatggatcataaggtcaggagttccagaccagcctggccaacatagtgaaaccccatctctattaaaaatgyaaaaattagccaggcatggtggcacatgcctgtagtcccagctacttgggagcctgaggtaggagaatcgcttgaacctgggaggcagaggttgtggtgagccaagactgcaccactgcactccagcctgggcaacagagcaagactccatctctctctctatatatatatatattagtaagagtgggactgtttaatatttttacaaatctctttaatatctggcttaaaacagctg

SEQ ID NO: 243842 - DNA, 521 bp, Homo sapiens
atctggtaaagatgaatccacaaatgtatacatatgcaaaaattggtactgaggaatttttaaaatatttaatatttagtatgttaatttttatcatttatgtatattatgtcattatatttttaaaagagctatattttccaaaacaaaaaatattcgccaggcttgatggctcacacctgtaatcctagcactttgggaggccgaggcagatggatcataaggtcaggagttccagaccagcctggccaacatagtgaaaccccatctctattaaaaatgtaaaaattagccaggcatggtggcacatgcctgtagtcccagctacttgggagcctgaggtaggagaatcgcttgaacctgggaggcagaggttgtggtgagccaagactgcaccactgcactccagcctgggcaacagagcaagactccatctctctctmtatatatatatatattagtaagagtgggactgtttaatatttttacaaatctctttaatatctggcttaaaacagctg

SEQ ID NO: 243843 - DNA, 633 bp, Homo sapiens
tgtttttaaacattttcagttcctgtgtgttatacagttgataaattatagctggccatttggatacaggtttggtgcgccaaaaggaaagaatctaaggtacagatatggatatcaccagtgtctaccaaaccttgtgtttgtctctctacagagagtttgagcaaaaagaaagaaggaaataaagacagtcatatctggaaggtccattttaccaagaagaactcagcttttaagaatctaggttcctgggcttattaggaatcagggttaagggttcagtttctgccttggtaaggccaccacttagagaaaaatccccatgttatcttttaagttcctgcaattatcccattattagacaagcaagtagaagctacactgcaagtcatcaggtactctaaagcacaaaattccagaatgtcatgacgtctggacagtctttaatgagtcaggattgattttaagaaatgaygaatgactgtttatttggaaaaattacatattttatattgtcttcattttcttttatattgttattttaaataattttatcttagttatattttgcagaaattaatctatactgctattttatttaacaagaaaatctttttacagtgataccaattt

SEQ ID NO: 243844 - DNA, 580 bp, Homo sapiens
tttgcatgtttgttttatttgagtaatttaccagaaaaaaagaagaactagctgatgtcgtaaaagaagtctgattttacacttcacagctaatacacaatgaagattttaggcagaagctgaacaggtcttgcagttgcagatgctttggtggcaaggagcataaaaatcaaagttgtcgactacagagagaggtttaattagatagttcagttccatggaacaccttaaaattctcagggaccttacgggttgggtggaattatttcctatgaataagtggcaatgagatttgtgagttgctgtcatgctcagactgacgcttcaggacagatgccaataaccattgttctgccttccttctcagtcagctgtaatctagaacattttgtctttagtctcttaagagcttgagaattaatttgaaaaatatgaagcaacatgtagtgctttcctatattatggratctaagaaagcaagacatctgggcacagtggctgacatctataatcccagcactttgggaggccaagatggaaggatctcttgagcccaggagtttgagaccagcctgggaaa

SEQ ID NO: 243845 - DNA, 560 bp, Homo sapiens
cctgtgggtcctccattgtctcttgcatgccacagcaatgtagcttggtmcttgtggcccagacagcctcaggtgaaaacaaggttctctctccttatgatctctccttagggtccagagaggacacccctgggttgcacatagggactggtatcatgcatttttccccctcacaatttctttgcatcccaaaaataaagaaactaaatatttttcagctaaacaaacaaacaaacaaaaatcttcagttaattatacttcctgtggttccactgttgtgttggatgaatatatccacacaacgaacctacatgcaagtttaggattgaaatgtgaccctaatgtgtgtgaatgtgaatgtatgtgtgtgtgtatgcgagtgtacatcctgtgcgagatgcaaaatgtatatatatgaggtgagtaaaatcctatttaatcttatcactaaagactgaaaacacaagactgtaatccagaacagatgtcatctcgccaaagttactgcactgtaaacaatttctttcttgggagaatttttgacactgagaagagtttta

SEQ ID NO: 243846 - DNA, 560 bp, Homo sapiens
cctgtgggtcctccattgtctcttgcatgccacagcaatgtagcttggtacttgtggcccagacagcctcaggtgaaaacaaggttctctctccttatgatctctccttagggtccagagaggacacccctgggttgcacatagggactggtrtcatgcatttttccccctcacaatttctttgcatcccaaaaataaagaaactaaatatttttcagctaaacaaacaaacaaacaaaaatcttcagttaattatacttcctgtggttccactgttgtgttggatgaatatatccacacaacgaacctacatgcaagtttaggattgaaatgtgaccctaatgtgtgtgaatgtgaatgtatgtgtgtgtgtatgcgagtgtacatcctgtgcgagatgcaaaatgtatatatatgaggtgagtaaaatcctatttaatcttatcactaaagactgaaaacacaagactgtaatccagaacagatgtcatctcgccaaagttactgcactgtaaacaatttctttcttgggagaatttttgacactgagaagagtttta

SEQ ID NO: 243847 - DNA, 594 bp, Homo sapiens
gctattatcaaaaagataagctacaaatgttggtgagggtgtggagaaaatggaatcctagtatactgttagtgggcatatagatttgtacagcattatggaaaacagtatgtaaattcctaaataaattaaaaataatgcttttgaagagttacaaatatccagacaacaaactagtttttcttaaayatgtacagaatttttaggagtttcatggttctaaaatgagcttaagaaatttagatcttggctatctgttaacctagcactgctgtaaagtatcctgaaaaactcctcaacaaatattcctgtaacaaaaaataggagacaaaaatttgaatagactcttgttggacaatcttctttatttaactgttatggagattgctcactaagaaaaactataaagaacattgtcagcttaaatggagtgcttttatctgttactatttgccctgaaatagtaactatctgtgaatattagtgtgggcagactggaaatcttaaaccagcactagctttttttaaatagggaaaatataatgtacattttctctaatcagcattcattagcacaatcatttcaggaataaa

SEQ ID NO: 243848 - DNA, 636 bp, Homo sapiens
ctacttccagtctttacagactgtttttggcagataaaagtcttctcaagttgagctcccaggctgacaggattgcctccaagattgtagtcaagagtggttggagccaggtcatgtgagttttgctgagtttacaataaggtctgtggttagtaggtctgttaccaggggctcaggcagatgtgaatcctgcctggtccctagctggactgtattgcctccaggaccttggtcagtagggctggtgctggaatgagyagccacttcagagtccacagatagtaggcttgttaccaggtacacaaatggtgtggtttcctccaggtttcttggagtactcttactgggtcactgggtgcatccctgggcagtcagtactggccctggactgcagctgagagagttgggaccaagtcacagggttgcttcaggtctagtcttgcctctgtagatacagacaggtgtatctctctctaggaccttgggtgggcaagactgctctgagactgcagctgagggaggctagagccaagttacaaagctatttcaagatccttagtgaaactgatataaggaggcctgcatggacatttttgtttccctctgtgtctccaggcaagcagaactgtctcagag

SEQ ID NO: 243849 - DNA, 384 bp, Homo sapiens
tatttgggggaataatcgaggaaaacttccccagccttgctagagacctagacatccaaacacaagaagcacagagaacacctgggaaattcaccacaaaaagatttgcacctggctyattgtcattaggctatccaaagttaagacaaaggaaagaatcttaagagctgtaagacacaagcaccaggtaacctataaaggaaaatctatcagattaacagcagatttctcagcagaaaacctacaagctagaagggactggtgccctatcttcagcttcctcaaacaaaacaattatcaagaattttgtattcagagaaactaagcatcatatatgaaggaaagagacaatttttttcagacaaacaaatgctgaaagaattc

SEQ ID NO: 243850 - DNA, 658 bp, Homo sapiens
cccatgttcatggattggaagaattaatattgttaaaatgtctattctgtccaaataatttacagattcagtgcaacccctaccataatttcaatgtcatttttcatagaaataaaaawatatatataaaatgtatatgaaatcacaaagtaccctgaatagctaaaggaatcttaggtaacaggaacaaagtcagaggcatcacactgcctgacttcaaaatctattacaaagttataataaccaaacaatatagcactggcataaaaatagacattacattgaccaatggaacaggctagggagctgaaaaataaacccacacatgtagtcaattgatttaaacaaaagtgccaaaaacatacaatggagaaaagacagtctgttcagtgctgtggggaaaaactggatatccacatgcagaaaaataaaactttatctttatctcacaccatctacaaaatcaactcaaaatgagttacagacttaaatgtaagacctgaaactaaaggcacttaaggaaaatacaggggaaatcctccataacgttggtctaggcaaagatttcttggacacaactccaaaagcatatacaatcaaagcaaaaataaataaatggaattgcattaaactagaaagctgctgcatagccaagaca

SEQ ID NO: 243851 - DNA, 658 bp, Homo sapiens
cccatgttcatggattggaagaattaatattgttaaaatgtctattctgtccaaataatttacagattcagtgcaacccctaccataatttcaatgtcatttttcatagaaataaaaaaatatatataaaatgtatatgaaatcacaaagtaccctgaatagctaaagsaatcttaggtaacaggaacaaagtcagaggcatcacactgcctgacttcaaaatctattacaaagttataataaccaaacaatatagcactggcataaaaatagacattacattgaccaatggaacaggctagggagctgaaaaataaacccacacatgtagtcaattgatttaaacaaaagtgccaaaaacatacaatggagaaaagacagtctgttcagtgctgtggggaaaaactggatatccacatgcagaaaaataaaactttatctttatctcacaccatctacaaaatcaactcaaaatgagttacagacttaaatgtaagacctgaaactaaaggcacttaaggaaaatacaggggaaatcctccataacgttggtctaggcaaagatttcttggacacaactccaaaagcatatacaatcaaagcaaaaataaataaatggaattgcattaaactagaaagctgctgcatagccaagaca

SEQ ID NO: 243852 - DNA, 322 bp, Homo sapiens
aagcttttcatgctgaaggacaggtgggctttattcaaawgtagaatatgctagaagaagcatcggccttaagggagacagagtaagcaagaatgtgttccgagcagcttgccctgtgacgaaggagaaggatttgaggggagggaaagtggaaaaagcggatttccctatgacctctgtctgcaggaaggctgatgtcctgagagccttctctatgtagaacctgggcctgggattgggggtgtggagtgtggatctaccaaaggtgaagattccttgcttcagggagctcccagcttggttggggagacccaggccctac

SEQ ID NO: 243853 - DNA, 635 bp, Homo sapiens
aaagcttttctggatgacatcctttggccagttagcagactcctcaatggctgctcaactcaggaatcttataaccttccctgatgaactcgcactgccccctccctagtctctaaatcgcctctgtcttttctcctgcattattttgttttcatcctagcactcaccccatgcagccacctgccccttacctttgcatatttgctgttccctctgtgtggagcactgtcagtcagtcacttaaatacgtaccgagtgcctaaaggggctggtatcaccatgtcaaccctggggatacaacgatgaaaaagaccagatcttgctctcatggggcatatgttctaaagacatagacaaagagtcgatctgtaaatgattgcaaattatattaaatgctatgaaggaaacaatgagyggcttagaggctgcagagagggacagctttagccatggtgaccagactgtgacaggctgagacttgaagcatgagaggcagctgcccatctcaggagtgagggaaagggctctgggcagaggaaatggtgagtgtacaagccatgaacctggcatgtcttcagaacagacagaccagggagaccaggcaggtgggcacaagatgggcaggcaggcagtac

SEQ ID NO: 243854 - DNA, 350 bp, Homo sapiens
ctaaagagcagagagtgggggacaattcwcttccatcaaatttcctgccctcaacgagcctgcccatgttcctgctctgaatgaggctcttgggtatcctgcaaactatgtccagtttccaggagtcacactttagaaagcctcattggagagcctggccccaggggagatttgcccggcctgttgggaggatgctgccccatctaagaagggtccagcattataaatctaaggaaagaggctgcatctacaacagttgttctacgtacaaatatctgcccaaaaaaacagttccagcaagtggaacaattcctctcctggaagaaggacacctggcattatctatcctg

SEQ ID NO: 243855 - DNA, 416 bp, Homo sapiens
  misc_feature (1)...(416): n = A,T,C or G
tgggcacaccccctctgcagaaacggacycagcagagcaggaccagtgtggactctctaaaggccagcccatcctccttctttcaggctgagggcctccctggccaggcccatgacccaatgtctggcctcatttcctgctgtatgatgccagcctttgttagtcacttgcaatccccaatagcaacctctgtcttatatccccatggacccattttttattatatgcctgactgggatcccccacttgctttgttcatccactgaaccccccaccaacacctaaactncagtctggctcttactctgttgcacaatgatgattactatagtctgccttccagaccagatggatgttgtcagtccaagcacaatgcccaacatagggttgatatttaatcaacgtattgcctgaat

SEQ ID NO: 243856 - DNA, 416 bp, Homo sapiens
  misc_feature (1)...(416): n = A,T,C or G
tgggcacaccccctctgcagaaacggactcagcagagcaggaccagtgtggactctctaaaggccagcccaycctccttctttcaggctgagggcctccctggccaggcccatgacccaatgtctggcctcatttcctgctgtatgatgccagcctttgttagtcacttgcaatccccaatagcaacctctgtcttatatccccatggacccattttttattatatgcctgactgggatcccccacttgctttgttcatccactgaaccccccaccaacacctaaactncagtctggctcttactctgttgcacaatgatgattactatagtctgccttccagaccagatggatgttgtcagtccaagcacaatgcccaacatagggttgatatttaatcaacgtattgcctgaat

SEQ ID NO: 243857 - DNA, 483 bp, Homo sapiens
ctgccagaaataactgagactgtcaccctgatttggcctctgaaagcatgttcattcaagcaaaggtggtgaaactatgcagccagaaagcacttgcctggggctgtggttctcaaacctgagacaggagaacccccctgcttggctacagccaggggctctgccacagcaggtgtaggctgggctggatcatctgcatgtgtaacaagttcctggatgatgccgtgttgctggtctggtgtgtggctgtgcagggcatggtgactctgctggacagaacatacatcctttccctgtgtgagtgtccaaactcctgacatcagctggtgggtggctcaggggaaacagttctccctgctgcctcccagcagagcccctccrtacccaactcaagccaaccagaaatatagttttttaaaaaaacttaaaggtttgcaaagaggagaattcagctgtgaagactagtaaaacagaccaaaagct

SEQ ID NO: 243858 - DNA, 573 bp, Homo sapiens
tttgcaacaagcgaggctgaggccacaggaggctgaggctgaaagccccggccttcagggctactttagaggagtgaagagcaaatgtgtctgttggtcccaaagagcagaggtccctgggggccctgccagtgatgtgggcagagaacaggtggcgtggagctcctgtctctgcctctgtcttagttggctcaaagtcccaaagaactggagaccctggtcaggaaaactgcattatcagggtacccacttccccttctcctgcacctccccagcctaagactctacagaagaaaggacagatgatcagaaccctggaaaaatggcagataggaggcaggactaacttgcagytcccactcggttggacagagcagtgtatggagactcacatcgtgaacttttgctccaagaactaccatagcaacatacccggaaagcggagagaatccacagaccctctgaaggaagtggattgctgctgcaggtgcccagagacagccaaaaaaccctgaagacaaaggacataatctcttcagagctctagggccctgcccaccacctgatcctccc

SEQ ID NO: 243859 - DNA, 550 bp, Homo sapiens
acacatgaatattgggggatatattcagaccatatcaggatgtgattaggtcatgaatacagagcccttgtgaatgggattagggtccttacaagaagaggccagagaactcccttgttctttccaccatatgaggcacagggagaggagagacatctgtgaaccaggaagcaggacttcactggacaccaaatcttccagcactttgattttggacttcccagcctctagaactatgagaaataaatttcttttgttcataagccacctagtctatggtattctcttatagaagcccaaatagactaagacactcagcttcttaaatctgtgggattttgtcttccaccaatgttaggaagttttttttcttatttctttgaktactctttcagccccattctctttgtactcttctcctggactctgataataaaaatgttgaaccatttgttattatcctacaggtccctcagtctctgatttttgtcttatttgttattttaatttttttttattattcagaccaggtaagttttattgatctgtt

SEQ ID NO: 243860 - DNA, 550 bp, Homo sapiens
acacatgaatattgggggatatattcagaccatatcaggatgtgattaggtcatgaatacagagcccttgtgaatgggattagggtccttacaagaagaggccagagaactcccttgttctttccaccatatgaggcacagggagaggagagacatctgtgaaccaggaagcaggacttcactggacaccaaatcttccagcactttgattttggacttcccagcctctagaactatgagaaataaatttcttttgttcataagccacctagtctatggtattctcttatagaagcccaaatagactaagacactcagcttcttaaatctgtgggattttgtcttccaccaatgttaggaagttttttttcttatttctttgagtactctttcagccccattctctttgtactcttctcctggactctgataataaaaatgttgaaccatttgttattatcctacaggtccctcagtctctgatttttgtcttatttgttattytaatttttttttattattcagaccaggtaagttttattgatctgtt

SEQ ID NO: 243861 - DNA, 532 bp, Homo sapiens
agaccacgcagctactaattaaagacaggaccagggcttgcactcggcatggtctggtctgccccagcacccagaaaaccatggaactatagctcagcactgcagagggctgctgactgggctggggtgaacacacactgacaaacagcctgggcacctcaactttaaaggaagggattattaatcacagactccaagggaggtgactgagagtacaaagcgctaccatatgacaaaaccagataatagcagtggccgggcattctgcatggcaggtaggtaggggttcagggatccagtgacctaaacgcacaaatcagtgttyaaacgatgcccctccaggcagtggggagagatgtgtttggaggagacaggagtatttccaagctctgtgtttttgatgctgcatttctcttccctctgttctggtcctcgggggctctctagccatgcacacctgcctgtcacctccttccaggggcaaaaccatcagcatgttcttccggctggctccccaccctggccaggctcc

SEQ ID NO: 243862 - DNA, 422 bp, Homo sapiens
ctccctgtgatcttctgcttcagggtttccccgccagctctctgcactcatggttaaatgggcccttcccttccagaccaaatcacccaagccccgaggctccyggcccctcctctttctgttgagaattccctggacagaacagcgggatgaggatcctgccccactcatcgctccttgctcacaggcacacaagtatctgcatctgtgcaagtcaccacggactcagcccagccaagaaaggtggaacccagtgaacaaaatcaaccagcaaacatgggtggtggccaaaggcagtgagagatggatacagtttagaggcagctattggatatttccctggagaatgaggcataaacgcacttggctttcagagtcccagtttttagggccttcccaccctctctgattctgcaaagact

SEQ ID NO: 243863 - DNA, 422 bp, Homo sapiens
ctccctgtgatcttctgcttcagggtttccccgccagctctctgcactcatggttaaatgggcccttcccttccagaccaaatcacccaagccccgaggctcctggcccctcctctttctgttgagaattccctggacagarcagcgggatgaggatcctgccccactcatcgctccttgctcacaggcacacaagtatctgcatctgtgcaagtcaccacggactcagcccagccaagaaaggtggaacccagtgaacaaaatcaaccagcaaacatgggtggtggccaaaggcagtgagagatggatacagtttagaggcagctattggatatttccctggagaatgaggcataaacgcacttggctttcagagtcccagtttttagggccttcccaccctctctgattctgcaaagact

SEQ ID NO: 243864 - DNA, 384 bp, Homo sapiens
gaggggtgcaagtggagaagtatttccttgagacatggggagagaggccaggggtgaagcccatcaggacaagaagtcatacttagaggttgagccayggggcagctatgatagctcacacaggtagagtggccacgttcttgtggtaaactgaggggggcaagaggagccttctggtgaagggccaggctccaagaaggagattggagccacggaggcagcagactctgacgtcagttcagtggagaggcagccagactgggcactgacactggacctgggcttgggatgcccaagcctgttgaggccgtcttcccacatcacttgggcagcatccaaatgtgctggtggacgtggtttctcggcacaggcttattttctgca

SEQ ID NO: 243865 - DNA, 619 bp, Homo sapiens
aatgatatataaataaaatgtggtataaacatacaatagaatattatttacctttaaaaaggagtgaaattctgacacatgctgcaacatgcatgaaccttgaagacattatgctaagttaaatcagtcatttatgaaaggatgcatactgcatgattccacttayatgaggtacctaatcaaattcacagatgcaggaaggagaatggtggttgccagggtctgaggggagggagagagtgaaagttattatttaatggagacagagtttctgctgggatgatgaaagttctggaaatgaatggtggtgatggttacataacagtgtgaatgtacttaacacgaccaaactgcacacctaaaaacagttaaagagtaaacattatgggtattgcaccacaataaaaaaaggaaaggtagaatatgcaatgaatcatgagttgaaaaatggatggcatttttcactttttagccagatgtcttggtgttctatagacacagccaaaatgaaatgatgaaggattggggaattgaagccaggactctggagtctcaagtgacgaccataattactgcatttcatttcctgtatgtaaggcaaactgagttcaggaccaaa

SEQ ID NO: 243866 - DNA, 498 bp, Homo sapiens
acaggctgtgatgtcagacagacctgcatctgaatcctggctctgatactccgtagctctcttaactcaggggagttttagactcygtaggcctcctatccttgcttgaaaatggggatcacagcagtaggggtcctgtgatgcttcagtgagctcatgctaggaaagcatccagcacattgcctgacacacaggctcagaacaaacctaattaccatggttggtcctcagggcccaacagccttccttatagcctgctcctctcctgagaacagaccaagaggacctgtgagtccctgtagcctcagctcctcccaccattctcttgaccccaggtaatcataaaattatgaagtaattgagggaaacatgcatggttctcccttgttctttatggcttgggtattgagcaatcaagagatattggaatgtcatctagaactactatttctagagaaaacctccaggatgggcatggaaccaaaaatgttcctagag

SEQ ID NO: 243867 - DNA, 498 bp, Homo sapiens
acaggctgtgatgtcagacagacctgcatctgaatcctggctctgatactccgtagctctcttaactcaggggagttttagactccgtaggcctcctatccttgcttgaaaatggggatcacagcagtaggggtcctgtgatgcttcagtgagctcatgctaggaaagcatccagcacattgcctgacacacaggctcagaacaaacctaattaccatggttggtcctcagkgcccaacagccttccttatagcctgctcctctcctgagaacagaccaagaggacctgtgagtccctgtagcctcagctcctcccaccattctcttgaccccaggtaatcataaaattatgaagtaattgagggaaacatgcatggttctcccttgttctttatggcttgggtattgagcaatcaagagatattggaatgtcatctagaactactatttctagagaaaacctccaggatgggcatggaaccaaaaatgttcctagag

SEQ ID NO: 243868 - DNA, 334 bp, Homo sapiens
cttttcctttgttctccagacattccagaggccaccctggtctgtgtgtatgtcctgaattgcaatcccacttcttgtttattattcccaaataaaaccttcctatttagagatttacttctttatattttttatkttgacaattagttcatttaaaaattttagctgaatcttcttaccagtttatatggcacctaatggtgtctgcctaggtaaacaaatactcaaatcctgcttcttttggcatgaagctgtgtctccctggattttgggttagttggttgacctgtgacctcagtactctgaggggttcaagaaaagtcgtgattgtgca

SEQ ID NO: 243869 - DNA, 640 bp, Homo sapiens
gttatacaacatcgtatctaatttcaccatgtgaagcttaaaatcaacattttggtgtaaaaasgacattcttgcttcttaattactggtgatgttttttaggaggcagaacacagactctagttcaaaagacagaaacattaaaaaccaaggaagctttcaagtagaaacaccaaagctaggtcttacagtgtatatcttatgcaataaatatgagtgtataagcctaacccaaaggagaagggacatcagtcaggaccaaaacaaaataacctaattccaggttacttgtattctacaaaatatgaaattaaaataaaggaacttagaaagactgaaagcagaatgaagagcaaaaatattccaattcaatgtaaacaaatagaaagctgagtatcaatattatacacagttacattcatgaccaaaaaatattgaaattgtgttcaatataaaaaatattgtatttgacataaatgttcaacataaaatataaaatattttataatatttattgcttgattgatttaaagatatagctgtcaagaacctttatttactatatagcatcatagcattaataaatgtagcaaaaactggaacaaataaaaggataaatttgacaaagcacaaaatcatt

SEQ ID NO: 243870 - DNA, 543 bp, Homo sapiens
cgtgtgagctattcctaaatgctgtgtgacaaagtcttgttctcagatgatttttaatactaactctgtgccctacaaagagaaggtcatgcaggaaaactccaggctggcatagctggccatttggtcaggttctcttcctctaacaccacatgatgatgaggaagtgctgcctccaaattctatttctatgatgcaacctccctacccaggagaccaaccatttctccaaagtgagccttcactccacatctatccatctcctaccacttmcccacattatgctctcatctcatagttgcctacaccaccttacctggaatcctttcttcactatggaccttacttgctccatctgtaaaatggggaagcattttcataggttttctaaaaactcaaagtgactgcttgatatggtttggctatgtcaccacccaaatctcatcttgaattgtagctcccataatgcccacatgttatgggagggacctggtggatgataattgaatcatggtggtggtttcccccatactgttcttgctg

SEQ ID NO: 243871 - DNA, 560 bp, Homo sapiens
ctctttctctttgttcaattttacttgttccttcatctgaatctaaatgaaaacttaaactccacacaccaactgtcaaacccttccagactcaatagcaaacacttctgggcccatttcagctactattcttttaacgaagctttctccaacttctctgattaaacaagatagtgaatttcatgaaacactaaatttgtttagaatcagagactgtgtggtttagtagatgtctgatacattttaggtgtgtctgaactacaatatgtcctgtactacacaaattaccctaaatggaatgctttcttttggaaacttgtatataggacatcttatatatattcaagaggaaaactgagtccagaaactgcattcaagttgtgctgcctctgactacgtaatcttgacaagctatataatctttctgacctttgtatattcatctatggaaaataagaggaaagattttaaaaatacctacttcactggattaaagtatgacgtcctatagaaatataagtttttatctytttattcttcatctcttatgagaaactttt

SEQ ID NO: 243872 - DNA, 536 bp, Homo sapiens
gcaactactgacctttctgtcactaaagatcagtttgaattttcttttttttgtaaatataaatatgtaatatataagtaatatgtaatatgtaatttttatgtaataatatgtaaatatttttatgtaaatagtatttttgcctgaatactttaactaagcacaattattttgagattcatttatgttgtgagtatcaatcatttatttatttgtattgctgacttgtatttcattgtatggatataaaacatttattcamtcacatgttgatacacatttgggttgtttccagtttttggttatagatatatgctgtcatttcttttgggtaaatatctaaaagtggaatgtcagaataataatgcagatgtatgcttaatatgtaagaaactaccaaaatctttccaaagtgtttgtatcattttatagccaaactagcagtatgtgagagttccagttcctccataatctagtgtggtcagtctttttaattgtagcctgatgtgtaatatcacgttgtggatttaatttgc

SEQ ID NO: 243873 - DNA, 512 bp, Homo sapiens
tagctgtgggcttgtcatgcatggcctttattacattgaggtgcattacttaataagtctactttcttgagcatctttacatgtatcatcagaagatgttgaacctgtcagaattttttcttgcatctattgagrtgacaatattatttgtatccttcattctgttaatgtgctgaatcacatgtattgatttgcatatattgaacaattcttgcaacccaagaataaatctcacttaccccttgggtataatctttttaatgtgttgttcaatttgggttactagtattttgctgaggatttttgtatctgagttcattggggatgctggcctatgattatccttcatcgtggtgtctttatctggctttggtttaaaagtgatgttggcttcataagatgaatttgcatgttttcccttctctttcattttacagaagagtttgagaaggatggcttaatttttttaggactacctatggaagcacagtcaggtgtgcctcctgctgggc

SEQ ID NO: 243874 - DNA, 540 bp, Homo sapiens
taaacaaatctaagacatctatatgtggtcctgcctacattcctttcatggtagacctcaggccagattttttcaacccctcagagggagctcttaccactaatatgtccaggcttatctctgaaatcctcctgggacagtaaagtgatactgttattccaccagccttgcctgctctaccatgcagcagtcagccactaaaagcctgagtgctcaggcacaaaggcaggccaccttccatggggtcatttggtagagaccaccttccatagggtcatggcagccccctctytggttcatggggtaaagatatgactgactggatctcacccacccatcctctaatctttgccatgaaaacaaaccacaccttgtgtacttctgacaaatctgaatttgtaacagagttaaagccttatcccatcgtgcagtgctcagcatataggaggcatctgcaaacatcacaggctgaaaactcttacagcctagagaaatggacatttgtgttttctttaccataaacctagggttttttctgtc

SEQ ID NO: 243875 - DNA, 336 bp, Homo sapiens
gctcaggcacaaaggcaggccaccttccatggggtcatttggtagagaccaccttccatagggtcatggcagccccctctctggttcatggggtaaagatatgactgactggatctcacccacccatcctctaatctttgccatgaaaacaaaccacaccttgtgtacttctgacaaatctgaatttgwaacagagttaaagccttatcccatcgtgcagtgctcagcatataggaggcatctgcaaacatcacaggctgaaaactcttacagcctagagaaatggacatttgtgttttctttaccataaacctagggttttttctgtcatatctt

SEQ ID NO: 243876 - DNA, 555 bp, Homo sapiens
aatggacattgtgcctgtggacaataaaagatacaggtaacaataactctgggatgtggaaatgtgggtatcaccagcattccaagacaattcttcaaactccttagaggaaatagtttagcaatgcatgctgtacagagaacaaggaatggagactatgtcaatggcctgtggcagagcaccaggtggaaaaagtgttaactttgacctgggattcccccctgtgtctctggatagaatgggattgtatagtgtctcctaaggtagcaaaaatcaagtggatcttaagtctaaaattaatttaattaacattggaagtgattaacatattgaataatttggtttgtgaaatgctaaataaattggggtgatttattttggaaagaggaaggagaggtggaacaataargcatattaaaatgtatatttgatggatcgccccatagatgatggagaggaagaacacgagaactgggtaatatttctagaagatatatctacttatggagtattattattcattgatatggcttgtgagtgagattgttaagttag

SEQ ID NO: 243877 - DNA, 594 bp, Homo sapiens
atagtaacaattatttcacagagtatctgtggtccaagttgtccatttttatctccaagttgatgacgtcaatgcactatttcccattttactgatggtaagactgaacaccatgaggtattagctttcagaatttgtaaatccagctaatgacagtgtacagagaatggtttcactctcttctgctaggcatagcttgctagttaacagaaattgtatctttgtccacctctggctccctgtcactcctgaagactcatgtagtgagcttagagccgtgaactgaccacttgtctttaattcaaccagcatgacatctcaagtgtctatctgactttgaatttctatattttcatttggtttccctaaagccattgggtatatttgtccagccaatctctttctactcttycctggcactcttaccagcccccaaaaattttgcaaacccttttgttatccctggcatgggtggcttatgccatttagcagatctatggaagtaatcagtgctggacactccagcaggcactactgcatctacaattcaaggtagctggccctgtgctggattctggcagatgatccagctgg

SEQ ID NO: 243878 - DNA, 587 bp, Homo sapiens
gtttaacctcatatatttattgttagccattcaaatcataagtatacaagcaatagtaacaattatttcacagagtatctgtggtccaagttgtccatttttatctccaagttgatgacgtcaatgcactatttcccattttactgatggtaagactgaacaccatgaggtattagctttcagaatttgtaaatccagctaatgacagtgtacagagaatggtttcactctcttctgctaggcatagcttgctagttaacagaaattgtatctttgtccacctctggctccctgtcactcctgaagactcatgtagtgagcttagagccgtgaactgaccacttgtctttaattcaaccagcatgacatctcaagtgtctatctgactttgaatttctatattttcatttggtttccctaaagccattgggtatatttgtccagccaatctctttctactcttccctggcactcttaccagcccccmaaaattttgcaaacccttttgttatccctggcatgggtggcttatgccatttagcagatctatggaagtaatcagtgctggacactccagcaggcactac

SEQ ID NO: 243879 - DNA, 546 bp, Homo sapiens
agatctactacagggcctggcacccagtaygtacccaatgaatagtgaatgggatcacttgctggcactgtggctcaggtgggcagagccactctcaaacttcttcttggagcacaaccacctaatatgtatgtagacattgataaggagtgatcattgagggacgccattgggcaggcacagacacaggaagcttgcatgggttacttagatgtgcagcatagcaggcttcatggtacttatactaaaaatttaccagtatgaagggttattattgacattttgaaaacaatggtttcaaataaactgaactttcaaaacgcttcagtgaccctcacttttatcggaagagaagaaagaacttgaattattggatacatatggtgatgggatggggttagagaaaaagccaggactctattaaatagtttaattggaatatatttttgaaatatccattgaagttgatccagattctcattattaaaaaatatgtggcttggtttcttgacgttaacaaaggatgtaaaaccaacaacacccatc

SEQ ID NO: 243880 - DNA, 631 bp, Homo sapiens
gaacatgttattcttaactccattcccgactccttgagtcatcctcaccatgtcacttaattccactcattccatggtcaacatcttggcttcaacaaggctctatttttccccaggcctacctaccttgaagggtcagaatgacccttgaagagacagtgtccttcaagtgtgtcagcaattcagaaactgacagcttccaaaatagctggtgtgttgttgagtgtctgttgccttctgaaagagtggcagtgtygccgagacagcaggatttccttgccaaagttgctcctaccctcctccccacaagactctgccctgcctctccctgtccctgcctaggaagactttgagcccaggggccatggcatttaagcactgtcagagttcccacttcaattcccacagtggtgccagttcagcatctgtcatgatgacccagcctgaactgtatttagaagcttggacatggcaccatgttccagcacatctcacagtgacaggagatttcctgagcacctgggcttgcgattcgagcactcctcttcccagggaatgggggtcaaaatgactttcctctgatgacctgtttccttcttaggatggtgtccttctgttggaggcctcttct

SEQ ID NO: 243881 - DNA, 569 bp, Homo sapiens
ttgaaattcagaagcatgaggcccaatccaagctcatagggaagagtaccagattgattagtgatgtgtttcatggacacaggagtcaggaatagcagcatatgcattacatatttattatcatattatttctaaggcttctactggaatgctgctgtgcatgaattgtcacaatatccctcttacatgctttcaggaaataaaagctattgtgtcattgttcatattttatgttattctttccaagtggcccagattttccagaggcatctgagaggccactaatctctcccctctagaaataaggtcatcatgttagcaaacttcctctgctctgacacagttgtggttttaatggagaactaatgtcttcatcagtatctgtgctatttcacacttcatttcctccccaactcttggatgaaaaccatccagtcctggtgatttactttgtgggagtttctytcaagtttgtttccttctccaaggatgtcacacaagcattttcagggctccagctggggagcacccagccttgaaacatcagcgtgtgatcaagtcactcaaga

SEQ ID NO: 243882 - DNA, 540 bp, Homo sapiens
ctatatgactcagctccagctgctcctgagagataagatcttcccctcttccctttgcttagctccatcctccaccccarttgaagtgcaccctcctctgtgatcccatagcaaatacttctattagtttcctgtttatttcacagctctgtttattgaaagcttgccaggcagtaggcttagagctaggtgcatatacatgcgatattcatccagtcccctcagcattctaagaggtggctcttgatatttccatctgacagtcctagatctacatgtctttttgctttttgttcccctctctcccaactacatctctgtcttcaacactgagcacagtgccggagtatacattagcaatcatgtgcttgtatgaagagaatctgcttgcaccactaatgtcctcaggtgctgggagacagtttggagcgggtccacgctgacctggggcagtgaaaatgaatctgcgaccctgagcattcaggcctgatggcagtttgttccctgaccttgcagaaaacagcttcttgttcacctgcc

SEQ ID NO: 243883 - DNA, 540 bp, Homo sapiens
ctatatgactcagctccagctgctcctgagagataagatcttcccctcttccctttgcttagctccatcctccaccccagttgaagtgcacmctcctctgtgatcccatagcaaatacttctattagtttcctgtttatttcacagctctgtttattgaaagcttgccaggcagtaggcttagagctaggtgcatatacatgcgatattcatccagtcccctcagcattctaagaggtggctcttgatatttccatctgacagtcctagatctacatgtctttttgctttttgttcccctctctcccaactacatctctgtcttcaacactgagcacagtgccggagtatacattagcaatcatgtgcttgtatgaagagaatctgcttgcaccactaatgtcctcaggtgctgggagacagtttggagcgggtccacgctgacctggggcagtgaaaatgaatctgcgaccctgagcattcaggcctgatggcagtttgttccctgaccttgcagaaaacagcttcttgttcacctgcc

SEQ ID NO: 243884 - DNA, 540 bp, Homo sapiens
ctatatgactcagctccagctgctcctgagagataagatcttcccctcttccctttgcttagctccatcctccaccccagttgaagtgcaccctcctctgtgatcccatagcaaatacttctattagtttcctgtttatttcacagctctgtttattgaaagcttgccaggcagtaggcttagagctaggtgcatatacatgcgatattcatccagtcccctcagcattctaagaggtggctcttgatatttccatctgacagtcctrgatctacatgtctttttgctttttgttcccctctctcccaactacatctctgtcttcaacactgagcacagtgccggagtatacattagcaatcatgtgcttgtatgaagagaatctgcttgcaccactaatgtcctcaggtgctgggagacagtttggagcgggtccacgctgacctggggcagtgaaaatgaatctgcgaccctgagcattcaggcctgatggcagtttgttccctgaccttgcagaaaacagcttcttgttcacctgcc

SEQ ID NO: 243885 - DNA, 411 bp, Homo sapiens
tccctgtattagtctgttctcacattgctataaagaactgagactggataatttataagaaaagagctttaattgactcacagttttgcgtggctggggaggactcaggaaacttaaaatcatggcagaagtcacctcttcacagagcagcaggagagaaaagtgtgtgagagttcaggaaaaactaccatttataaaactatcagatcttgtgagaattcactcactatcacgagaacaacatggggaaaccacttccaccatccaattgctgctctccctttacrtgtggggattacaattcaagatgagatttgggtggagacacaaagcctaaccatattattccaccccggcccctcccaaatcttctttctttcacatttcaaaaccaatcatgccttcccaaca

SEQ ID NO: 243886 - DNA, 429 bp, Homo sapiens
ccttataacagagtgaaggggcaagaattgctctccctgtcttcacgaggtgattatattaaaaccttattgccaacatgacctcctaattattccagagtgccaagatctggccttccacagtgcctttccacacaattaccattgagcctgatgaccctgctcttttcctattttcaatttcacttttaaaattaccaggttctctaaatccgatgaaggactacctccaccataagaaaacagcatataaggcactgcattttctatttgtaaatattaaaataaaagggggacttcagcccctgttgatacaaacgtcagccttgggctacaacccctgattcctmtaagatttttgtgtccccatcctccagggaatggatacaactaattgctccaagcaaggttggaatcgccatgctggca

SEQ ID NO: 243887 - DNA, 500 bp, Homo sapiens
agatcttgtcaataccttcaaagagaaggttggcactttatggtgagagttctcacccctccctagcttctctcctgaccaacccatcaccttcactccattccctgtcgctccctcaaagctgtgaacatctaaagcactagctgtataattttatacaattttatacaatttccattgagtgccttctttagtgatctctgttatcttttttccatgcctcctttgtattttgctgttggtattatgctgccattcctagctttcagaagcattttttaaaatccaatcctaaatttaccttccctggctccaattcatatttgcaatgtttcgtctttctttgggctgtacagacaagctccaaaaatatatkgtgccttcatgactttcatttttctcccttaaaatgggatctagcctctaccctctgatgctgaaattaatatttcataatcaagtccttgagttacatcttctcttactatattttcctgcct

SEQ ID NO: 243888 - DNA, 448 bp, Homo sapiens
gctgtagctgtgacagtgctctatcctcgcaaccagaacatacttagaagattaacacgccatccttcaagaagcatcttctgtaagatagggaccttgtttggttcaatgaacattggtacagaccccagcacagaagagaagcaggtttgcaatacttttcctaaaacaaaacaaaacaraacaaaatgaatcaatgaatgttaaatagcaatccacggatctattatctttatgtgtctttcattttgaactattcaaagctcttctataagcctcgtttataatttagctgagcgctttctctacctattttctgaccgtatctgtggatttgtgggcagacactctattttggaagatatttacactgtcaatatactttccatttgacactgcctaccttcttccttgcatccttatggttcagctggaggagggaaccaag

SEQ ID NO: 243889 - DNA, 396 bp, Homo sapiens
gtgaacatggaatatttttccatttttggtgtcctcttaaattcttttcaaattgttttatagttttcattaaggagatctttcacttcctgggttaagttaaatcctaattatttaattttacttatggctattgtaaatgggattacttttattatttctttttcaggttgttcactgttgacatatttaagtgctaccgacttttgtatgttgattttgtatcctgcagttttactgaatttktttatcagttctaatagttctattgtaagtctttatgtttctgcaaatataagatgatatcatgtgcaaacaaggataatttgatttcttacattctgatttggatgtcctttattcccctatattatctgattgctctagctaggattt

SEQ ID NO: 243890 - DNA, 367 bp, Homo sapiens
agtatactgctcttttttggtttccattggcatggaatatctttttctatcccttaattttcagtctgtgtgtgtgtctttatacgttaagtgtatttcttgtaggcaacagctcattgggtcttgtttttttaatccattcagccactctctggcttttgattagtttagtctatttacatttaatattattgttgataagtaaggacttctsccattttgttattggttttctggttgttttgtggtttttctttccttcctgtcttccttcaatgaaggtgattttctgtggtgttatgatttagtttcttgatttttatattttgtgtatccattgtatgtgtttttggttttaggtgaccat

SEQ ID NO: 243891 - DNA, 550 bp, Homo sapiens
atttagttgttagctgcatttgatcacaacatcaaattctcataaatactcaagctccaaagtggtttcttctcttcaaccactttagaacatgtttcttcatgacacaagaacgtgatgtcacaccctgttgatgctgaagcaagaaactcctgttggtttcctatactgtgatgtgccaagttgtaacattttctagaattatgcaagaccaatgagttccatccctggttaattcatgcctcgtatatttaaagttrttcagagaatgagcatcacattctactttaggagactgatccttttctgtacctaacttcactgcaatatagtgttaagatgaacattgacttacagttaaactccccaagcctcattttcctaatctgtaaatcaataaagcagaactacatctctaaaaccacaatctctaaagttccttttatttctggcattcagtgattttttcaattcattttcatactcaatcagtagtcaaatattccctagcatgtgctatgtgccagacactgcactacgtagggaagtg

SEQ ID NO: 243892 - DNA, 550 bp, Homo sapiens
atttagttgttagctgcatttgatcacaacatcaaattctcataaatactcaagctccaaagtggtttcttctcttcaaccactttagaacatgtttcttcatgacacaagaacgtgatgtcacaccctgttgatgctgaagcaagaaactcctgttggtttcctatactgtgatgtgccaagttgtaacattttctagaattatgcaagaccaatgagttccatccctggttaattcatgcctcgtatatttaaagttattcagagaatgagcatcacattctactttaggagactgatccttttctgtacctaacttcactgcaatatagtgttaagatgaacattgacttacagttaaactccccaagcctcattttcctaatctgtaaatcaataargcagaactacatctctaaaaccacaatctctaaagttccttttatttctggcattcagtgattttttcaattcattttcatactcaatcagtagtcaaatattccctagcatgtgctatgtgccagacactgcactacgtagggaagtg

SEQ ID NO: 243893 - DNA, 556 bp, Homo sapiens
tttaaataataacactataattaaagcttagggtaggcttaggatctcattcaagttaacaaaagattacccttcacaccagwatttaaaacaaggctctaattaatgaatgtgctaattgttcttctttttttgcaatcgttcaaaaagatgctgcacagatattcacacaaaaaccacagctgataccctggtgaattgcagtgctcagaaagctgtcatttcactgtgctatcctgggcaactgtggggcactcctgtgatgtcaaatgtaggcctagagtagagtcctctaatgtgaatttacactctcaagtattggagagctgtagctatctctagaatagggaacccagccccctcggtttgcctgagacagtccagctccctcagtttgcctgagacagtccagcttactcctattgtcttgatttagttgttaagaataccttaaagagtgtcctaatttgggtgataacttacctggtcaccctacatcagatcattcgcggagtcttgaatcttatcagcagggaaggagataaggtggggaaga

SEQ ID NO: 243894 - DNA, 556 bp, Homo sapiens
tttaaataataacactataattaaagcttagggtaggcttaggatctcattcaagttaacaaaagattacccttcacaccagaatttaaaacaaggctctaattaatgaatgtgctaattgttcttctttttttgcaatcgttcaaaaagatgctgcacagatattcacacaaaaaccacagctgataccctggtgaattgcagtgctcagaaagctgtcatttcactgtgctatcctgggcaactgtggggcactcctgtgatgtcaaatgtaggcctagagtagagtcctctaatgtgaatttacactctcaagtattggagagctgtagctatctctagaatagggaacccagccccctcggtttgcctgagacagtccagctccctcagtttgcctgagacagtccagcttactcctattgtcttgatttagttgttaagaataccttaaagagtgtcctaatttgggtgataacttacctggtcaccctacatcagatcattcgcggagtcttgaatcttaycagcagggaaggagataaggtggggaaga

SEQ ID NO: 243895 - DNA, 614 bp, Homo sapiens
tggcaaacattgagagcttttaactagccgaagagttcactgaattaggactggacagttttggttccatttttcacttcagggttgttggctgtggcagtgctaacaacatatctgcaaagggcactagattacccagcctttccacacctaagaggtctcaccccatcaaagaagaatttgaggcccaagatgctagacgttgctctaaagagcaaatccaaaacaagctaaaattggaagaaactgaattcaatsaaaggagcagaactagcctgctttcaagtttttgatcatcatttcagggagtgagatttcttccattatcaaagaaagaaggggattgtacacaaagccaggaaccaatttgagctttaatgactaaacagagaggattgggttaaagccaacttatagaaccagtgaaagggatggaagttgaaacaatacaggcatagaacaaacaggctttaggccacatgtaaatctagacaaatacaaaacacatggtgtggtctcagggcacaggctttgctctttgcctctctctcttccacagtgcttcctctaaaggtggttgatcacatcttgatagtactgtaacaagagaaagg

SEQ ID NO: 243896 - DNA, 648 bp, Homo sapiens
gggggtacacaagtgccgttcaagatggcgtcacgccaggagaggtcaatggccagatagttacacagagaagtcaccatgaacttccgggaaagtaatgggacattttggttctgctgaaaggatggcaactgcaaacagaatgcctggacaactggataaatcagaacctgagcccggatccggggaagatctgatctgcccaccaaggcctgggtgatggcggccaccgctgcacctccgacgctttctccacagaccacaaccctggaggggtccaccccataggtttccagggccttcaggaagtgaatggaggcattcatgcagtcttggaaaagggcaggggaatggtggtcaggaagcttgcggtacctaaaacgaaaacagggagcaacactacrccagtgtggacagtgttgctagggagctgtttcaacagaatcctcaacccccttacaagactatatctgattaaatcctcagaataaccctatgaaataaggattttatccccattgtcttcctatgagcatgtgaagaacctgcctagagtcatacaggcaaggattcttaactccaaacctgtgctctgtcagcttcccgtaaactctatacgaggtgatgcaactttgttttcattgaagc

SEQ ID NO: 243897 - DNA, 499 bp, Homo sapiens
gaacataagtttatatatttacatatatgttcatagaatatatttgctttttaggcaaataagtgtttactgttttctcagttgtcttcagttcaatataatccttatgtcaaagcagcatattttgggggagcattttctgatcccctacaatagtcttcaagttttatctcatttaatttcctgagtccagtaggatattagtatccacctttggcggactaaatgacttgcccaaagccaacagctagttaggtgtaggaccaggatttgaacccaggctctctggctgcagaacatacaccatagagcatgggctcagtaggtgtgcattgaatggcatctaattctgctgctccacagtcatgcgctgggaacttggtgaggcccgtacagagcatttccctggcttggggaatacacatctttatatgtattgaaaaataccagaaatggccaattttkgtctctttttcaggttgtaccgaggagagagaat

SEQ ID NO: 243898 - DNA, 591 bp, Homo sapiens
tgttaacactgtttgtgattatttaaatattctctaagaagtttgagatttttgctctagctcttctagtttctttctaggctcttaatagaacatcccttaatgatctattcacagcaatgtcggatttttttagcatgtaccacatactcttctagcttctaccccttatccagtttcacagccatttccacatttttaggtatttgttatactagcaccctactttcaataccaattttctgtttagtccattcaggctgctgtaacatagtaccataaagtggatggcttataaacaagagaaatttattaatcacagttgtagaagctcaaaaattcaatatcaaggtgccagcaaatacagtgtctgttgagggccaattttcacattcataggtggtgccttttcacactctcctcacatggtggaagaggcaagacagctctcttgggccttctttatacagatactgatcccattcatggatgctatgccctcataacctaaccacsttctaaaggcttttccttctaacccatcctaataccatcactttgggggtcacaattttaacatatgaatttgag

SEQ ID NO: 243899 - DNA, 629 bp, Homo sapiens
catatgaagttgtgatggagttaagtgaaaaaaattaattggcatgcagttggtttagacgattcacttaataaggatgagttaaaaggatatgtagcagagctaaactgagaaagactgaagtttaggattaaagaatagtagcatatgtgggataacatatcaagactcaaatttaaaaattgrctgtattcctttgcattggaccttaaatcaaagattgagctatgaagaattattagaattattagaaggcaggttattatttctaaagcttagtaattgctttagtgaagagccaccacactcttgttagtaaaataattttaagcctctataacgctcacttgatgttactaaaagggtagaatatagaaaaaaggccaagtctctggatttgaaatttcttagtgtgggccagtaatctgcatttcagcaaatccccttgtgattgtgatatgtcctaaagtttaaagaactgctgtgtacctccttaatgtatttaatcttcaatataaatgaccattcatcaaagaggcttgagcaaaggcatgacacaatcaaacctatggcttccatgttaaaaatagtctcttggagcaagggtgaaaacaaagagaccagtttgg

SEQ ID NO: 243900 - DNA, 423 bp, Homo sapiens
tgacatgtttcaaagggcctcaacatatgccagataaatggaagaagaagtgaggaacttcacacaagagaacaaaaagcaaattttctctgaatatttcctgataaggaatgtcaagttttgacagatgtgaatgtgtgctgatctgatasagaaaactttttaaagaagcttcagttagtttgatctgtgtaaagtgaaagacttgcttctgtcttaataaccaatctaccactttaatattttcaaataattggtactgatgaatgcttctaaaggaccaaggagaatttttgctttttttctggaaaattggtatcagttttttagagtcatattatgtgtgtagtctgaatagtgttaaaaatatcaaaatacaaactggagaattttgcacaaaataggaaaatgttgaatatattt

SEQ ID NO: 243901 - DNA, 499 bp, Homo sapiens
ggcagggttagctcattgattttaagggttttttttttcctgttttttcttttatggtatgtgtttatcatgtacaacataatgttctgaaacatgtattacattgtggawtgtttgaattcagctaattaacttatgctttattttatatacttatcttatttgtattgagaatgcttatgtcttacttcattcttatgctcctataaagaactgctcaagagcacataattaataaaggaaagaggtttaattgattcacagttccacagggctgaggaggcctcaggaaacttacaatcatggtggaaggggaagaaaacatgtccttcttcacatgatggcaggaaggagcagttcagaacaaagggggaaaaacctcttataaaaccatcagatctcatgagaactcactcactatcatgagaacagcatgggggaaacaaccccataaccgaattacctttcacaagatccgtcacccaagataatggaattt

SEQ ID NO: 243902 - DNA, 499 bp, Homo sapiens
ggcagggttagctcattgattttaagggttttttttttcctgttttttcttttatggtatgtgtttatcatgtacaacataatgttctgaaacatgtattacattgtggaatgtttgaattcagctaattaacttatgctttattttatatacttatcttatttgtattgagaatgcttatgtcttacttcattcttatgctcctataaagaactgctcaagagcacataattrataaaggaaagaggtttaattgattcacagttccacagggctgaggaggcctcaggaaacttacaatcatggtggaaggggaagaaaacatgtccttcttcacatgatggcaggaaggagcagttcagaacaaagggggaaaaacctcttataaaaccatcagatctcatgagaactcactcactatcatgagaacagcatgggggaaacaaccccataaccgaattacctttcacaagatccgtcacccaagataatggaattt

SEQ ID NO: 243903 - DNA, 499 bp, Homo sapiens
ggcagggttagctcattgattttaagggttttttttttcctgttttttcttttatggtatgtgtttatcatgtacaacataatgttctgaaacatgtattacattgtggaatgtttgaattcagctaattaacttatgctttattttatatacttatcttatttgtattgagaatgcttatgtcttacttcattcttatgctcctataaagaactgctcaagagcacataattaataaaggaaagaggtttaattgattcacagttccacagggctgaggaggcctcaggaaacttacaatcatggtggaaggggaagaaaacatgtccttcttcacatgatgkcaggaaggagcagttcagaacaaagggggaaaaacctcttataaaaccatcagatctcatgagaactcactcactatcatgagaacagcatgggggaaacaaccccataaccgaattacctttcacaagatccgtcacccaagataatggaattt

SEQ ID NO: 243904 - DNA, 499 bp, Homo sapiens
ggcagggttagctcattgattttaagggttttttttttcctgttttttcttttatggtatgtgtttatcatgtacaacataatgttctgaaacatgtattacattgtggaatgtttgaattcagctaattaacttatgctttattttatatacttatcttatttgtattgagaatgcttatgtcttacttcattcttatgctcctataaagaactgctcaagagcacataattaataaaggaaagaggtttaattgattcacagttccacagggctgaggaggcctcaggaaacttacaatcatggtggaaggggaagaaaacatgtccttcttcacatgatggcaggaaggagcagttcaraacaaagggggaaaaacctcttataaaaccatcagatctcatgagaactcactcactatcatgagaacagcatgggggaaacaaccccataaccgaattacctttcacaagatccgtcacccaagataatggaattt

SEQ ID NO: 243905 - DNA, 358 bp, Homo sapiens
agtgttaacccagcaggtctgagttgcttaaatcctgcacatttagcagatgggcctatttgcataattagctattggtcagcggctagaaactgaggtcttggaatatcccctatgctactaattgataagggtgtttggtagtcttaaaattttaaaccatgctgttccagtttctctataaagtttrtgcaaacaatgcgacttttgatgaacatgtgctttgtttctgtgaggtttggaatgactataactgaggtcagtcacgaagatactactacttgaccaacccccagtaaaaactctgcacttttagactcaaaagaacttttctggaagaaaacacttcaaacatgtg

SEQ ID NO: 243906 - DNA, 559 bp, Homo sapiens
ttgctctctggccaggctccctgaaattcagatttaagaaattcatcgtcccttccttttttatttagtctatatattaccacacacttttgaaattgaatcacatgatattccttttctataattgccaattatagctgttggctggaaagaataaactgccagttttatttcaagttgctcatctttaattcaggctttaactcagacttgaatgactattggcttagagaccccaaaccacagccagacttayatttagtagaattttcagaaacttcaagtgttccttatccctccctgactcaaggcaataatatatctgtcttaattgaaagtttaagactaattcatcttcactatgacatgtttcttacgtttcagtgcctttcccatcaaaaagaattgttaataagaatttaaaaaagaaactattcagttcccataaaaatatttatgccttaagacaaggcaccactcctattcaatatggtactggaagtcctagccagagcaatcaggcaagataaagaaataaagggcatttaaataggaagag

SEQ ID NO: 243907 - DNA, 585 bp, Homo sapiens
ttacttacagacacagatttctatatattttagtgaatagaatgtgctcaataaacatgtcaattctattatttcaacaaaacctattaagtatatcctcataagcatcacagaggttttcttaacgggtgattatttttggttcaaaagaagcagcctcaaaaatttctgtgctgtgaacattgtcaatacctcattcttagcacttaccatctctgtgcacaccagccagacttccaggaattgtgactgtttgctaagaagtttctctggtctctggagttcactttgcgaatatgtagggcaagacagacattctggagagttaacagcccccaggagtagcccttaaccaattactggtgagagttggtgaataaaaaccccacctgaccaagttacttgagtggagaaactgaaattttaagctggctctcaggrttcccccgtgctattaagcttaaattgccatcgttgtaacttgcttcaaggtgcatgcttcattgacttttttccaacgtctgtctcatttcttcactttcttactagagcttctgtataacctaaccaaaataaattacttgt

SEQ ID NO: 243908 - DNA, 546 bp, Homo sapiens
atagtgatccactcaaaatgacagagccagtatgtggcagaataagaggccagtccctaactgycagacaccaagtcctcattcgctaccctgatatttacagatgtttattgatgtaggtttagctgtttgttttgagacaaggtctcactccatcacccaggctagaatgtcatggtgcaatcacgactcactgcagccttgacctcctgggctcaaagtgatcctcccacctcagcctcccaagtagctggaactacaggtgcacaccaccatgcccagctaattaaaaaaatttttttttgtggaaatgggttctcattatgttgcttggctggtcttgaactcctgggctgaagggaccctcccacctcagcctcccaaagtgttgggattacaggcatgggccaccatgccctgcctgtttattgacgtctgtgcattgtttggctctgatgtgaatactatcccgctttggagagtaaaggctgagaggctggattccagagcgcaacagtctgctgctgtgcagtgcagcagccacaa

SEQ ID NO: 243909 - DNA, 546 bp, Homo sapiens
cccaaacctcaggcagctcagccaagcgggagctcagagagcaccccctggcctggsaccacctgccacctctcataaggttcagggggtgtcttcctggggactcaggctcactggcaattttgcacttttcttacaaagtgaggaatagtcaggtcacctctgagtaggtgacactggagaacactgacaaaattatcttctggcaaaaagaagtctcccctggtggaaggagcccagcattcctgtaaggcaggattcttaacctttcctgtgcattgtgatagaaaagtagaatcttgggaccccaaactcattatgctaaaggaaaagttaagcttgggaattgagtcgcccaaaaactacctttcttttgttcccagatagttgtaatttcacaggcttgctttatcctatgtaaaatgcagatttactaagcacaagaaaaatgcataaatgatttttcctctacccacttcttttcacatgtaaaatgtagattcactgagcactaatcagagcctcacaggaatgtaaccacttgcc

SEQ ID NO: 243910 - DNA, 546 bp, Homo sapiens
cccaaacctcaggcagctcagccaagcgggagctcagagagcaccccctggcctggcaccacctgccasctctcataaggttcagggggtgtcttcctggggactcaggctcactggcaattttgcacttttcttacaaagtgaggaatagtcaggtcacctctgagtaggtgacactggagaacactgacaaaattatcttctggcaaaaagaagtctcccctggtggaaggagcccagcattcctgtaaggcaggattcttaacctttcctgtgcattgtgatagaaaagtagaatcttgggaccccaaactcattatgctaaaggaaaagttaagcttgggaattgagtcgcccaaaaactacctttcttttgttcccagatagttgtaatttcacaggcttgctttatcctatgtaaaatgcagatttactaagcacaagaaaaatgcataaatgatttttcctctacccacttcttttcacatgtaaaatgtagattcactgagcactaatcagagcctcacaggaatgtaaccacttgcc

SEQ ID NO: 243911 - DNA, 598 bp, Homo sapiens
gtttcagtttttcccagagtgagagaaatatactgtgtgctatatcattagttgatacaggaataatttcataatcaatagtgtagtgctcacataagttgaaaaagctaactattcaaaagctagcaagtattttcctggtttttaaaaaattataaaagtgaaaataatawttctgaattgctgagaactttattaccttattttccttctcctctgcttttttcctattgcctgccagttgatgattgttatttcttactagcattgccctttaggataggaaggtataagtgaagaagggcaaaacttaaatgtgtagttaatttgcaaatctgttactaactctggtgaaaggtggacttctgaggatttttcccttcctagtttgaggatttcgacatcttttaagattcggattcttactatattagagttgattatatgaagactttgatcatgtctaaaatgccatatttttgcattctaacatattctatatatattttttcctctgtctttccccattcggaaattcatagagaccattgtgcctccatctttttttctctgtctgctctgaattttgggtaaagaa

SEQ ID NO: 243912 - DNA, 548 bp, Homo sapiens
gcccagcatgagcaggccctggtgcagtgcagtcaatgatattcttccctgaagtgtccactttttggcaattaagtggtttattgatcttaaggagaaatacagcaagacagcaatgaagtgatgtcagctgcataataaggacctagtttaagagaaatgtcaaggggatgaattgttgggaggttaggataaggatgagggtgacaggcctcagcttggagcttccactctttcttcagctgctacatctggagtgaatctggagttttcagtttagccatgatttattgcrtgctggttgtgttcaggtgctggagaggagtctttgtggagctttggctcatcagggagagacatacggacaagtggacagctggcaggccacagagtggttaagagcatgagctcgtgcgtcaggtagatcaggtttctggtcccctctggccatttgctagctgaggaaccatgactaatgaccccaagactcagtttcctcttccataaaatggagataacaatattacccacttcactgttttttggag

SEQ ID NO: 243913 - DNA, 548 bp, Homo sapiens
gcccagcatgagcaggccctggtgcagtgcagtcaatgatattcttccctgaagtgtccactttttggcaattaagtggtttattgatcttaaggagaaatacagcaagacagcaatgaagtgatgtcagctgcataataaggacctagtttaagagaaatgtcaaggggatgaattgttgggaggttaggataaggatgagggtgacaggcctcagcttggagcttccactctttcttcagctgctacatctggagtgaatctggagttttcagtttagccatgatttattgcgtgctggttgtgttcaggtgctggagaggagtctttgtggagctttggctcatcagggagagacatacggacaagtggacagctggcaggccacagagtggttaagagcatgagctcgtgcgtcaggtagatcaggtttctggtcccctctggccatttgctagctgaggaaccatgactaatgaccccaagactcagtttcctcttccrtaaaatggagataacaatattacccacttcactgttttttggag

SEQ ID NO: 243914 - DNA, 548 bp, Homo sapiens
gcccagcatgagcaggccctggtgcagtgcagtcaatgatattcttccctgaagtgtccactttttggcaattaagtggtttattgatcttaaggagaaatacagcaagacagcaatgaagtgatgtcagctgcataataaggacctagtttaagagaaatgtcaaggggatgaattgttgggaggttaggataaggatgagggtgacaggcctcagcttggagcttccactctttcttcagctgctacatctggagtgaatctggagttttcagtttagccatgatttattgcgtgctggttgtgttcaggtgctggagaggagtctttgtggagctttggctcatcagggagagacatacggacaagtggacagctggcaggccacagagtggttaagagcatgagctcgtgcgtcaggtagatcaggtttctggtcccctctggccatttgctagctgaggaaccatgactaatgaccccaagactcagtttcctcttccataaaatggagataayaatattacccacttcactgttttttggag

SEQ ID NO: 243915 - DNA, 474 bp, Homo sapiens
gggcaggggtcaatgctcgtaggaggataaaaggacaaatagaggccagacgcatttgttcaggcctgcaatcccagcactttgggaggacaaggcaggcagatgacttgagcccagcagttccagaccagcctgagcaacgtggtgaaaccccatctctataaaaatttcaaaaaattagccaggcatggtggcaggcacctgtaataccagctactcaagagactgaggcagaagaattgcttgaacccaggaggtggaggtttcagagagctgagatcgcgccactgcactctggcctaggtgacagagcaagaccttgtctcaagaaaaagaaaaaagaaaagaaaagaaaaaatcgaaagacaaatagacaccatgcctgcccacaaagaacttccatgcagtggaaagaccrggcaatgctcaaagaaagagtggttgattctgaggatgatgagtgataaggagggc

SEQ ID NO: 243916 - DNA, 412 bp, Homo sapiens
tattttctatcttcttggctagctcttcttgtttctcttgccctaccctcccatcttcatttcatcagccccagagactaaaagaatgggaaatagacccagccaagggggcgctgggggtgaaagggtgctcagtaaagtttttggtctctggcaacaagtgygcctcagtgtacgtggaatgatatgagacccactgcaaagacctagcattggtcgggcctggtggctcacacctgtaatcccagcactttgggaggccgaggcgggaggatcacttgaggtcagaagtttgagaccagcctggccaacatggtgaaaccctgtctctactaaaaatacaaaagttatctgggtgtggtagtgcatgcctataattccagttactcgggaggctgaggcagaaccactt

SEQ ID NO: 243917 - DNA, 412 bp, Homo sapiens
tattttctatcttcttggctagctcttcttgtttctcttgccctaccctcccatcttcatttcatcagccccagagactaaaagaatgggaaatagacccagccaagggggcgctgggggtgaaagggtgctcagtaaagtttttggtctctggcaacaagtgcgcctcagtgtacgtggaatgatatgagacccactgcaaagacctagcattggtcgggcctggtggctcacacctgtaatcccagcactttgggaggccgaggcgggaggatyacttgaggtcagaagtttgagaccagcctggccaacatggtgaaaccctgtctctactaaaaatacaaaagttatctgggtgtggtagtgcatgcctataattccagttactcgggaggctgaggcagaaccactt

SEQ ID NO: 243918 - DNA, 532 bp, Homo sapiens
ctttttaaagcttaataatattttattgtatctatataccacatttttttatccattcatctgttgatgcatactttggttgcttctacctcctgattactgtgaataatgcaactataaacaagagtgtgtataatagctcattctcatgctgctagtaragacatacctgagactgggtaatttatatagaaaaatagatttaatggactcacagttccacatggctggggaggcctcacaattattgtggaaggtgaaggagaagcaaagtcatgacttacatggcagcgaacaagcaagacagcttgtgcaggggaacactcatttttaaagtcatcagatctcatgagacatgttcactaccatgagaacaacagcatgggggtaaccagccccatgattcaatgaccccccaccaggtatggaaactacaattctaaatgagatttgggtggggacacagccaaaccatatcagtttgcaaatatctcttggattctccaaaatagaattgctggatcatatgaca

SEQ ID NO: 243919 - DNA, 532 bp, Homo sapiens
ctttttaaagcttaataatattttattgtatctatataccacatttttttatccattcatctgttgatgcatactttggttgcttctacctcctgattactgtgaataatgcaactataaacaagagtgtgtataatagctcattctcatgctgctagtaaagacatacctgagactgggtaatttatatagaaaaatagatttaatggactcacagttccacatggctggggaggcctcacaattattgtggaaggtgaaggagaagcaaagtcatgacttacatggcagcgaacargcaagacagcttgtgcaggggaacactcatttttaaagtcatcagatctcatgagacatgttcactaccatgagaacaacagcatgggggtaaccagccccatgattcaatgaccccccaccaggtatggaaactacaattctaaatgagatttgggtggggacacagccaaaccatatcagtttgcaaatatctcttggattctccaaaatagaattgctggatcatatgaca

SEQ ID NO: 243920 - DNA, 542 bp, Homo sapiens
ttctctatctacagttatttcattgtcctagattaatttgttttctaaaagttttcaaatatattggtgaactaaacatataactcttactaacatgctgttttaatgcaatgaaaatgtatgtattgcattgtagtatataaaaagagatagggggttgttttttgactttgtagtaatggccattctggctggtgtagttgggtgtcacaatatggttttaatttgcatttccctgatgattcgtgatgttgagtattttttcatctttggccatttgtgtatcatattttaagaaatgtatgttcatgttgtttgtcacagatgtggtgaaaagggaacacttatgcacagattgtaagaatgtaaattagtgaaactgctatggaaaacagtatggaaatttctcaaagaacaaaaagtagatctaccattctatccaycaatacaactactgggtatctacccagaggaaaagaagtaattatatcaaaaagacatatgaaatcccatgtttatcacagcacaactcacaattgcaa

SEQ ID NO: 243921 - DNA, 519 bp, Homo sapiens
attataatgtattgtgcatttcaaaattgctaagagagtgaattttaaatgttctcacaacaaagtaataagtatgtcaggtgatggataggattattaacctgatttgttcattccrcaatatttactgtattgaagtattaccttgtacctcataaatatatatatacaaatatatatataattgttacaaaattaaaaaaataaaaaagatgtgtttgatctttaaaaattttctgagagaagtgtgtctgttttttcagaagaaacttacatttaatagacattaagttaacttaagtaaggcagataattttggccatcaggttatattattaaatgaactgtttttgctaattttataaaagctgtggattattaacagcaagtaggggatattttgtcatgatcagataaagattttgcatgattctatttgaaaaaatgaaattatttccctaaaattgcaaagtgttagtgccttttatttcagaggtctagccttaaatggtttagtca

SEQ ID NO: 243922 - DNA, 505 bp, Homo sapiens
acatattttagttagtgtacatagcttatgttgttcttcttttgtaatatgaaatctataaaaacacaactgggccaggatgggttacgatcactgtctcttcacaccacgattatgctccttgtcttctcccattcattaatagaaaagaagataaggccaacctgacattttctatcacaggcaagttttgattttatctttcttagacctttctgggattatttctttactaatacattttaaaatttcaccagaataaatctagaggtaaatcacttcatcaattttgcatgacatctttggtcatggaatttctggatcaacatatttttgtttaggatttattctccaagttctattgctttttctccatctactttattattttatataaaaatacctattattcmttgattttctctatgtcctcatatatacatacttcttgctcattgattccatatttttatgaattattctctcattcattactagaggcttt

SEQ ID NO: 243923 - DNA, 506 bp, Homo sapiens
tagtatttgtgctgttatatatgaagtaaggttaatcttaaatatccatgttttgagaattagcaacaatgacaaactaattcaatataaatagttttattattatatattaatattttaatattagttattaaaataagcatttaaaaattccatcccaacattaggacaatatattacaaataatattttaaaattggtatgtactgcattaaagttttctgttattctatgaagttatttcaattaattttaggattgcacataacatagatatggaattgcataaaggtcacataaaaaagttgccaattatcttatatttgtgtttttgtttatttcataatgttaaataatatttttaacgaaggcaggaatttcaaaatcatcaatatatacaataattttctggatttctttgtctttattattctaactctgttttttttttkctactatattttatttttatttcacattcacactaagtttctttgcttctcagc

SEQ ID NO: 243924 - DNA, 620 bp, Homo sapiens
aaacttcctcattgctctaagaagtatcagatttggcagcagtattacttatgctctagaaaaatacaaggaggtattattctttgccatccaatattgatataattttttaaattataaatgtgttatcaataaaatacttttataaaattacagttctattcatgaatctctgtttaatctttcttcaaaacatgaacatcacacaatccactaggggctatctgagaattaaaaatgtttactttagaagggctgctttaaaatggtcctctaaaaccaggctttaatattattcaacaataatgagtttacctaaatctacattgaaaattttagcagagcctgcttccatgtatttacacatttcttttttatcagaaartaaaaatctgaattaattaagctgtaatgaatgacaaagtattataatacagaaaactgcaaagaagacactaattcctttgggggacaagactcagaaatggattttcttcaattggccatgacatctattaatggtctcataaaacgtagcctgaaatgctttgtgttttttagaggattaaggtcttttggtttattatactcatggtcaagctttctcaaaaattattcat

SEQ ID NO: 243925 - DNA, 620 bp, Homo sapiens
aaacttcctcattgctctaagaagtatcagatttggcagcagtattacttatgctctagaaaaatacaaggaggtattattctttgccatccaatattgatataattttttaaattataaatgtgttatcaataaaatacttttataaaattacagttctattcatgaatctctgtttaatctttcttcaaaacatgaacatcacacaatccactaggggctatctgagaattaaaaatgtttactttagaagggctgctttaaaatggtcctctaaaaccaggctttaatattattcaacaataatgagtttacctaaatctacattgaaaattttagcagagcctgcttccatgtatttacacatttcttttttatcagaaagtaaaaatctgaattaattaagctgtaatgaatgacaaagtattataatacagaaaacygcaaagaagacactaattcctttgggggacaagactcagaaatggattttcttcaattggccatgacatctattaatggtctcataaaacgtagcctgaaatgctttgtgttttttagaggattaaggtcttttggtttattatactcatggtcaagctttctcaaaaattattcat

SEQ ID NO: 243926 - DNA, 620 bp, Homo sapiens
aaacttcctcattgctctaagaagtatcagatttggcagcagtattacttatgctctagaaaaatacaaggaggtattattctttgccatccaatattgatataattttttaaattataaatgtgttatcaataaaatacttttataaaattacagttctattcatgaatctctgtttaatctttcttcaaaacatgaacatcacacaatccactaggggctatctgagaattaaaaatgtttactttagaagggctgctttaaaatggtcctctaaaaccaggctttaatattattcaacaataatgagtttacctaaatctacattgaaaattttagcagagcctgcttccatgtatttacacatttcttttttatcagaaagtaaaaatctgaattaattaagctgtaatgaatgacaaagtattataatacagaaaactrcaaagaagacactaattcctttgggggacaagactcagaaatggattttcttcaattggccatgacatctattaatggtctcataaaacgtagcctgaaatgctttgtgttttttagaggattaaggtcttttggtttattatactcatggtcaagctttctcaaaaattattcat

SEQ ID NO: 243927 - DNA, 620 bp, Homo sapiens
aaacttcctcattgctctaagaagtatcagatttggcagcagtattacttatgctctagaaaaatacaaggaggtattattctttgccatccaatattgatataattttttaaattataaatgtgttatcaataaaatacttttataaaattacagttctattcatgaatctctgtttaatctttcttcaaaacatgaacatcacacaatccactaggggctatctgagaattaaaaatgtttactttagaagggctgctttaaaatggtcctctaaaaccaggctttaatattattcaacaataatgagtttacctaaatctacattgaaaattttagcagagcctgcttccatgtatttacacatttcttttttatcagaaagtaaaaatctgaattaattaagctgtaatgaatgacaaagtattataatacagaaaactgcaaagaagacactrattcctttgggggacaagactcagaaatggattttcttcaattggccatgacatctattaatggtctcataaaacgtagcctgaaatgctttgtgttttttagaggattaaggtcttttggtttattatactcatggtcaagctttctcaaaaattattcat

SEQ ID NO: 243928 - DNA, 606 bp, Homo sapiens
cacacaaattttcatctaactgatattttaattttatctaactgagaaaaaagatgtctgagtcatttatgggaaaatagtctgatttaatttctaaatttacatgggtaaaatattaaacagagattttatttaaaaagaatgcaatatctacttccaaattaaaatcataatagtttttgaaattctattaaatttatgaattgaaaaaaatgaatttgattttagttctctgtctcgtggcattgtcaaacttgttgaatttctascagtgttgtctactccatgctttcgaactatctttcagatgtcattacaaatgttcttattctcatgaatttaaacatataaaaattccatattctcacccttttgttaatattaaagcaaatatacatataaatgcaataattcacaaacctcccattgatcagattcataccttctaaatgagaaaacatatataaatttattgcatatatacacatcaaaaatcccagtgattctgagtactataaagtaactaatggaaataaagcctttaaatggttaaagacatttaggcattggtgaggaatgcaagattttgctctaactatattttat

SEQ ID NO: 243929 - DNA, 496 bp, Homo sapiens
ttgacatggtttctgacaaaattatttattcttcatcaattttcttaggcatgatttycataaatgctggaaaagaatattaaaactgtccaaatactgataacctgattattatgtagacatattaaaataatctactcacaaaatatgtatttcttttcttttgtaaaagaattctcaaagattagcccttagccagaaactaaacctgcattctgagattctagatcaatgaaagatgaaaatataatacaaaccacttagataattttaaatatcttatacccatattaactgtaggatgcaatattgctaaggtattaacatttctccagtttgatctatagatatcaagacacaatcaaaatcttactaatatttttacagatgttaacaagcaggatttaacatttatatgaaaagtcactagaataaccaagataattttcagtttgaagaacaaagttgaaggattcacataaatcaatttcaaaat

SEQ ID NO: 243930 - DNA, 350 bp, Homo sapiens
cagggctcctccaaaggccggatcggagtggcccttagcacagctttggctggcccaggcttattctcccactgtacccgcttcagattcamtgggcctaggaagtagcttgtatatggccttagcatctaatacctcttttccctctcccccagctgcctgtctccaacattcacctttcagtgtcgcaatactctatgccttggagtctagggagcaggctggagggcccagccagcaaacatttcccttccttgcatgggcttttgcttacccataggtcagatatttccaccccggttggtggagtcagcaaggctggcacagaccaggctctcagccccctgctg

SEQ ID NO: 243931 - DNA, 421 bp, Homo sapiens
ggaattccagatgctcctcagcatctcattcacaaaggctctgagcagctctaagacagggctcctccaaaggccggatcggagtggcccttagcacagctttggctggcccaggcttattctcccactgtacccgcttcagattcaatgggcctaggaagtagcttktatatggccttagcatctaatacctcttttccctctcccccagctgcctgtctccaacattcacctttcagtgtcgcaatactctatgccttggagtctagggagcaggctggagggcccagccagcaaacatttcccttccttgcatgggcttttgcttacccataggtcagatatttccaccccggttggtggagtcagcaaggctggcacagaccaggctctcagccccctgctgtttacttgccaaaaa

SEQ ID NO: 243932 - DNA, 415 bp, Homo sapiens
tccatgtggaaaatgatgaggctgaacttgtaattctcaaagcttggactcccctacaaatgagctgaataattgatcctctgagacctggaggcagcagctccaatccttaaccacttcctgtgccggctccaggatgccatgcgagaatgagcattttctaggtgcaccatgaggtgacaaagattgagaggccctcctctaaacccctttcctgcactaacattccatgattctaggttttgaggaaatcaaattctaatccgacaccttggttttaccattgaggaawgtgttgcccaaagaaggaaaatggctcacctaaaattgcatggcttagtgtatagaacattactctcctaactagtaatcctgggtttttctagtttgccatactgtctctgtatcctttgta

SEQ ID NO: 243933 - DNA, 437 bp, Homo sapiens
ttgacgtcacagcgttgccatttgcctactgctgcttggatacagaatgcagcacttaacccttgtcctgcggggagggagtgattgagttgggtgctgtagttctggattacacaaccttttctttcttccttatctttgcttctgtctttgcttttttccttgttatttgcttttgatagaggagaaaaaggattatgattaagcattttgctgtggttttgtgtgttttgcttgttttaacagctctgtagcctgatttcctttaactgtttagtgcctgataggaaarttgggcttttaaatgtatggacagggcaacaaggctaattcctgcagttgtgtacccactccctccctggccccctcctaccacatatacttcttttcaataatactgtttttcagtggcttttctccaagtaccctggcatttt

SEQ ID NO: 243934 - DNA, 407 bp, Homo sapiens
gggcataagttcattgctagattcaaagggagttacaggttcataggtctttctgtttctcaagtacagtgccagctccacctttcttcagataggctgccttctgaatctgaaaagtaacaagcttaatgacttaagaactgtatttaatataatttatcccactttatataggcacttataaaatcatttgccraagactctaggattattttagattaatttattttgtataaattggttaattaataactatggaaaatccatataaaataaatagacacaatcattggactaaaagtgaccttacagggggcatttaagaatctccaggcattttgtctcagcactttttgcatcttctctacctattccctgggaaatggttctcaaacagtagcacaatt

SEQ ID NO: 243935 - DNA, 407 bp, Homo sapiens
gggcataagttcattgctagattcaaagggagttacaggttcataggtctttctgtttctcaagtacagtgccagctccacctttcttcagataggctgccttctgaatctgaaaagtaacaagcttaatgacttaagaactgtatttaatataatttatcccactttatataggcacttataaaatcatttgccgaagactctaggattattttagattaatttattttgkataaattggttaattaataactatggaaaatccatataaaataaatagacacaatcattggactaaaagtgaccttacagggggcatttaagaatctccaggcattttgtctcagcactttttgcatcttctctacctattccctgggaaatggttctcaaacagtagcacaatt

SEQ ID NO: 243936 - DNA, 635 bp, Homo sapiens
attctttcagctttccatgtaacacattcataggaatagataataaaaataaaggaaatattacttttgagaaggaaataaacatgaaaacaaaacaaagacaccaaccctgatttctaagagcttccattacagcggaagagtcacacatgtataagataaattaccataacagataattgccacccttataatataggtattttgtaaattactatgagtctgcagaagaaagagttattgagagsagcttaattcttttcctacaaagattttgtaatacaaatgatggagaaagcctagtggaatcacctaccaggaagatagtggcttagcttcaggcagatcttattcatttactctacaaatatttattgaacatctatcatgtgttgttaggatattggaatccatcaatgaatcaaagagaagaggatccctgttgtgatattctaggaaaaaaataaactaaaaaacaaaattggcaatgaccaattaaagcattccttctttgataacaggtagaaattaattggtttttggttgatggggatactaaaagctgtagaacatcataccttttgatcctgaagtctcactaaatgaccatgtcaagcagtatgttagaataatga

SEQ ID NO: 243937 - DNA, 551 bp, Homo sapiens
tgttttgtactatattgccagtggaccaacttcgttttattggaatttttttttttattttctggaggatctttctcccttcctccccttaggaattcaggacacatttctgaaagaytggttttactatgtgagaagcacaatgttgtatactatttgaatttgagcttcccttgtccagggacggagtgtgggcatgccacctctgttcagttatggggtgagtttcttggccgcctgggacccctgcctcccgcccaagaatgcaggtgagagcgtttgcccctggttttgaccaggatgcccagtcctggtgtctgaattccacccatgaagcctgaccaagcacagtgggaaaatcagcctatggccaatggacatggaggccaagtttgagggagagggagtttgcccagagtggcagctgcagatatgatctgaagggtaaatgctcactgcaaaacaggaggggagccaaggtcagaaccagagaggcagggtcaggcaaagggcatagagaagagcaagaagctagagagaggagaggaggc

SEQ ID NO: 243938 - DNA, 554 bp, Homo sapiens
ggaccaacttcgttttattggaatttttttttttattttctggaggatctttctcccttcctccccttaggaattcaggacacatttctgaaagactggttttactatgtgagaagcacaatgttgtatactatttgaatttgagcttcccttgtccagggacggagtgtgggcatgccacctctgttcagttatggggtgagtttcttggccrcctgggacccctgcctcccgcccaagaatgcaggtgagagcgtttgcccctggttttgaccaggatgcccagtcctggtgtctgaattccacccatgaagcctgaccaagcacagtgggaaaatcagcctatggccaatggacatggaggccaagtttgagggagagggagtttgcccagagtggcagctgcagatatgatctgaagggtaaatgctcactgcaaaacaggaggggagccaaggtcagaaccagagaggcagggtcaggcaaagggcatagagaagagcaagaagctagagagaggagaggaggcacacacacagttgggaccaaagagg

SEQ ID NO: 243939 - DNA, 552 bp, Homo sapiens
agtgtcttctgaggggaataagtgaccaaaagggatagaagcctggtaatggcctgtaatcagtttttacactaaagggaaaaagtagtttaacctaaggtcttcctacttcttcatccaccaaggctgaaaaagtaaatattatttcattagggktttaagttgacctgaagaaaggaggaccaaaaatgctgtatccttgtgggagatgttgtgtgccaagaagagccagggcaggtggcgtagtaaaagcacagggccagagagtcaggaggtctgggtttgagtctttggttcaggcctcatcaccttagtcacttcccctctctggcatcctcaatttcctcattttgaagtgaggggcctgagtgagataacaactaagatccctgctgagttaatgcaatattactttaaaaaagaagagagaaagaagggatggaaggagaaaaaaatgggagggaagaaggaaggaaggtgggatcagcaagtagagtagtagaatagaattaatttaactataagtgacaggaaactctaaataacagggac

SEQ ID NO: 243940 - DNA, 551 bp, Homo sapiens
ttttcttctgcttctagactgtctccacggctatcttgggattcacctttttcaaggctaagttgctatttgtctatttgcttgctttctagcttccgaatgtgcactgctgttgtcttttctaacatgacgcttgtwtttgtggtttaatgccttaaaaatccactttattattttagggaggtgtcaggaggaaacagaagtaactgtgtgtgttgattctactgtacaatttagagtacttggaatatataatttttgttgcaacctattaagatatggcattatttaaaaacactgatctaagcgtggaagtcacaactttagaattttttgtaaaatttcaaaaaatatatttttaaaggggataaaattaaatcatgaatccttttagtaacaatctacatttgtttttatgtgcttcacacatctcttaataaccatgaagggattacagtattctcagtagatcaattccatacttcttattaatcattctagcttttataatgctggaagtgccaaaatatatcctcattgcagctgcatat

SEQ ID NO: 243941 - DNA, 511 bp, Homo sapiens
tgtgccaccactcctggctaactggcctcaagcagtccccccctcggcctcccaaagtgctgggattacaggtgtgagcccctgcacccagygagttacataggctttatgtaatccaatgggaaacagtttttcaaaatttctcctgtagaatccacttgcaaacaatatttgccacaaacgggggctttattaaagatcacacatcagctttagttaggggttttatgggaaatgcacactgcttttgtggactccagaggtagcaatgttaccgtagaaccttttgtctatcttgtgaactcttcacttcaacatcatttcttctctgcttcttttgttcttttacaggcacaaaacagcaacaccacctacccctcccattgccttctttagagtaagttctctgttctgaagccttggcacaggctgacatccttcttacatattttactgaattgcaggtaggagcttggtctttctcatccttgtatcttcttcagcttcagca

SEQ ID NO: 243942 - DNA, 512 bp, Homo sapiens
atgtctctagaccagatttttttccccctcatttattagcttgatgaatgtcrcaatatgtatgtgaaatatattgagcggatataattagttccatttcaagttggaaactgaggcactgagaggttaactaaaactacattagtttttagtaataagttgtaagcatcttcaggtcaaaggtgatatcttagtatagcctgcctttctacacaagcatatcttcatgtggtctgcacccagtaaacgattgtgggcttggaatgtctggaagtggtcctagattttattacctcctgcctagtgttctttccatggcactattttgcttcataaagagggcattaccaattggaagtgggcgctttattaaatttgacctgctacctgtagccgtgggcaatacaagattgaacaattcactttctaaataggtggagggttagaatgggaaggtactttgcaccaatcaaatctccctgatttttgtttatgggacaagccactccagt

SEQ ID NO: 243943 - DNA, 512 bp, Homo sapiens
atgtctctagaccagatttttttccccctcatttattagcttgatgaatgtcacaatatgtatgtgaaatatattgagcggatataattagttccatttcaagttggaarctgaggcactgagaggttaactaaaactacattagtttttagtaataagttgtaagcatcttcaggtcaaaggtgatatcttagtatagcctgcctttctacacaagcatatcttcatgtggtctgcacccagtaaacgattgtgggcttggaatgtctggaagtggtcctagattttattacctcctgcctagtgttctttccatggcactattttgcttcataaagagggcattaccaattggaagtgggcgctttattaaatttgacctgctacctgtagccgtgggcaatacaagattgaacaattcactttctaaataggtggagggttagaatgggaaggtactttgcaccaatcaaatctccctgatttttgtttatgggacaagccactccagt

SEQ ID NO: 243944 - DNA, 512 bp, Homo sapiens
atgtctctagaccagatttttttccccctcatttattagcttgatgaatgtcacaatatgtatgtgaaatatattgagcggatataattagttccatttcaagttggaaactgaggcactgagaggttaactaaaactacattagtttttagtaataagttgtaagcatcttcaggtcaaaggtgatatcttagtayagcctgcctttctacacaagcatatcttcatgtggtctgcacccagtaaacgattgtgggcttggaatgtctggaagtggtcctagattttattacctcctgcctagtgttctttccatggcactattttgcttcataaagagggcattaccaattggaagtgggcgctttattaaatttgacctgctacctgtagccgtgggcaatacaagattgaacaattcactttctaaataggtggagggttagaatgggaaggtactttgcaccaatcaaatctccctgatttttgtttatgggacaagccactccagt

SEQ ID NO: 243945 - DNA, 527 bp, Homo sapiens
ttgcagagaaagacttctgtatgatgcatgatagtctttccattaggagatgatacrtggtattccgcattacattcaaaactggcttttcctgacttgcaaaattgtgaactgccaagccacccaatttatttggagaattcctcaggtgcagagttcatttagtactggtcccccacttcacagagtactgttagctgatcagaatgttaactgttcccaccactaaacatcatggcatctaccttcgaatgaaaacaaacaaacaaaaaaatgaactaaagagacatgtttttttggcctgcacactcctgatagaaaatagagaaatagtaagaagacaacctcaaaaattaatcttattcctaaaaaggagaggcaggaaataaacagattagggtgtgtataattttgaaatatactgtgcagacactttacaatccagctaccctgatggaggagaatgttccataaacagataaattcttctccctcaacatagctcctttgtttattgttctccacac

SEQ ID NO: 243946 - DNA, 521 bp, Homo sapiens
atgaatttatacatgtacttcatacttcctaacagattaatacaaaattacatcctataatgactcacaatacaattgkacctggccacagaatcttcaacaaagtaacagcaatcaaatcagttctttcaactgtaataatgatcacaggatgtacatttcagaatatccagatgcagtccaattatattgatgattttacacacaccattagattaagtagctggcaagataatctgttctttcaaatttgtatgcaagtaagcaaataaatatggcatacaatataagcctgtgtttcattttgattagttattatgattttttttattggtacaacattccagaatctggcctgtaagtcttcactcattgaaataaaaaagacacctgcatctataaaacaagttccagctagtataggtaaacccattatctgacaaaaatttaagtgatattggttaccttatactgaaatctgaaatacttaccaagctgtacatatttcattattaatacag

SEQ ID NO: 243947 - DNA, 601 bp, Homo sapiens
catgtgttctggtccagtttgcagctttcttcatctctgactgctactaaatttacagctgaaaaagttagaaattgttccaagttattcataccttttaattgaaatgattggttaaattttaccccaacaaaagatcagaacagatcttttaagagatatttttccaaacctatagtttgtcaatgtttggagagggaggaaatagccaaaaaaaggaggacagggaggagtaaggggaagaggaaaaaaawcgaggaaaaaaaaaaaaaagcagaggaagcaagaattaaagcaagagaagcctggtcctgtttaaaaccttttacatactaaaatgacacgagctatcacctcacacctgttagaatgactattactataaaatagaaagatgagaagtgttggcaatgatgtggagaaattgtaactcttgtgcacttctcatgggagtataaaatgatgctgccactatgaaaaacaatatggaggttcctcaaaaaattaaaaatggagttaccatatgatccagcaatcccacttctgagtatatagcaaaaacaaaaaaaaaaatgaaatcaggatctcaaagagatatctg

SEQ ID NO: 243948 - DNA, 597 bp, Homo sapiens
aatggagaatgcttactggactgtacagcaataagtgatccaaatgctcgggaagctttgggtttgtcacatatgccactgtggtggaggtgggtggaagtggatgcagcttgaatgcaaggacacacaggtggatgaaggagttgtggaaccaaacagggttgtctcaagagaagattctcaaacaccaggggcctgcttaactgtaaaaaaagatctttattggtggcattaaagaagacactgaaaaataatgcctaagtaattattttgaacagtatgtaaacattaaagtgattgaaatcataactgtctgaggcaatggcaagaagaggggctctgcttctgtaacctctgatgaccatgcctacatggataagactgtcatttggaaatactatcctttgaatggccacaactgtgaagtaaaaaagttctgtctgaacaagaaatggctggtgctttatccagccaaagaggttaaagtagttctggaagctttggctgaagttgtggaggtaattccgatggggatgacaacttgagtcatggaggaarccacagtggttgaggaggttttggtagcaatcatggtgg

SEQ ID NO: 243949 - DNA, 460 bp, Homo sapiens
acagggaatgcaccatcacccagaattttcagacctttcagagcccgaagagaatgattctcttaaaaaaaaaaaagatccctgaaataaaaacaagaatgctctgaaaaggagtattaatgctttttttccttatttgaaaatttaagaaaatcaacaccagcatggtgttgcctgagcaccagggcacagcaagcacatgacaaaggaattagtttgtggtaaatggtatgaccatcttccctccaasaaaagaactagatcaagttttaaaggccaattccttcagatcttcattttatttgtactccaaatgaggacatatatacaatgttatagcagttataatatccctacatgatatattatttcttagatttcttttttatttttaattttttggatacataataaaagtacatatttatggagtacatgtgatattgtgatactggcatac

SEQ ID NO: 243950 - DNA, 445 bp, Homo sapiens
atttagtaaaacccaacctatctataaaaagtgacttttatctttttatttttcgtcattccccattttagtaggaatattaaattaaaattaaattttaaaatccttcctaaaatttctttctgttggtactgttattcttgctcagactttttaacctaataaagattgattgactgagccttccgcctctgaagatctggratctgtttactggcagtttactgaaccagagcctgagttatccttacccacttgacataagtagccgtagctgtgtgatttcaaattgcactactgctgatttactaatggaattggatgggtggattaaagtttatcaagaaactattgggtctgatctaagagctaagcactctataatcttatatctcatcaaatcctacctttcactaacattaaaatttggataaatgctgttcaa

SEQ ID NO: 243951 - DNA, 531 bp, Homo sapiens
tctgtctttcccctagaaatttggcgaaaccaccatcctactactagctccagttagaaccactagtaaaacagaataatagtaggttggtataaagcaatggcargaagaaaatgtaaatttagccttgccaaatttaaaggcagttcaatttatatgttcttggccttctattttagagtaaaataaataataccaaataaagcaaaacaaggagtataggagtgataacgtggctcctacagaactccatatttattgtaactaagaaaaacacaaactgaggaaacaactattaaattacagctaatgcaaaatgtgacaatatactgtacaaaacccatggtcttctatcatgaggagaaaatgaaaactcacttctcagtgaaatataatatttcaaacaggtgtgtccatgattaaacttttaattcgatttgattcattcattcctccttttcttccttctagtggatgggctaatcacatgtaaaagtatagaatagaatgattgaaaaaacaagtttttgt

SEQ ID NO: 243952 - DNA, 632 bp, Homo sapiens
caccatatacccaatatgttataccaaaaatcatgcagtaaaacacacataatttactttaaccaccaagaatttataagccacagaaaaagtaatagtaacatagaatacaatgtggtttttcccctctatatttataacgtgcatattatgacataatggtgattaaatttgcttcattgtctttcctgtaaaaatgtggcagagaatctccttggactcacygcttttagaaagatggcataaataacatggtattttttactggtcttaggagcacaggtgtagatacattgcaatctgttatcccatggaaggataaatcattgaaaatgacctacttccggaggctgggtcagcagccacattttggaggaaaataaggtatacagtgttttctttgcatttcgaaggttaaaagcaggggtcacacaatcaaatgcctgcagaggccagagagttaacataattaaacccagagcagacatcaaggccataagcagaaattataactgtggtgatcagaagtgtatataatcttacctaagggattcaaattatctaaagggaacagcaatagcaacatggtgcatttcaaactaaaaatatttcctgaccatatttgggcaata

SEQ ID NO: 243953 - DNA, 586 bp, Homo sapiens
catccagcgcccaggagtaggcaccaggyggaccatctttcaaaaatgagcgctaaaagacaaccgaaaactttttctcgaagtgaatctggtagccaggagtctatttagtggatgagtacctgtaagaaacatagcaagtcagcctgagcccagataccatgaacgctggcccatggtagcagggcaggctattcaggtatatacgggatgtcacccacgagctgaccctacatggttctgctggaaagttggaaactccaggtgcaaggctggtgctatttcttcataagcaattcgaagagatgtcgtgcagaagggcaacatcaggaggaattacccttgcttacactcttccactccacagaggatgctttgctcctctttactgtgtgggaacaccttatatgcatcttttccctcattaaattttaagctcattgtggttaaagagtataccttatctgtttctttattagcccagtgctggacacatgatcagcattctgtaaatttaagaattctttgccatgtgctaatcgagtgctaagcacagcactaggtcctataaaacaaaaacataagt

SEQ ID NO: 243954 - DNA, 586 bp, Homo sapiens
catccagcgcccaggagtaggcaccaggtggaccatctttcaaaaatgagcgctaaaagacaaccgaaaactttttctcgaagtgaatctggtagccaggagtctatttagtggatgagtacctgtaagaaacatagcaagtcagcctgagcccagataccatgaacgctggcccatggtagcagggcaggctattcaggtatataygggatgtcacccacgagctgaccctacatggttctgctggaaagttggaaactccaggtgcaaggctggtgctatttcttcataagcaattcgaagagatgtcgtgcagaagggcaacatcaggaggaattacccttgcttacactcttccactccacagaggatgctttgctcctctttactgtgtgggaacaccttatatgcatcttttccctcattaaattttaagctcattgtggttaaagagtataccttatctgtttctttattagcccagtgctggacacatgatcagcattctgtaaatttaagaattctttgccatgtgctaatcgagtgctaagcacagcactaggtcctataaaacaaaaacataagt

SEQ ID NO: 243955 - DNA, 568 bp, Homo sapiens
  misc_feature (1)...(568): n = A,T,C or G
cagtagccctcttctcatagctccactaggcagtgctccagtagggactctgtgtaggggctccaaccccacatttcccttccacactgccctagcagaggttctccatgagggctccgtccctgacacaaaacttctgcctggacatccaggcatttccatacatcctctgaattctagggagtggttcccaagcctcagtgcttgacttctgtgcacctacaggctcaataccacatggaaactgctaaggttagaagcttgcaccgtctgaagccacaccccatctgtatctttgccccttttagccatgcctgggatgcagggcatcaagtcctgagattacacaaagcagcaaggccttgggctcagcccacaaaaccatttgttcctcctaggcyccctggcctgtgatgggagggacagctgtgaaggtctctgacatgtcctggagaatgtttcccattgtcttggcaattaacatgtggctcctcattacttatgcaaatttctgcagccagcttgaaattctcctcagaaaatggatntttctttctatcacattgtc

SEQ ID NO: 243956 - DNA, 608 bp, Homo sapiens
ggagttaggcacagtgactctatttgaagctctttctttggcaatgtatttcagagacatcttttgggtgtttttatacctgtgagaagaagggaggaatgagttaaaaaaaagtggctgagaaagtagaacataaaaaataggcagaataatcaaaaacracccacttaaaaaatggtaaaaatggaaaaataatacacatgtacattgtatattttctatttgtctgagtgttttaggatttattttgggttgagtttagatcaagtaaatattaagcaaactttgagactggtcttaaggcagcactttttcaaatctgctgttgattaatccatgtgcaaaattcaaataaaaattattttcagtgaaaattggttctactacagcaaacaattagtggctggttttgccagaagaagcaagtgtggattctaacactgcacaaatacctttctacatcccaggtggtatttgcttaattcatttatcaccttcattagaaccataccttgtctcacagggtaatgtcaaaacttgaatgtctcttgttctactatccctcacatattcacaaaggcaaggtgttgacataaataattaagaac

SEQ ID NO: 243957 - DNA, 608 bp, Homo sapiens
ggagttaggcacagtgactctatttgaagctctttctttggcaatgtatttcagagacatcttttgggtgtttttatacctgtgagaagaagggaggaatgagttaaaaaaaagtggctgagaaagtagaacataaaaaataggcagaataatcaaaaacaacccacttaaaaaatggtaaaaatggaaaaataatacacatgtacattgtatattttctatttgtctgagtgttttaggatttattttgggttgagtttagatcaagtaaatattaagcaaactttgagactggtcttaaggcagcactttttcaaatctgctgttgattaatccatgtgcaaaattcaaataaaaattattttcagtgaaaattggttctactacagcaaacaattagtggctggttttgccagaagaagcaagtgtggattctaacactgcacaaatacctttctacatcccaggtggtatttgcttaattcatttatcaccttcattagaaccataccttgtctcacagggtaatgtcaaaacttgaatgtstcttgttctactatccctcacatattcacaaaggcaaggtgttgacataaataattaagaac

SEQ ID NO: 243958 - DNA, 596 bp, Homo sapiens
agtagttgttttgtctctgaccttggagcagaatgggacagtagtttcactggtgctaaaacccatgaccttatccttattagcacatctctgtaaggagactagtgttaacatgaagctatcaatttttaacaactgtaacttatgtaaaatttggtaaactatatgcaggaaaccattcccatatggggggttaacaaatgatttttgatgagtactattattattgcccaattttaataaactgcagggaaagtttcaagagtccctgatataacaactattttactaagttaatgttttttcttctctactctatggtgcctgccaaaagtgtgagtaaaaaatctggattacgaggcatttattgggtaaacagcatttcatttttacacaaacgttgacattaattaagtcttcccaacatctgggatgtaggtaagtgttctgctaattttacagaggaggaaatgaaatcacagcggactggmagcttgccaaggtcactgaacaagttagtgtcaggactgggagtactactcaggaatttttggctgtgaatcttcttttcaacaaaagtaactcataaggaaaaa

SEQ ID NO: 243959 - DNA, 569 bp, Homo sapiens
catgatggaaggtcatcagcatcatagtaaagaggaaaaagagcaaactcgggcagatcaataatactggtgggtaacagtagagagctcaggctgggccttgagtaagtaacttttgagcacagattggtaaaacaataagaaagtgagtctcatagatayttcggagaagagagtctaataaaagaaaattcctagcgtgccaactctgaagcagaactgtggagtatatattctagaacagcatagatgcctgtgtggttggaatggagaatgggaagatgagatcagtgagagataacagcaaaatatgactggaaactagacttcaaagggtcctggagcagccttttgaggcccttgactttctgtctaggacagaaaaaaatggatcttagaatatttactaggtaaatgcgggttgtttttcaaagagatacacaaattcacatttccattgctaatgcatcagagttcgtttcactccatatcctcattcaaacatagtatgttcactcatttaaatattcgctgaaaaatagcaagtatggagtacaacctaatggttt

SEQ ID NO: 243960 - DNA, 432 bp, Homo sapiens
ccactgtcctcccactcctgatacaaacacagacatccttctaataagtaaacggtctgtatattgtrtatgagaattgcaccccatcccagaggtaacctaaatatggcaaacactcaataaaatatatacaaaatgagaccaactcattgctgtgaattttctaatcacagcagtccaatgactatataaagaggtgatcgcttccataatgaagcctgtattagtccattcttacattgctataaaaaatacctggacagtgtaatttataaagaaaagaagtttaattgtcctaaggttctatgggctgtgcaggaagtgtgattctggtatcttccaggctcctggggaggcctcaggaagcttccaatcagggcagaaatcaaagagggagcgaggcatctcacatgttgggagcaggagcaacag

SEQ ID NO: 243961 - DNA, 432 bp, Homo sapiens
ccactgtcctcccactcctgatacaaacacagacatccttctaataagtaaacggtctgtatattgtgtatgagaattgcaccccatcccagaggtaacctaaatatggcaaacactcaataaaatatatacaaaatgagaccaactcattgctgtgaattttctaatcacagcagtccaatgactatataaagaggtgatcgcttccatratgaagcctgtattagtccattcttacattgctataaaaaatacctggacagtgtaatttataaagaaaagaagtttaattgtcctaaggttctatgggctgtgcaggaagtgtgattctggtatcttccaggctcctggggaggcctcaggaagcttccaatcagggcagaaatcaaagagggagcgaggcatctcacatgttgggagcaggagcaacag

SEQ ID NO: 243962 - DNA, 590 bp, Homo sapiens
tttgacttttgattttaaataccccaggatgattggaatttgccttattcttattttcagtctgtcaaattaagtcatgtatcattagaagcaatactgttgtatgcgccagagaactggttttatgatctatttgtagtagaagggctgccttgtcattatcaaaggttactcttcagaaaagttgcttgccttattagctatgtattctaatagcataacgactataccaactttgttttgtttaatttttcatggtatatatttttccatcttcattttgggtgttttcttcgtgttcatttgagaatgtgttaagtgtaatacagttttgttttttaacaaaatcagtcagtctttrtgctttaatttcagcactttagttgcctttaatttaatttcagacacatttgtgtttgctttatgaatatattattgttatttggctcatctatgttctttctccctgttttatcttactttatcttattttattccacatttccatctatgaggtgagtagtcatgcatttctacaccgatttgagtgtttatgcatttttgacttattatggtcaagtagaaattac

SEQ ID NO: 243963 - DNA, 465 bp, Homo sapiens
gttatatgtaacataactgtaatataagcaaatattaaaaatccctttctgcattatactttttttttacttaacaatataatctagagatagcttcataatggtcttacatacaaatgtgcactcacacatatatatacctatatgtacagatatacatatatccacatgtgcatacatgtattacacattccacaatatttgtaattctttgaacctttggaatttattgagactcatttttagggtgaaataaattatccatttttaagttgttttatatgtgctggtaaataatctccactctttttttgggagagtatagtatacagtattagtttaatgcatgcattttcaagtttattaaggtatttacatatttgatatttctgaaaatagaatactattggtttattttttagrctattttgttaggttcatataatttgttgatattgtgttctc

SEQ ID NO: 243964 - DNA, 494 bp, Homo sapiens
ggacagttgttgcatctggcctcttttacaaccaagaaagagacacaacacctagtgaaccaatttggatttgagcrgcaacacattgctcatttgggtgcactactctggcccacttaccaattgacctaaaaagctgctaattttgagtggggcccagaacaaggggaggctctgcagcaggtttaggttactgtggcttctctgccacttgaaccatgtcattcatgagatccagtggtgcttgaagtgtcagaggcaggtagggatgcagttgacaggcccccataggtggataacactgtgggtctttaggagtttgaagcaatgtcctgcctttatccatagataactattttccttttgagagatagctcttggtctgctactgggccttagtagaaactgaacacttgaccatgggccaccaagttaccctatgacctgagctgcccatcatgaatttggtgttctgtgactcatcaagtcataaa

SEQ ID NO: 243965 - DNA, 519 bp, Homo sapiens
tcaagaccagcctagccaacatggcgaaaccccttctctactawagacacaaaaattagctgggcatggtggtgcacacctgtagtcccagctacagcccaaccctcaggaggctaaggcaggagaattgcttgaacctaggagttgaaagttgcagtgagactagatcgtgccactgcactccagcctgggtgacagagcaagattctgtctcaaaaaacaaagtttaatgtatcctgttaatactaatttggcccaattctttacaaaataatacgtaggacattttatgatcaaaatatatttgttgtctcccttcctcatattaacaagcagtaaatagttgcatcattgaaatcacttttttcttgtccccaaatttgtcctttgtccaccaaaaaaggacactgctagacacttcagtccatcctgacacaacacattattaataacttgataaacatgtggctttcccccactagattataaactctgtgaagtcagaatgcttgtctatct

SEQ ID NO: 243966 - DNA, 519 bp, Homo sapiens
tcaagaccagcctagccaacatggcgaaaccccttctctactaaaracacaaaaattagctgggcatggtggtgcacacctgtagtcccagctacagcccaaccctcaggaggctaaggcaggagaattgcttgaacctaggagttgaaagttgcagtgagactagatcgtgccactgcactccagcctgggtgacagagcaagattctgtctcaaaaaacaaagtttaatgtatcctgttaatactaatttggcccaattctttacaaaataatacgtaggacattttatgatcaaaatatatttgttgtctcccttcctcatattaacaagcagtaaatagttgcatcattgaaatcacttttttcttgtccccaaatttgtcctttgtccaccaaaaaaggacactgctagacacttcagtccatcctgacacaacacattattaataacttgataaacatgtggctttcccccactagattataaactctgtgaagtcagaatgcttgtctatct

SEQ ID NO: 243967 - DNA, 519 bp, Homo sapiens
tcaagaccagcctagccaacatggcgaaaccccttctctactaaagacacaaaaattagctgggcatggtggtgcacacctgtagtcccagctacagcccaaccctcrggaggctaaggcaggagaattgcttgaacctaggagttgaaagttgcagtgagactagatcgtgccactgcactccagcctgggtgacagagcaagattctgtctcaaaaaacaaagtttaatgtatcctgttaatactaatttggcccaattctttacaaaataatacgtaggacattttatgatcaaaatatatttgttgtctcccttcctcatattaacaagcagtaaatagttgcatcattgaaatcacttttttcttgtccccaaatttgtcctttgtccaccaaaaaaggacactgctagacacttcagtccatcctgacacaacacattattaataacttgataaacatgtggctttcccccactagattataaactctgtgaagtcagaatgcttgtctatct

SEQ ID NO: 243968 - DNA, 626 bp, Homo sapiens
  misc_feature (1)...(626): n = A,T,C or G
tctttgacgggttattaaacatctttgccatttaggatcatcagtgtaagataaaaataatacctcttcttcgagtttctgggtaaataaatgaattaatataaatatataaattatttagaatgtatctggcatatagtaagctatataagtgttagctattgttgtaatagtgaaaataatgctgctaytgctgatgatgatgacagagaccaggaagcagtgaagagaagatactaggagccctaagatttttgcctgggtacatagacaactaagtcaaggaaaaaggaattgacttttactaagtgcctatgcgctcagtaataagccattagagacgttagagcctcaattaccaagaagggacagaaaccttttggatgacagaatgttaggaaatttctggaccttgtgatttctgacaagacatgaaagcatagtcatgagcatctncagcttangacaaaagcagatgttctcaagctgacacaaaggaaatgcaaggagaaaactcctcctagaacaagattttgctacttattccctcacaattatgcccctttccaagttattaaccccttttcacatgacaggaggtggaggaggcactgctaagagaggtg

SEQ ID NO: 243969 - DNA, 564 bp, Homo sapiens
tgtcatgttcatctactattttgtctgatacatagtaggtcctcaataaacatttgttggattgaatatatttacattatgaggttcattttagaaaaggttaaggaaaatgcaatagccactagtaattacagaagttagcactgatatgaaaacaataagacaagcttttgttttttcacaggcatgaaagtccaaagtaaatagactatcttttctcttcttggatccatctacatacatgtaataagaccaactatgtaccaggaactatgggattctgttgccttcatctcttttctctcacaggggctctccctgctccctgccaaggtggtggtgcctgtgtggtagaagggaagagcgagttggggctgcacaggcacaatctggaaatgaccagaataaaaatgccccagcccaaccagcaagcaggactccccaatcagatttttatttctaggcaatgctgctagggaaaaactctttcccctggagaaatcaaacaaaaacacagcttggratgattcatacaaaggttctcaaacttagctgtacttttta

SEQ ID NO: 243970 - DNA, 568 bp, Homo sapiens
attttataaaatgtaaaaaaaaaaaaaaaaaaaaacgaaatctactcgcttgtaaaactgggaaaggtcaggggtaatgtgggcctcaggcaccatgaattaaatgaacaactatggtgttatttgaattcattcacctcctgactgtttttctctgcagggcagctgacaacctcggcaaggcagaagtcaccatgaaagcttccttttctcaagtatttaccattcaaaactttagggaaattcattaacataaattggcaatgatattagatgatttaattttgaaggcaaataaaaggtttttggaggatactgttgcattgctgctaggaatataaattggtctaaccactttgtaaaactattaggcagtatttrctaaagcaaaatatacatgtggtctatggcccagcaattccacttctgggtatgttcccaaaagaactgaatgcttgtgtttataaaaagatatgtgcaagaatagtcatagcagcattatacataacagtctccaaatggaaacgaaccaattatctactaataataaaatgaataaattgtgtta

SEQ ID NO: 243971 - DNA, 567 bp, Homo sapiens
acacacacacacccacacagcctgttatggatgtgtacagttgatccttgaacaacgtgggtttgaactgcatgggtctacttatatgcgggttttcttctccctctggcacccctgagacagcaagaccaacacttcctcctctgctcctcctcctcagccttcttgtcatgaagatcatgaggatgaagacctttactattcattacgtggatctacttccacttaatgaatagtaaatatatttttctcttatgattttctcagtaacattgtattttctgtagcttattttattgtaagaatatagtgtgtaatgcataaaacatacaaaatatgtgttaattgactatgttatcagtaaggcttccagtcaaagtaggctatcagtagttaagtttttgggaagtcaaaagttataccttgattttcaatggtgcaayggtattggcatccctaactcccacatggttcgagggccaagtgtatattcaatttctatatattcatatatatgtggttttgcatctctgaaaattctgactgatacagaccatttagttcttc

SEQ ID NO: 243972 - DNA, 615 bp, Homo sapiens
tactcacctgtgtccaatttccaattaatttgtggtctttcaggacttactttaagggaaagatattatttttctcttcttgttggaaactttctggagcatgtgggtgtagtgactggtattgctctgggttacagagcagcttggatgagcatctgtgcagaaaccactatggtaggctatatttaaaaactgtttatttcaaatgttcaaaaaataaaagggctgggtctctagcaagaagcagccttgaatttgctgcagaaagaagatagagattataagacgtagagggtggttcaatcaatccatttaatattagctgttcactaaaaatgagtgaggaggagagagaaaaaaactgcaacttcttgaatgataattaaacctgttaatcatattctgattagaaaartatataggaataaacatgtgcttcatattcctgtgggttttctgttctggccatgaaaaataaaagagaatcaaactgccaagaggctttttgaatggggttggataacaaaaattcccccaaaaaacaaaaaactttctgcaaaatcttagtggggcaagcacatgcaaaaaactattttgttttttctccttgaatta

SEQ ID NO: 243973 - DNA, 602 bp, Homo sapiens
agggtggaagcactggaggtagacagatgcattaggaggttaccayagaccaggttcgacatgatggtagactgaggtggtaagaagtggttaggttcgaaatgtgttctgaaggtagaccagatgggatttgcgtgtaaattagatgtggtgttatcaaagttatttcactctcatctgcgtacttgcaattggcagttgtgaccctgggaactgactcaagaggtaaatttcagggggtgcatcctcaatctcacatcttcattttgggctatgtggtcctttcatttctgagggctgtcccctccaggtgggtgcaactctgaggccctgtcttctgttaagcattgctgcctcccatgtgtgggaagctgtggttattaagatatacatcgcacattcactgccctcatggaggtcttaatcctacaagagaggcaatattacaatgtggcatgaaatgctgtaatagaggtgaatacttctccgaaggaatcaagatgtgagtgacatcttctaacttaattctaacttgggtcagaagactaaaaatcagagtttgctagaggaagttgcaggggacctgagctttaaaagagacc

SEQ ID NO: 243974 - DNA, 522 bp, Homo sapiens
aatgtgttggttttaaaatcttacaactgccttttcaacaaactgctgttytcatttagcaaacccatggagatggataaagtagaatcttcccaacataatgactgttcttcagaataatttcatgaaaacagacctagcacagaccaattattttcagtcttgtctgaaaagcaagtgaagggtctgaagcatgccttcagaaaccagtcccagtgagttgagttggcatgaatttgattctctttttatttctgattatgaaacctacttatgacaatacacaggaaaggttttggagaaagagtcatgggctgggagaagttggtgagtgaataaagaaaacttatcgtgtgtaacctgtggatctgaaattggatagtaatacaaacaaaacaaaatcatgataagtgaaaactccacaattgcagagttcagttagaaccagttgatctgcagagagattgagatctactttcttcctcatttgagagaggatccaaagtgcatcttcaaaacttc

SEQ ID NO: 243975 - DNA, 522 bp, Homo sapiens
aatgtgttggttttaaaatcttacaactgccttttcaacaaactgctgttttcatttagcaaacccatggagatggataaagtagaatcttcccaacataatgactgttcttcagaataatttcatgaaaacagacctagcacagaccaattattttcagtcttgtctgaaaagcaagtgaagggtctgaagcatgccttcagaaaccagtcccagtgagttgagttggcatgaatktgattctctttttatttctgattatgaaacctacttatgacaatacacaggaaaggttttggagaaagagtcatgggctgggagaagttggtgagtgaataaagaaaacttatcgtgtgtaacctgtggatctgaaattggatagtaatacaaacaaaacaaaatcatgataagtgaaaactccacaattgcagagttcagttagaaccagttgatctgcagagagattgagatctactttcttcctcatttgagagaggatccaaagtgcatcttcaaaacttc

SEQ ID NO: 243976 - DNA, 522 bp, Homo sapiens
aatgtgttggttttaaaatcttacaactgccttttcaacaaactgctgttttcatttagcaaacccatggagatggataaagtagaatcttcccaacataatgactgttcttcagaataatttcatgaaaacagacctagcacagaccaattattttcagtcttgtctgaaaagcaagtgaagggtctgaagcatgccttcagaaaccagtcccagtgagttgagttggcatgaatttgattctctttttatttctgattatgaaacctacttatgacaatacacaggaaaggttttggagaaagagtcatgggctgggagaagttggtgagtgaataaagaaaacttatcgtgtgtaacctgtggatctgaaattggatagtratacaaacaaaacaaaatcatgataagtgaaaactccacaattgcagagttcagttagaaccagttgatctgcagagagattgagatctactttcttcctcatttgagagaggatccaaagtgcatcttcaaaacttc

SEQ ID NO: 243977 - DNA, 522 bp, Homo sapiens
aatgtgttggttttaaaatcttacaactgccttttcaacaaactgctgttttcatttagcaaacccatggagatggataaagtagaatcttcccaacataatgactgttcttcagaataatttcatgaaaacagacctagcacagaccaattattttcagtcttgtctgaaaagcaagtgaagggtctgaagcatgccttcagaaaccagtcccagtgagttgagttggcatgaatttgattctctttttatttctgattatgaaacctacttatgacaatacacaggaaaggttttggagaaagagtcatgggctgggagaagttggtgagtgaataaagaaaacttatcgtgtgtaacctgtggatctgaaattggatagtaatacaaacamaacaaaatcatgataagtgaaaactccacaattgcagagttcagttagaaccagttgatctgcagagagattgagatctactttcttcctcatttgagagaggatccaaagtgcatcttcaaaacttc

SEQ ID NO: 243978 - DNA, 601 bp, Homo sapiens
cagatttttggggtataagttctgaactcaccacttcttaaaggaccttgggcaagttatcccttttgtgctacagttttctcacttgggatagattttacacacctcaaagaataggtgagcattaaataagagcatgggaataaaattactaagcacagagcttggcacgtaytaagctcagtaagtgctggtggttaaatatcctagcttctggtacattacataaattttaaaacattagcttcatttcccttcctttctgccttgaatccaacagtctgcttctcttaggattacattgctagtgataacactaattattgtaagctaatgaaatgattttatgtccaatatgcatcttttatattttttggtttatatcaccaattaaacacaatttttttctgtgacaaaaattgtcatatttccccagtacgagcaacagaattcttgactgggacaagagagtctaagaggctcttccacacgttaatatttaaaataatacattatattggaatctttagggtatgggacagtcaagggctcttttcattagaattacttggaaatacagcttgacattaatttaaacgag

SEQ ID NO: 243979 - DNA, 601 bp, Homo sapiens
cagatttttggggtataagttctgaactcaccacttcttaaaggaccttgggcaagttatcccttttgtgctacagttttctcacttgggatagattttacacacctcaaagaataggtgagcattaaataagagcatgggaataaaattactaagcacagagcttggcacgtactaagctcagtaagtgctggtggttaaatatcctagcttctggtacattacataaattttaaaacattagsttcatttcccttcctttctgccttgaatccaacagtctgcttctcttaggattacattgctagtgataacactaattattgtaagctaatgaaatgattttatgtccaatatgcatcttttatattttttggtttatatcaccaattaaacacaatttttttctgtgacaaaaattgtcatatttccccagtacgagcaacagaattcttgactgggacaagagagtctaagaggctcttccacacgttaatatttaaaataatacattatattggaatctttagggtatgggacagtcaagggctcttttcattagaattacttggaaatacagcttgacattaatttaaacgag

SEQ ID NO: 243980 - DNA, 600 bp, Homo sapiens
cactgttctgtagtgccaaataagtaacaagccatcatttccagaagaaatcaaggctgtaagagctacaagggatactagaaaggatgctaggctgggtgttgggaacccttgatcctgatccctgatttggcactaacttgctatgaaacctagagttctgactttgctatgtttcaaatacatttgacatctctggagctcagtactctcacctgaaaaatgttttttgactctaaaaaatgtcccttaacctttctatatgaagagatactgcttccgggaaacaaaaagagtcagggggaggctggattgatgcaaggctcctgttccttagagagcaactggtttcttggccctctcctgggtgcttctttagacccacacytctggcacctgcctcagctccaccctgctctcatggatccagaatataacaatcctaaactccaatcctagctctttcccttgttactggcaaaaacattgacaactttctaggctctctttaatttcaatttcctcctgtgtacaacagaactaataatatgtaactcatggtgtttctgttaaatatataatgtgtcagatccatacatt

SEQ ID NO: 243981 - DNA, 600 bp, Homo sapiens
cactgttctgtagtgccaaataagtaacaagccatcatttccagaagaaatcaaggctgtaagagctacaagggatactagaaaggatgctaggctgggtgttgggaacccttgatcctgatccctgatttggcactaacttgctatgaaacctagagttctgactttgctatgtttcaaatacatttgacatctctggagctcagtactctcacctgaaaaatgttttttgactctaaaaaatgtcccttaacctttctatatgaagagatactgcttccgggaaacaaaaagagtcagggggaggctggattgatgcaaggctcctgttccttagagagcaactggtttcttggccctctcctgggtgcttctttagacccacacctctggcacctgcctcagctccaccctgctctcatggatccagaatataacaatcctaaactccaatcctagctctttcccttgttactggcaaaaacwttgacaactttctaggctctctttaatttcaatttcctcctgtgtacaacagaactaataatatgtaactcatggtgtttctgttaaatatataatgtgtcagatccatacatt

SEQ ID NO: 243982 - DNA, 612 bp, Homo sapiens
tttgtgccaaagacacagcttttgttttaactaagaattgggaaaatcattgaaatgaacattttatatataatgactgttcaagcaagaaggactattcctcttctcactctatggtatcagctgtcattttctggcaaggctgagtactgggaaaccatgcttgagaagtaaagcacttacttgtaagagataactgaatcactgttgccttagcttttagttttattctgtaaatattaaacaggagacactcagagttcctcgattttctagcaactgtttcataactgaaagcattgattatgttgtcatggrcttgatatgcttgtgcatgtatttgatgatcatattttcatatagttttattaggttcattgattgcaggcagtgggtcaaaaatatgaatggaaaatgcaggtaattttttcaaatagtttatgctaatataataattgaattaccatctggagatagtgggaatttccctttcagcattttcattgtcaatttagttttcaatttaatggctataaatgttgctaaatactggagtcttgaaaaattgttcatgctccttctgatctcaggaccttcacacatgctttccct

SEQ ID NO: 243983 - DNA, 402 bp, Homo sapiens
tatttgtgtaaaggagaattcttatttttaattctatttcagtgcttctcagctttagtgtaagatgaaaacttttgtacttttccagagagctttatgcctgcaaaaccggtrctgggtggtagcaatgcatgcggcaatgatgaggagttgtgggatagtaacgtcctaggtgctgatttcagaagttgtcacagagggcagcacttgcctgcctggggaataacacacaacaagtacaaagtagcagctcaaagttctattatgggatagatacttcaggatggatccacaagcaatgcctcaactgctgctggaagagcctgtcttgttattttcagtggttgatttagcctatggtccacagaatactagaaggactggaagtgttggaggggccct

SEQ ID NO: 243984 - DNA, 585 bp, Homo sapiens
tggtggcaatagcaagagaacaagaattagaaatgaagctagaagatgtgactgaattgctgcaatctcataatcaaacttaaatgtatgagaatgtgctttttataaatgagcaaataaagtgttttcttgtgagagaatatactcctaaaaaagatactatgaacattattgaaatgccaataaaggatttagaatattacataaacttagttaataaattggcagcaggatttgagaggattgactctaactttgaaagaagttctagtgtgggaaaaatgctatccaacaatatcacatgctatagagaaacctttggtaaaaaaaaaaaaatcaatgtggcaaacgtcattattgttttattttaaaaaattaccagctgagagatggagcaagatggcagaatgcaatgctcccccaatcctcccccctgyaaagacatcaatttaacaactgtctacacaggataaccactttcattatggccaaaaatccagtgagccctcatagtacctgattacctgattttatttctgtattgctgaaagaggcactgaagaggttaaaaaaaaaataaacagc

SEQ ID NO: 243985 - DNA, 598 bp, Homo sapiens
gaagggggataatgccccggtaactgtggtaaataaattttgtatggaaactgggagaggcagaccggggaattcaagcagtgcctccctccaaaaagcagagagaaacatcaaataaggtttacctactcgtttttcagggacttaggaactacagaatttatgtaactgaaaaaaagatgctacttgttagcaaaactgtcttcaatattggttttaccaatggcaaaaaccgtgattatttttgcaccaaccaaatactatgcgggaaacataaaatcmtgagtatatatgagagaaaggaaaatatttaagtaagaatggtaatttctagatttggctaggtatgatataatgaatgcatggaatgaagttgctaacaacaaatttgcccctatgaaacttttttttttaaccttatgcggccttttagccaaatcgaatttatcttattttatttttgtttatactacttcatggaacaaaataaataaatgtcttattaaatgagggtttcatttttttacattgtctctttgcatagccttttgcaaatgcttgattttttcgagagaacacatgagtagaatgtaaattc

SEQ ID NO: 243986 - DNA, 585 bp, Homo sapiens
gagctacatcgaataatccctttattggatttgtattttagcttaaatctcacaagtaacaatcacactttttaaaaaaagtatccacattttatatacttttttaaaaamgtatccacattttatatacaatgcaagtaatgaagctagttcaaattcatttcttaagaaacaaaaatatttcacactttcgacgtattttgattacccatttgaggcatgacttaactttgttttgagtaaacatttaatttactggaggaactccaaagctatgatattataaaaccatttacccaaatagttgctctaatgtttttaatgtgtcgatataacaatgagatatttatagagattctactttttatattgtttaatatgaaccaaatgtcaatttcttcagctcttattgaataatgatgtataatctaggggacttattttatttacttataagagtcttcctttacaaatctttttaaaaaacatacatccatgctgtaatcatagagtaatagaatatcactctcacatcttataaataataatgacagccactaaaactagtgcataatatcaaataaa

SEQ ID NO: 243987 - DNA, 585 bp, Homo sapiens
gagctacatcgaataatccctttattggatttgtattttagcttaaatctcacaagtaacaatcacactttttaaaaaaagtatccacattttatatacttttttaaaaaagtatccacattttatatacaatgcaagtaatgaagctagttcaaattcatttcttaagaaacmaaaatatttcacactttcgacgtattttgattacccatttgaggcatgacttaactttgttttgagtaaacatttaatttactggaggaactccaaagctatgatattataaaaccatttacccaaatagttgctctaatgtttttaatgtgtcgatataacaatgagatatttatagagattctactttttatattgtttaatatgaaccaaatgtcaatttcttcagctcttattgaataatgatgtataatctaggggacttattttatttacttataagagtcttcctttacaaatctttttaaaaaacatacatccatgctgtaatcatagagtaatagaatatcactctcacatcttataaataataatgacagccactaaaactagtgcataatatcaaataaa

SEQ ID NO: 243988 - DNA, 585 bp, Homo sapiens
gagctacatcgaataatccctttattggatttgtattttagcttaaatctcacaagtaacaatcacactttttaaaaaaagtatccacattttatatacttttttaaaaaagtatccacattttatatacaatgcaagtaatgaagctagttcaaattcatttcttaagaaacaaaaatatttcacactttcgacgtattttgatyacccatttgaggcatgacttaactttgttttgagtaaacatttaatttactggaggaactccaaagctatgatattataaaaccatttacccaaatagttgctctaatgtttttaatgtgtcgatataacaatgagatatttatagagattctactttttatattgtttaatatgaaccaaatgtcaatttcttcagctcttattgaataatgatgtataatctaggggacttattttatttacttataagagtcttcctttacaaatctttttaaaaaacatacatccatgctgtaatcatagagtaatagaatatcactctcacatcttataaataataatgacagccactaaaactagtgcataatatcaaataaa

SEQ ID NO: 243989 - DNA, 585 bp, Homo sapiens
gagctacatcgaataatccctttattggatttgtattttagcttaaatctcacaagtaacaatcacactttttaaaaaaagtatccacattttatatacttttttaaaaaagtatccacattttatatacaatgcaagtaatgaagctagttcaaattcatttcttaagaaacaaaaatatttcacactttcgacgtattttgattacccatttgaggcatgacttaactttgttttgagtaaacatttaatttactggaggaactccaaagctatgatattataaaaccatttacccaaatagttgctctaatgtttttaatgtgtcgatataacaatgagatatttatagagattctactttttatattgtttaatatgaaccaaatgtcaatttcttcagctcttattgaataatgatgtataatctaggggacttattttatttacttataagagtcttcctttacaaatctttttaaaaaacrtacatccatgctgtaatcatagagtaatagaatatcactctcacatcttataaataataatgacagccactaaaactagtgcataatatcaaataaa

SEQ ID NO: 243990 - DNA, 536 bp, Homo sapiens
gtcgatctatattttgtggaaatgtctgggagaatatagcctgtagtgggatttttcaaccatctacctctgttccaaatgcacttttccattttatttcctagagtcccacaaactatttcatttgaagaaagaattctgctaccataaaaaaatccattgacaattcatttttgcatttgttgatcatgctcactcttcaaggaagggccagttaattaattcagtgaaacttttctgatcttctatgttagatgaagacacccttgctctgaactgccagagacataactcttaaagtatttactatgttccagctagcaatttagaacatttcaattcatatgcagatactccctaaggacataatctttatctattttctatcagctataaggctgaccagccataaatactactggagtagtaaaaatgaatgaataaaatgaataaatggtcacaaaartatctcatagctctgaaacttcatatatattaatctgattttcacactagtaactatttttcctcagagc

SEQ ID NO: 243991 - DNA, 448 bp, Homo sapiens
ggcaaacatctgagccaaatgttatgcagcttattaaagtaatatttatgaactgattgtgggataacagcagttaattactgcagctcacattgtaaaaaatatcaaagtctaagctttctataaatcataataatgaattttattcactyattcattcactctcttgcttactcaatttaaaaagactgttttctataatgaaatgtgctctcttaacattaaaatgagcgattgtaatctagggttacctcatgcttatcaaaagcactatttaactctttaaatcatctttctatttcaaaaggtctgcttttttgccagactttaaggtctgcttttcattcatttattttttcattcactcattcatcaaacttctgttgaataccaactttaagcaaggcactatttgagttgagataaaagagtaatacatttgtcaaga

SEQ ID NO: 243992 - DNA, 622 bp, Homo sapiens
ctcctaattatacagtatatcagctaagagatatgagatgacaayttaaaggctttctttcaaattatgacttccatttatttttaagcaatattatttattatagaatcgcagacattcacagcactttgtacttcttagaatggagggagagtcccaaagaccttaacatcagaaaactttaactattatctatcagtcaagcaaatggaagttctagtaggtggaaaaggagtataagacatggcaaaattagagaatagtgactacacaggaaaaaaaaatggactataaagacaatttgaaagatgtgaaagccaatatttcatgtatgttaagaaaaaaggatgaaaatgttttctcagaaaaagaagaaagtgtagtagatggcaaatagagcagtcaggaaatagattgcagagcatatggtaatatatacagagaaatggaaagtttaaccattggtttccaagtacagagttcactattttggtcttttcattctgattatctcatttaccaacatgatactttttagtgtcctttatttggaaataatagttttaattcagtatttctagacctttttaatgttataaatgttagaaatatgttaattaac

SEQ ID NO: 243993 - DNA, 622 bp, Homo sapiens
ctcctaattatacagtatatcagctaagagatatgagatgacaatttaaaggctttctttcaaattatgacttccatttatttttaagcaatattatttattatagaatcgcagacattcacagcactttgtacttcttagaatggagggagagtcccaaagaccttaacatcagaaaactttaactattatctatcagtcaagcaaatggaagttctagtaggtggaaaaggagtataagacatggcaaaattagagaatagtgactacacaggaaaaaaaaatggactataaagacaatttgaaagatgtgaaagccaatatttcatgtatgytaagaaaaaaggatgaaaatgttttctcagaaaaagaagaaagtgtagtagatggcaaatagagcagtcaggaaatagattgcagagcatatggtaatatatacagagaaatggaaagtttaaccattggtttccaagtacagagttcactattttggtcttttcattctgattatctcatttaccaacatgatactttttagtgtcctttatttggaaataatagttttaattcagtatttctagacctttttaatgttataaatgttagaaatatgttaattaac

SEQ ID NO: 243994 - DNA, 622 bp, Homo sapiens
ctcctaattatacagtatatcagctaagagatatgagatgacaatttaaaggctttctttcaaattatgacttccatttatttttaagcaatattatttattatagaatcgcagacattcacagcactttgtacttcttagaatggagggagagtcccaaagaccttaacatcagaaaactttaactattatctatcagtcaagcaaatggaagttctagtaggtggaaaaggagtataagacatggcaaaattagagaatagtgactacacaggaaaaaaaaatggactataaagacaatttgaaagatgtgaaagccaatatttcatgtatgttaagraaaaaggatgaaaatgttttctcagaaaaagaagaaagtgtagtagatggcaaatagagcagtcaggaaatagattgcagagcatatggtaatatatacagagaaatggaaagtttaaccattggtttccaagtacagagttcactattttggtcttttcattctgattatctcatttaccaacatgatactttttagtgtcctttatttggaaataatagttttaattcagtatttctagacctttttaatgttataaatgttagaaatatgttaattaac

SEQ ID NO: 243995 - DNA, 587 bp, Homo sapiens
tcctttgtgttttgctccaacccagaacaagcttctctattctggctgtagtcttgggaatctggcagtttactgtctgctgaggtcctatagctgtcatcccacctccatctcccccaaccagtgaatttcccttcccccaccccaacagcctaaatctgatccatgggatgtactcacacattatttgcccagcaaattctagcagtgcagctcgatgccatcactatagaagctctcttgttcttttccatcaaagccaccagacacagcctgtctcttaaccccaagaattctcagctgggagtcagacacttgtccactctgtcctccccgacccccaaccacacaggacatatattttgccctctgagtagtcccttgaagtcccttttctcccttcccctctgaattgatgttgggggccaagagggcagtgagtagagaggcaatgccttggatgactctccaaagagctcctccctggaaatccactcatttcccttctataacttcagtgtgagtgagtcaggtaattgacttyccagttatagcttttacagttttgtatcttagccttgtacccc

SEQ ID NO: 243996 - DNA, 414 bp, Homo sapiens
gccacctgagtgaagtttccagtagatcaggtctattcaagaagtgacttaaacttaactcaaagattccagattgaagcatatagtagaataagcctaagttctttgaggaaagcctaaattcaccttccttagtctaacaagctcctggagttsagggcagagtgaattacgtctacccaatcactccacaatcccattttaaaaagcagcgccccaaagaaaagctgtctttttttttccaattgatgaatcctttgatagctaactttaaaatgcttttcctatttgatatgatttcttccaatcctgtcccatcgcaactgcatattcaggaggtaaaaagaagcaaatgtcaatgctgaattgatctacaaactccaccttaagaaatacttctctaccacagaattc

SEQ ID NO: 243997 - DNA, 543 bp, Homo sapiens
ggcagtaaacatttattagtaatgcacaaaactagtttgtggagttttatgagtggcttgacttctggttaatggcatgaaacctacaaaaagagagcaaaagtagagaaaaaattatattcacccaaacaggggaatggccacaactccaaattttaaaatgtaaaacgcacctgcaaaatgctatgaattattgacccatatgtaatatgctgacttttaacacatgcctcttcagatctcaagatttccccccaaataagtgtcatggtcattcgaagcatagtcaacctttctttctttctttctttctttttttttaagagagcagagattaggggaattgaatgggtcttggaagaagtgaagactttgccatcagagacccagttttgcattatgaggcatcagaagtrgagccttgggaaaagtcatacggacatgtcattttgttttgtctatagcggccttccagccatttcgtagacatttcggagtgaaaagggtattagagacaatgattgccagattgtaacacaaaaa

SEQ ID NO: 243998 - DNA, 497 bp, Homo sapiens
tactaagccctccaggtgattctgatgctggctaaaatttgggaaccactgccttagaaggtcatttttttttttttcgagacgtagtttcgctcytgttgcccaggctggagtgcgatggcactatctcagctcactgcaacctccgcctcccaggttcaagtgagtctcctgcctcagcctcccgagtagctgggattacaggcgtgtgccaccacgcccagctaattttgtatttttagtagagacggggtttctccatgttggtcagactggtctcgaactcccatcaggtggtccgcttgctcaccctcccaaagtgctgggatcacaggtatgagccactgtgcctagccagaaggtaatttttttaatgtaaataaaaataagacttccatgggtaggaatagttatctgctcctacagagctggcccagaggtatgcagaataaacccaaaaacactctaatgggaggactagttgggaacaacatagc

SEQ ID NO: 243999 - DNA, 497 bp, Homo sapiens
tactaagccctccaggtgattctgatgctggctaaaatttgggaaccactgccttagaaggtcatttttttttttttcgagacgtagtttcgctcttgttgcccaggctggagtgcgatggcactatctcagctcactgcaacctccgcctcccaggttcaagtgaktctcctgcctcagcctcccgagtagctgggattacaggcgtgtgccaccacgcccagctaattttgtatttttagtagagacggggtttctccatgttggtcagactggtctcgaactcccatcaggtggtccgcttgctcaccctcccaaagtgctgggatcacaggtatgagccactgtgcctagccagaaggtaatttttttaatgtaaataaaaataagacttccatgggtaggaatagttatctgctcctacagagctggcccagaggtatgcagaataaacccaaaaacactctaatgggaggactagttgggaacaacatagc

SEQ ID NO: 244000 - DNA, 550 bp, Homo sapiens
gttttggtatatgcaacaagaaataattttatatgggttgagacctagtctgaagaatatttgcaattactaagtctgactttctcatgtttgagtcaatcctaattagatccctactggcatggctggatcttagaaagaaataagccagtgaaagataaaatctacttgtgaggttacagccttagcagagaagatccaggaaatamctagtccagctgaaggacagtggagacaggaggggctacataatgcgaacctgaggcctggttattaaccaggctcttgctgtttggtgtaacatacatgctattgaattatgccctgactcaaactcccctcctctttctctcctaacatggacttttggggaccttgctgctggtccattgtctaggaggagccattaatacagtatctgctgttagcctaattcgtctggttggaaagaatgcctaaaccttgaaagtattccattaaggagtttggattttatcccaaggacagtagaaaacattgaatggtcttaagaagaggaatgacaccatca

SEQ ID NO: 244001 - DNA, 606 bp, Homo sapiens
gctggtcagtggagcagtcagaacacacacaacatttatccattaagtttgccktcttatatgggtgcaattcgtggcaccccaaacaatgacaaagtaacttcaaagatcactgatcacagatcaccataacagatataataataatgaaaaaattttaaatattgcaagaattaccaaagtgtgacacagagacacaaaatgagcacaacctgttgaaaaaatgataccgatagacttgctcaacacaaggttgctacaaaccttcaattcgtttaaaaaaaaaaaaaaaaaacccagccgggtgcagtgactcatgcctatagtctcagcactttgggaggccaaggggggtggatcacttgaggtcaggagtttgataccagcctggccaacatagagaaaccctgtctctactaaaaatacaaaaattagctgggtgtggtggtgtgcctgtaatcccagctactggaaaggctgaggtgggagaatcacttgaacctgggaggaggaggttgcagtgagctaatattgtgccactgcactccagcctaggtgacagagtgggactctgtcttaaaaaaaaaaaagaaaaaaaccaacaaa

SEQ ID NO: 244002 - DNA, 606 bp, Homo sapiens
gctggtcagtggagcagtcagaacacacacaacatttatccattaagtttgccttcttatatgggtgcaattcgtggcaccccaaacaatgacaaagtaacttcaaagatcactgatcacagatcaccataacagatataataataatgaaaaaattttaaatattgcaagaattaccaaagtgtgacacagagacacaaaatgagcacaacctgttgaaaaaatgataccgatagacttgctcaacacaaggttgctacaaaccttcaattcgtttaaaaaaaaaaaaaaaaaacccagccgggtgcagtgactcatgcctrtagtctcagcactttgggaggccaaggggggtggatcacttgaggtcaggagtttgataccagcctggccaacatagagaaaccctgtctctactaaaaatacaaaaattagctgggtgtggtggtgtgcctgtaatcccagctactggaaaggctgaggtgggagaatcacttgaacctgggaggaggaggttgcagtgagctaatattgtgccactgcactccagcctaggtgacagagtgggactctgtcttaaaaaaaaaaaagaaaaaaaccaacaaa

SEQ ID NO: 244003 - DNA, 591 bp, Homo sapiens
gaattctccatacataaaatccattctagatgtattataaaataaaacataaaagatgaaactttaaaaatgcgaagtgaaatgtggagaatgtctttctgaccttgggataagaaagaatgtcttaagacaaaacacactataaaagaaaagattaacattaaaaatttctcttcatccaaagatactacaaagaaagagaaaatacaaatcacattgtaggagtggagaatgatacaagcackttgaaaaacaatttggttattcttattagatgaacatttgtttatcctgtggtctatcagttccacatctagttatggatactcttgcttctgtgcactaggaggcaaggacaagaacattcaagcagcactgttggtaaaagcaaatagctggcaacctactaccataataaggattagacttatttagagttgctccacagagcctaacatagttcagtaaaaggaatcttcaggaaagcaggttttcttttagtgaaaagaactttttaacattcaaaaccatccaaaagcttagtaaactgcttcccacggaaagagttcccttaactggaagtgatcaagt

SEQ ID NO: 244004 - DNA, 591 bp, Homo sapiens
gaattctccatacataaaatccattctagatgtattataaaataaaacataaaagatgaaactttaaaaatgcgaagtgaaatgtggagaatgtctttctgaccttgggataagaaagaatgtcttaagacaaaacacactataaaagaaaagattaacattaaaaatttctcttcatccaaagatactacaaagaaagagaaaatacaaatcacattgtaggagtggagaatgatacaagcactttgaaaaacaatttggttattcttattagatgaacatttgtttatcctgtggtctatcagttccacatctagttatggatactcttgcttctgtgcactaggaggcaaggacaagaacattcaarcagcactgttggtaaaagcaaatagctggcaacctactaccataataaggattagacttatttagagttgctccacagagcctaacatagttcagtaaaaggaatcttcaggaaagcaggttttcttttagtgaaaagaactttttaacattcaaaaccatccaaaagcttagtaaactgcttcccacggaaagagttcccttaactggaagtgatcaagt

SEQ ID NO: 244005 - DNA, 509 bp, Homo sapiens
gaattccttttgaggtcaatcagggatttcttcttggcttggatccattgctagtgagctagtgtgatttggggaggttgttaaagaactctgttttgtcatattaccagggttggttttctggttccctctcatttcggggggctctgtcagagggaaggtcttgggctcaaggctgttgttcaaattctttttcctacagggtgttcctttgatgtagtactctcccatttttcctatggatgtggcttcctgagagctgagctgtagtgatcactaactctcttctggatctagccacccagcaagtctgccaggctccaggctggtactgggggttgtctgcacagagtcttgtgatgtgaactgtctgtggktctctcagtggtggataccagcacctgctccagtggaagtggcaggggggtgaaatggaatctgtgagggtccttagttttggtttcttaatgcactatcttttgtgctggttggcctcctgctgggagatg

SEQ ID NO: 244006 - DNA, 388 bp, Homo sapiens
acgactcctgttaggcagccccttttccatggcactagttttcatgggctcagctaatactcttgccttcatttgcccattcaggcctatggggttaatagcccctcctgctcctctcgtccctgggcatctcctgtgaccctgcccagatttctgtgaatagtcccttcattaaactctcatcggtctcctttgagggtgccatcccttcctgccaggccttgaatacaaggaccgaggacagaaagatagtccaggcgctgagcaaggtgrgatgcgtggagccagggagagagagaacatgcacaaggggaagggatcagctgtaaaatctggcatgctctaactcgagaaggaagattctgctgcttccccgtggccttgacct

SEQ ID NO: 244007 - DNA, 388 bp, Homo sapiens
acgactcctgttaggcagccccttttccatggcactagttttcatgggctcagctaatactcttgccttcatttgcccattcaggcctatggggttaatagcccctcctgctcctctcgtccctgggcatctcctgtgaccctgcccagatttctgtgaatagtcccttcattaaactctcatcggtctcctttgagggtgccatcccttcctgccaggccttgaatacaaggaccgaggacagaaagatagtccaggcgctgagcaaggtgagatgcgtggagccagggagagagagaacatgcacaaggggaagggrtcagctgtaaaatctggcatgctctaactcgagaaggaagattctgctgcttccccgtggccttgacct

SEQ ID NO: 244008 - DNA, 596 bp, Homo sapiens
tttgtctctgttgtatttatgttgccttttaaacaaatggaccaccaaatcccaatggcttaatccaatagaatgttatttcttgctcagccaaaagtctaatacagctgttcaaatttgraagtagctttatgccatttggtgatacaatctagatcagcttcgtattatggttttaccatctgcaggatctcagaatatctattttcaacttgcagaaggagagagcacaataaacttgctttttaaatgctctagcccagagacttactcattattcctgctccattcaattggtgacaagtggtcacctaaccgcacctggattcaaaaagtcctgaacagcaatgttccatcattagtttcacattatacaaggaataggacacattttttatgtgtgtgtacagctagttttcactgccacaatccaactcatttatcccatcatcaactttgaaaatctattaattactggacactgtactagattcgggagacacttaaaaatgaattgttcttgccttcaagggatgtaaaatctagtaggagacagcctttaatcatctcagaggttattcctctaagttgaaacc

SEQ ID NO: 244009 - DNA, 500 bp, Homo sapiens
agaaaactttatctacctataataaaatcctttttcctgtcttaataatagactttcattttaacttggcactttacctctcagaatggaagactgcatttttcaacttctttataggataagcgtgatcatgtgacaaatgagacagaaatgtggtggaaaggtagtgtggcaactattagataatagtttcaggggaatggattcaactccaaaatccattgtttgtccttctatgttgtttgcttctaccagtcaacaccttggctctgatatctgcatcttcagcagtcatattgaaccataaagatttcaaaaatatagctgtacgtatggtatcatgaggcagtggaaagacaggaggctgggtttctgatgaatrctttggatctgccatacctcaactgaacatatctccaaatttgtttttcagtgagagagaaatgcattttatcttgtttgagctacactgattcatttgttcattttctgtctcttat

SEQ ID NO: 244010 - DNA, 503 bp, Homo sapiens
ggtttgatttgtttcgtccaactagcatttaaaactttttcaatttgaaaaggttctccgtgggcatrcactttgcagtttacacactctccttctctttttgtattattttgcttcagattcacctatttatattgctttcctccataggcatctgagataggaaatactgctttcagcctacattctacctcattacatgttaataatagtaagaataaatgagagtgaagaaagttgcttgattttaattgaataagggtcataatttaacgagtacagatgattaacaggtttttttgaaaatgtatttctcagattaattatataaaatagatacttttatctgcattttataggtaaggaactaagtttcattgggtttagagtatcttctcacaaacacagtctataaggaatagaaccttaatttaagtactttggagtctgtctcactctagttctcacaatattaatctcagctctaccacacaacttaggtt

SEQ ID NO: 244011 - DNA, 378 bp, Homo sapiens
gaattcccatttgatgttcagcctgtcccattaagaagaattttggcacctggtgaagaagagaatttggaatttgaagaagatgaagaagagggtggtgctggagcagggtctcctgattcttttcctgctagagttcccggtactttattaccaaggttgccatcggaaycaggaatgacattactcactatcagaattgcgaaaattggtttgaaagatgctgggcagtgcatcgatccctatattacagttagtgtaaaggatctgaatggcatagacttaactcctgtgcaagatactcctgtggcttcaagaaaagaagatacatatgttcattttaatgtggacattgagctccagaagcatgttgaaaaa

SEQ ID NO: 244012 - DNA, 451 bp, Homo sapiens
gaattctaattgtctgcataaytctaatataggaaggagggagaaaatgaaactttgggcacaaaggcatgtttctgaacctttatccaacaccatttccattgtgggaaccacaaaaaggatgataaattaataaaagaaataggggccaaataaaatcttaaaagagataaaaagaggaagccaaacaaccacaacaaaaattgataatattcagctcaggaagagaataattttcttccctaacacagtgatctctgacttatctctcccagtaactgaagacttaaaaatcatttgcactccgataacatcagattttgcaaactcgcctttgaataaaaggtctcaatgtatatttgcccctatgtttaaattgccaaaccaagatttggttctttgattacagttatatttctataagccattaaagttttaattagcagtgatt

SEQ ID NO: 244013 - DNA, 451 bp, Homo sapiens
gaattctaattgtctgcataattctaatataggaaggagggagaaaatgaaactttgggcacaaaggcatgtttctgaacctttatccaacaccatttccattgtgggaaccacaaaaaggatgataaattaataaaagaaataggggccaaataaaatcttaaaagagataaaaagaggaagccaaacaaccacaacaaaaattgataataytcagctcaggaagagaataattttcttccctaacacagtgatctctgacttatctctcccagtaactgaagacttaaaaatcatttgcactccgataacatcagattttgcaaactcgcctttgaataaaaggtctcaatgtatatttgcccctatgtttaaattgccaaaccaagatttggttctttgattacagttatatttctataagccattaaagttttaattagcagtgatt

SEQ ID NO: 244014 - DNA, 554 bp, Homo sapiens
ccccaaaattcatatcttaaaatcttaacccccaaagtgatagtattaggaggtggggcctcttgggaggtgattaagtcatgagggtggagccttgatgaatgggattagtgcccttatgaaaaagaccaaagggagttygtttgctcttttcaccacataaggaggtagtgaaaagacagctgtctatgagtcagaaagccagccctcaccagacacggaatctgctggcaccttcctcttggactttccagcccttcagaactgtgagaaatttctgttgtttataagctaccccattaatgataatttgttatagcagtgcaaactgactaagacactccctttccttctgttttccatatctgccatcacctttgtcccatgcctttctgtgttctcattcttctaggaaaccacataaaacatccagaatttcaaatgggcatgctgaggattgggatggttccaggtggaacacttgttgctgtttccctagctcaagtgtaggatttattgagaacaggaactgcgaagtttttaatcatagccat

SEQ ID NO: 244015 - DNA, 584 bp, Homo sapiens
ctctcattggttgatgggtctttaaatgattttctgatttttattgataacttttaaaagacatattgagttaaaaattaatattgtaatttctyggtagtttacaatatttttagttcaaggacaccctcttcttacattgttgcaaagtctaaactcttggactagattgtgggttatgttttgttttttttcaagtggggagagaggttatgtgtcagcatttttcctttcttgtttgtcttgtagaacacctaaagtgtcctttttgcttctcttccccattaaccatcaaattgccagatgaggcctcccttgtctttttttttttttttctctgcctcaaacttcaaatcacatttacatggaagctcttttcatacagtccaggctcttacatagccatatgcatttttaatatttttaatctcgcagtggacctagtgattctgtgatctgtcattagctccccatttctgtcttccttgctttatttttttaagtacttttgttcacaatgaatacttgtggttgggtggatataccaggatctggtgctatttcctttatttactttcagttac

SEQ ID NO: 244016 - DNA, 624 bp, Homo sapiens
tcaagtgatatctctcactcttattatttacgttttaaaaataaaataagctaagtgaaataagccagacacaaaatgccacatattgtatgtatcatccatttatatgaaatatccagaatatcaagtctaccaatatattttccaggatctgaggaaaggtaggaatgaaagtgactgcttaatgtgtatgggtggctgtttggggtgatgaaacaattccaaaacaagaaagtggtaatggttgcacaacattgtgaatttactaaatgccacttaatagtatgctttaaaatggttaaaatggtaaattttattttatgtgtaatttaccacagtaagatgacagacagataggtagatagagggtacaaatagctatagatagattctatcatgtggtagagaaagtgtaggtatacagctataccctttagtcaatgtgytgcagtgttaaagagaaggtggaaaataccagcacttaatggtgacttaattaagagcatggaagaagctttacaaatatggaagttttatttagcttaatagtatttttaaaaatatgactaatcaataatttaaatattttacataatatttttgaatattacattttttaaaaaa

SEQ ID NO: 244017 - DNA, 570 bp, Homo sapiens
gataaatgagtctaattctttgaaggcagtcttaaaatttattctagaagatcagacatttgctccttcccctttttttcttcagaagttctggaatataggatatttgaraggacataataacataataattaagttattcaagggacataatgattaaacttatctaaatgttgctttatataattgtagcaacatctcaacattgaaaaccgttaatcaccacacactggaaggcttaacaaattccaaaccagattaaaattatttcacaaataatgaaaccaatgaatgggtcaatattgaatatgctttttttcctacatagaaaaattggtcaagcggaacaaaaatatctctttcatatatgaaatccctggagaattaaatgcatcgagttgtttctgcattctccctcctccgttgtcttggggatctataatagacatatactggaatttatgcttagttttgctattttgggatttcctcgtcctgccattcagggtggtttccagcattcatggtttcgttattcgttctagaagtagacagatggatccaggctaa

SEQ ID NO: 244018 - DNA, 414 bp, Homo sapiens
catactgttttgcttactctgcaatagggttaagtcttaactggaaaagagcaggaaaaaaatcttaaaayatagatatctaaaggttatttgaagaccaatctggcatatagaatattcttattctgccattttctgacttcactttggattttaatatcttaggaagctattttcctctttaacactgatttttatggaaatcaaatgaagcttagttacctcaccatgtaccaattcctcagtgatatttttaacttctgattatcttattaatggttgtagtagccagattttcctaaaaattcttcagtataactatgggtaggcatttgtgctagctttgaacaaaacaaaacagaacttcctatgttcaatttacaaaggaaattttaatattgtgtgactaacttc

SEQ ID NO: 244019 - DNA, 419 bp, Homo sapiens
gaaacacatactgttttgcttactctgcaatagggttaagtcttaactggaaaagagcaggaaaaaaatcttaaaacatagatatctaaaggttatttgaagaccaatctggcatatagaatattcttattctgccattttctgacttcactttggattttaatatcttaggaagctattttcctctttaacactgatttttatggaaatcaaatgaascttagttacctcaccatgtaccaattcctcagtgatatttttaacttctgattatcttattaatggttgtagtagccagattttcctaaaaattcttcagtataactatgggtaggcatttgtgctagctttgaacaaaacaaaacagaacttcctatgttcaatttacaaaggaaattttaatattgtgtgactaactt

SEQ ID NO: 244020 - DNA, 423 bp, Homo sapiens
tataaagaatttattacagaatgccgattctttaatttttccaaccataaacgtatttacagggggctttcactttgtccaaatttggaagactatttttgtaattgagataaaatctacaatgttaacaaatgaccatgttatactgttactggtggtcatttatataaaatactccattttatttgagctcatgttcrttcaatttcagtattatatttctgaatgagaaaagtacaattcaaggtgtttaggttaaggactgctgaacatcttctaattcacaaacctcccactcagagagtttccaggagaaacaagaacaaaatatttgttttactgttttctatttcacaatacagtaaaagaactactttttcttactctgtaacagaatgctgactcttattctatttcatatga

SEQ ID NO: 244021 - DNA, 496 bp, Homo sapiens
aatgaagcagtggcagagtttgagaggatcaactccaatttagaaagaggttttactgtggagaaaatgctatcaagtagcatagcatgccacagggtaatcttttgtgaawagaagagtcaattgatagagcaaactttattgttgtcttgtcttaagaaattgccacaactactctaaccttcagcaaccatctcctgaacatcaaggcaagaccaagaccattcaccagcagaaagtataggactaaggctcagataatcatcagtatttttagcttcattttagtattttttaactgaggtatgggcattgcttttttctttactttaatgctattgcacatttaatagactatagtatagtgtaaatgtaacttttatatacattgtgaaaccaaaaaaaatcattttcctccttttattgctatattcactttattgcaatgggttaaaattgaactcacaatacctctgaagtatgcctgtatatattt

SEQ ID NO: 244022 - DNA, 496 bp, Homo sapiens
aatgaagcagtggcagagtttgagaggatcaactccaatttagaaagaggttttactgtggagaaaatgctatcaagtagcatagcatgccacagggtaatcttttgtgaatagaagagtcaattgatagagcaaactttattgttgtcttgtcttaagaaattgccacaactactctaaccttcagcaaccatctcctgaacatcaaggcaagaccaagaccattcaccagcagaaagtataggactaaggctcagataatcatcagtatttttagyttcattttagtattttttaactgaggtatgggcattgcttttttctttactttaatgctattgcacatttaatagactatagtatagtgtaaatgtaacttttatatacattgtgaaaccaaaaaaaatcattttcctccttttattgctatattcactttattgcaatgggttaaaattgaactcacaatacctctgaagtatgcctgtatatattt

SEQ ID NO: 244023 - DNA, 476 bp, Homo sapiens
gcatctgatcatcagattccacagtggcatggtctgcaagagagccacaaacaaggtgctgggagtgctgcactgaggatgtgctgtgctgccccggagggaagagagaagccgggcccggaccaaggatgcaggtttgcatgcgggttagaacagtcccatggaaggagtgctactgttcagggttctgtgactctgcttccttaacccatcaagaattccttcattttggaaacaaaggtcttctggattttaagtgtctgggggcgagacctgtgttttattcttccaagcaactgttccccagcacaggccatgcacagtgctgacacacagcaagccccagatgaactgggactggcaggcctggggaggccggctcgttaygtcggctcctttgtagcaaagtccattaaggtctatgattagaacactaagtagaaataactaggcttgttgaaaattatcctgacatg

SEQ ID NO: 244024 - DNA, 626 bp, Homo sapiens
aactgcctctcagggtacatgggaaatgctgccaactgcctaagttgtttccaaggtagcaaggttttcccatactttgagcccctccccatttatcttctgctggagggtcrgagattgaaggagcagatgcaggactacaggacttctgcttcttggaagtgagttgcacacttgtagagtgactggtgggcacccttcattgtatctgggtgtctgtagaacaggacctttgaggcagcaccaatagttggctcagaaatgattatagaatgagacagaaccctccctctgtctgctctgggctgtgcattgggccttccttccctttctgcatgtgtcagaagaggaatccccttcttctccctgaagaacatgcgatggtagcaggagccttgagtgtcggtctgcagtgccctctcccttgcacatggactctgtggttgcagatactgggaaaaagcattgtggcctctcctctcctagaccgtccaggtgaggcaaacaccagcccacgtgtgcagatgggttagtattaggctagtgtcagcaggagaggtaggcgctcagcctatctcccactagggaggggaagaagaaaggaaggagcggctgatcccttgagg

SEQ ID NO: 244025 - DNA, 535 bp, Homo sapiens
atggcctcagtgaaatgaggccatactcatttcactgatatgtgaaatgagtatcctcagacatgatacagcctgacttccaattctggtttgacctaatctccttaccacgaaactaagaaaatgttctctgaaccgcattgctgttagatgggggaaaaaatattgtcaggctgcacgtggttgcccctgcctgtaagctatgattgcactactgcacttcagcctgaatgacagagcaagacccagtttcttaaaaaacaagraagtattgcctagagatacattttcaaaaccatagccactatctgtaggcagctactaagaatgtgaaatgtgactcctctgaattgagatgctctgtaagtgtaaaatacacacttgatttcaaagatttagtatgaaaaagatataaaataatttttatattaattatatgttgatataatttggatatattagattaaatgaaatatattagaattaatttcagtggggcatggtggctcctgcctgtaatctcagtgagttggga

SEQ ID NO: 244026 - DNA, 626 bp, Homo sapiens
cgctacttatcttcctgaaggaatgacatgtcccattctcggaaatagcatagaaccacaaaagcctatggaatcagatatgtgagttttgaaaaatcattgttccatttgcttaagatggtctaaaaattgcaaatgtattgtctttctagaaaatagcagagaaaagtgaatagcactttgataggcttcatttgataatgacattgctgtcatgccatctctgcctggtggtgtttatgggggagagctttctctcccttggcttcttgtgagaggcatccgtcacacttccccaccctcgcattcaaactccttagggggaggaggagtgatctaaattgtgattatgggatgaggggctgtcaaagtgtggtcagtactggcctcttattttggggggtctactcatcattcckgtttgctccttcatactgtaagtttttcaggggcaggctgcaatcaggaggcctgaagttgcttagcactgcctgtggctgggcaggtaagctctgtttgaggtttaggattaggaagccatatttttcattattaactttatcagtaataaagccagtatttgaatgcccatctgctttttcttctctgtttctcagtggttccaa

SEQ ID NO: 244027 - DNA, 376 bp, Homo sapiens
gtatatttccaggaatttatccatttcctctagattttctagtttgtgtgtgtgtaatggtgttcatagtagccttgaatgatcttttgtatttccgacgtatcagctgtaatatttcccatttcatttctaattgagcttatttaggtgttcttctctcttcttttcttggttaatctcactaatagtttatcaattttgtttatattttcaaagaactagctttttgtttcatttgtcttttgtatttttttaaatttcaatttyatataattctgttctgatctttgtaatttcttttcttctggtgggttagagtttggtttgttcttgtttctctacttccttgatgtgtgacattagattgtctatttgt

SEQ ID NO: 244028 - DNA, 571 bp, Homo sapiens
ttccattacatagtaggatgactatagttaagagcaatgtattgtatattttaagatagctaggaaaaaggatcttgaaagttatcaccacaaagaaatgataacggtatgaggtgaaggacatgctaactatcctaatttgaccattatataatgtatccatatattgaaacatcacactgtacaccataaacctgtacaattattgtatgtcaattataaacaaaatttttaaaaaatagagtagtcgaaatcatagaaccagaaagtagaaaggtggttaccaagggatkgagagaggaggaattagagtttagtgggtatgcaattttagtgttgcaaatgaagagcttccatagatttgttgcccaacaatagaactatacttaacgctagtgagttgtgcatttaaaaatggttaataataagtttaatgttacctggttttttaaccatattttaaaaagtgaggtccaggaaggccatgttaaatgttcgattagagagaagaaatggtcttttagaagaagagtggatggaggaagagactatggtataattgtaagacaat

SEQ ID NO: 244029 - DNA, 560 bp, Homo sapiens
ggtaagctactcagatttgggggtagagagggttacctactacagcagatagtgttaccttaacaaataaataattcttagtattcttgtaaaagccactgtgcackctttaattattcaggaccccggacagtgacacaatagtaccccatcacccactcccatggactaggactgtcagggtaagcctgcaaattcttgtaatgtatggcaagccagactgatatctctcttcacatgtcgccttactgacaccaaggccatcatatttattgagtgggaggaatataagtacctttggttggagttttcacagtcagatgaaaagtgagaagaccacattaagttgggagccagcataaacaaaaacgtgagatcaagggaactaagtgcacttggctatagtgagcccattcatattactggagcacaaagtttccatgctgtataaggtagctatcacatttcatggatgaggaagctaaagtgtggagaggtcgaatcatttacctgagatttcaccaggtcatggcagagccacagttgaacctagacagctt

SEQ ID NO: 244030 - DNA, 558 bp, Homo sapiens
acctgacagccacagcctttgtaacctcatctcagaagtgacaatgcctcacttttgctgtatctatttgttgaaagggagtcgctaggttcagcacacaatccaggagagggaattccacaagagtgtgagtgccaggaatcagggatcattgtacaggctgcctgccacaaggtgtaatttacgtatcataaaatgcacagatcttaagtattcagatcaataagttttgacaactgtatgtgtcatgtacccatcactcaataagatctagaacatttctgascctctggaaagcttcctgatgatcttttccagtcaattcaacacattcctttctcactccccaccacccctcccctccatcacagagccaaccactttcttatttccaccagcatagacctgttgtgcctgtttgtggactttatataaatggaatcctccaatctgattttttttgtgtgggtacatacattttgtgtgggtatatatatttataggatacatggcatattttgatataggcatacaatgggtaataattgcatcagggta

SEQ ID NO: 244031 - DNA, 633 bp, Homo sapiens
tcaactagcaaccactatcggatttttaaacttatatcattcaagtcagcaaagaaaactatgcatttcaagttttctctaaggtcaaacatttcattcattagacagaccatataatggccatgaatggaggctccaaatccmagctctctctcatattagctgtgtgaaaaactagcattttaatagtgcctgtttcatcatactcttataaagtatagttacaatcattttaaatggttattacattgcttcacatacaaaaaacactgaatatatgttatctattattgtcattgtcattattttaaaatagtgttctgaagagtgttttcagagctctggtagtggatgagtaaacctcaggcaaattataagaaataaaacattttccagggtctatgtaggagagagaaaaatgaaaaagacaaagtctttacagattcctttagctctcatcatgaagcagaagattgtattcacatccttggatcttttcctgccctctctctagcgatatggtaggcatacaatcatgattgtagaataagtgaaagagaatggatggaggaatgaatgaataaatgaatggatgggtaagcaaatgaacaaacaagcagatcactggtaatg

SEQ ID NO: 244032 - DNA, 507 bp, Homo sapiens
catggaccttcatcagtaattctagtttcaccctggtcttgtgatctcactctgcctctctgcccttgtgaccttttattgccctctgaagcatatgatctctgtgacccactccctattcatacccccctccccttttaaaatccctaataaaaacttgctggttttgcagtttagggggcatcatggaacctgctgacatgtgatgtcacccccagagacccagctgtaaaatttctctcttttgtactctctctctttatttctcagaccagccaacacttagggaaaatagaaaagaacctatgttgaaatattgggggctggttcttctgatacctaactccccacagttaaacttagttagacatacagtaagagaatgttcaaaaggggattaaagctaccaaaagtcttctctgaacccatcccccatttcccataccaaataaattagtttctccagctaggtaaycccatagcatcccagtacatcatcaacataac

SEQ ID NO: 244033 - DNA, 601 bp, Homo sapiens
gcaatgagataacatctcacaccattcagaatgattattattttaaaaataaaaaatagcagattctgtcaaggctgcagagaaaagggaatgcctatacgttgttggtgggaatgtaaattagttcagccactgtggatagcaggttggagatttctcaaagaacttaaaacagaactaccatttgaccctgcaatcccatactgggtatatactcaaagaaaaacaaaacattctaccaaaaagatacatgcaaatgtatacrcattgcagcactatgcccaatagcaaagacatggaataaatcctggtgcccatcaatggtggattggataaagaaaacatgctacatatacaccaaggaatactacgcagccataaaagagaatgaaataatgtattttgcaacatggatgcagatggaggccattatcctaagtgaattaacgcaggaacagaaaaccaaataccacatgttctcacttataagtgggagctaaatattaggtactcatagacaaaaagatgaaaacaacagacactggggacaattagagggggaagggaaaggggagggaaccattgaaaaactaactattgg

SEQ ID NO: 244034 - DNA, 601 bp, Homo sapiens
gcaatgagataacatctcacaccattcagaatgattattattttaaaaataaaaaatagcagattctgtcaaggctgcagagaaaagggaatgcctatacgttgttggtgggaatgtaaattagttcagccactgtggatagcaggttggagatttctcaaagaacttaaaacagaactaccatttgaccctgcaatcccatactgggtatatactcaaagaaaaacaaaacattctaccaaaaagatacatgcaaatgtatacgcattgcagcactatgcccaatagcaaagacatggaataaatcctggtgcccatcaatggtggattggataaagaaaacatgctacatatacaccaaggaatactacrcagccataaaagagaatgaaataatgtattttgcaacatggatgcagatggaggccattatcctaagtgaattaacgcaggaacagaaaaccaaataccacatgttctcacttataagtgggagctaaatattaggtactcatagacaaaaagatgaaaacaacagacactggggacaattagagggggaagggaaaggggagggaaccattgaaaaactaactattgg

SEQ ID NO: 244035 - DNA, 609 bp, Homo sapiens
gagtgaattcaaattgtagcaattgtaacaacctatggctatacttaagtatcttatttctttcagctgccaaagacgaagtgataacttagcacaaggtgtgaaaaaagaggagttgtcaataactatatatcaaagtgctatgtcaactgttgagtgcttcactgttgtgttaatttaatggcatttatttttatttatacaaaatttttcaatgatgaaaatctagtatgtagagttacctacgtgactgacaagcccagtcaaagttactttgacacactgactcccacagcataagagggatcaatgtaaagtcctatccttagatccaaagatcaattgcacaaatgaggcaataaattacagctatttggagagctgtcttaggctgaatctgggtttgaatatcacttccaccacttatagtattgagcaaactattagacctctatgakcctcagtttcttcatctgtaatatttggtcaattatactagccttgaagaattatttaaggattctgtaaattaactcttattaagtgcctggaactttagtaaatggtcaattatttatcatccctccctctaccctacactgggcagag

SEQ ID NO: 244036 - DNA, 514 bp, Homo sapiens
tggcttaccactcttctctcatggatcctgacatcaaactcatcggaaacaaggcactgttgcctatcagaagtcaattcaaacgacctgcccccagagagacaaaagatacagatattgtggatgaagcatctattacttcaaggccaatatcttcttcaaaaactatgaaattaagaatgaagctgataggaccttgataatatataatgatatatataactctctacatttctgaatgtctgaagaaactccaaaagtgcaattccaaaagccaaggtgagaaagaaatgtatacactgggaatcactaattttcccattcctggaaagcctggttttctacttaaygcaatttatgccaaacctgcaaacaaacaggaagatgaagtgatgagagcctatttacaacagctaaggcaagagactggactgagactttgtgagaaagttttcgaccctcagaatgataaacccagcaagtggtggacttgctttgtgaagagacagttcat

SEQ ID NO: 244037 - DNA, 401 bp, Homo sapiens
ctaccaacaaccaggaaacttgaaagaggacctgagtcccagataagaaccacagcctggcasataccctgatgttagcctggtcagatcctcagaggagaatccagccacatcatgttggaaaacctgtgagataagacatggctgctgtgtcaaacccctaaatttgtggcaatttgttacacagcagtagagaagtaatacaccatctctttattaacaggaaaaaaaaaacccatgaaacttaaattaggagacccatgtatttcaacacaaatgagagtgcatactcctttgtggcactaaagtattcacacctgtgtgttgctacgcaaacaaaacacacttgtgttgaaaaactacagccaaccccttccaggacatacacctcctacctggcc

SEQ ID NO: 244038 - DNA, 488 bp, Homo sapiens
gggtggttgtgcctgctgcagataattgtgaccctgaatagctggaactgtgttcactgtgaaccaatgtttcctctgagagccccaaagaccctgagtgtgaatcgcttgagtgggtggggtctcttamcctgtgagtcctcccaccaggggccccatccttccacccatctttcctcgggcctgtttcccttgaggtctgagctggggtgcccagtgaggggtcatccttgctgtgagataaaaccgaggtgtgactccccatctccatgcagggccctagagggtgtgcgcagcttcaaccatctgatcaagggtggattcaactccctgctcagggcagcagctcgtggttcattcagctccagcgacgtctcgatggggataaggtaaggggcacagagaaccaaagattgggtctgatgggattaaacccccaactggtgtccctgtgtcttctctttcctgacaccagacgccaagaagaa

SEQ ID NO: 244039 - DNA, 488 bp, Homo sapiens
gggtggttgtgcctgctgcagataattgtgaccctgaatagctggaactgtgttcactgtgaaccaatgtttcctctgagagccccaaagaccctgagtgtgaatcgcttgagtgggtggggtctcttaccctgtgagtcctcccaccaggggccccatccttccacccatctttcctcgggcctgtttcccttgaggtctgagctggggtgcccagtgaggggtcatccttgctgtgagataaaaccgaggtgtgactccccatctccatgcagggccctagagggtgtgcgcagcttcaaccatctgatcaagggtggattcaactccctgctcagggcagcagctcgtggttcattcagctccagcgacgtctcgatggggataaggtaaggggcacagagaaccraagattgggtctgatgggattaaacccccaactggtgtccctgtgtcttctctttcctgacaccagacgccaagaagaa

SEQ ID NO: 244040 - DNA, 646 bp, Homo sapiens
tgcaaattaactgtgtatcgggatgtttttcggaacaaataacagaaactcatatggcaattggcttaaacaattacaaaatatgttggttcatataatctagaggtgatccagcaatcccaagatgtcttcacggatcagaccctttccatctctgccctgctgttctgtgttgactttatcccaaggctggacttcctcctgggtgaagaagaaatcaggtaacctttgcaagcattctcagaagagcaagcagggagtttcctagaaaccacaagcraacccatttttgaatcttcttgacctcagttgcatgatatgtgtgctcttgaccaaaaccctatcaatggaatgactgggatcacccttagaacagtgttgtagctaggatgggagcaggatgaactttcttgaatccctgggatgcagggaaaacaggattcctgaaaagtgaagaactgggtgtgtgtgtgtgtgtgtgtgtgtgtgtgtgtgtgtgtgtgtgtgtatggcattgaaattttgggtaggcagtcaacagtattcactacacctatcagattccaaaggtatcttggtcaccttgattagaactctaaatgtgtttaatgtgtgtatgtacgcatgttcacattgtgctgaattg

SEQ ID NO: 244041 - DNA, 646 bp, Homo sapiens
tgcaaattaactgtgtatcgggatgtttttcggaacaaataacagaaactcatatggcaattggcttaaacaattacaaaatatgttggttcatataatctagaggtgatccagcaatcccaagatgtcttcacggatcagaccctttccatctctgccctgctgttctgtgttgactttatcccaaggctggacttcctcctgggtgaagaagaaatcaggtaacctttgcaagcattctcagaagagcaagcagggagtttcctagaaaccacaagcgaacccatttttgaatcttcttgacctcagttgcatgatatgtgtgctcttgaccaaaaccctatcaatggaatgactgggatcacccttagaacagtgttgtagctaggatgggagcaggatgaacttycttgaatccctgggatgcagggaaaacaggattcctgaaaagtgaagaactgggtgtgtgtgtgtgtgtgtgtgtgtgtgtgtgtgtgtgtgtgtgtgtatggcattgaaattttgggtaggcagtcaacagtattcactacacctatcagattccaaaggtatcttggtcaccttgattagaactctaaatgtgtttaatgtgtgtatgtacgcatgttcacattgtgctgaattg

SEQ ID NO: 244042 - DNA, 622 bp, Homo sapiens
cagcttaaatagatccaccatgctgattccaagttcacaacatggtgtcaaccatctcacaaaattcttcaatatttaacaattggctctcaggagctagttcaagccagctccagcacascactaattataactatatgaccatattgcaagtcacttaatctctctgagcttcactttcttcttctgtaaatcacaatcatcataattatgatcatatcctatattatcataattatcaccaatgatgatcatcatcactattatcatttcaattatttcaattagacttaaagccatagcttctaatctttatgccaaaggcacccaaagtcttataccaaagtctctaagaaagactatgccttttcacctcatgattagcaaagtagcatagtccaatgtcaaaatccaagactatgttgcctattgcagataatctcaaaaatgtcccttattaatgtatttgtttttaaccagagaaaagggaggaagagagaggaaataaagaaagggatgatcttgacttgacaaatctatcttcatttttctgaatattttctgtgttatccatctattcacccattcctctattaaattagtattcactgagtacctacta

SEQ ID NO: 244043 - DNA, 574 bp, Homo sapiens
tatatatgagtataaaatttccttaaaattactgcttataaggccaggcatggtggctcatgcctgtaatcccagcactttgggaggccgaggcaggtggatcacctgaggtcgggagtttgagaccagcctgaccaacatggagaaaccccatctctactaaaaatacaaaattagctgggcgtggtggcacatgcctgtaatctcagctactcggaaggctgaggcaggagaatcgcttgaacctgaaggcagaggtcgcagtgagctgagttcgctccattgcactccagcctgggcaacaagagcgaaactctatctaaaaaaaaaaaaaaaaaaaaaaaaaaaamatcattgcttataatttttagactgcagagtcctaaaagttaaaatcctttttttaactaccccaatttatagaagaatgaagagagaattcacactgatatgaaatattgtatattggccgggcatggtggctcacacctgtaatcccagcactttgggaggccgaggtgggtggatcatttgaggccaggagttcaacaccaggctggccaatatggtgaag

SEQ ID NO: 244044 - DNA, 328 bp, Homo sapiens
acatttgcccattttatttatctttgcataaaaagagcttttggtttcattgtatttctctattgtttttctgtttgctgtttcactgatttggtctatcttggtgaatcttgcattttcggtggaaaagaatgtgtattctgctgtcatttgatagagtgttctataaatgtcaattaggtactattggctaytggctgatagtgttgctcaattctcctatatccttgctgataatatgtctacttgtcctatctattactgagagagaagagtttaaaactttaaatataattgtggatttgcccatttatcatttcagttttat

SEQ ID NO: 244045 - DNA, 552 bp, Homo sapiens
tcttcaagtattctttctgtgctatactttttctccactctttctggaattatgatgaagaaaatgatagaccttttgatattgtttcataggtccctgagtctctatttattcttttttcaaccatttttctatattttgttcattttaatttgtattaatctgtgttcaagtacactgcrcttttcctcttaaaaccccattctgctattgatcatacccagtaaatgttttactttgattactgtatttttcagttctgaaagatttatttagttcttcttttttattttctatttctctgctgaagctttctttttttccactttttttcaagagtattttactttttcagacagaaaaactgaggttaatttatcattggtagacctatcttgcaataaattttaaaagaagttcttcagagaaaaggaaaatagtatgcatcagaaactcagatctatataaaagaagaacattagagaagtgataaatgaaggtaaactaaaatattttatttttcttgttcttaattgatgtaactgttagcta

SEQ ID NO: 244046 - DNA, 548 bp, Homo sapiens
agatctggaatgagttctgaattttcccatctcycactcttcttggccaccttaaaggagggatgtgggggaaggtagggaagaaaagaataggaagagggaacgccgtggccctgccaagggaccagtgacagtgacggcactccccacccaagaacaacttttcaccagaaagtgtctgcgacatcctcctttggccaacagggggcgccagaggtccgcagtgcgcggagagagcaagacacccccaactcctgagcgctccacccctcatagaaatttcactcctaacacttcccagccttcatttcaacagcaatgcttcgcccattttatagatgcagttggggctcagaccaaagcctcgtatccagttaggagcaggatcagaattcgaacccaaagccagctgactccttgttctggtcaacacggttggtgctctcccgtgcaggatttcactcgtccatttagtgtaataagatggagagacgacagatggaggttcgattcgctactccgtcatttactggcccggccaggtgctg

SEQ ID NO: 244047 - DNA, 537 bp, Homo sapiens
atctctcactcttcttggccaccttaaaggagggatgtgggggaaggtagggaagaaaagaataggaagagggaacgccgtggccctgccaagggaccagtgacagtgacggcactccccacccaagaacaacttttcaccagaaagtgtctgcgacatcctcctttggccaacagggggcgccagaggtccgcagtgcgcggagagagcaagacacccccaactcctgagcgctccacccctcatagaaatttcactcctaacacttcccagccttcatttcaacagcaatgcttcgcccattttatagatgcagttggggctcagaccaaagcctcgtatccagttaggagcaggatcagaattcgaacccaaagccagctgactccttgttctggtcaacacggttggtgctctcccrtgcaggatttcactcgtccatttagtgtaataagatggagagacgacagatggaggttcgattcgctactccgtcatttactggcccggccaggtgctgtcaggagggttaattca

SEQ ID NO: 244048 - DNA, 399 bp, Homo sapiens
tatcagatatatgatttacaaatacttcctcccaatttttgagttgtcctttttttttttttcttttttttttgagacagtcttgctctgtcacctagcctggactgcagtggtgcctatagttagttcactgcactctcaaacccctgggctcaagccatcctcccacctcagcctctcaagtagctaggactacaggtgcatgccaccatacttggctaatttttttttgtagtttttgtagagattggttctatgttgcccaggctggtcttaaactcctgagctcaagcagtcctcctgccttggcctcccaaagtgttrggattacagccatgagccactgcacctggccctcactttcattcttgaaagatattgtcactggatatagaattc

SEQ ID NO: 244049 - DNA, 439 bp, Homo sapiens
cttccctcagagccctcacagggaaccagccctataaaaccgatgtcagattcatgacctccgcaactatkagaataagcttgtgtaaagtcagtatttgtggtaatttctacagcagcagtaggaaactaatataggatgttactcacatttaaaaagggaaagtgtttgaaaaaccctaacgtccactgtcaaaaaacctaacattctttcattctttttcacagtatgaaatccagaatagcagcatttggctttttttttttttttttttttttttttaaaggctggtctcactatgttgtccaggctggtcttgaactcttgggctcaagcagtcctcccacctcagcctcccaagtagctgtgcattcatttggccttttagacttccttacaatgcggcataaacttctgtggtgtagacatgttgagattt

SEQ ID NO: 244050 - DNA, 439 bp, Homo sapiens
cttccctcagagccctcacagggaaccagccctataaaaccgatgtcagattcatgacctccgcaactatgagaataagcttgtgtaaagtcagtatttgtggtaatttctacagcagcagtaggaaactaatataggatgttactcacatttaaaaagggaaagtgtttgaaaaaccctaacgtccactgtcaaaaaacctaacattytttcattctttttcacagtatgaaatccagaatagcagcatttggctttttttttttttttttttttttttttaaaggctggtctcactatgttgtccaggctggtcttgaactcttgggctcaagcagtcctcccacctcagcctcccaagtagctgtgcattcatttggccttttagacttccttacaatgcggcataaacttctgtggtgtagacatgttgagattt

SEQ ID NO: 244051 - DNA, 423 bp, Homo sapiens
cctcacagggaaccagccctataaaaccgatgtcagattcatgacctccgcaactatgagaataagcttgtgtaaagtcagtatttgtggtaatttctacagcagcagtaggaaactaatataggatgttactcacatttaaaaagggaaagtgtttgaaaaaccctaacgtccactgtcaaaaaacctaacattctttcattctttttcacagtatgaaatccagaatagcagcatttggcttttkttttttttttttttttttttttaaaggctggtctcactatgttgtccaggctggtcttgaactcttgggctcaagcagtcctcccacctcagcctcccaagtagctgtgcattcatttggccttttagacttccttacaatgcggcataaacttctgtggtgtagacatgttgaga

SEQ ID NO: 244052 - DNA, 478 bp, Homo sapiens
atatatctgtgtatggattagttaggaatccaattgtcccagaactatatgttgataaaatagtccctgctttcctcaacgatctctagcattacctctgtgattggttttaaaaagccagggtctagctctgttgcccaggctggagtgcagtggtgccatcatagttaactgtaaccttgaactcctagcctcaagcaatcyttcgccttggcttcccacagcactgggtttacagatataagccactgtgcccaggtggagattgtttttgtatgtgtgtttatgaaagtaatgttaaaatggtaaatagtgttttgttatatgctttttaaaattaaatatatcttgaatgtcttttgataccatttaatatataatcagtttttgtggatacataggagaccactgtattcaatctctctagtttttattatatcacttttattcctgatcttccagttgccctgtctcaaga

SEQ ID NO: 244053 - DNA, 406 bp, Homo sapiens
tcagtagctacagctcctcagaggctggagcacagcacagaagatctgtcagggaggagctggtttttgaaaatttaatccaggccaggtgtggtggcttacgcatgtaatcctggcattttgggaggctgaggtgggtggatcacctgaggtcaggagtttgagacyagcctgggcaacgtgacaaaaccctgtctctaataaaaataccaaaaattagctgggcatggtggcggactcctgtgattccagctacttgggaggctgaggcaggagaattttgcttgaacccaggaggcggaggttgcagtgagccgagatcgcaccgttgcactccagactgggcgacagagcgagactctgtctcaaaaaataaaataaaataaaataaaaattccagacttcc

SEQ ID NO: 244054 - DNA, 642 bp, Homo sapiens
ggcacagatctggtagatattttgatactttttaaattgggggtggatgttgtaaacatatacagagatgggatttttacattgatgtcattttacatgccgtaaatatttactaataatagctgtaaacctaccaatttattcttcatgttaaactagcaaatctcattttaattgtgttattttgttaatgctaatttataccttttttccttcttaaagataaaaacaaagctcagtggggtttatagaactccattagactgtaagctccattaggactcactgcatgtgatttaaatttttttcctcttatttctctagggcctattccctggtggattccagtcaagtgtctacatttctgatttccattcttcttatagtctatggtagtttcaggtaagatattctcaaatggggttgatayaagttggaggtggaagaaggaagcattgctctgaaagtgctggtaccaaaacttactctgtgaagaaaaacaggacttcggcaggatttgactcagaatagagagttctgctatttgttctttaattggctgctgttaaacacttcttcattgtgcttatgagtttagcatgttaatgcttacatgtaaaaactaattgcttaaaatgctgg

SEQ ID NO: 244055 - DNA, 632 bp, Homo sapiens
gtctactctatgtatggatgacttctgtttatacatatatgctaggatggacatgaaatattagaatagttatcagaggaatgattagcagttaatgcattggagattggcatatagctcctttttgaaaaataatacttttcttaaatactaattttccaaaggttatgacttgagtaaaagtaagttttaggacagttttctcaagcttaggccctttcagggtagcaaaagacccacagaatctaaaaatatgcccagaaattaatgtattgctagttattcccagataatggagttaaagaaggtagagcatctccactgaagatatrcaatgaaccttgatcataaggaatacaaacagggtcttaattcatgaacttactcactgtcctactcaacaataaacataaattggggttttaagaatgtgattgcgatgtgtttaaaattttatggaaaatatttgggccaaatttggaagtgatccctaaatgtctcagtttcctttttttggacaactttaggaaggccatgtattttacctgcagtatcttcctgaactaaaatgtgaaggagacaacatcttccatgcagccccatttaccactttcttcagtcttgctcctcct

SEQ ID NO: 244056 - DNA, 596 bp, Homo sapiens
tatttatatatatttttgccatgtttttttcttccttcctgatgttctgagacattctttcttttatcttttcctttttgtttagagaacttcctttartcattattttagggcaggtctcctggtgacaaatcctcttagtttttcttcatctgagaatgtcatccctgaagaatattttctctggatatagaattttggattgatagttctttctttcagcacttaaaaaatgttgcactgcttcctactggcctccttggtttattttgcgaaatcctctgtcattcaaattgttcttcccctatggcttcatgcatcatttctctctggctactgtcaaggctttttcctttgtctttttgtgggactgtgatgcatcttggtgtggatttctttgggtttatcccatttggtgctcagattcttgattctgtcttttgccaactttggaaagtttttagccattatttcttcaaatgcttttctagccctaccctctttttcctctccttctgggagtcagatgacctacctttaacatcttttttttgtagttcaacacgtctctgaggcttagttcatttttttcccca

SEQ ID NO: 244057 - DNA, 596 bp, Homo sapiens
tatttatatatatttttgccatgtttttttcttccttcctgatgttctgagacattctttcttttatcttttcctttttgtttagagaacttcctttagtcattattttagggcaggtctcctggtgacaaatcctcttagtttttcttcatctgagaatgtcatccctgaagaatattttctctggatatagaattttggattgatagttctttctttcagcacttaaaaaatgttgcactgcttcctactggcctccttggtttattttgcgaaatcctctgtcattcaaattgttcttcccctatggcttcatgcatcatttctctctggctactgtcaaggctttttcctttgtctttttgtgggactgtgatgcatcttggtgtgkatttctttgggtttatcccatttggtgctcagattcttgattctgtcttttgccaactttggaaagtttttagccattatttcttcaaatgcttttctagccctaccctctttttcctctccttctgggagtcagatgacctacctttaacatcttttttttgtagttcaacacgtctctgaggcttagttcatttttttcccca

SEQ ID NO: 244058 - DNA, 610 bp, Homo sapiens
agaacatctcactcccagtcctcattatcaaatcagggttagtttgagatccagcatggcctcctgcccccatggggcatggagtaagggaaggaacataatggcagtcctgcatttgaattctygcctgagactttagacacagtcatataatctttctgttttcaggttccttagatcctgaatggaggctgtgataccatcctcatagttgtattttagagggaaatgaaataatgtgtctgcagctccaggcacactgcaggcaatcagtaagtgttgatgtcacccactttctctcttcttatctgatacatattataaaaagtagcttctcattactttaaatatggtctttttgtgcaatagctgtgttattggaaaaataaaggcacaaattgaattctcctaaatcagatttttttttaaatgcctgggatttagctatttaaaggaaacctgtggtgaattcttctgtaatgcaaataattactttccaatttatctgtttagtaagtcgagcttctcctgtatcagattttttaaaatatgaggctggcttgtgtagaagagctttcacaatcctctcactgatgaaaaaaagtcactc

SEQ ID NO: 244059 - DNA, 607 bp, Homo sapiens
tgttgttgaccaaaatgttgggcagctcctgactatacatgtaacttcagttcagaagaaagaaaagagggccctaaatatagttaaccagaacttatttagacaaaaatagtcctaagctgtagaaagctaacatggcaatatataaggctaaaccaaatattattttagcaacactgtatttcctcactcttactcggtggtccccaggcagcattctcagcaacagctgccaaaccatccaagaatggactgcttattcaaccagctgggggaggtggtctttccattgcaattgggtacactgggattcctgtttaagaaagcattctatgaatgagtgttgatttaattaaccctaagaaaagttaagcttcacgaagtgacaaatttaatttcatgactttaaaaaatgaagctctaaccttgagatagatatctttccaaaactgtaaccactaaggttctacttgaaacaagcagccagctatacccttacctccaatgagagtacatgtgtagggctttaatcagaagttagttgtaaacagggaaaatgctrttagcaaactcattgtgtaggcttccctttaaacatgtctttgtg

SEQ ID NO: 244060 - DNA, 533 bp, Homo sapiens
caaaatttttttattccactataagcaaagaatctgaagcgttacraaacatgggtatgtgggagatagaaagagggtaagcgactatagtactgcttggactaaagaaagaactattctctgtttggactctggccccaagttcataatcatgattctaacagccagcattttttggccatcactctgagcgccaggcaccggactaagcactacctcattttatccttccctgaccttcatatacacactgttaatacctctgttttatggatgaagaaacagatgtctggagagctcaagtaacttaccaagatcacacaaatagtaaagtcaaagtcaagatttgaaacaggacatcaatgctttacttttcttttcttttttttttccttttttttttttttttgagatggagtctctcgctctgtagcccaggctggagtgcagtggcgccatctcgcctcactgcaagctccgcctcccgggttcacgccattctcctgcctcagcctcctgagtagctgggacta

SEQ ID NO: 244061 - DNA, 533 bp, Homo sapiens
caaaatttttttattccactataagcaaagaatctgaagcgttacaaaacatgggtatgtgggagatagaaagagggtaagcgactatagtactgcttggactaaagaaagaactattctctgtttggactctggccccaagttcataatcatgattctaacagccagcattttttggccatcactctgagcgccaggcaccggactaagcactacctcattttatccttccctgaccttcatatacacactgttaatacctctrttttatggatgaagaaacagatgtctggagagctcaagtaacttaccaagatcacacaaatagtaaagtcaaagtcaagatttgaaacaggacatcaatgctttacttttcttttcttttttttttccttttttttttttttttgagatggagtctctcgctctgtagcccaggctggagtgcagtggcgccatctcgcctcactgcaagctccgcctcccgggttcacgccattctcctgcctcagcctcctgagtagctgggacta

SEQ ID NO: 244062 - DNA, 610 bp, Homo sapiens
taattatacagttttgagtgattttcttagtattgatttctatttgtattgtgctgtggtccaagagtgtggttgatatgatttcagttctttgaatttgctgagtattgttttatccgattatgtagtcagttttggagtatgtgccatgtaacaatgagaaggatgtatattctgtttaaactgtgaaatttcatacctacagtaaaagtatggcttcagaggggctaatgcttttctaaaagaggaaatratttcaaaaccctgtcaccaatatttgaacatttcaataaaatagaggtaatgaaaacttttggtaattcttagacaaatttcactagctggagtaattagattgagatctacacaaagcaagcattgcttcattatccctctagtaatgatgatgaatgggaccgatcatctgggataacccccacagactggttctcttggttagaatgctgtgttaaagagaccaggataatagattgtcctcccgggtaagctagttagttgtcaattctacagttcccatatctcctgttagccataggaatgtgaggccgtgtccatagctagaaggccaaagaactgggatttttagtca

SEQ ID NO: 244063 - DNA, 625 bp, Homo sapiens
attgaataaagaaaaatactttttataaatgtagtgtagcctaagcatacagtgtttataaagtccacagcagtgtacagcaatgtcctaggccttcacattcacccaccactcactcactgacacccagagtaactttgagttctgtaagttctgttcatggcaagtgccttaggcaggtgtaccatttctttatcttttatactgtatttttactatgtcttttctatgtttagatatggatgaatacataaatacttacattgtgttccagtgtcctacagtattcratacactaatacgctgtacaggtttgtagcctaggaacaataagctatatagcctgggtgtgtagtaggctataccacctaggtttgtgtaggtacacactacgatgtttgcactatgacaaaatcttctagtgatgcatttctcagaagaggatatctctgtcattaagcaatgcataactaatctaatttaaaatgccccaaaaacttaatttggacttgctaatttttcattgtacattatagttagattaattgttaacttactgtcactttcatccattttctaatcattcctaatatcatgtttaagtagtttatttttacaccattaa

SEQ ID NO: 244064 - DNA, 625 bp, Homo sapiens
attgaataaagaaaaatactttttataaatgtagtgtagcctaagcatacagtgtttataaagtccacagcagtgtacagcaatgtcctaggccttcacattcacccaccactcactcactgacacccagagtaactttgagttctgtaagttctgttcatggcaagtgccttaggcaggtgtaccatttctttatcttttatactgtatttttactatgtcttttctatgtttagatatggatgaatacataaatacttacattgtgttccagtgtcctacagtattcgatacactaatacgctgtacaggtttgtagcctaggaacaataagctatatagcctgggtgtgtagtaggctataccacctaggtttgtgtaggtacacactacgatgtttgcactatgacaaaatcttctagtgatgcatttctcagaagaggatatctctgtcattaagcaatgcataactaatctaatttaaaatrccccaaaaacttaatttggacttgctaatttttcattgtacattatagttagattaattgttaacttactgtcactttcatccattttctaatcattcctaatatcatgtttaagtagtttatttttacaccattaa

SEQ ID NO: 244065 - DNA, 544 bp, Homo sapiens
attaggcactcgatacatgagagttctcttctctctccaccgtgcaagtagctacattaccagaataaaaataaagcctaaatgatggcatctctcactctcacataaaggactgcattgacataaacycagatgctagcaatatgtggaagctggacttgcaaggattcattatatatttgtcattctttttttttaagtagaatagaaggttaatgttgacctcctagctagtcttttaaaaaacatacctttaaagtcatatgattagtgctctgtttccctagattaatagaaatcaaaattgtagaaagaatagttaaaatattacaggctttcttctgttcctttcttgtttttaaatttttatcttcttaaaaaactgttatgtacgtacagcaatccttagatgcagcacagcagggcttttgtagttctctgaattataggtaataatgaaactctgaaacttcactttcctcccaggctggtgtggagctgacatggccaggggaggtagcttagctgtgtgagtcggtggtaa

SEQ ID NO: 244066 - DNA, 542 bp, Homo sapiens
aataatagttatcatgtacttactgtataccaggaattgggctaagtgttttacatacattaatcaactcaactgcattaaattctaatagaaaaaaagtatcaaaagagaaagtctataatacctctgtaagaaaagaaatgaagaaagcaaaagctggccatgcatctgcagcctggtctagtagaaaggatgctctgcatattgaacaatatctggtctgagtggcagttgcattcctatggggaagatgagtgtgttgcactaccagagcttactgacacyggttgctgagagctgattcaatgctcaccaagcaaccttctgattataatttatttttcatgtagatttgcctattgggagaaaatgcactgaaccataaacatgagaaatgattgtgcctgacacttcccatctcaaattaaagaactgaattgtggaatttatacactactatgaagccggttaaagggatacagtcttctaatacctagttacctctctggatgaaccaataatcagggtcagccttagaaagc

SEQ ID NO: 244067 - DNA, 542 bp, Homo sapiens
aataatagttatcatgtacttactgtataccaggaattgggctaagtgttttacatacattaatcaactcaactgcattaaattctaatagaaaaaaagtatcaaaagagaaagtctataatacctctgtaagaaaagaaatgaagaaagcaaaagctggccatgcatctgcagcctggtctagtagaaaggatgctctgcatattgaacaatatctggtctgagtggcagttgcattcctatggggaagatgagtgtgttgcactaccagagcttactgacactggttgctgagagctgattcaatgctcaccaagcaaccttctgattataatttattttycatgtagatttgcctattgggagaaaatgcactgaaccataaacatgagaaatgattgtgcctgacacttcccatctcaaattaaagaactgaattgtggaatttatacactactatgaagccggttaaagggatacagtcttctaatacctagttacctctctggatgaaccaataatcagggtcagccttagaaagc

SEQ ID NO: 244068 - DNA, 578 bp, Homo sapiens
gaggattcactaaatcaccaactcaaactatgcagcataattgtggatgtctggaaaacagcagcaactgatgcggtggcctaatatgctgctacaaaaaatgtaatggctctttctgagggaaaacttcaggctgtctatgaatctacaaacccaaagaaggaaatgtcatcaggcagtttagaaaaggaaatgcagatactgatcaaaacactattttccacattttctcagtakggaaaggattgctgatgctgcattgacctaacagtcaagatcacaacttgcctttcattctgtcacctttcaaaagaaagaaaaacatgtatactggaaagctcatcacattttaggactatggtcttttaagagattcccaccaaaagattccttctatggggcccagggccatgttttatgccactgactctgccactatgatcacaaatgacaggaccaagagagagcaactgtcccaagagcagccaatctacagactggccagcaacctatgaaggggactgacatgagagattagcccaacaggcaatgaatctaactggactaattagatttcc

SEQ ID NO: 244069 - DNA, 494 bp, Homo sapiens
tgctgcattgacctaacagtcaagatcacaacttgcctttcattctgtcacctttcaaaagaaagaaaaacatgtatactggaaagctcatcacattttaggactatggtcttttaagagattccyaccaaaagattccttctatggggcccagggccatgttttatgccactgactctgccactatgatcacaaatgacaggaccaagagagagcaactgtcccaagagcagccaatctacagactggccagcaacctatgaaggggactgacatgagagattagcccaacaggcaatgaatctaactggactaattagatttcctcttacagaagattgaactcaagctgtacagaaggggaaagtagcggaaggacacagagcagagggtggaacgaggcagttaagaccatattgagaagatacagagtgaggtaatttgtttaaaacaaaataaagcagagtctgaaaagggctaatagcagcagagaa

SEQ ID NO: 244070 - DNA, 494 bp, Homo sapiens
tgctgcattgacctaacagtcaagatcacaacttgcctttcattctgtcacctttcaaaagaaagaaaaacatgtatactggaaagctcatcacattttaggactatggtcttttaagagattcccaccaaaagattccttctatggggcccagrgccatgttttatgccactgactctgccactatgatcacaaatgacaggaccaagagagagcaactgtcccaagagcagccaatctacagactggccagcaacctatgaaggggactgacatgagagattagcccaacaggcaatgaatctaactggactaattagatttcctcttacagaagattgaactcaagctgtacagaaggggaaagtagcggaaggacacagagcagagggtggaacgaggcagttaagaccatattgagaagatacagagtgaggtaatttgtttaaaacaaaataaagcagagtctgaaaagggctaatagcagcagagaa

SEQ ID NO: 244071 - DNA, 510 bp, Homo sapiens
tactgatatggaaagtgtgctatgatatattaagagaaaaagtgaacttgaatgaacagtataatcccatttatgcaaaatctaatcctgtatttttgtttatgaaataagtgcatgtaaatgcatacgaaaaggactggaaagatgcacaccaaattgttcgtgctgattgcctctggagaagagcaggattggggaaaagagactttcgtttcttgctcaactgttttgtttaacatttttacaacaaaaatatgctaatgtctatctgtatgatcctattacaaatttcaaaaaataaaarttattccaatggcagagtaggaaaaactaaagaggagtaagattagaaacagggaggacaatgagaaggatgctgtcattatgcaaacaggaaaagatgggagcccagggtgggagtggaactgggataaagaggacatggattcaagagagataggaaagtggaaatggtgattattcaggtgtgggcatgaagagggaggaatg

SEQ ID NO: 244072 - DNA, 485 bp, Homo sapiens
gtagagaaaattaaaagctcaagataaatatgagaaatgttttaaataagcaccgtccaagagaacttcctccaatgatgaaagtattctatatctgccctatccaattcagtagccactagacacatgagcctattgaacatttkaaatgtggctagtgtgacagagaaacttaaattttaattgcatttatttcaattaatttaaatttaaatttaaatagtcacatgtggctatttagtggctgtaatagtaggcagtacagttctagatgaagaattatcaggaagacataaagtcaattaaaagttccacagtgggatggttctatagcactggggacctgttggtacaatttctttgataggaaaaagcaatgtaacctttttattttacttaacagaattgtaatcatgcagaaatgtcctttagagatccagaatccttggttggcagagaatataagatattggggcaagagatgt

SEQ ID NO: 244073 - DNA, 603 bp, Homo sapiens
ttaagcaatgtctttttaatattctctgtgacaaaatgggaactacaaaaggcacttcttctgaatactgaagtatgatcgttttctcaaggaaaaacacttttgtgattgagttgcaagctgacgtaaccgattttttcatggaacactatttttacttaaaaggatgactgacagatgaactatggcyattcagacttggataattggcagacattttctcaaaatggaacgaagtgagcctgtaacttcaaggaaaacaaccaacagaacttgttgccaatgataaaattcaagtttttaagcaaaaattagaattttagaaaatttgtatttgccaccatgggtctgacagcttcccaatacttggacttttctaatgagatcagtggtgatgttaatgaacgtaattttggcgtaaatgtttggaagatctacctgattcaatgaatcaatattttcaaaacagaaaagtataatagttaaaaattttttaattaatgggttaaacagtaaacagttgaagagagaattattgatatatggatttttttaaaagtactcataatacagcagagaaaacaaggagatagaaaaagtgaa

SEQ ID NO: 244074 - DNA, 529 bp, Homo sapiens
attaagttaaaatcttgagatgacaggattcttctgaattatctaggtagatatataggtgcaatataatcacaagagtccttctaagaggaaggcaggaggtcagagagaggaggagacgctacaaacctggctttacacatggagaaaggaaccacaaacagcctctagaagctaaaggaggcaaggaatagattctcccctggagcctccagaagaaaaattagcccctgctgacmctgtaaggctcattgcagacttctgacctctagaccttcaagagaacaaatttgtgttttctttaagccatcaagtttgcagcaacaatgggaaactaatacaggcaggttcttataaaactaaatatacaactcccatacagcacagtaagtgtactcttgggcgtttatcccagagaaatgaaaaaaacttatgtttgcacaaattgttacagcagccttttttgtaatagtcaaagctgcaaacagtccagatgtcatttaacaggtgggttaaacaaacagtagtg

SEQ ID NO: 244075 - DNA, 416 bp, Homo sapiens
ttgggtgggggactaggggagcgatagcattaggagaaatacctaatgtagatgacaggttgatgggtgcagcaaaccaccatggcacgtgtatacctatgtaacaaacctgmatgttctgcacatgtaccccagaacttaaagtgtaattaaaaaaaaaaaaaaagaaagaaagaacaagtaggggaataggggaagggagacaagaaaggaaaaatgagcagtttatgagtgtgagcaactggggctcaatcccactgggggcctctgggagacagtgaagaacatgactcagagttctcccacgtgaggggtgagggtgctggattatttattataataaagttacagggaacagagaaaaaattaaaaaattaaaaattaaaagtgggtataaatgagtgcagaactgcctc

SEQ ID NO: 244076 - DNA, 581 bp, Homo sapiens
ttaacaatagttatctctgagcaggggaattatgggtgaattttattctcatcttaatattttatataaatattttttcttaaaatattaagktaaggttaaataagcaatatgaggttctatcaaactcaataaaaagccattattcataatagctatagccagatacacttttaatagtagagaaaggtttttttttctagcttttattttacatttgaaggtacatgtgaaggtgtgttacattaggtaaacacatatgttggggctttgttgaacatattatttcatcacagagatactaagcccagtacccaatatttatattttctactcctttccctcctctcaccctcctcactcaagtagaacccagtgtctgttgtttgcttcttaatgaagaacaaaatttttacaaataagtttaaccatggaggtgaactatctccacattgaaaactgtaaaacattaatgacagaaaatgtagaatacacaagtaaaattgtatcccgtgttcatgaattggaagaattaatattaaaatgcccacgccacacaaagtgatctacaaagctaattc

SEQ ID NO: 244077 - DNA, 581 bp, Homo sapiens
ttaacaatagttatctctgagcaggggaattatgggtgaattttattctcatcttaatattttatataaatattttttcttaaaatattaagttaaggttaaataagcaatatgaggttctatcaaactcaataaaaagccattattcataatagctatagccagatacacttttaatagtagagaaaggtttttttttctagcttttattttacatttgaaggtacatgtgaaggtgtgttacattaggtaaacacatatgttggggctttgttgaacatattatttcatcacagagatactaagcccagtacccaatatttatattttctactcctttccctcctctcaccctcctcactcaagtagaacccagtgtctgttgtttgcttcttaatgaagaacaaaatttttacaaataagtttaaccatggaggtgaactatctccacattgaaaactgtaaaacattaatgacagaaaatgtagaatacacaagtaaaattgtatcccgtgttcatgaattggaagaattaatattaaaatgcccacrccacacaaagtgatctacaaagctaattc

SEQ ID NO: 244078 - DNA, 602 bp, Homo sapiens
gaagaatcaacaccattaaaatgtctacacttcccaaagccatctacagagtcaaagctattcctatcaaactatcagtgtcattttccaaagaactagaaaaaactattctaaacttcatatggaaccaaaaaagagcccaaatagccaaagctgttctaagcaaaaacaacaaagctggaggcatcaaattacccatcttcaaactacactagaaggctacggtaaccaaaacaggatggtacaaaagcagacaataaaccagtggaacagaatggagaataaagaaataaagccatatcctacagccatctgatcttcaacgaagtcaacaaaaataaccaatggggaaacaactccctrttcaacaaatggtgctgggacagctcactagccattatgcagaagaatgaaactggactcctacctataagcatacatgaaaattacctcaggataaattagagatttaaatataagacttcaacctataagaatcctagaaaaaaacctaggaaacaccattctggacatcagttttaggaaagaatttatgactaagtcctcaaaagcaattgcaacaaaaacaaattcacaagtga

SEQ ID NO: 244079 - DNA, 631 bp, Homo sapiens
gactggactgcataaatcttagcctagagcacccaacaaatgaaaagctgttattcaagtagccacctattctgattatatttggagcattacctaccgtattggtagtcccagccctgtaaaatctaatattacactttctttagcaaaactatttctcgaggtttcatcctctttttttagcaagtgattttcatatctcaaagttagttgagatgttcaagaccatctgatccaaccctttcattttctatttctacttagggtaacaaaatgaaagcaagcgcgtggccttcttctgagtgacagaactggcagctcagagccactgctgaaaaagaagatccagaaaatccccacattttgagtcacagctgcagctgctgagggccaagatactatcccacagggctccaccattcttgaagaactaaggaggaaagacctgrgagaggagaggtcacaatttgggaggctacacttgtattaaaatgaggctattctcttcctttacctctaggaagccaaagaaagttcatcagagagattgaggattcccaaactcccccaacctcaactaagctagggactagagctagcgtcttatctaagagtggatcaagaacttgat

SEQ ID NO: 244080 - DNA, 564 bp, Homo sapiens
gttgtattttaactaacatattgttcattttttatgtttttaagctttatacaaatggaatcataggtatttatctgttacatatccatgtaacaaacctgaacatgtacccctgaatctagaaaaaawaaataaatagtaacatgaaaaaaaaatctaaaaagaaaaaaaaaaaaggaaacctaatactgagacactggagtaagccaaagatgaatccctagctaggattccatttgcataaagcataaaaacagagaaaaaaagaacaatatagtagtttaaatgcaacatagaggataaaactatgaagaagtaaggtgatcaaacacagaattcagccaggaagaagacggatgtgatctgacaggaacacacaaggggcatccagaatacgacagcgttttatctcttgaccgaggtgggagttgtttcactgtttttcttctgactaaagttcattctttacacagctaactatctcagttattctcctaccatgtttcaatacccacagctacttagccacactgcagctatctgttgattgctttcccatcatcc

SEQ ID NO: 244081 - DNA, 564 bp, Homo sapiens
gttgtattttaactaacatattgttcattttttatgtttttaagctttatacaaatggaatcataggtatttatctgttacatatccatgtaacaaacctgaacatgtacccctgaatctagaaaaaataaataaatagtaacatgaaaaaaaaatctaaaaagaaaaaaaaaaaaggaaayctaatactgagacactggagtaagccaaagatgaatccctagctaggattccatttgcataaagcataaaaacagagaaaaaaagaacaatatagtagtttaaatgcaacatagaggataaaactatgaagaagtaaggtgatcaaacacagaattcagccaggaagaagacggatgtgatctgacaggaacacacaaggggcatccagaatacgacagcgttttatctcttgaccgaggtgggagttgtttcactgtttttcttctgactaaagttcattctttacacagctaactatctcagttattctcctaccatgtttcaatacccacagctacttagccacactgcagctatctgttgattgctttcccatcatcc

SEQ ID NO: 244082 - DNA, 593 bp, Homo sapiens
gtaaattaaaaacaaaaacaagtaatggggaaagcaaaaaaaaggaaaaagataaatcttagaagccacatgagactggtgtcagtctctacaaagctggaagtgggtaaaatctgtcctcaccttctccagtttccctctctgctcttcttcytctggtttcccttctgaactcctcttctacatgtcacaaaggatgaatcttctcaggatttggtcctgtgccctcctctcttctctctacattcttgggtgctttcatttatccccacaggaacactgtgtcttatatttactgagagcctattggcccagggcttacagtccattggatagtcacctgaatgtcctaaaatcaacacattcccaaatgaaaacctcaccttctttgtgaacctccttttgtattcctccttttagattggtggcatcaacttttctttacctcacccccatgtgcaatgattcactaagtcttattgattatacttctgaaatattcttttttaaatgtgtcttatgtccaagctcacaatctctgttaactctaagagacaaccttctaaataaatggcctttgaatctcaaggaac

SEQ ID NO: 244083 - DNA, 593 bp, Homo sapiens
gtaaattaaaaacaaaaacaagtaatggggaaagcaaaaaaaaggaaaaagataaatcttagaagccacatgagactggtgtcagtctctacaaagctggaagtgggtaaaatctgtcctcaccttctccagtttccctctctgctcttcttcctctggtttcccttctgaactcctcttctacatgtcacaaaggatgaatcttctcaggrtttggtcctgtgccctcctctcttctctctacattcttgggtgctttcatttatccccacaggaacactgtgtcttatatttactgagagcctattggcccagggcttacagtccattggatagtcacctgaatgtcctaaaatcaacacattcccaaatgaaaacctcaccttctttgtgaacctccttttgtattcctccttttagattggtggcatcaacttttctttacctcacccccatgtgcaatgattcactaagtcttattgattatacttctgaaatattcttttttaaatgtgtcttatgtccaagctcacaatctctgttaactctaagagacaaccttctaaataaatggcctttgaatctcaaggaac

SEQ ID NO: 244084 - DNA, 579 bp, Homo sapiens
ctgaggtgggaagactgctcgagcccaggagttccggtttgcagtgagctatgctcatgccactgcaccccagcctggacaacagaatgagaccctgtctcttaaaaaaaatactgattgggactgggtgcagtggctcatgcctgtaatcccagcactttgggaggccgaggagggtggatcatgtggtcaggagttcaggaccagcctggccaagatgctgaaaccccatctctactaaaaatacaaaaattagccaggcatgctggtgggtgcctggaatcccagatacttgggaggctgaggcagagaattacttgaacctgggaggcggaggttgcagtgagccaagatcactccactgctctccagcctgggtgacagagtgagactccatcccaaaaaaaaaaaatactaattgggtactgctttgctctttttcttacatatttacaatatttgtgtttgctatagttattattaatcctacagctattactaaccctagccctaaccccatsaaaagcattatcagacatttcacattctggttgtcaattgctaactaattattagtaa

SEQ ID NO: 244085 - DNA, 352 bp, Homo sapiens
caatatgattgactttagcacttgagaagccaaatatgtatgctaaaatgtctagcataacaattaaaagaatagaaacaaagtatatagcttctaaattagtaaaagaggaaaatagaatgagaaaaacaaatactctatcckagagaatccaaggaaaaaaatgaaaaagaaacagaaaaggtaggacaaataaaaagcccatgataagatggtagaaataaatccaaacatattaataactacaaaaataaatgtaaatggatgagatagatatctaagtggaagaaatatatttttcaactgtatttttaaaaaaatggattatctacaagatatccacaaaagagta

SEQ ID NO: 244086 - DNA, 597 bp, Homo sapiens
gtttataccaccatccaatataaggataggcacttggtatacaagcaatgcttcctaaattaaatacagataaaagcaatgccatgagtactacagatgaaaagtctaagaaatggatcttttggagagtcagagaaaaaataaatgttttaattcagattctatttcttagaatcctaaagtaaagcaaatatatgatttccccgtttataacaatttagaaacaagcaactcaaaaaatctcatcaatacaaaacaagtagttacatatgaattatttttcctttgaacctcagaaatttttcattmagttagttaagatttaaataatgacaaggtattctaatcctctaagtgtccatcagtcatatttatttgcttgttcacatctgagtgaatactctgtaatgtcagagaagccaaatacacaaggggtggacaagtggattataggaatcacagcaacctaacatcttactgataacataggggcgctaacagttcccaatcatttcacatgttgtaagtaatacctattttaaaacactggattacaattacacaattatatttattataaagctaattcttattatc

SEQ ID NO: 244087 - DNA, 597 bp, Homo sapiens
gtttataccaccatccaatataaggataggcacttggtatacaagcaatgcttcctaaattaaatacagataaaagcaatgccatgagtactacagatgaaaagtctaagaaatggatcttttggagagtcagagaaaaaataaatgttttaattcagattctatttcttagaatcctaaagtaaagcaaatatatgatttccccgtttataacaatttagaaacaagcaactcaaaaaatctcatcaatacaaaacaagtagttacatatgaattatttttcctttgaacctcagaaatttttcattcagktagttaagatttaaataatgacaaggtattctaatcctctaagtgtccatcagtcatatttatttgcttgttcacatctgagtgaatactctgtaatgtcagagaagccaaatacacaaggggtggacaagtggattataggaatcacagcaacctaacatcttactgataacataggggcgctaacagttcccaatcatttcacatgttgtaagtaatacctattttaaaacactggattacaattacacaattatatttattataaagctaattcttattatc

SEQ ID NO: 244088 - DNA, 563 bp, Homo sapiens
tagaagcaattatagttcctaaagttcctatgtactctggtccagattttgacagctttgattatgatgtggcattttaccacacataactaaatccaaaatgatgcagaaaccaaattatgagccaagatagggtctgagattgtagaaagtgtcagggaaaaattgatttagaaggacaaatattaaattgttgatctattatcaattatgtagaacataacacctaagtattttgcaaacaacataacatgaaaaacgaagataatcytttccctaaaatgcttgttttaaggagggtagggagtgaatataactgagttgctaccctggaggtaagctgcctactggagaactgctgacatggctttgtatcttccattccctgtgctaaaggcactcagaggtcttgcctaccaaatgacacaatgatgcatgcagcatgctgccttgtggctatcaaaccataccttacagatctttcatttaaatgcatttcatgtagcatttaagcgaattccatgggggaaaaaaggggcttttgttatagtaagttagctatt

SEQ ID NO: 244089 - DNA, 615 bp, Homo sapiens
ctattaaacctggtcctgccacaacctcacacactttatgttccaaacacactagatttcttaccccrtgcggaaattcaacaaagcaaaaataaactgggtggggagggagtatgggacacaggagaattttgggggaagataatagagctgttggttacataagtatatccatttgttaaaattggaccactaacatttttcaatgtaagcaaatttagctttaaaaaatgtaaaaagtaatagagtgggagtggatatgggtggctatatagatgatacaagaatggcagaatgttgataacagtcgaagctgtgtgataagtacaggaagatttattatactattctgtttattttgcatatgtttaaatttttctgtaagttaaaaaatatgaaaatatgttaaaacttactaacaaagaaatgcaaattaaaatcacaatgagataccactatatacccagcagaatggctaaaattaaagacaattccaaatgctgatttggaaatcccattgagaggatgtggaacaatgcaaacactcataaattgctgatgagagtgtacaaaactgttttgacattatctactaaatgtgaagatgccactatc

SEQ ID NO: 244090 - DNA, 532 bp, Homo sapiens
aaattgctgatgagagtgtacaaaactgttttgacattatctactaaatgtgaagatgccactatcttttgacccagtaattttactcctaaggtatatatcacaccagaaatgtatgcacataaacaccaaaaaacaggtacaataaccttcacagaaactttattgatgacatccaaaaactagtaacatttcaaacgttcttcaactgaatggataaattatgttaagtttatacactggaatatgatcaatgaaaatgcaagagtatggctacacaaaacaatggatgaaatcttaaaaaaaccaatgtggaataaaagaagttaaacacaaaatatgcagataatgtataattctacacatagactatatgattccacaaaactaatgaatggttttattcctgtgaggaagaagaaagtggcagtaattgattggaaaagatcacaagaaatgcttctgrgtaattggtgatgttctactccaatagctgtgtgatggtgccatgttcattttatggtaaatcatt

SEQ ID NO: 244091 - DNA, 586 bp, Homo sapiens
tttaaaactcttgtctttctagtcttaagaaactcatcttgaacacacaacccagccaaatgaatgaagatagaaaataacgctcaagtcagctaggtaagtagaattaatgtcttaaagattattcactaaaagccagacttcaagactacacaatatatccatataacgaaagtgcacttgtatcccttaaatttatacaaataaaaataaatattgtgaaagtgctatattttatttggatatgtttgaaacatatctaggcttgtatttaatttaattgttccttatgatttcacttaaagaaaacaaagacgtcttgtcttcaaataattaaaagcatctacagaagatattttatagtccacgtrttcatccctacattatctttgtgtttaaaagagacagaaaaattcaaagaaaaaatacgaagacaagctgggtgtagtggctcacacctataatcccaacactttgcgggggccaaggctggaggatagcttgaagccagaagtttgaaaccagcctgggcaacacagggagaccctcatttctacataaaaattttaaaaattagctaggcatg

SEQ ID NO: 244092 - DNA, 602 bp, Homo sapiens
ggtgtagtggctcacacctataatcccaacactttgcgggggccaaggctggaggatagcttgaagccagaagtttgaaaccagcctgggcaacacagggagaccctcatttctacataaaaattttaaaaattagctaggcatgctggcactttcctgtagtcctagctactcaggaagctgaggtgggagactcacctgagcccaggtgttcaagattatagtaagctataatcacaccactgtactccatcctgggcaatagagtgagacggtctcaaaaaatatatatgtacatatatgtgatatttacatattaatatatgtgtacctatatatgcatatatatgtgtatatgtacataaataatgtgtacctatatgtacatatatgatgtgtacatayatatagacatacatatgagattaagagaaagaaaatgctaattaacatttgttgagtcactattctgtctgagacacgaggccagacactttatatccattatcttacttagggaaatatgatccaaaacaaagcaaaagcattaaccagctttatgttaaccttcatatgttccctgagcatggagataaaaggag

SEQ ID NO: 244093 - DNA, 602 bp, Homo sapiens
ggtgtagtggctcacacctataatcccaacactttgcgggggccaaggctggaggatagcttgaagccagaagtttgaaaccagcctgggcaacacagggagaccctcatttctacataaaaattttaaaaattagctaggcatgctggcactttcctgtagtcctagctactcaggaagctgaggtgggagactcacctgagcccaggtgttcaagattatagtaagctataatcacaccactgtactccatcctgggcaatagagtgagacggtctcaaaaaatatatatgtacatatatgtgatatttacatattaatatatgtgtacctatatatgcatatatatgtgtatatgtacataaataatgtgtacctatatgtacatatatgatgtgtacatacatatagacatacatatgagattaagagaaagaaaatgctaattaacatttgttgagtcactattctgtctgagacacgaggccagacactttatatccattatcttacttagggaaatatgatccaaaacaaagcaaaagcattaaccagctttatkttaaccttcatatgttccctgagcatggagataaaaggag

SEQ ID NO: 244094 - DNA, 686 bp, Homo sapiens
atttattttttcttttgtagggacaggtctcattatgttgcccagactgaacaagcagtcctcccgccttggcctcccaaagtgctgggattacaggtgtgagccactgtgcccagcctcaatgaacatttttgaatgaaggcacaaatggacagaagtggaagtaaactcagaaatggcataacagggactaaggagaaaaataactcactcattcactcatttaataaatattgactgatttctatacatagattaggcactatgtgtcagatactgttctagggtatgtatgggtaaacaaaaccagacatgattacactggccctcaaggagtttacagtctaattgaagagacagatattaatccaaaatcaccaaatataatatgcatactatgatcgtggtgtggtaagagatatggtkctagaagagggtataacagagagatttgaccctgccagggaggtaagggaagccttgcttaaggaaataaggaattgcccaattaaagtgtagtagaaagaatgttttaggcagagggtctggcaagttcaaaagtcttcatgaaagaatgagagctagtgtgactgctgcacggtgggcatggtaagggatgagatcaagaagacccttataggccatgtacaggggtgatttatcttaacagcaaagtaaaaacatca

SEQ ID NO: 244095 - DNA, 636 bp, Homo sapiens
aagttctatattttgtaagtcaacaaagagttaaatccataaacaagaaagaataaggtagcccaatattgaatttttttaaatttacattaattctttaaagaaagaaaataccattagatacactgccagcctcatcacacagagacaatatgctgcattcaaaacaaacattctgttccagaaagactttatattagtctgctatctgcctttatcacataaagttatactggatctcaagttagcctgtaacataatgtaatttctgagaaaatgacttatctaaatttttctgaaaacaaaactgatcttcaaatcaagacctagaaaatactagaaagattaataaagactttttaatgctctccaccattcccaagaaatgaacaaatttacctcattctttgctctttattcccaaccttctcatttacttaaggggaatctaaataagtgatcaatcacatctggttrcaagttgttaaagaataaagaagtaaaaagtaatataaactagaaaatccatttatggcccatataaacattctaaaacaatatccaatattttaatataaataaatatcctcttaaatctaacctcttatatgtcatctttaggaaaacccaagtgga

SEQ ID NO: 244096 - DNA, 466 bp, Homo sapiens
aaccactgttgacagaccaaaagtgcagttactctttgaaaacaaaatataggcattgccaatttccaccacagtatatttagaactaagttatagactaaattctaagcaaaaccctactatcatttggaaatcaggagaactaaaattgatgctgtgttcccacttcagcagccaatcaattcttgatatatcccaaggcagtggttcygacatgaggttaatcattacaatgagctgggaataaagatgtacacagccctcccctagaggttcagatttaatagatttggagtaggacagaaaaattaaatgttcccccattattccctggcaaactttttggctggttctttgaagctcttttctgtattaggaagtaagcaaggagtttttcaatacattttccccttattccttaaagaaggtcaaaactgtattacaggattgcctgtgatttttctct

SEQ ID NO: 244097 - DNA, 466 bp, Homo sapiens
aaccactgttgacagaccaaaagtgcagttactctttgaaaacaaaatataggcattgccaatttccaccacagtatatttagaactaagttatagactaaattctaagcaaaaccctactatcatttggaaatcaggagaactaaaattgatgctgtgttcccacttcagcagccaatcaattcttgatatatcccaaggcagtggttccgacatgaggttaatcattacaatgagctgggawtaaagatgtacacagccctcccctagaggttcagatttaatagatttggagtaggacagaaaaattaaatgttcccccattattccctggcaaactttttggctggttctttgaagctcttttctgtattaggaagtaagcaaggagtttttcaatacattttccccttattccttaaagaaggtcaaaactgtattacaggattgcctgtgatttttctct

SEQ ID NO: 244098 - DNA, 601 bp, Homo sapiens
tacattttccccttattccttaaagaaggtcaaaactgtattacaggattgcctgtgayttttctctttaaattcagctcaaattacttcaggttctgggccaacatgggattatggctatttagcgtgattctctacgaagtagagaatctttgtctatactgagacataattttgaactatgcttacgcctcttgacagcactataaatttattcaaagcctttctcccttaaaacaccccaattacaattaagtattgatataattactagtttaatgcctatcttctctactagattatacactccaaagcagccaagaataagcctatcttatttacaagtgtaacgtattcagctcttacaatgctcaaaaacaatttgttgaagaaacgctactaatctagggaacctaagtactatgaaagaatatctttaggcagagaaaaaataaatggtaaaaagcacctgatctttaaaaataaaaacagccaccagaaataaaatacaaacggaaggtctttagtcactactttcctacagctctttgccacaggtaaggtggcaaaactgatctgcagtaatttactaattaatgta

SEQ ID NO: 244099 - DNA, 601 bp, Homo sapiens
tacattttccccttattccttaaagaaggtcaaaactgtattacaggattgcctgtgatttttctctttaaattcagctcaaattacttcaggttctgggccaacatgggattatggctatttagcgtgattctctacgaagtagagaatctttgtctatactgagacataattttgaactatgcttacgcctcttgacagcactataaatttattcaaagcctttctcccttaaaacaccccaattacaattaagtattgatataattactagtttaatgcctatcttctctactagattatacactccaaagcagccaagaataagcctatcttatttacaagtgtaacgtattcagctcttayaatgctcaaaaacaatttgttgaagaaacgctactaatctagggaacctaagtactatgaaagaatatctttaggcagagaaaaaataaatggtaaaaagcacctgatctttaaaaataaaaacagccaccagaaataaaatacaaacggaaggtctttagtcactactttcctacagctctttgccacaggtaaggtggcaaaactgatctgcagtaatttactaattaatgta

SEQ ID NO: 244100 - DNA, 585 bp, Homo sapiens
tggtttgctccaaggaggttgttgatttctggcaaatagatcttaactattattatttcattagatagtaatttctaaaaattgagaattatttttcctcttcaaaccaactacatcttgcacaatgctctggatattgtaggagtcccacagaagttcatcaaattcaattgaaagactgaaattattcagtaatcttagattcttcaataccaaagcattaagataaaatcagacaagagcactgaattctgaactaattcaataaaagtcatcaattatgaagcactttcactaacacatggctacatatgggcacctaatttaaaaatggcttagttattaaaggacaaaaataacatgaatgtcayagaattttcaaaggagctttataatatgtgtaacttgctagaattggggttatcaaatttaatatgaacagctctcatcaaatttgaacttaatgaatgcagttgtgaaacaggcaaatccaatacactgcgaatagtctaactcttaattcattccacagatatgatttacccctaatagccagaagcatcacttctaatagctcacgttatg

SEQ ID NO: 244101 - DNA, 603 bp, Homo sapiens
tatctctcatcctctttctcattaagtatgcattactatctatttcactagggtattttgtgacttaatagtgtgcactgatttgagccttaacaggggaaagagctaaacaaaattctttatgtatgtatttgtactatggagaatacagaatcatgataaatatgcaataacagtataaaacaaaaagagctttaggacagacagatgaaggaggtgatgtggagaacagagacacagacattgtataaaccacggctaaagagataactagggcagatatccaggcaagaaaaaccagttagatcagttgtaaatcaaatatatttaactattaatgtcttggtggggtgaggggaaaatgaccttatattttgattagacatggatacatatgaatgttcaaaccaagacttgtagcaggtattgctagatattatccattgcctcttcagataacactttctaccttgtgtccaatctgccccagcagtctggcctttatggtctacattaagggatcccttcactctgrcgtcccaggaaggccaagtggcaggagagcagaaggcaggaagagagtgaagcaagagtatttatctt

SEQ ID NO: 244102 - DNA, 526 bp, Homo sapiens
gcacttttccttggaactcaggcagaaaaataataaatcacgcctagctctcttgctcaggatccagtcccggttccccacctgtagttccctccagctgcttcctgctacttccattcctgcaccttatgctccagctattccaaagtacttcctggcttaaaacaccaagtgatgttgtaagtcccaagctttgtaagtgatgttctctctcactggagtcctttctctccccagccccttccattataaattcccactcctcctcctcagatgtctcttcttctacaaagcctgtcccgcccctttcacagagtaaagaagcccacccctactgtgtccctgaacgtggctttaggcatggaagaaactacatttaacctttgttccccataacttgaaaagcaactggcacatcatagattctcaatgcatgtctgttgaattgagttttactgttcatctaccttgcagacaaatgrcatttcttagatatcaattctttttgatttcctttttccaaccc

SEQ ID NO: 244103 - DNA, 504 bp, Homo sapiens
ctgtagagaatttacaaacataacaaacactttatacaagtaataaagttttaataatgaaactgaccaaaaaccagtctgctccttatcatcatgtacatgccaacaattctaactaatataagtgataaaatgctgttccctccccaccaaaattttgttgtataagttctaacaattgttgtggttactgttgggttttaataatatatatgcaaactttaaattagcacgtttttactgctcatccttttatacaggcatacgttttattgcactttacagatattccatttttcacaaatttaaggtctgtggcaacctttcatcaaacaagtctatcgctgtcatttttccagcagcatgtactcacttgtgtctctgtgtcrcattttgatcatccttgcaatgtttcaaactttttcattattattatatcctttatcgggatctgtgatcagtgacttttgatggaattattataattgttttggggtaccacga

SEQ ID NO: 244104 - DNA, 497 bp, Homo sapiens
ccactgacagcactagacaggttatcaagacagaaagacaacaaagaaacaatggatttaaactataccttggaacaaatagacctaacagatatatagagaacgtttcatccaacaaccgcaaaatacacgttstatttaatagcacatggaactttctccaagatagaccatatgacaggccataaaatgagcctcaataagtttaagaaagttgaaattatatcaagcactctctcagaacacagtggaataaaactggaaatcaactccaaaaggaaccttcagaaccatgcaaatgcatggaaattaaataacctgttcctgaatgagcattgggtcaaaaacaaaatcaagatggaaattaaaaaattattcaaactgaatgacaataatgatacaacctatcaaaacctctgggataaagcaaaggcggtgctaagaggaaagttcataaccctaagcacctatatcaaaaagattgaaagagcacaaac

SEQ ID NO: 244105 - DNA, 572 bp, Homo sapiens
gtacaacatgaaggtcataggtaataaaattgtactctatatgagattcatgctaaatgagtgctctcaccacaaaaacaaagggtaactatgtgagataatggatacattaatttgcttcactatagtaacctttttactatccacatgtatcccttaacatgttttataccytgaatatatacaatacaatttattttataaataaataaaattctatttcccttgcctcaatgaaacaggaaagaagacaggcatagaatggagggctcatatgaaagaaaaattctgcctcctggaaaacaattgctaatgaattggtatttgacagcagaggcattgcaatggcagggacttcaaaaggaggctggtcactgaaaccagtggctgttctcaagacagtggaacaggagcacatggacatgcaggagggctctgtagaagccaggagccaccagaacctgaccagaaaagaagacaaaggcatcaggctgtccaaagtcttaatggggaaaaactggaaatttaaatcaaagccctactggctctcttttgcactcagtgttggtggt

SEQ ID NO: 244106 - DNA, 455 bp, Homo sapiens
ctacttcctctttgcagtggggtctctagtttgtgccatgactcctgtagagcttctatagagttctgtaaacttctgtagagtttactagatgagaaggattgacacaattacaaatgggaagaaaacagaaagggccacactacggtatgtcccaggcagaagtgattgcttctcctttcttccttccttcctgcccagggcctcatctttgtggtggacagtaatgaccgggagcgggtccaagaatctgctgatgaactccagaagatggtgagtacccagagccctgggaactgagccctcagcttggggacagagtgatctctgtagtggtatagaagtcagggagcccccmacaggcattgaagaccaggaatataagtttttctttgtggacagacacattgtgtatctcaccctgttttggatgggagtgactttttcactttttc

SEQ ID NO: 244107 - DNA, 621 bp, Homo sapiens
ttctggacagataaatataatctctccagaaagcactgacgatacaagtgatgtctgattatcacccgtcaagaaagtyatattgaatgacactcatcttttaaacagtccagccagggcagagatgaatgctacgatatgggtgaggacattctttttgttgaggacaagggagttaatgaagttcttattttatattttagaataattttagatttacaggaaaaactcaaagacaatgcacacagtgcccatatacccaagcccagctttcctcatgatgaacgtcttacaatagtatagcacattgtcacaactaatgttgataacattattattaattgaagtccatactttactcatataaatatccagccctgaaatatcattagtttttacccaatgtcctttttctgtcctctgatactataatacgtttagtcatcacgtctccttgggcctctcttagctggaacagttgggacactatcttttacaatgtctctgccatctcagactcaacctccatgcatctccacaccacctagaccccaggaacccatgagcacagggaggaaggtcatagaggaaaataagtcactcagggtgatgcatggagcc

SEQ ID NO: 244108 - DNA, 621 bp, Homo sapiens
ttctggacagataaatataatctctccagaaagcactgacgatacaagtgatgtctgattatcacccgtcaagaaagttatattgaatgacactcatcttttaaacagtccagccagggcagagatgaatgctaygatatgggtgaggacattctttttgttgaggacaagggagttaatgaagttcttattttatattttagaataattttagatttacaggaaaaactcaaagacaatgcacacagtgcccatatacccaagcccagctttcctcatgatgaacgtcttacaatagtatagcacattgtcacaactaatgttgataacattattattaattgaagtccatactttactcatataaatatccagccctgaaatatcattagtttttacccaatgtcctttttctgtcctctgatactataatacgtttagtcatcacgtctccttgggcctctcttagctggaacagttgggacactatcttttacaatgtctctgccatctcagactcaacctccatgcatctccacaccacctagaccccaggaacccatgagcacagggaggaaggtcatagaggaaaataagtcactcagggtgatgcatggagcc

SEQ ID NO: 244109 - DNA, 540 bp, Homo sapiens
aaatcccgtgaggcatcttaggacttgaatccttaacctttcaagtctaagccttgagcttggaagattcatgagcaagcaaatggatgcagcagagaagaagaacctgcagatgccgtgtcatgtgtttttaatttcctgaaggatttgggtgatgacagggctaagtatcatcctgagatggactggagaatgtggcagtgtctctgaattacccggcagcagaggcaagctccctggagttgctgtgggaggcagggtgggtgggcctccttgctccctcccccacgtggccagagttttgtaattcccacatgacgtccactgtgctgggcagtcccctcacagcacaaggccccttagaaacctttgcttgtctctgtcccgtccagcwttttagttagcatgtcagcatcctcaccagtgtttacgattgggagcttattattttcatcacttacttctttctaaaagcagccattgctggagtttgacgatgaaaagggatggctgtggtcattttgtacatcaggggcactt

SEQ ID NO: 244110 - DNA, 630 bp, Homo sapiens
aatatgaaagtcatctgcaggaatgagcaaccagggatgatttttgccasttttttgggctcaatcttttgcaccagaagaaatgaactcaaaatcctgggctgtctgctgctccccaaacccactctggaaacaaaagaccatgatgctgctctaatcatcacacaaaatgtttagaaagggtgctattacaaggggctccaatctgaataccctgatccaaacttcttggtcacatgcttagctagaaattgacagagctaataagatattcaaattgcacataggtgttcaccacccccagccaccaaatccttctaaccatcttgagaattatctagagaaaacaaatatggatgcaaaactctgcaaactgaaaatgttaccccacctccacccctggagtcaggaaggcagggaaagaagtcagtggtgagcacatacacaggaaagagaatatggaattgaattgttttcagtgatggaaaatattcagttttccccaaatcttctaaattatttgcagtcctgatagtcctaactattaattacagcaatacagtacaaagaaaaagagttctggttttttgagagctgtataaactttctgaaattctgcaaacctaaacc

SEQ ID NO: 244111 - DNA, 594 bp, Homo sapiens
acctggctcttagtatcattctacccatggtggcaggacccaaataggatatctgtaactatgcttttgactgtataaagggaaccctcctttaaaatgccaaaatgctaattactcatgaaacttggttttcttttcaccactgtgtataattcctwtgtttattccagtctctgtctttcctcttgtattgtctacctttgtattttcaacagcacaggaatgtttacatgtttgtcatcgagtgccactcaccaggatgggcccacagtcccccactccctattgctcacccccttgttgcctcccaaaccatgtgcactgccatctgcatgacaggaatgactatccatttctcttctttttcattttacctcatccttccctcccaatcccttctatcctttttttttctcagcagttggtcaaaatatagaactacagcacttcactaaagggcatccaaataggaagagaagaaatcaaactacccctgtttgcagatgacattattctatatctagaaaacaccatggtctaagcccaaaagctccttcagctgacaaacaacttcagtaaaggtgcaggatacaa

SEQ ID NO: 244112 - DNA, 584 bp, Homo sapiens
tctctgtactgcatacatgtagatcaaacatctctccctccttttcccttactttctaggtcaagagacaagttaaaaccatgtaactgcacatttccaggaaagagaatctgattggaccagcttgaatcagttttctacccgcctctattccaatcagctatggcaagggagaagcgggttaataaaggataaggatgccaactgggatgtggggaagtgctggagcaaactgcctggcatgtgcattataaatagatgagcacgtccatattgtggaaaggcaacaggacaagaggacaggctctggggtcaaattgcctggctttgacttttgaccttgccacttattagcagcttcactttggacaaattattcaatttctttttcttttttgagatggagtctcgctctgtcacccaggtgggagtgcagtggcgtgatctcggctcactgcaacctccacctcccaggttcaagcaattctsctgcctcagcctcccgagtagctgggactacaggtccgtgccaccatgcccggctaatatttcgtatttttagtagagatggggttgcaccgtgt

SEQ ID NO: 244113 - DNA, 584 bp, Homo sapiens
tctctgtactgcatacatgtagatcaaacatctctccctccttttcccttactttctaggtcaagagacaagttaaaaccatgtaactgcacatttccaggaaagagaatctgattggaccagcttgaatcagttttctacccgcctctattccaatcagctatggcaagggagaagcgggttaataaaggataaggatgccaactgggatgtggggaagtgctggagcaaactgcctggcatgtgcattataaatagatgagcacgtccatattgtggaaaggcaacaggacaagaggacaggctctggggtcaaattgcctggctttgacttttgaccttgccacttattagcagcttcactttggacaaattattcaatttctttttcttttttgagatggagtctcgctctgtcacccaggtgggagtgcagtggcgtgatctcggctcactgcaacctccacctcccaggttcaagcaattctgctgcctcagcctcccgagtagctgggactacaggtccgtgccaccatgcccggctaatatttygtatttttagtagagatggggttgcaccgtgt

SEQ ID NO: 244114 - DNA, 371 bp, Homo sapiens
gccattaaaaatgattctgtaggctggacccggtggttcatgcccacartcccagcactttgggagcctgaggtgggagtatcacttgagcccgggagttcaagaccagcctgggcaacaaccccatctcttagaaaaaatatatatatataaatataaatatatatgtaattattttaatttacctgcaaagacattactgggagataacgcgcttacgtttttctgttttaaaaaaccaaacacctttacgtgtatgtatgaaaattctaaatttatgtagcaatatgttaatagtattatccactgtggcaagaatgagagtttaagtttcttttataaacatgtatgtactctcgaactactgctgc

SEQ ID NO: 244115 - DNA, 581 bp, Homo sapiens
tcatgagcaccaaaacatggtatataaatgagtgtactgctkgatggagaacattgatcagctgactcctgttcacccttgatcttgccatcccacatgtaccagcacccacaaccctacacgttgtactcctaggtgatggcaataagaatacagaacagctagagctatttgccaagctgcagaaatagcccttggtgatataaataaatgatgtcacaaatgacaccaagttttcaagcttaagtagctagaagaaggtgtcatcattttcaaagaagaaggtgtcatctttttcagaggctagaaaattgagatggggagctgatgcatgtcatttggaacttcttgagtgtggggtgatggagaggcattccagttaaaaagcagtaggcagtcagatgtgtgataactgaaacctgagtaagaaaactgggatggaaatgtaaagataatactcatctgagagaggggaagattaatccagagagagagaagcagggacagaaaaatagaaatataaatgaatggatgaatattaacgaaaatacttaaataatgcttaaagtgagaacagagta

SEQ ID NO: 244116 - DNA, 581 bp, Homo sapiens
tcatgagcaccaaaacatggtatataaatgagtgtactgcttgatggagaacattgatcagctgactcctgttcacccttgatcttgccatcccacatgtaccagcacccacaaccctacacgttgtactcctaggtgatggcaataagaatacagaacagctagagctatttgccaagctgcagaaatagcccttrgtgatataaataaatgatgtcacaaatgacaccaagttttcaagcttaagtagctagaagaaggtgtcatcattttcaaagaagaaggtgtcatctttttcagaggctagaaaattgagatggggagctgatgcatgtcatttggaacttcttgagtgtggggtgatggagaggcattccagttaaaaagcagtaggcagtcagatgtgtgataactgaaacctgagtaagaaaactgggatggaaatgtaaagataatactcatctgagagaggggaagattaatccagagagagagaagcagggacagaaaaatagaaatataaatgaatggatgaatattaacgaaaatacttaaataatgcttaaagtgagaacagagta

SEQ ID NO: 244117 - DNA, 581 bp, Homo sapiens
tcatgagcaccaaaacatggtatataaatgagtgtactgcttgatggagaacattgatcagctgactcctgttcacccttgatcttgccatcccacatgtaccagcacccacaaccctacacgttgtactcctaggtgatggcaataagaatacagaacagctagagctatttgccaagctgcagaaatagcccttggtgatataaataaatgatgtcacaaatgacaccaagttttcaagcttaagtagctagaagaaggtgtcatcattttcaaagaagaaggtgtcatctttttcagaggctagaaaattgagatggggagctgatgcatgtcatttggaacttsttgagtgtggggtgatggagaggcattccagttaaaaagcagtaggcagtcagatgtgtgataactgaaacctgagtaagaaaactgggatggaaatgtaaagataatactcatctgagagaggggaagattaatccagagagagagaagcagggacagaaaaatagaaatataaatgaatggatgaatattaacgaaaatacttaaataatgcttaaagtgagaacagagta

SEQ ID NO: 244118 - DNA, 560 bp, Homo sapiens
atttatagcctagtgaagaacagagcaaagcactggacaaataacacacacatacacacatacagaccaataagagtaattgtaataaatacgcaaaaaagaaaaaaatcaaaaacaaaaacaaggtccaggtgctgggcatatataaakggcagctgcctcactttgcctggagtgttagagaaagttacactaagaaaatgacatacctggcaaatgagtaataaaaaataataataaggaaaagtgatcaccaaagtcagagggagcagagtcagcaaaacaccaaggaagagaagaggaaaacacacaatggagagcaataaagagccccctgaaaatcttaaagtggctttttttttttttttttaccatttcctcctccatttaccatcctagtccaaaagccaagtgtaagcaggcagttcagggctagggtttgggtcagggtggacactgctaacttgttacccaatacacattcaccagttctacctactaacagaaccccacattttttaaggtagcaatgagcctagacaaattactaattttgccgg

SEQ ID NO: 244119 - DNA, 601 bp, Homo sapiens
tcattacacgggcacactctataacattgtccattgccgcacaaatttcactgtaaggtgtgtccaatctgatacagctttgaagtcaaaaaccttaagatttgaatcttatctctattgaatgctaattatgttacccaaagcaagtcacccaatctgtctgagctttggtttcctgaatacctatattttgtgagtattaaatgagatcctttataaacaaacacaatgagcacaaaggcctatctacaccactgcaagctctctgcaaacattatctcctttctcttttgccctttctctacactgaactacatttgaggaattttcattaaaagaaacagaagtaaaagctagtaaaattcattcctacagaacagatcccaacctaattaagtgtaacacraaaagtgagtttctacttaaattctgaggcaaagattataaatacacagaagcccaaatgtggcaattgtgcctattatcagaatagcatgcagaccataaaaagaatattttaaggactgtttccattttcaaaaggctagtaagttagtattatgtaatcacaaagctatgctagaaaagaactttcagcagt

SEQ ID NO: 244120 - DNA, 591 bp, Homo sapiens
taaccaacacaaactacttttctaaaatgtctcctattttcataagtgatagaatttagttataaaagtcctactaactcttgtaaaataatctacagagacatggtgattcatttgctttcattcagcagcatttgcttgtaaaattattaattatgtgcctattatgtgctaggtactctattgggtgttcttgtacaaatcatttttctgccagcaaagccatatttttttgagttagtaattcccagatttttgtcaaattcaacagcattatgcaatgagttcttagtatgtacagtaaggaagagcagaattttagttgatgtaagtaattctacattttattttggataacaggaacatacaaactatatacatgcaacctgaatattcttattaactgttcattttgcatttctgtccaatttgaccagtgaatycactcaaatagtcaagttggctttggcatttaggtaggaccagtaggtccataaagtgagagagtcaaatgggtaatggaagacaaactccctcctagatcacaagctcctgagaataagaactgtgacttctatagtactggggcca

SEQ ID NO: 244121 - DNA, 530 bp, Homo sapiens
ggattaaaaccttaaagagaagtaaaatattctcctttactgtctccatttcagtcattgcctttaaaattcatacatatattccactagtgctaacctaagagaatcagcattatttaatayccattgcctcagacactgttgtttggccaaccatactcattcccaggccccagccaccttcttctgtggctaggaacactaaatacttatttttcctgcttctcttgcagctaagcattgccctggacacagttctggctgatgagatacaagcaaaacccaccagagggttccctgaaaagattttgctttcatgattaaaaaaaaaaaaaggagaaatatggctggcattgtcacttctcccttcatcatgtcctgaacatacaatacctaggcttgcattatgtattttgcaaccgtgaaataaaaagcatgaaaatgaaaaacaaactcaatgggaatggtggaacagaggattaaacaggattattaagcaactaaacctatgcaaacaatcccctgttttc

SEQ ID NO: 244122 - DNA, 568 bp, Homo sapiens
aattaacttaaagaactgaaaaaaactctacaatgaaaattataaaacactgataaaagacattgaagatacaaaaaaaatgaagacattccatgttcaaggattgaaggaatcaatattgctaaaatgtccatactacccaaagcaatctacagattcaatgtaatccttgtcaaaataccaatgacattatttacaaaagtagaaaaagtaatcctatgatttatatggaactacaaaagaccccaactagccaaagatatcytgagcaaaaagaacaaaactggagaaaccacattacctgactttaaattatactacagggcaataacaaataaaacagcagggtgctggcataaaaacagatacctagaccaatggaacagaatagataacccagaaacaaatccttattttcaacaaagctgccaagaacatatattggagaaaaatcatctctttaataaatgatgctgggaaaagtggatatccatatgcaaaagaatgaaactagacccctatctcttgctatatgcaaaaatcaaatcaaaagggattaaaaacttaa

SEQ ID NO: 244123 - DNA, 568 bp, Homo sapiens
aattaacttaaagaactgaaaaaaactctacaatgaaaattataaaacactgataaaagacattgaagatacaaaaaaaatgaagacattccatgttcaaggattgaaggaatcaatattgctaaaatgtccatactacccaaagcaatctacagattcaatgtaatccttgtcaaaataccaatgacattatttacaaaagtagaaaaagtaatcctatgatttatatggaactacaaaagaccccaactagccaaagatatcctgagcaaaaagaacaaaactggagaaaccacattacctgactttaaattatactacagggcaataacaaataaaacagcagggtgctggcataaaaacagatacytagaccaatggaacagaatagataacccagaaacaaatccttattttcaacaaagctgccaagaacatatattggagaaaaatcatctctttaataaatgatgctgggaaaagtggatatccatatgcaaaagaatgaaactagacccctatctcttgctatatgcaaaaatcaaatcaaaagggattaaaaacttaa

SEQ ID NO: 244124 - DNA, 568 bp, Homo sapiens
aattaacttaaagaactgaaaaaaactctacaatgaaaattataaaacactgataaaagacattgaagatacaaaaaaaatgaagacattccatgttcaaggattgaaggaatcaatattgctaaaatgtccatactacccaaagcaatctacagattcaatgtaatccttgtcaaaataccaatgacattatttacaaaagtagaaaaagtaatcctatgatttatatggaactacaaaagaccccaactagccaaagatatcctgagcaaaaagaacaaaactggagaaaccacattacctgactttaaattatactacagggcaataacaaataaaacagcagggtgctggcataaaaacagatacctagaccaatggaacagaatagataacccagaaacaaatcyttattttcaacaaagctgccaagaacatatattggagaaaaatcatctctttaataaatgatgctgggaaaagtggatatccatatgcaaaagaatgaaactagacccctatctcttgctatatgcaaaaatcaaatcaaaagggattaaaaacttaa

SEQ ID NO: 244125 - DNA, 589 bp, Homo sapiens
taatgtaaagcaaattgacatataagcacctaagacaaagtgcatcagcccatctcataaggtggctgaaaggtccaaatgagattgtagatgagaagactcttggtgagttatgggccacagcagaaatgtaaaggatcattcctcttggtgtgcagtgaggataatcagacaaggcaccatctggattcccagaacatggtaattgataatgacaaggtcaaagatggaaaggcagaatgcctggggatactgagaagacagagaagcaaataggggccgctggcctcaaagacagtggagcaaattgtgttcaccgatccaaattattttctagcacaccatcgctgcctttttcatcccatttattatataaccatgaccaagacwttaacttatctagtactcaaaagctccacctgcgaaagtgtcttcaaggggctgcttttaggatattcaggatgaagacctaaatgatcttcagaatagccttctacaaattcaatgtctcatcatgacttagtaggttagcagcacggcctttgggactgaattctgactctgccacttgctagctgtgtgccttgtg

SEQ ID NO: 244126 - DNA, 589 bp, Homo sapiens
taatgtaaagcaaattgacatataagcacctaagacaaagtgcatcagcccatctcataaggtggctgaaaggtccaaatgagattgtagatgagaagactcttggtgagttatgggccacagcagaaatgtaaaggatcattcctcttggtgtgcagtgaggataatcagacaaggcaccatctggattcccagaacatggtaattgataatgacaaggtcaaagatggaaaggcagaatgcctggggatactgagaagacagagaagcaaataggggccgctggcctcaaagacagtggagcaaattgtgttcaccgatccaaattattttctagcacaccatcgctgcctttttcatcccatttattatataaccatgaccaagactttaacttatctagtactcaaaagctccacctgygaaagtgtcttcaaggggctgcttttaggatattcaggatgaagacctaaatgatcttcagaatagccttctacaaattcaatgtctcatcatgacttagtaggttagcagcacggcctttgggactgaattctgactctgccacttgctagctgtgtgccttgtg

SEQ ID NO: 244127 - DNA, 537 bp, Homo sapiens
cctttcccaaccaaatctcttcccagagctgttaacaagaaacaaaatatgctgacttgagtttcactttctttccattcctctgccttcctcttgtgggacccccaatgaatcatgaaatggttttggtcaggtaagagtgaaaaaagcacagaacaaagcccagtctgtcaaacatgcagatcctagaggacagagactctgcagcccagttctaccaacggacgtaacccctgaaataatttgcacctatttcaatcaactattcatctgctagccttctgattttattatattatgaagccatttattttcaaggaaactatatttgttgcttagttgatacatgatgaagtaaactgagaaaatacactcctaattctcaggccaactcttttaaggcctataaaaaatgacataaatagattctgatgttgyttcatttctgcagaagggtgtttttatattatgttcttctatcaacacagtaagtacagattgcatcttaaagctctcatctagtgctggagtttccaa

SEQ ID NO: 244128 - DNA, 590 bp, Homo sapiens
acaaaaggctgaacaaccaattagtagaatattgtatagggaattaagtcactagtgggagctttgtctgaatgaattttgaggtctcttgcaaacctgaaagaaaataaatccataatctacaaatggcctaaaagaaaggtgattgcaaaagacttattcacattactaacggtctcagcaagatatggtgtgaagtccaatctgctacccatccccaaatatttatatayacacacacacacactcacataacacacatatgcttcttatcaaggtggaaaaaacaccaaagccctcattagctcagattctactgtttcaaatgtgtaacaatgcagaagaaaataggatcaaggtttgctatctctaaggggaaaaaaaaaagtttgcgaagtgaattgctagggtaaacaagattctgggaggaagcttgaccttacaaccaaagtcaaaaaaacacaccattaaaaataaatagcttatgatttctgtacaaataaatcttcccaatttctcaatgacccattctttaactcagctcaggtatgactgaacagttataagtccttgctagcagtccttactga

SEQ ID NO: 244129 - DNA, 493 bp, Homo sapiens
aaaaccttcaactagaactggggcacacatggagaaggatttcttcctagaaacaggagaaaagctgcctygctgaagccagagcacaaggtcagagctggactcaagaccttgatgcaagagcaacaggagtattcagttaaagctttttaccaactaccgactgaagacaagattggtcccagagcaggagacaggctgaatcttggagtagagatgattacaccacacagtgaggaggaatatgggaataaaatatccatatttactgaggggataagaagaccttatcctcctggcctgtcttctctttgtgctctcctgttagctgaatccagtcagctgtttttctttcatttatgccaggatgcatcactttatacttaagcatgtgtggacagagaaaagctcccactaaaacactgacataaagagaggaggatcgcaccagaattatagggcttccctgcttttgtgaaggaaaagtctttaa

SEQ ID NO: 244130 - DNA, 542 bp, Homo sapiens
gagcatttgtttattccactggttaaatgtatgatcctagttttgtaacctctctgagacaaactttcctcatttgataaatgggtactataacccacaactggcagggattttctgagaagtcataaaatagcaaacgtagaatgctatgtccaacattagtaggtgttcaacaaatgttaattattttccttcctttttccctgccaatatcctatctgaaaacaaacaaataggtcactatcaaatttgaaaaattattcgtcatcacgatttattaccaatctcagtaacaggatgatgggcacattcagttcattttcttttaaatttaccttagctttcaacatctaacttgtctttaaaaataccattcactaaaataagtggatatctggtagagacaacctgatatttgtacttgaaatattctaaaatgmacttggacaatcaattcatccactcacttatgtgtgtatctgtcgacaagtgtgcttgtttctacataaggatcattatatacaagccccattctgagcgcc

SEQ ID NO: 244131 - DNA, 540 bp, Homo sapiens
cagcctggcctttaaggttctccaaggtctcactgtgtttgtggatttttttttcccaaccactccagattatattgatctctgaaactttttagcatttatatctgcatcatttgttctcaaacttatgctttcttccactgtttcatgagaattttatgtctgtttgttgcccatcctgccagcactaaatgctgaaccmtcatattatactttttttttttttgcagcatctggctcaacacacaaatcggggcacttaaaaatattaattcagtaagatggaatgagtgaatgagtgaaaatagagtgctacctagaaacagagaaacacaaaggatgttcaatttggggagagaaagctgtaggtgtttttccaacccacatgatacatcttaaacattatttttagggagttcttgaagatgggcaagataaggtcagacactgttctagttcacttttttttattttgacaaggcaccaggagagacaaagctagcccacctctctttctttttttttttctttcttcaaaaa

SEQ ID NO: 244132 - DNA, 537 bp, Homo sapiens
aattgtatgctggccaatattaggctttacaattgttaaaagatggtttgatatgcttagtcttgtcaaaaacattgtatgtaagaagaagaaacttgagaaaggtggtcagtagagagcctcttcgactaatagacagtttgagcatctgacagctgcattagaagcagaaattggtaaacaacttgacatagtatagcaaaacattcatgaaggcagccctgaatcccaaacagggatggataacctgaggacaaggaaaraaaaatgaggcaaatagacttttaatgctgtaatatacattaaacagaagccctctatttctgttccatgttcagatccatcttgagagcacagcaaacactcagagtatctgggggagaaggtcagttttcattcatcattatcagcaatgaatagttactaaaaggagtgaggctttgagcccaggaaagcagaaagaacagagagagtccccaaggctgggatgaggcaggaagctgctcaggaggattagcgcctgacgtggaagtggtt

SEQ ID NO: 244133 - DNA, 632 bp, Homo sapiens
tgactttgactctttcctttctcatgtgcactttgatacatacataaaaatatatactttttttgtgacacaatgctaagggagtaattgaaacaaacttggcaacatcccattgctataaattcacccaggctgtctgccactggagaacatgaaatgactaattgaaggataaacaatgcttatctcaacctaagaaataataataataacagtgatgaccatattttaatatgaataacagtttctttagttttatgtaaaaatgaataaaataatttttagatatcctatatttattgactggtaacatggaatctaaacaaaagtgttatttttatgcaaatacagatttaagagagattgccttctctctccctgaacctctgctttgacacacacacacaaacacattatcttatatatggaaatmtggaaatccaccagccaccaaatttgcagctaggagagaaggcaaatttaggacctggaatgtggttgcttgttcaactcttgtgtacattgagttaaggtttaagctgctgtaccataaatgcagtctctctacctctcaactattcaagtgagcctactgagcccttgaaatgtggctgctctggattaacatatgt

SEQ ID NO: 244134 - DNA, 544 bp, Homo sapiens
tactgtattttttatttgtattattttttctaatttttttaaaaagctatttgtataaatttatggggtacaagtgtaatttggttacatggatatattgcatagtggcgaactcagggtttttagtgtatccttcaccagaataatgcatattgtacctattaagtaacttttcatcttcacccctctcacccctccacccttcaaaatcttcgttgcctatcatttcttctaagaactggaacaatacaaatatgcccactttcaccactcctattcaatatagtactggaggtcctagccacagcaattaggcaagaagaaagaaaagacattcaaactrgaaaaaaaaggatgccaaattatccctattcactgatgatataatcttacatctagaaaaccctgaagactctaccaaaaaactagatttgataaatgaatccagtaaagtttcagggtacaaaatcaacaaataaaaataagtaaactttgtatacaccaataatcatctagctgagaatcaaatcaagaaggtaacccc

SEQ ID NO: 244135 - DNA, 504 bp, Homo sapiens
gaatgaggagagcttgcagaattttcttgcagtgttttacacatttcatttttcatttcaattcagaataaaaggcaaaagaataagagtgaaacaactaagataagcccaaacaaaaatgaggaaaaggtgtatatgtaaattaagaacacatttattactagccttttttaaaaaaggaatgacagtgacctctagtaaaatatttctgtctagaggcaagattacccatgcctggataacagccaatgtttaagctcttctcttagaagtgtcctatctacctctcccaccttcrtttcttcaagaagtcagctaagaacccatcaacaccaatacaaaggctgtaaaataacattttcctcttggctggatgcaaaaactagaactgcagaaaagttctcaataaaaattgtttgaatcgctatcaactcattctttctgctgactaggaagttaaataaataaataaataaaagggactccaagtcaccagttacgcca

SEQ ID NO: 244136 - DNA, 668 bp, Homo sapiens
ataagaatataagaaatgatttatgggtataggaggaggtacagagatttctttygttgctgttcttttttttgttttgaggcaaagtctggctctatctcccaggctggaatgcagtggcatgatcttggttcactgcaacttctgcctcctgggttcaagccatcctcccacctcagccccacaagtagctgggactacaggcatgtaccaccacacccagttaatttttgtatttttagtagagatggggcctcactatgttgtccaggctggtctagaactcataagttcaagtgatccgcctgcctcagcctcccaaagtgctgggattacagtcatgagccactgcgcctggccagagatttcctcaagttgtttgcaattatttcaccttaaaaggaaaggaaaacaatagtaggcatcagcttgcatgctggaaattttcatacagaataatattatgatgaccttcccatgaaagagagaaagagagaaatatatataaagtgatatatgtataatgatttctatacttagatttagggagtagacatgttttattctaatagcaaaataattaaagatactgttatactggtctttaactggcccagccagaaaactttttatttactaaactcatcttctcaatgaaacaaaacaac

SEQ ID NO: 244137 - DNA, 668 bp, Homo sapiens
ataagaatataagaaatgatttatgggtataggaggaggtacagagatttcttttgttgctgttcttttttttgttttgaggcaaagtctggctctatctcccaggctggaatgcagtggcatgatcttggttcactgcaacttctgcctcctgggttcaagccatcctcccacctcagccccacaagtagctgggactacaggcatgtaccaccacacccagttaatttttgtatttttagtagagatggggcctcactatgttgtccaggctggtctagaactcataagttcaagtgatccgcctgcctcagcctcccaaagtgctgggattacagtcatgagccactgcgcctggccagagatttcctmaagttgtttgcaattatttcaccttaaaaggaaaggaaaacaatagtaggcatcagcttgcatgctggaaattttcatacagaataatattatgatgaccttcccatgaaagagagaaagagagaaatatatataaagtgatatatgtataatgatttctatacttagatttagggagtagacatgttttattctaatagcaaaataattaaagatactgttatactggtctttaactggcccagccagaaaactttttatttactaaactcatcttctcaatgaaacaaaacaac

SEQ ID NO: 244138 - DNA, 558 bp, Homo sapiens
gctgttcttttttttgttttgaggcaaagtctggctctatctcccaggctggaatgcagtggcatgatcttggttcactgcaacttctgcctcctgggttcaagccatcctcccacctcagccccacaagtagctgggactacaggcatgtaccaccacacccagttaatttttgtatttttagtagagatggggcctcactatgttgtccaggctggtctagaactcataagttcaagtgatccgcctgcctcagcctcccaaagtgctgggattacagtcatgagccactgcgcctggccagagatttcctcaagttgtttgcaattatttcacyttaaaaggaaaggaaaacaatagtaggcatcagcttgcatgctggaaattttcatacagaataatattatgatgaccttcccatgaaagagagaaagagagaaatatatataaagtgatatatgtataatgatttctatacttagatttagggagtagacatgttttattctaatagcaaaataattaaagatactgttatactggtctttaactggccca

SEQ ID NO: 244139 - DNA, 606 bp, Homo sapiens
ttgaaaagaatagtcctcgcttcaaacagaacagtactattaatatacaactggttaagtttaaaccagtaartcataatgaagcaaaagtaggttttgaggaaactgccttaagcctccatgactttacaattccatattgagcactaataataaatcccaattcatatgtgtgactacataaatattcatgcagagttaaatgtgcacctataaatgtacacgatacatatgcagatgtaaatgcattttatgatttcagcttatgaaaatgtcttatctgttggttttggagaaactatcactttgatatccattagatgtaatatatgagtttatcattgtatcaccatcatgttataatgccattgtctgagatttatctattaaacaactcagaagtatgtaaatgctcttaaaatgaaaagaaaattgtgaagctattaaatcatggtcaataaaatatttctatgccagtcattatctaatcatctgactccatcaagtcttaactgcaatgatttccaaacccacttaagtacttttgcctcttcctctgcatccttgttataagaatggtaaattgcttagattagttgactgctg

SEQ ID NO: 244140 - DNA, 535 bp, Homo sapiens
gccaactacaaggttaggtctcaagagactgtcatggttttccttgatctccctcttgcagttagacttaaacactcttagaaaaagtctggacttggctaggcatagtggctcatgcctgtaatcccagaacattgggaggccaaggcaggaggttcacttgagtccaggagttcaagaccagcttgagcaacatagtgagacccccccatctctacaaaatattacaaatgtagcccagtgtggtgccacctgtggttggagctacttgggagactgagatcagaggatcrcttgggcctaataaattgaggctccaatgagcctgagctgtgtgccactgtacttcagcctgggtgacagagtaaaactcagaaaaggaggggaggcagaaaaggaaagaaaaagtcaaaagaaaggaaagaaagaccaggacttgccagctggatagtgataaaccatgttcaggagaggctagttatcctagccaaagctattctataccaacctgtagatacaagagtgccaagtcatg

SEQ ID NO: 244141 - DNA, 647 bp, Homo sapiens
aactggagactccagaggctgcattctgcttcagaccagtgctgggattttgagcaagtaacttaatttatattttaagtataacttgtttatcttaatgtatatatattgtatatatatgcacacacatacacacatatatatgtatgtgtatatatatacatatatatgtatatatgaagtaaagaggctattggacttatttcttaggttcctcccaatatgaacattccaagagcctgtgacagtgaaacaagccccgaggccttcctatyataaaacaaccttttcattccattttggtctccatagatttcagtgtcctttctctcagtcgaaatcactcacttcaaaaacttggactaacatcaagattttagccagaagcaagctgaaaagtagttgccattggagactccttaatacctcattgttaaactggctaatggtgctctaaggatgagccgttagaggaaatggtcaagatcttcatctcaagggtgaggaagctaaggtcctgaaaggtcctgtgatttgccaaatgtcagacagcatcctagcaaagagggtaagttctacttttaaggtttgtgattccagatccatccgttaatccactcatgtaagatttgtcgaacacttacaga

SEQ ID NO: 244142 - DNA, 647 bp, Homo sapiens
aactggagactccagaggctgcattctgcttcagaccagtgctgggattttgagcaagtaacttaatttatattttaagtataacttgtttatcttaatgtatatatattgtatatatatgcacacacatacacacatatatatgtatgtgtatatatatacatatatatgtatatatgaagtaaagaggctattggacttatttcttaggttcctcccaatatgaacattccaagagcctgtgacagtgaaacaagccccgaggccttcctatcataaaacaaccttttcattccattttggtctccatagatttcagtgtcctttctctcagtcgaaatcactcacttcaaaaacttggactaacatcaagattttagccagaagcaagctgaaaagtagttgccattggagactccttaatacctcattgttaaactggctaatggtgctctaaggatgagccgttagaggaaatggtcaagatcttcatctcaagggtgaggaagctaaggtcctgaaaggtcctgtgatttgccaaatgtcagacagcatcctagcaaagagggtaagttctacttttaagktttgtgattccagatccatccgttaatccactcatgtaagatttgtcgaacacttacaga

SEQ ID NO: 244143 - DNA, 585 bp, Homo sapiens
ccaataggaggctaggaagtcaaggtcctccaatctcagacccctgtcttaagggtaagatcaaaggctggcacaaaacttacagatcattttatacaaaagttggtatatgcttggggccttgtgggacatcttctccatatcaaatccattaaatcattggcccagactccatttgtctttaacaggaaggaatagctcttggggtgattcaaggtgaaaccttatccatttcttccctctctctcattgacgccgtgtatgtgcaaggtggtgaggcagccgaaattaggactatagagtccttcatgttcacagaacaagtgctgcaaatgggtgtgagtcagccttgagctcaatcgagagtaaacagacaaatttacattcatatatggatttagacatttgtcaaatatttgctaaaagagcatttcacttgtckaaggaaggcatagccttaatatttttctttctttctaaaggactcgtttcacccacgtgcttgatgaaagtttaaatataaaatgcctgagatgaaaatgtatattaatatttttctgtctttccaggtagatctgctgacct

SEQ ID NO: 244144 - DNA, 547 bp, Homo sapiens
taagaatgtccctttagatggaaactttgctgaaattttatccactcatttattgcccacatgagtttaaaaatgagaataaagctagatcttttacatcactggaaattttcttatgtctcagcaccatccagaatgttggcaatattaacagaccagcaatacttcttgcataatggagccagaggaataaggaagggtggggaggaggaagggagcagaggagagctttgggagactttccctgactaattcttcttcaaaactgtgaaacttacaatttctaaaaaccatagtcatgatgaaaatgcctcctttaaaactgcagccttagaggaagcctgtaggcttctgtcgagtattttagatcaaagacgtgggtttgaagttgaggttaattccctcactttgcagtaccactaaaatgaacatcacaaayaaggcctgaaaagcaatggctcgattccttgaattaactctatcgtttctaggtaagtacttggaaaacactgcatttacaaaatatatagctggttgaggacccagg

SEQ ID NO: 244145 - DNA, 502 bp, Homo sapiens
cctcactctatgtgtcactttgagcaactttgcttagttagaagctatttccttacctttaatataagagtaatactcagtttgtataatagtcctggacatccaatgaaaaactgtgtataaaatatcttgtcccataagtgctaaatgaattgtaactactgctgtgactgactaaataaaaattatatatgtataagtataaaacctcttacaaaacatgtaataataaaagaatgagtcataaaagacaagaatcaatgagtgttaatggtcacctttgttgctgacctctamactccatcccctggccttaacaaatatggcaggacatcttcaggatttggcaggcagacaattttatcttacactagtgacttggatgccattcctcttccttccactcagtaacagacggtgccctggacagcagtgacatctgcagccccaagggagaagggtcagcacaaattttaattttgcttttggtttggggctttaa

SEQ ID NO: 244146 - DNA, 502 bp, Homo sapiens
cctcactctatgtgtcactttgagcaactttgcttagttagaagctatttccttacctttaatataagagtaatactcagtttgtataatagtcctggacatccaatgaaaaactgtgtataaaatatcttgtcccataagtgctaaatgaattgtaactactgctgtgactgactaaataaaaattatatatgtataagtataaaacctcttacaaaacatgtaataataaaagaatgagtcataaaagacaagaatcaatgagtgttaatggtcacctttgttgctgacctctaamctccatcccctggccttaacaaatatggcaggacatcttcaggatttggcaggcagacaattttatcttacactagtgacttggatgccattcctcttccttccactcagtaacagacggtgccctggacagcagtgacatctgcagccccaagggagaagggtcagcacaaattttaattttgcttttggtttggggctttaa

SEQ ID NO: 244147 - DNA, 507 bp, Homo sapiens
tttatcttacactagtgacttggatgccattcctcttccttccactcagtaacagacggygccctggacagcagtgacatctgcagccccaagggagaagggtcagcacaaattttaattttgcttttggtttggggctttaagtacacaaacaggttttttttttccctgtcagtttgcatctagcttcgcatctgacattttttaatgttttatgtatttggattgacctagaaatttatagcttcaggtttttgcttattttgctctgtctctaattcaacctccttgatttaaaaataaaagccaaaatataacatgaacaaatactctatttgtctgtatcactaagggggtaaggaagaggtcattctgctctttttgagctacttcttattacaatatattaacatttgaatatcttcaataacaagaaacaagaatactagggataacctataaaaacctgagtataatttgactcatcgctaaaaaaaacttaaaagc

SEQ ID NO: 244148 - DNA, 507 bp, Homo sapiens
tttatcttacactagtgacttggatgccattcctcttccttccactcagtaacagacggtgccctggacagcagtgacatctgcagccccaagggagaagggtcagcacaaattttaattttgcttttggtttggggctttaagtacacaaacaggttttttttttccctgtcagtttgcatctagcttcgcatctgacattttttaatgytttatgtatttggattgacctagaaatttatagcttcaggtttttgcttattttgctctgtctctaattcaacctccttgatttaaaaataaaagccaaaatataacatgaacaaatactctatttgtctgtatcactaagggggtaaggaagaggtcattctgctctttttgagctacttcttattacaatatattaacatttgaatatcttcaataacaagaaacaagaatactagggataacctataaaaacctgagtataatttgactcatcgctaaaaaaaacttaaaagc

SEQ ID NO: 244149 - DNA, 603 bp, Homo sapiens
gcacttggcacagtataatttctatgaaggtgccttgtaagtagcctggggtgattatggtggtgtaattttcatcacaaccacagataacccaggtaactgtgcaggtacaatgacgttcagcttaagtggctttgttccaaacaagggsctctattgtaaaaacaaagcaggtgttaaaacatagagatattgaagataggggtcattttacatactaacatgcactgaaaagtaaatctgagcttccccacattattgccaggaattacggtatacttaagatgaatccattaagtacacaactggacaaatgatgaaatttcatgttagcaaaattcctgacatatttcacacctcttactctattaaattacacttttttaacaaagaaaagctttcctactgctacacattttcaattttttctcctatgtatttcatattaaaatttcaaaataatttgatcagagatctagtgcacaaaggtgcctaagtgaacaataatcaccaaaaacacttgcaatggctgcagtagtgggattcccatcagtgatgtcaacagtgatgccaagaagacaaaagaagagggaaggagctaat

SEQ ID NO: 244150 - DNA, 498 bp, Homo sapiens
aaatgagggatgctcatgccatgttaaataaatcatttccacttatatttaatacattgtattagttaggatgcttgcagctgcaaatgatagaaaatccgatccaaaatggctttaaaaattgttgttctataggtctatcaccctagacttctgctgtccaatatgatagtcattagccacatttaaatgtaaagaaatcaaagttacatttacatttaagtgtaaagtaattaaagttaaatacaatttgaaattcwattttttcagtttgcactagccatattccatcaagtgaccaatagccacatgtcactaatggctgctctattaaacaatgcagatatggaaaaaccttcttcacctcagaaagttctattagatagtgctggcttcaaagaaaaggaagttgttaaatcagtaagcaacagtatctgttatattccctatgtagcaggcaataatctttatgcatattatttcctttaacttcccaac

SEQ ID NO: 244151 - DNA, 498 bp, Homo sapiens
aaatgagggatgctcatgccatgttaaataaatcatttccacttatatttaatacattgtattagttaggatgcttgcagctgcaaatgatagaaaatccgatccaaaatggctttaaaaattgttgttctataggtctatcaccctagacttctgctgtccaatatgatagtcattagccacatttaaatgtaaagaaatcaaagttacatttacatttaagtgtaaagtaattaaagttaaatacaatttgaaattctattttttcagtttgcactagccatattccatcaagtgaccaatagccacatgtcactaatggctgctctattaaacaatgcagatatggaaaaaycttcttcacctcagaaagttctattagatagtgctggcttcaaagaaaaggaagttgttaaatcagtaagcaacagtatctgttatattccctatgtagcaggcaataatctttatgcatattatttcctttaacttcccaac

SEQ ID NO: 244152 - DNA, 581 bp, Homo sapiens
atgaataaatgagtaaactaactctaatttagcaatgtgaactgctataattcaatgtcattggacttagagttatagaacttctagttgatagtttctcctattttgttttttgcttaatgttgtcataggtctactcttatacaaggcaaggggccagggaactggatgtaaaggtttacgctgttcaagacccactagcaaaaactacatgtataactgaaaatcaatgtgaagaatattaaaatatttactactttataaaggattaggtaataaccaatatgttatttttgcttcactttatagttggtgattaaaattccaaaatgtattccatcacacataaagtatcataaagagcaaaacaggaaaatatttttcaactatgtggtaaaatrtctaatataagtaaataataaatggaggatataaatgtcaaggacaaatccaaataaaagaaaccaggatcctggctgcagctctgagattaacactgtgatttgtcaataattcactttacttctctgggttctagtttcttcactagaaaacaagagattgattcttattttacatcc

SEQ ID NO: 244153 - DNA, 589 bp, Homo sapiens
cacccacaatggaatttgcatgaaaatctgtttactgacccagttccctaggggtgcatttgccctagcacttggagtaaacaccattttcattgcactagaaatagttctaattggacaaattgttataattttagcaacacccaaataaatcaaaggaattggaggcagacatgccacagaatctggattcggccacaaaccagttcagtatttgtgcctgaaataaaagtctagtcatataccacctacagatgctaaaggaacagctacatacctcaactgaacttagaaaatatgatttttttattgtactttaagctctgggatgcatgtgcagaacgtgcaggtttgttacataggtatacatgtaccatgatggtttgctgcacccatcaacccatcatctaggttttaagccccgcatgcattaggtatttggcctaattctcactctcctttcaccctcaaccccctgacaggtcccactgtgtgatgttcccctctctgtgtccatatgttctcattgttcaactcccacttacgagtktaaaaaaaaaaaaagaaagaaaatatgagtttggagaaa

SEQ ID NO: 244154 - DNA, 581 bp, Homo sapiens
ttcctgtcatatctttacatgactgaccacttcttgtcactcaggtcttatctcaaatgtcacctcctctggcgaggcatactcagaccacacagtctaattaccttcctcctcctaatacccaggttagtctttcacagttaatctgttgtatttcttctaagcacatctcagcatctgaacacatctgttcatttatgtttattatggagtgtccatctccccacactcaaatgtaagcccgtgagcatgaatattgcctttcttcactcaacccagctcctggaaaagtgcctggcacatggaagcctgaaatcagattcttccacagtgtggcacccatttccacctccttgttctgtctctgtttataygtctgtgctagcttttagtatattacatcttttatttgaacagctatttccaaagaaagtgaggaggagggaaaggaggacatatcaaagtctgggggtggcagggtagaagaaggaatgaatcatttctaaaacacacattcaagttgtgtagttttcagtgtaaaggatttgtgcatttttgttaaaattgacccttatatatgt

SEQ ID NO: 244155 - DNA, 596 bp, Homo sapiens
tatttatccataggataagcccagcatcatatatattcattttctataaatcaagcatttccctccaacaatgctataaccaccataaatacccatggaaatacgcaaactcaaactcaaagtgcaattactaacataatggaaataactgactatggtctttttcttaaaaaaatataatgggtcctctttcctaaatacatacacacacacacacacacacacacacacacacacactatatacatatatacatatatatatgtatatgtgtatatatatakgtatatgtgtatatatatatgtatatgtgtatatatatatgtatatgtgtatatatatatgtatatgtgtatatatatatgtatatgtgtatatatatatgtatatgtgtatatatatatgtgtgtgtgtatatatatatatatatatatatatatgcatatgcatgctggtttaaatactggtcttgacaattctgccaccaaagctaaaatttgtatcaagtcatcagtaatgagtgcatttcctcatattatgatactccagttttgcctttgagttcagatccaactggaataaaacaaattctctat

SEQ ID NO: 244156 - DNA, 620 bp, Homo sapiens
cccttttaattaaattgccatgattacttaagcatcccattaaagacatgttatatgctgagtatcattctgagactgactctgtagccataaaaaattaagttctgaaaatttttattattactgtttcagaagaagcaaacaagcaatccaaacatagtttagtctgaattcattgatttatttattcaccatggacctattaaacatttttgtttgtaaagagctgagttagctgagttgaattttaacatagcttaaatccatttcactttttgctattcccrcacctcacctcatatctttcaacctggtcagtttgaattttcctggaaagaggcactggactattaatctatttaagctgaacaaatgcttgtagagaacctgttccacatggcattgtgctgtttggtgcctgtgtatattttattaaagtgtagataaattatttctcaaatgattgtagttagaagactgggattatttccttaaccctgatacccattcacactttctttcttcatatcagtcaaaaaccagacagctaatctgttcataagcactcatggtctactatgtttcaggagctacagacaaagaccgccagtcctcagcag

SEQ ID NO: 244157 - DNA, 568 bp, Homo sapiens
tctgctacatagcaggtactcagtactttctgaacaaaataaatgattaaacaattttaattatattgtttattacttaaaatccaactgtgacagcttctcctggggcctttgatatgcctctatgatatctgtgtgtgttgggaatggagggaagtttgacatagaaaagtaattggggttgaattattggaagagaggaaagtaatagtgagtcagaggatggaaactaggaaagggatctctgagtacctagaatgtatactgaagatattggccacctgggtgacattggcaagaggtaaaaagaaattggagaacatcatgaggggaaaaaaatccaaaaaacagaaaagtcaataagccacatttcatctactttataattttgccttgtgctgcctcatttcttcttccaggaggttagtaaagatcttcaaagggaacattgagctmcagagctgctaagattctattcagaaaacaggctccctatggaaagagagtcccatggccccacattcaccattatcctgctctgcagagcttcggatgccagacagaagta

SEQ ID NO: 244158 - DNA, 531 bp, Homo sapiens
ggtatgtaggggacaaaaggaataagtcatactttcaaaaattatttgtggaactgtcagtggtgttacctgaaggcaagtacacttttattcccagttattcaccttatcaatttacacaattcagttctgaattggagatacagttaagatttgagataggaaagagtaattccaacagccmcataccagagcttctccattactgacttatcttcatgtaattttaggtgtgtttgtgatctttattattcctatgttgccaatgtaatgtttacagttagggaaagtaaagcaataaattatcactcatcacagaaattatccaaaatttagcaataggcaaaaaatatgaatggctgttctttccgtagagggcttcatttgagtctatcaacaaagctactttacaactctaggtataggggttacttagtacagtttcattcagtagaaatgcaaataatgtctgtccaatggaacatataacctgaaatgttatggtttattattatactgtaggatactaaa

SEQ ID NO: 244159 - DNA, 595 bp, Homo sapiens
catttgcttatctatagtacacagacagttcattttaaagcatgggacttatgatccactactggcacatactaaatccctcctacaggatacctcacygccattgtcccaccctatatgactacctctcaagccctcagcaaaatccctgagaaaataaacacagtggaaggaagaattctccagctcctactgtaagaggctgagggagtttatcctcccactgcctgaaaaaggtggtagtttcatcagcagaatgtttcccactgagataatgttacaagggatgactggtatatgtaaatccacaagagctattatttaactttattgtgaattaaataagattttgtttaaccccaaacaagtatcaattatttgttaaagtacttaggaaaaacaacccgttggtaggttgatagtaggaagaagaattttgaaatatcatgaattatgcttggtattttatttttcttcctaaaacttcgacattttttttaagtaacaataataatgaaaacccacatttggcctgagagagccagcttagctctcataatcaccctgtcacatgcactgaacctgattagagtca

SEQ ID NO: 244160 - DNA, 415 bp, Homo sapiens
aatgactaaataggtcatactaattacttatcatagaaactggcacataagaagtgtttaacaaatgacatcaaattcgttatcatcatcagaactgaccttgtaacttatatgttactatcactagtttacattcaaggaaattgaggctctgagaagttaattaactggtccaattttgtacagataaaatactagatttgccaaaatcatctatatccttgtagagccatattattggtttgtagtttgaatatgcatttataattattgatagtactttttgaggaagaawtgcaagctaaaatatatgcaagtgagtgcaataagtactattttctgagaaacatctgtggccatattatcccaaacattggttggaaatacattttatttttatttatcaaaacaagtc

SEQ ID NO: 244161 - DNA, 426 bp, Homo sapiens
ttttgttttttgtggagataggggtcttgctatkttggccagctggtctcgaactcctggcctcaggcaatactactgcctctgcctcccaaagtgctgggattacaggtggaagccaccatgcccagcataattctttgaaggactcttgtcaaaatacattttggactagattttattcaaaatagaagacaattagtaccttgagatgcaaggacctcctccaaccacacacacacacacacacacacacatggacacgcacacacacacacgattctattaccttttccttaatgaaagatctacttttagaacaaatcgcaaataataatatatttgaacagaaaaatactatttcactaatgttttaatatctaatttcagcttcataatatcctaatgctatcaggttagtagggtaaa

SEQ ID NO: 244162 - DNA, 426 bp, Homo sapiens
ttttgttttttgtggagataggggtcttgctatgttggccagctggtctcgaactcctggcctcaggcaatactactgcctctgcctcccaaagtgctgggattacaggtggaagccaccatgcccagcataattctttgaaggactcttgtcaaaatacattttggactagattttattcaaaatagaagayaattagtaccttgagatgcaaggacctcctccaaccacacacacacacacacacacacacatggacacgcacacacacacacgattctattaccttttccttaatgaaagatctacttttagaacaaatcgcaaataataatatatttgaacagaaaaatactatttcactaatgttttaatatctaatttcagcttcataatatcctaatgctatcaggttagtagggtaaa

SEQ ID NO: 244163 - DNA, 426 bp, Homo sapiens
ttttgttttttgtggagataggggtcttgctatgttggccagctggtctcgaactcctggcctcaggcaatactactgcctctgcctcccaaagtgctgggattacaggtggaagccaccatgcccagcataattctttgaaggactcttgtcaaaatacattttggactagattttattcaaaatagaagacaattagtascttgagatgcaaggacctcctccaaccacacacacacacacacacacacacatggacacgcacacacacacacgattctattaccttttccttaatgaaagatctacttttagaacaaatcgcaaataataatatatttgaacagaaaaatactatttcactaatgttttaatatctaatttcagcttcataatatcctaatgctatcaggttagtagggtaaa

SEQ ID NO: 244164 - DNA, 580 bp, Homo sapiens
cctcctccaaccacacacacacacacacacacacacatggacacgcacacacacacacgattctattaccttttccttaatgaaagatctacttttagaacaaatcgcaaataataatatatttgaacagaaaaatactatttcactaatgttttaatatctaatttcagcttcataatatcctaatgctatcaggttagtagggtaaacattataaatttatttttacatggaaaaaactgtccccaagatcacacagctattgaggagtcaaatgcaaaccttgtcaacctaatcctaatagcaaataattactgtactttgctattatctctcaataattgtctccttggtcattaggttgcctcaatgtacataattaaatacaacatcaacaggtaaggtggtatattcaaaatgcgaacttcaaagttttacatcatcaaggmtgcacagtttagataaatgttttttggtctggttcaagttggacagaaatttcattgaccgacatcctctcaaaagagcctattgcaagctattttctccataaacccgggtctgcctgtcatcactcatg

SEQ ID NO: 244165 - DNA, 630 bp, Homo sapiens
ttaatctaacttttccacaataagaagcagacaactcatgttactgtagaaggaatacagaaaaaaaattaagttagccattaaaatgaccactggaagaggaaatagcaacacatcaatcctaagaatgaaggatttcagctggactcaataaaatgtaatcacaacagctatctacaaggctttactttaatgataaaacacatcagaacttgtgagaataggtttttaaaaatttattcctattattggaaattctgaaaatgtgcaagccaggtcaatattgcattatttaaagatgcactgtcaaacaatcttttactgaaaccaaaaacatctacattctcagtgttataggaaatatagccggtgttttataacattctgcattaaatggtattgtttatctaagggggttcttagaaaagaacgttaagctttcaacaatcccaacatcacccaagcacaaaaatgaaaaccgatcagaactgcaaatgacaaaaggataacaatttgttacttcatamatttctgtgatataatttccacaatttccattcatgcagtgacttctagataaaactcattctccttgcaaatgcgttatagcttaaccatatataacatgta

SEQ ID NO: 244166 - DNA, 561 bp, Homo sapiens
gtgaaagtcaggaaccaaagcaaacagaagaggtaaacttagaggacaagaaataagacatacatagataacttcaagattattaatatcctcagagacaagaagtgtgtccatgcaacaagaataggaggctaaaagaatagaaacattcagagggcaagaagaagctcctagaaattaaaaaggagaygatagaaatatctcaatagataaggtataagagcaagtagagaaaacatttcagaaagcaaaacaaatgaaaatgaccataaaattggagaattcattcaagaggcttaactttccaattttgaaatccccaaaagagaaaatagaggccattaccaaagaaaaatttaagaatatttctcagaactgaagaataagaacttttggattgaaaatagttataaaataccagcaaaaagaaaagaaaggaaggggaaggaagaaaacctatatgaaggaatattaacacaaaattttaaaacactcgtgagtaaaaaccaattacagagaaggattaaggctcagaatggtttcaggattttcacagcaata

SEQ ID NO: 244167 - DNA, 565 bp, Homo sapiens
tgtccatattcctatcatcccagcattaaaaattattatttctttcagtctttatccacaaaaatccataaattattaatgtgcatgtactttttgtgtttggtttcccactgagcattatcatgctatcacaagagaagcaacagaaagaacatttgattttgaacctaagatgtggtttaagtcttggcacacagtcattccttgtatagtcctcataggaatcattttcttagctacctaatatcccacagaattgatgtaaccaattttacttactcttctccttcttcttggacatttaggtcatgaccaatatttcacagttctaaatatcactgcaatacatatttccctgatatagctttcttcttatattctgttttctgtatccttgatataaattcatggcaggttgaaygtatttatagcttttggtacatagtgccaaattgttttccaaaagatttataccaatttatacttttattagaaatatatgattatatagcagacttgccaatattgaatactgtatggttaacgttctcctaatgtaatatat

SEQ ID NO: 244168 - DNA, 565 bp, Homo sapiens
tgtccatattcctatcatcccagcattaaaaattattatttctttcagtctttatccacaaaaatccataaattattaatgtgcatgtactttttgtgtttggtttcccactgagcattatcatgctatcacaagagaagcaacagaaagaacatttgattttgaacctaagatgtggtttaagtcttggcacacagtcattccttgtatagtcctcataggaatcattttcttagctacctaatatcccacagaattgatgtaaccaattttacttactcttctccttcttcttggacatttaggtcatgaccaatatttcacagttctaaatatcactgcaatacatatttccctgatatagctttcttcttatattctgttttctgtatccttgatataaattcatggcaggttgaatrtatttatagcttttggtacatagtgccaaattgttttccaaaagatttataccaatttatacttttattagaaatatatgattatatagcagacttgccaatattgaatactgtatggttaacgttctcctaatgtaatatat

SEQ ID NO: 244169 - DNA, 574 bp, Homo sapiens
attaaacaaataataatgatgggtcttcaaccaagttttcatttcctctgataatccaattccatcatcctatcagcctaattgttatcctatttagttttcatggccacttttccttctaacttctaatgggttacaaaacatagttaagattatgagctgataattcctatcaattattaaatgttttcatgtgagccgagtattataagtgatattcatagtcagaattcttggagaccgctacttttcaccttgcaactgaggtgtattttgtattcataatccttgctctttgctatgccctggcctgttcctgaactctctctytgtctgcttttccaagcctcctctgtccccatccatctggcactcacataccccctcacttctgcttccacctctctccagcaggctcactgcttggtgcagatggagagatacttttgaagttttcaggaaatcctctcaagggcagtgaaacaatttgtctgtgagcagagatgatactgaatgcattggaatggaggtaaaatttagaatatccaagggaaaaatgcgttagttaaaatag

SEQ ID NO: 244170 - DNA, 574 bp, Homo sapiens
attaaacaaataataatgatgggtcttcaaccaagttttcatttcctctgataatccaattccatcatcctatcagcctaattgttatcctatttagttttcatggccacttttccttctaacttctaatgggttacaaaacatagttaagattatgagctgataattcctatcaattattaaatgttttcatgtgagccgagtattataagtgatattcatagtcagaattcttggagaccgctacttttcaccttgcaactgaggtgtattttgtattcataatccttgctctttgctatgccctggcctgttcctgaactctctctttgtctgcttttccaagcctcctctgtccccatccatctggcactcacatacccsctcacttctgcttccacctctctccagcaggctcactgcttggtgcagatggagagatacttttgaagttttcaggaaatcctctcaagggcagtgaaacaatttgtctgtgagcagagatgatactgaatgcattggaatggaggtaaaatttagaatatccaagggaaaaatgcgttagttaaaatag

SEQ ID NO: 244171 - DNA, 632 bp, Homo sapiens
agtttcagtgctgcagctgagagcaacccccggggactcagcagagtaacaaacagaaggaatcggggctttctctaatcaatgttgcagagaagaagtacccacccatcctgggccacctacccaccttgattgagaccattgggtaaaaaagaaagaaatttctagcttgtttaagctactttcacaaatctctgttacagcagtttagcctgtattctaatatacagtttctacctagaagtgggtattgccataacaatatctgagaccagggtcacaggctgtaaggacagagatacagatattgacagctggaaagctgaggactcctgctagaaaagccaactttttctgttccccaagcagtacaaggtaagactgttgctcagagcatccttcaagaatctcctatattctcctaggccacacaatggcagccagttcaaacattcagktagggcaggcctggatttcccattcgagcctattgcttcagatgacctcaaggaagaagcccttaaactgagggagttaggagtgggctaccaaaccaataaataagctacaaagccaataaatcaaaaggtagttaaaaactacagccaaaggctactttaatgtggaactgg

SEQ ID NO: 244172 - DNA, 488 bp, Homo sapiens
agtatgtgaatgtcctagtccaagtccccagtgcagctaggattggagaagtataattaaatattgctcagcccagaagaatcagggtgtggtccaggtcagaaacaggcagagtgaagatgagactcaccgrtgctaacctttctttcctttgctaacacattcaagtgacagccacacttccaccagtagcacagactcatgagaactggtcattaaacagagagtactctcactgggcaggtgaagggggatatgtccattattgtgagaggttcatgttttgacaaaaggatcctgatactgatacccaatactgagttgaaattcagtcaagtagagcggcacatatgaatcacttggggatcttattagaatacaaattctactcaatatgtctcaggtgggacctgactaataagctcccaagtgatgccaaagctgctgggcctttggctctctctttgaaaagcaagattctagatttt

SEQ ID NO: 244173 - DNA, 385 bp, Homo sapiens
agtcccaaccagtgccctgggtttctgagtcccttttttctctctccactacccagagcaagcagccagggactgtgggacacatggcagagccctgatcttgtgggcacaggcagatcaaagtagctaaagatgatgytaaagagacaggtgtggtaggcaccaataggaggctaggaagtcaaggtcctccaatctcagacccctgtcttaagggtaagatcaaaggctggcacaaaacttacagatcattttatacaaaagttggtatatgcttggggccttgtgggacatcttctccatatcaaatccattaaatcattggcccagactccatttgtctttaacaggaaggaatagctcttggggtgattcaaggtgaaac

SEQ ID NO: 244174 - DNA, 524 bp, Homo sapiens
actattattaaaagtcaaaaaataacatgttgatgaggctacagagaaaaaggaagacttacacactgttggtgggaatgtaaattagttcagccactgtggaaagcagtatgaagatttctcaaagaaccaaaaacagaactaccattcaacccagcaaccccattacttgatatctacccaaaggaaaagaaattcttctaccaaaaasacacatgcacctatatgttccccacagcactattacaatagcaaagacgtggaatcaacctaggtgcccatcagcagtggactggataaagaaaatgtggtagctatacactgtgtaatgctatacagccataaaaaagaatgaaatcttgccctttgcagcaacatggatgcagctagaggccataatcctaagcaaattaatgcagaaacagaaaacaaaatatttcacgttcttacttataagtgtgagctaaatcttggctacacacagacataaagatgggaacaatagacactggaaactccccaag

SEQ ID NO: 244175 - DNA, 524 bp, Homo sapiens
actattattaaaagtcaaaaaataacatgttgatgaggctacagagaaaaaggaagacttacacactgttggtgggaatgtaaattagttcagccactgtggaaagcagtatgaagatttctcaaagaaccaaaaacagaactaccattcaacccagcaaccccattacttgatatctacccaaaggaaaagaaattcttctaccaaaaacacacatgcacctatatgttccccacagcactattacaatagcaaagacgtggaatcaacctaggtgcccatcagcagtggactggataaagaaaatgtggtagctatamactgtgtaatgctatacagccataaaaaagaatgaaatcttgccctttgcagcaacatggatgcagctagaggccataatcctaagcaaattaatgcagaaacagaaaacaaaatatttcacgttcttacttataagtgtgagctaaatcttggctacacacagacataaagatgggaacaatagacactggaaactccccaag

SEQ ID NO: 244176 - DNA, 586 bp, Homo sapiens
ctgtgtttgcaagtaccaacgtaattataaatggagggcatcaccaggagtggttctacacagatctgacccaggtgatttacaaaaaggttgtctctccataacatatacttggatgcagtcacttacatttgctaattgctactgtttcctaattattcctgggagcaagagggacaaatgatgcccagaataaatttgaaaagcatattggaactctgaagacaggggcagaaaagtgaatattttaggataaacatttttaacacctttttcttccaaaaagtgttaaattttcaatatggttaaaatatcgaaataggtaggttattgctgcaagagaatggttggctkcatagctaatatcacatagtggaattttgacttctgggatgtggcttatgacaccagaaagacagacacttgaggcaataaaggtcattatttttgagattcagaaactatatatttgtccaggtaatggctgatacgcacataaataaattgaacgtggagaggagtgatgaataaaagcccacattcagttgtgaaataaattacaaattgagcacattatgaagacaaa

SEQ ID NO: 244177 - DNA, 552 bp, Homo sapiens
ccacaacaccaaaagctacaaatggcagagccaatatatccttttgtttcaaaatgtcaactataaaaagcctagagttttcctatcattaccacttttctggatacctgtatgtttcagacaatggaattattttctctgtaggcttttaaaaataagtctttaaaaattggtctaatatgttgtaccaaagtctgtcaattaagaaataaagctcttgtttttaaaaaaaaagagtcatggaaacaatttytaaaatccatatgctttaaaacctgcagtaagatcatattgtttagaatgaatgtgtgtggtcttcttacctgacccttcgggtattttttttttaagaatcccaggacaagcatgtgtagtgataaaaacagcaaacactacacggatatttcaccaaaggctggtgaaactcaggatagttaaactagatagctttcatttccatcactggctctacctaatgttagtatatttcttaaaccaggacttcttaggaagttcagtgggcactagcaaatctgcactatgcaactggaa

SEQ ID NO: 244178 - DNA, 621 bp, Homo sapiens
attgaaagcagggtcttgaggatatatttgtatgcccatgttgacagtagcattattcataagagataaaacctggaaacaacttaagtgtccactgacagatgaatggaaaaacaaaatgtggtataaacatactatggaatattattcagcctcaaaaaggaaactctgacatacacttcaacatgaatgaatctggaagacattatgctaagtgaaacaagcaagtcacaaaaaagacaaacatgattctgcttatataaggtacctagagtactcaaaatcacagacacaaagcagaatggtagatccagggtctggggggargaggaattgagaagatattgtttaatgggtatagaatttcagttttgtaagatgcaaagagttatagagacaaatggtggtgctgattgcacaacaatatgaatatacttagtatcactgcactgtatacttaaaaatggttgagagtaaattttatcttctgtgtaactttactacagtttaaaaaatagaaaaaaattttaaaggggaaaaacatgaccatgggcaaatatctgtgagattacaagtgtgttcaggagtttaatctggtaaattctataaaggtttatgtga

SEQ ID NO: 244179 - DNA, 621 bp, Homo sapiens
attgaaagcagggtcttgaggatatatttgtatgcccatgttgacagtagcattattcataagagataaaacctggaaacaacttaagtgtccactgacagatgaatggaaaaacaaaatgtggtataaacatactatggaatattattcagcctcaaaaaggaaactctgacatacacttcaacatgaatgaatctggaagacattatgctaagtgaaacaagcaagtcacaaaaaagacaaacatgattctgcttatataaggtacctagagtactcaaaatcacagacacaaagcagaatggtagatccagggtctggggggaagaggaattgagaagatattgtttaatgggtatagaatttcagttttgtaagatgcaaagagttatagagacaaatggtggtgctgattgcacaacaatatgaatatacttagyatcactgcactgtatacttaaaaatggttgagagtaaattttatcttctgtgtaactttactacagtttaaaaaatagaaaaaaattttaaaggggaaaaacatgaccatgggcaaatatctgtgagattacaagtgtgttcaggagtttaatctggtaaattctataaaggtttatgtga

SEQ ID NO: 244180 - DNA, 640 bp, Homo sapiens
tttatgtgtatacttattttagttacatatatatatgtatatgtataatttattttagttacatatataactatatttatttgttatataaatatataactaaatatatataatatatataattataaaataaaatccttccttcctttccttcaacttccttccttccttccttcatcatgatgcattaaagagattttatggtctattgaagggctgacaaaaaccacttatgcrtccctaaccaaaattgaaaaacaacatttatctggtctagagtatatataaacgtgttatctgttactcaagttttcatatttcctcaacacttataactagacttgagcatcagtcactacaatgtttatcacaggtactttatgtataactaaaataaaatttaataaaacatacccttagtattcactattctctccctccctccctccctccctcccttccttccttccttccttcatcatgatgcattgaagagattttatgatctattgaagggctgacaaaaaccactaatgcgtccctaaccaaaatttgaaaaacaacatttatctggtctagagtatatataaacttgttatctgttactcaaattttcatatttccaaaacacttataacta

SEQ ID NO: 244181 - DNA, 536 bp, Homo sapiens
aaaacctattctagcaaaagttatacacttaaaaataaagcatccctcctggagagctatatacattaatatatgtttatgacgatacttgcttttagatgaagctgattggtccagtggccgatgactttgtactctgtgcttttgttggttatttgatactggaagatatcataacgtccaggagcatctccgttttcattaaaagtgacaggagtgccagcactgcctataaagatttagaaaacaatgttaataaagttttagtaagatagcccactgggtttatttttcttttagaaggaatggtagataaaaatatattgtgtgaagtaagtgatgcaaagattgcaatccatacaaggtcattcttgatagcataatatcttttacatgaaaaagaagcccagacatacacacacgagtaagacgtgctttattgtacatattagaaagtaartgatgagtatccaagttaagcaatgcacataacagctaaataaataaaagttgataggctgaatattcaatactgg

SEQ ID NO: 244182 - DNA, 582 bp, Homo sapiens
atgatcccaagcaaatccatgcttccctcttcatgacattatgaacttcatgtatattttctgtcatcttttatattcacaaayggagagaccaaataaatcctctcactttgttattaatgtgacattagaaaccacggggaaactttgacatatctgtgaatgggctctgagttaatcaccagtagctgaagtggtttttattactgatgacccttgcatcttgttttcctaatgcgatttctagtcttaaattaggcttgcagttgaattacttcaaccctttttcaggaagaactgattccattacatattgactcatttcaaatgactgccatggaactctggtcaatgtagaaagagcatcgttgagtagccataaggaactaactcattagctgtttaataattcctacaagtttgccatcttttaaaaatgtcattgtttgtactgaaactggccactctgagaaacagaattaagtggcgaattttttttttgtccacaaaaaaatttcaaatgacaaatgtctgttaatatagtcattaatttatcaaggtttaataacaacacaggtaaga

SEQ ID NO: 244183 - DNA, 582 bp, Homo sapiens
atgatcccaagcaaatccatgcttccctcttcatgacattatgaacttcatgtatattttctgtcatcttttatattcacaaacggagaraccaaataaatcctctcactttgttattaatgtgacattagaaaccacggggaaactttgacatatctgtgaatgggctctgagttaatcaccagtagctgaagtggtttttattactgatgacccttgcatcttgttttcctaatgcgatttctagtcttaaattaggcttgcagttgaattacttcaaccctttttcaggaagaactgattccattacatattgactcatttcaaatgactgccatggaactctggtcaatgtagaaagagcatcgttgagtagccataaggaactaactcattagctgtttaataattcctacaagtttgccatcttttaaaaatgtcattgtttgtactgaaactggccactctgagaaacagaattaagtggcgaattttttttttgtccacaaaaaaatttcaaatgacaaatgtctgttaatatagtcattaatttatcaaggtttaataacaacacaggtaaga

SEQ ID NO: 244184 - DNA, 582 bp, Homo sapiens
atgatcccaagcaaatccatgcttccctcttcatgacattatgaacttcatgtatattttctgtcatcttttatattcacaaacggagagaccaaataaatcctctcactttgttattaatgtgacattagaaaccacggggaaactttgacatatctgtgaakgggctctgagttaatcaccagtagctgaagtggtttttattactgatgacccttgcatcttgttttcctaatgcgatttctagtcttaaattaggcttgcagttgaattacttcaaccctttttcaggaagaactgattccattacatattgactcatttcaaatgactgccatggaactctggtcaatgtagaaagagcatcgttgagtagccataaggaactaactcattagctgtttaataattcctacaagtttgccatcttttaaaaatgtcattgtttgtactgaaactggccactctgagaaacagaattaagtggcgaattttttttttgtccacaaaaaaatttcaaatgacaaatgtctgttaatatagtcattaatttatcaaggtttaataacaacacaggtaaga

SEQ ID NO: 244185 - DNA, 609 bp, Homo sapiens
tttccatccacatgtgctagtgcagaaatggaaacaaacaacatggagttgtgaggtaatgtttactcatcaggtgctacccttagatgtcacacatctccttgaatattttctgttcaataagaaatgtgtgaaaaagtatatttttattcgtaggcatctcaagcactccaacatggttttgtagggaaaatgatatattcaatgaagrttttttttttcaaatgttggctcttttgaatattgcgcaggggaagaatatgggcttgggatgcagggactagagtctgctttctggctctaccaattatccgtgtgatctgagtaagttaccctccttaagcctgttttctcatctgccaagcaggcataataaccccaaccttcctaaactgttgcatgagatgacagtgtatatgactggtacacaatagatgtgcaatgaacgcaaacactcatcatcttccattcctttggctgcacttatgcccccttagtatacattttcttgtttacaccatgcaaaacacaatgtaaaaataatgcattcacctttatgtgcaaaaattatacatctctttgttagtgcaatcctctcagttttttgtc

SEQ ID NO: 244186 - DNA, 609 bp, Homo sapiens
tttccatccacatgtgctagtgcagaaatggaaacaaacaacatggagttgtgaggtaatgtttactcatcaggtgctacccttagatgtcacacatctccttgaatattttctgttcaataagaaatgtgtgaaaaagtatatttttattcgtaggcatctcaagcactccaacatggttttgtagggaaaatgatatattcaatgaaggttttttttttcaaatgttggctcttttgaatattgcgcaggggaagaatatgggcttgggatgcagggactagagtctgctttctggctctaccaattatccgtgtgatctgagtaagttaccctccttaagcctgttttctcatctgccaagcaggcataataaccccaaccttcctaaactgttgcatgagatgacagtgtatatgactggtacacaatagatgtgcaatgaacgcaaacactcatcatcttccattcctytggctgcacttatgcccccttagtatacattttcttgtttacaccatgcaaaacacaatgtaaaaataatgcattcacctttatgtgcaaaaattatacatctctttgttagtgcaatcctctcagttttttgtc

SEQ ID NO: 244187 - DNA, 527 bp, Homo sapiens
cccaaaggaaaataaatcattctaccaaaaagacatatgcactcatatgcatatcacagagctattcacaaaagcaaagacgtgacatcaacccagatgcccatcagtggtgaactggataaagaaaatgtgacacataggatttatgggggaaaatggcagatgggaggcaggactaaattgcagctcccactcagacaggcagagcagcatgtggagatacatcatgaacttttcctgaaagaactactggaggaacataccaggaaagccaaaagaatccacagaccctttgaaggaagcagattgctcctgcaggacccaggagacagcccaaatactatgagtgcccaaagtatgaaagtgggaaagggtgaacacacamcctcactggggaactcgaaggtccaggttatgggagaaggatttgaccctacctagaactgagacaatttagagagccaagtgaaatacaggagtagaggaagtgccagaagagccctgtgggctctctcggtccccaggga

SEQ ID NO: 244188 - DNA, 534 bp, Homo sapiens
caagctgaactttgtaacaattccaaccaaacatgcaaaatttcttggacagaacttgggggagagagtgaatccagagtgcagacacaggcaggcaaggaggtatgaaacctgaaagtcctgcttgctttctcagctgggaggctggtagcctggggcaagttcttagccctgcttgcccactgcctaaaaacaaactcagtgctattgcggggaggcacagtgagagtgagactggccttttggattgcatgggagccgggtgaggcctgtaactgtcggctgtcccccacttccctggyaacctacatgacacagcagaggcagccataatcctactggtaacgtaactccattgacccgggaaccacaaacccatcccccacagcagctgcagcaagccctgcccaaggagaatcagctcagacatgtctaaccctgccccaacttgatggtatttctctacccaccctggtagctgaagacaaagatcagattctcttgggagttctagggctccagccactgcctgat

SEQ ID NO: 244189 - DNA, 518 bp, Homo sapiens
ctaaccctgccccaacttgatggtatttctctacccaccctggtagctgaagacaaagatcagattctcttgggagttctagggctccagccactgcctgatcttccctatactaccacggctcatgctctcttgaaagtgccacctcctggcaagaggccaatcagcacaaaactagtgcaayaaacaacaataatacaactacgggccctcacagaatgcatttcactcccctgccacctccactggagcaggtgctgctatccatgactaagagacagaaagatggttcacatcacagaactctgtgcagacaccccctagtaggtaagtactacatcaagggagcaccccatgggacaaaacagtctgaacagaagcccttgagccccagatcttccctctgacatagcctacacaaatgtaaaagaaccagaaaatcacttctggtaatgacaaaacaaggttgtttagcaccctcaaaatatcacactagctcaccagtaatggatccaaag

SEQ ID NO: 244190 - DNA, 596 bp, Homo sapiens
tatttataatggacctgattttctgtaattacatgaactgtcaatgaatattaggccactgtgatagatgtgaattgtctatgttactatggtgatttgaggtgtttctattctacactgcacgcataacaatgtggagcataattaaaagacatagtgaaatatattttaaaattgctgtcaattaaaaagcaaaacatagtctgactttagcataatcctttcagaagctggcctaycaaactgatgaaaacaataattattagttaatatattgtcttttcaaatgtatctaaaacatttacaaaaatgattattttctgccaaaatgaaatgctagcaatcatgattttgaaatcttagttcatattctctgaccattatgtgataaaacatgaaattcttaacaaaagccttaaaaaattaaaaagttaacacaacaccaaataagaaaaaaacaatagcctccaaagatttagaacaaaaaactaagcacttattttaattaattagtcaaagaaaaaattaaaattaaaatcatagagtgctatttaacagataacaatatatcaaaatacctaaagaatgtgaccaag

SEQ ID NO: 244191 - DNA, 596 bp, Homo sapiens
tatttataatggacctgattttctgtaattacatgaactgtcaatgaatattaggccactgtgatagatgtgaattgtctatgttactatggtgatttgaggtgtttctattctacactgcacgcataacaatgtggagcataattaaaagacatagtgaaatatattttaaaattgctgtcaattaaaaagcaaaacatagtctgactttagcataatcctttcagaagctggcctatcaaactgatgaaaacaataattattagttaatatattgtcttttcaaatgtatctaaaacatttacaaaaatgattattttctgccaaaatgaaatgctagcaatcatgattttgaaatcttagttcatattctctgaccattatgtgataaaacatgaaattcttaacaaaagccttaamaaattaaaaagttaacacaacaccaaataagaaaaaaacaatagcctccaaagatttagaacaaaaaactaagcacttattttaattaattagtcaaagaaaaaattaaaattaaaatcatagagtgctatttaacagataacaatatatcaaaatacctaaagaatgtgaccaag

SEQ ID NO: 244192 - DNA, 510 bp, Homo sapiens
aaggtctcaaaaaagttacctaaaagactatctccactcactaacccatcttccttcatccttcatccctctgtaatttcctccctctctcagcattgaaacttccatttcaaaggctacaaattgtgtccatgttgccaaaccargagaggcttatcagttcttcctcacaatggcctctcagctgtgtgataccacccacatgcttaagagaaggcattctgcaggcttaggtaagtctgaatccaaggctcaccacacactggatttatctataaacttttaaacctcctcatcaataaaatgaggatagcaattattttcctccattggctttttgtagtgattaaatgatataatccatgtaaagtgcttaatcttgtacttggcacatagcaaagattctacagttgtcagtttttatagctggtaatactcttggtgttattcttctgtaattgttctctcatgttgcatttcattaaacaacactctccagaggaagagaga

SEQ ID NO: 244193 - DNA, 510 bp, Homo sapiens
aaggtctcaaaaaagttacctaaaagactatctccactcactaacccatcttccttcatccttcatccctctgtaatttcctccctctctcagcattgaaacttccatttcaaaggctacaaattgtgtccatgttgccaaaccaggagaggcttatcagttcttcctcacaatggcctctcagctgtgtgataccacccacatgcttaagagaaggcattctgcaggcttaggtaagtctgaatccaaggctcaccacacactggatttatctataaacttttaaacctcctcatcaataaaatgaggatagcaattattttcctccattggctttttgtagtgattaaatkatataatccatgtaaagtgcttaatcttgtacttggcacatagcaaagattctacagttgtcagtttttatagctggtaatactcttggtgttattcttctgtaattgttctctcatgttgcatttcattaaacaacactctccagaggaagagaga

SEQ ID NO: 244194 - DNA, 584 bp, Homo sapiens
tgggcacatagctaggctacccttttccagtcttccttgcacttaggcatggccaaattattagttcagacaatcaattgtgagcacacgtgatatgcactacatwggagggcattaaaaccccctaagtggtcttctatggtcttttctcttcctagctggctagaatgaaaatgttatgctggacactttgagcatctgcatgttaaaaacgacagaacttacattaggctggattccagcgtgagtgcatgaatatccgtgctactaacctgttaatccaccattcctttagcataattgtgtgagtataaaacaaacttctattctgtttgagtcattacaggttgtcagtctatttcttccagcagacacccataacatccaaatatctagtgagttctcaatgaatagttattaaatgaataagtgaaatcatattaagtctggaaataaatgtttcacttcatgtcacattataaagcttcaagaatagtgtagagtgagtatcagacactggcatggattaataacttgtttcagattgtccttaagagttaatactcattacttcaatgtggata

SEQ ID NO: 244195 - DNA, 584 bp, Homo sapiens
tgggcacatagctaggctacccttttccagtcttccttgcacttaggcatggccaaattattagttcagacaatcaattgtgagcacacgtgatatgcactacataggagggcattaaaaccccctaagtggtcttctatggtcttttctcttcctagctggctagaatgaaaatgttatgctggacactttgagcatctgcatgttaaaaaygacagaacttacattaggctggattccagcgtgagtgcatgaatatccgtgctactaacctgttaatccaccattcctttagcataattgtgtgagtataaaacaaacttctattctgtttgagtcattacaggttgtcagtctatttcttccagcagacacccataacatccaaatatctagtgagttctcaatgaatagttattaaatgaataagtgaaatcatattaagtctggaaataaatgtttcacttcatgtcacattataaagcttcaagaatagtgtagagtgagtatcagacactggcatggattaataacttgtttcagattgtccttaagagttaatactcattacttcaatgtggata

SEQ ID NO: 244196 - DNA, 584 bp, Homo sapiens
tgggcacatagctaggctacccttttccagtcttccttgcacttaggcatggccaaattattagttcagacaatcaattgtgagcacacgtgatatgcactacataggagggcattaaaaccccctaagtggtcttctatggtcttttctcttcctagctggctagaatgaaaatgttatgctggacactttgagcatctgcatgttaaaaacgacagaacttacattaggctggattccagcgtgagtgcatgaatatccgtgctactaacctgttaatccaccatycctttagcataattgtgtgagtataaaacaaacttctattctgtttgagtcattacaggttgtcagtctatttcttccagcagacacccataacatccaaatatctagtgagttctcaatgaatagttattaaatgaataagtgaaatcatattaagtctggaaataaatgtttcacttcatgtcacattataaagcttcaagaatagtgtagagtgagtatcagacactggcatggattaataacttgtttcagattgtccttaagagttaatactcattacttcaatgtggata

SEQ ID NO: 244197 - DNA, 584 bp, Homo sapiens
tgggcacatagctaggctacccttttccagtcttccttgcacttaggcatggccaaattattagttcagacaatcaattgtgagcacacgtgatatgcactacataggagggcattaaaaccccctaagtggtcttctatggtcttttctcttcctagctggctagaatgaaaatgttatgctggacactttgagcatctgcatgttaaaaacgacagaacttacattaggctggattccagcgtgagtgcatgaatatccgtgctactaacctgttaatccaccattcctttagcataattgtgtgagtataaaacaaacttctattctgtttgagtcattacaggttgtcagtctatttcttccagcagacacccataacatccaartatctagtgagttctcaatgaatagttattaaatgaataagtgaaatcatattaagtctggaaataaatgtttcacttcatgtcacattataaagcttcaagaatagtgtagagtgagtatcagacactggcatggattaataacttgtttcagattgtccttaagagttaatactcattacttcaatgtggata

SEQ ID NO: 244198 - DNA, 588 bp, Homo sapiens
ttgggtttattactcactacaacagggagaacacatactcatacataggtaaccatgatagttttagtaagatgaggttagaaaggattattacaaggtttaggatttggttggatgattttggagagagtccaaggaagggaagtttcactgtggactgagtgctgtctgaaacttctatgattatctcaataaatcttatctatagagaagggcagactagagcaaagctacaactgtaactagcaaagaagcaacagttaataatcgaaataggaagatagttgatcttctttaaaaaatattcatgttttgtctgtgtctattttttcttgatccattgtggtcagagtggccttgcccaaygttggtgttcaatgcaattgtttatgggcaacaggggaacaccagggcttaggtaacagtgcgaggcaggctcctgaatgtcaggggttgcttttgtctaatctcatctaatcccatgactttaaattccatcaatatactgaatattctcaaatttatatccctagttcttatagccatgaatggccatgacagccaaaaagtcttcacctacaaggcttt

SEQ ID NO: 244199 - DNA, 540 bp, Homo sapiens
agttgagaaagttgggtttattactcactacaacagggagaacacatactcatacataggtaaccatgatagttttagtaagatgaggttagaaaggattattacaaggtttaggatttggttggatgattttggagagagtccaaggaagggaagtttcactgtggactgagtgctgtctgaaacttctatgattatctcaataaatcttatctatagagaagggcagactagagcaaagctacaactgtaactagcaaagaagcaacagttaataatcgaaataggaagatagttgatcttctttaaaaaatattcatgttttgtctgtgtctattttttcttgatccattgtggtcagagtggccttgcccaatgttggtgttcaatgcaattgtttatgggcaacaggggaacaccagggcttaggtaayagtgcgaggcaggctcctgaatgtcaggggttgcttttgtctaatctcatctaatcccatgactttaaattccatcaatatactgaatattctcaaatttatatcc

SEQ ID NO: 244200 - DNA, 603 bp, Homo sapiens
ttttatcatttgcatgaagaatgtgcagatattgccagcccacacccagggaccctcacagagtaaacttgtgtatgtctataagtgatctgggtgtttggcttgtgtcttggcatgaaagctactcctgcycttgatctttgcatgtgcataggatggaaggaagggaagggactctgctgttctcaggagaacttcaactctatgtctttatttttgaggatgagcaaactcttcaaagggctgttctgccctatctcttattttctgctttcctaacctttccccatttcctcttcattctgaagtgctaagaacgtttgagaagctggaggacacatgcttagaaccatagggaaaaagccattcacattccattgtgtcatcagcccagacctctttgtcttacccagaggccacttcccaccaccaaaaggaatattaggagtattaattctttccgctactaagacgttgtttagggtaccctaaatagcagtcatcgaaataaatgaagcctctattttaaagttaaagggacactagcactttaagctgtttggtacagtgtttttaaagtatggaaaataacactcaccttct

SEQ ID NO: 244201 - DNA, 603 bp, Homo sapiens
ttttatcatttgcatgaagaatgtgcagatattgccagcccacacccagggaccctcacagagtaaacttgtgtatgtctataagtgatctgggtgtttggcttgtgtcttggcatgaaagctactcctgctcttgatctttgcatgtgcataggatggaaggaagggaagggactctgctgttctcaggagaacttcaactctatgtctttatttttgaggatgagcaaactcttcaaagggctgttctgccctatctcttattttctgctttcctaacctttccccatttcctcttcattctgaagtgctaagaacgtttgagaagctggaggacacatgcttagaaccatagggaaaaagccattcacattccattgtgtcatcagcccagacctctttgtcttacccagaggccacttcccaccaccaaaaggaatattaggagtattaattctttccgctactaagaygttgtttagggtaccctaaatagcagtcatcgaaataaatgaagcctctattttaaagttaaagggacactagcactttaagctgtttggtacagtgtttttaaagtatggaaaataacactcaccttct

SEQ ID NO: 244202 - DNA, 528 bp, Homo sapiens
gcaatccaatttaagaagtcaccataggtatgaatagcaaacaattatatgttccccatcayggctaaatgtatcttgtgagccatctacaaaatcaattattcagcaattcagttcatttcattgagacaatattaataaaaggatcaaaagaactatcgtctaattatgtcatacacaataaatcaccaactatttatcaaaaactgttctttccattctacctctgtggttattgccttaggtcagacaccatcacttctcacctgaattaatgtattaagtttttaatgggtctccctatctccaatctcaccaatcccagattaccctttaatgatttcacattaccttgaaaataactaggcacttatttttgtgctctggtacaaaaatgcctttgtctgttgccacacaggccattatctcatggaaaacctgttttccagctgtgtcgaattcagtagtattcatagacccaacacaatctcttcttgtctttaatgtgacgtttatcctgaaaagagt

SEQ ID NO: 244203 - DNA, 528 bp, Homo sapiens
gcaatccaatttaagaagtcaccataggtatgaatagcaaacaattatatgttccccatcatggctaaatgtatcttgtgagccatctacaaaatcaattattcagcaattcagttcatttcattgagacaatattaataaaaggatcaaaagaactatcgtctaattatgtcatacacaataaatcaccaactatttatcaaaaactgttctttccattctacctctgtggttattgccttaggtcagacaccatcacytctcacctgaattaatgtattaagtttttaatgggtctccctatctccaatctcaccaatcccagattaccctttaatgatttcacattaccttgaaaataactaggcacttatttttgtgctctggtacaaaaatgcctttgtctgttgccacacaggccattatctcatggaaaacctgttttccagctgtgtcgaattcagtagtattcatagacccaacacaatctcttcttgtctttaatgtgacgtttatcctgaaaagagt

SEQ ID NO: 244204 - DNA, 588 bp, Homo sapiens
ggaatctaaacttgttggcctagcagtaaagttcttcaaagtttgccaatctgtttggatcttatcacactaaacacctctccatgtatcctacggtttgagctggcactcgtcagatgtggttttaaaatgtatactaattaaaattaaatagaataaaaaattcaactcctcagtcacactatccacatgtcaagtgttcaacagccactagtggctaccatattggacagaacgttcatacaacattgccttcatggacataagttctattggacagtgctagtctagacaactggactactcaaatttctcatctctacactttagctcattctattctctgtctacctgaaatgcggtccaccaaccatatctcttcctattcagatatgacttgttcttcaagatttattcttaatatttacctgtctccaaagtctttacttatcactctagctgaaagtatggcagcccacctatgaactctcaaagttgtttatactactrctcttccccatgttgttttgttctgtcattattggtgcaaatgcctgctttccttgatcagagatataatctttgaag

SEQ ID NO: 244205 - DNA, 594 bp, Homo sapiens
gtcaatatttctgtgagccagggaggaacagcgctgctgttttccttctgctcagctgttacatgtgcctacagaaagacaacttcacctgctacttttttattcaagacagcacagataaagaatcatgagcagtaacttctttcagttcttttttcttcctgaacacactgtgttctcatctattattgatcagaaagtgatatttaaatagggtggcaatttataaaattgcacagggatgttattacattatcttaattaattttacaacyagcactcactcactgtcctttatagtacatctaaagaattaatgtgctgattaacaatagccaagcagactcagatagtagctttcagataagaacttctgttaatcttctgcttgtcaattggaatctactgacataaattgctttaatctgagttcctggcattaagcatttatagaacaacattttgagacactgattattgtaccattcctttggggcagtgcccctaaattttagtgtacaaaagagcatctggaatttgttaaaatccaaattatttagccctttcagagagatcctaattctttaggtctaa

SEQ ID NO: 244206 - DNA, 569 bp, Homo sapiens
caccctttgcaagcagggaggagctgcggtcctcctcttcctatgtggaacctgggattcaaacaacctgtcaggaagcactctagcagggactctggccttgtgagagtccctgtttctcccttttcttccttttcccccaacaaaaccctccttactcactgttcagatgatctgcaagcctacgtttttatggctttgggacagacaaggaccctgtctttagttgaactaagggwaagtcctacaacactacttgggcaatttagggaaatactttcaagtgggagataatggatttagaggatgtatacacaggtgtcttgcaaagtggatccacttaaggtagccatgtaatgcacaatggtttgagacaaattctatgttgcctcactagaaatagactttactggagaaagaggaaacatgcaaagacaggatcaacacaccaagaacacatggattcccatcctcccactgtctttatagacaggtgtgtggggccgagtgagctgctagatacaaagtgtagcttgctatgctttttccttttagaaagcaagatcatg

SEQ ID NO: 244207 - DNA, 501 bp, Homo sapiens
cccgcaccttcaggtttgtgggaaaggatcccccaaatggcaaataaggcactccctcccggggtgggacttgcttaggggacttaagggtttctgcaaccggcgagggggtctgttttcacccccgctatcttgggtgcgcagacactctctgacaccaggcttcacagtttgggccacgggggaagtaattccccagggaaccgcgggggtgcggttttgcgcaactgggtgactcgcgtgtccctccgcatttcatttgcaccaagggagcgcgtgtcagacgaagggaattkttttttcttttttggtgattctgttattttttcaccaactgtacgaagctcaagggatatccgagctttctggctgggcggatgggcttcgcgcttggcatggctgagcggtccatctctacctctccgtttctatctctaccataacagcgaccactcagcccgccaggagcccctgtttcccagcgcaggttcctttttcttc

SEQ ID NO: 244208 - DNA, 501 bp, Homo sapiens
cccgcaccttcaggtttgtgggaaaggatcccccaaatggcaaataaggcactccctcccggggtgggacttgcttaggggacttaagggtttctgcaaccggcgagggggtctgttttcacccccgctatcttgggtgcgcagacactctctgacaccaggcttcacagtttgggccacgggggaagtaattccccagggaaccgcgggggtgcggttttgcgcaactgggtgactcgcgtgtccctccgcatttcatttgcaccaagggagcgcgtgtcagacgaagggaatttttttttcttttttggtgattctgttattttttcaccaactgtacgaagctcaagggatmtccgagctttctggctgggcggatgggcttcgcgcttggcatggctgagcggtccatctctacctctccgtttctatctctaccataacagcgaccactcagcccgccaggagcccctgtttcccagcgcaggttcctttttcttc

SEQ ID NO: 244209 - DNA, 577 bp, Homo sapiens
gccctgtggtttttttttaaaaaaaaaacatatttaatcaaaaatattcattatttctcatgtcaacagtgcaaatactaagaaattgtagtgtaacagaatgttgagtaggatttttcctttacctggaaatccaggtaaatcctaaagctgaaaggtctgggaagagcttcccaaaaactacctttactttacattctaagaggagtcagagagccatcctgaaggccaaccaagacatgccagaggcagccctacttgagcaagttcccatccactcttcctcttaaatctcattttttagggagaaaactgagagggaagggctcaagggcatcaagctgtggcttgtcagcctctgggaaagagccatgtttaggggagtggctttggctctttccctcaaaaggacagttctccaactgaaccacttgtggagactgctggtagctgcataaaaagatatyctaggtggatatttgctgaccaacaaaacctacaggtatacttggggctaccacaacagagaaggatggtaagatagtttattttagaacttcctgatgcatgaaattta

SEQ ID NO: 244210 - DNA, 544 bp, Homo sapiens
tatatctccaacaaattaaaattatttggtaaactagttaaaattataaaaagaaaagacatttgcctactgttttatattagttttagtgaggggctcaaagttggaaagaaaaacagaacagagataatgaggcaaagaaggaaggaagcttcaggagtgtgtatgtgcctcctctttacttagaccttcccaacatgaattcaatattctgtttaaagtgaacattcaagatatcaaacatatccatagttacgttaacagaaagaaaaatatatattccaaaactaaaatatttccacataagccattactttcatattttaaaactctattaacacaggtaattcggaactgatstaagtctttaaaactaagttatttagggttacctgattagcatacaaaacatctgggtttctaggttacatttctccaagaaaactgcagagctcctccctctctctccctctgtctctcacctctgcagactattatttaaacttcatataattgggagttgagaagattttttaaatgactg

SEQ ID NO: 244211 - DNA, 594 bp, Homo sapiens
aattgagtctattatttatccacatggatttcatgaccagaacattctgattttcactgtaactcttccctggctccagattacatcaagttttctaatttccttgattcttaaactaacttgatattttcttttgttgtctattgcctttttcttttccctagctacttccttctcatcttgtttattttcaatcaatactttgccctatgcccactctctatattacatattcatatgttctggccttctgtaatttcatttgtaatttcagttcacctgtacttccccactgggagacagtgtagaacagtgttggatgaaaaatccttgcatragtgagcatgaagtgggatatgggtcctagacatctgtcaggtaggatacttcttaaattataactttagggctcaaagcattaagccactccagctgcaatagcctacttcattgtatgaatataaaataaactagacattagaaattcaaaatatctcctgtactcctagacagcaatccacccactgacaagaagtctctaaagaagtttttataagtggtaacaatgaataattttgcactagtcccatcacc

SEQ ID NO: 244212 - DNA, 577 bp, Homo sapiens
gatattagctatcggacaattattaaacttaaagaggaaaaaaaaagaacttaaaaaagacctatttttctcttcccatcctggcctcatccatttgaagcaagggtgayaaccttgttgtcataaccctacaaggaaatttttcacatttaacccacatttactgagaatctactctgtgtgccagtaatagtaccagactttttcatggccattatcttacgtaaagtaggtatgaaatggtatttttctaagtagaggtaaaggattctactcctcccactaaaaatacaaaataaaagaaaaagaaagacacaaaagttagagaaaacaaaatattagaagtttggttctgtttaaatgtatgcaaatccaattaggactaaatttacacttcaaaatatgtcaaaaattctctaacaggaaaaaaggacaaagttgaattttgttttctgttcttttcatgtgactttttgtgactggtattctttatacaaaatgactatggctcccataaataataaccaacaattctatagtattttgaagttttcaaagtattttcacataaaaaaat

SEQ ID NO: 244213 - DNA, 577 bp, Homo sapiens
gatattagctatcggacaattattaaacttaaagaggaaaaaaaaagaacttaaaaaagacctatttttctcttcccatcctggcctcatccatttgaagcaagggtgacaaccttgttgtcataaccctacaaggaaatttttcacatttaacccacatttactgagaatctactctgwgtgccagtaatagtaccagactttttcatggccattatcttacgtaaagtaggtatgaaatggtatttttctaagtagaggtaaaggattctactcctcccactaaaaatacaaaataaaagaaaaagaaagacacaaaagttagagaaaacaaaatattagaagtttggttctgtttaaatgtatgcaaatccaattaggactaaatttacacttcaaaatatgtcaaaaattctctaacaggaaaaaaggacaaagttgaattttgttttctgttcttttcatgtgactttttgtgactggtattctttatacaaaatgactatggctcccataaataataaccaacaattctatagtattttgaagttttcaaagtattttcacataaaaaaat

SEQ ID NO: 244214 - DNA, 656 bp, Homo sapiens
ttaaaacaacttattaaaaagtatacctaatacccacttctctgtcagtcatgaagtatattagcacattaaagtctccaagaggtcttaaaaaaatagaaaaaaaaacaattatcctaacattccctaaacttatttgaccaggaagcctttttatgcatatatagtagctacttaaaagcctgcagaaccagtgttctgaggaaggctttgagaaaatgcttacctggacaagaaccacagctatcatcttgaaagttatttcagccttaggttttcaakttttagaaaaaaataaaaaataaaaaataaaaacattgtgaaagagaccatctcctaatgttcagagtcattagaaattctcagaaaatgaataaaattctgccctttgggaagatatgcccaaaagggtagcagaatggtattagctttccaaggccaattacttcttaacaatctcttaaaggatatgaaaaagttctatttttcatggaatgcccagtaattgcttatccagctggtagcagatgcaaaacttcatctcaggaggaaagcttaacgtacaaatttgtgaagacctgataaagagtgagaagaactctcaggagtctcaggaaatgaataagttcatgcctgtgatgaagacagaattgaga

SEQ ID NO: 244215 - DNA, 440 bp, Homo sapiens
atcaaacaaaaatgcaagcagaagtgttgtggcttctgtaatgtgccattattatttgttcctcttttcaccattttgcctcagaaaaaaaaaaaatgaaaataagaaaaatgggagggtggggccaagatggccaactagaaacagtggccttcggaggctcccatcagaaaaaccataataaacgtgtgaatcyttcactagcaatcagggtatccaggttctctcatcagaacagactaggaggctggaatgacccatagagagaaggaagaacaatgtggtgtggcaggccacctaagagccacacgggcagaggagcccccttcccccagccaagggaggcagtgagtgagtgtgctacctagctggggaaaccatgctttttccacagaactgtgcaacccacggatcggaagttccctctcacaaacccatgc

SEQ ID NO: 244216 - DNA, 592 bp, Homo sapiens
tccctccttgcctgtacctggtgagcacacgggtcttacattcagctccttgagaagagcacttcttctgcttggactgtttatctcaggatcatcagtctcctgatggcaaaccacttgtccccccaccccgccaccacctaccttagagcctacttcttttcacagcccaaagtaacgttttctttgatgactcttgagctgggttgtgaagaaaatgctcttgttgtacacagcattctttttgcttccaatttttcaaatttttattgtggtaagaacacccaacatgaactctatcctcttaacaaatttttaagtgtattgtattagtccacaatgctataaagractccctgaaactgggtaatttatgaaggaaaaagatttaattgactcacagttctgcatggctggggaagcctcaggaaacttacaatcatggaagaaggcaaagcaggcaccttcttcacaaggtggtaggagagagaaaggggaaaccaccacttataaaactatcagatctcatgagaactcactcactatcacaagagcagcatgggggaaatcatccctatgatgcaatcacctc

SEQ ID NO: 244217 - DNA, 555 bp, Homo sapiens
tggtattacaaggtaagcaaaactggcgattactgaatttcttaaaataaaataaaacaataaactttaaaagaaataatagacatgtgcttcgtaaggcaaaaaaagtaattacaaagatgttaagtttgaaatctccagaattctaaaattctttcaatctctttgcctgcactgttttctcatgcctcatttctccttcatttagttttctaattaactcccacttccttatcacatatcggttcaaatttaactccaactgagaatccttattagaaactgttacttgatagccaagcctcaattaatattttctcaataaatatataaataaatggccaggaagggaaagctgaggaactgactcctatctttcctttccccrctttctttctatatctcccttatcaatctttgaataaaattatattttgttaagatagatctcatccaggtgataccaaggctatcgtacaaaactgactacattgatcattgataccgttttaaaatctcattatgaagcctggaaaattgtagatgcaatacacc

SEQ ID NO: 244218 - DNA, 580 bp, Homo sapiens
gactaaataggtcatactaattacttatcatagaaactggcacataagaagtgtttaacaaatgacatcaaattcgttatcatcatcagaactgaccttgtaacttatatgttactatcactagtttacattcaaggaaattgaggctctgagaagttaattaactggtccaattttgtacagataaaatactagatttgccaaaatcatctatatccttgtagagccatattattggtttgtagtttgaatatgcatttataattattgatagtactttttgaggaagaawtgcaagctaaaatatatgcaagtgagtgcaataagtactattttctgagaaacatctgtggccatattatcccaaacattggttggaaatacattttatttttatttatcaaaacaagtcaagatggaattattaattctcaatttcttcaagtctcaactaacagtttccttacatgaaaactgtaatttaagtaactggataccaggaaaaagaaaaagagaagaccttcaatttaatgatagatatctaccataaattaaacctcattcaagaacttcaatgcac

SEQ ID NO: 244219 - DNA, 431 bp, Homo sapiens
acaaattttatgtgtactaagttatgtcttctgttatgtaattctcacaacaatctcttaaagtatgtattattataytgttatctctctcagataaatagtttattatttttcttaagctcacttaactagtaaatagactattaacacagaaaatcagactcaagggcctatgctcttaaccacaatattgtgtttgactgtatcaggatatacctgcttgaagaggtcacgagaggctacctgattataagaaggctcataaaaaattgatttgtgatccagctgatgataaggcatattaaacttgccagcaaacttagatattaccacttgcacatggctctttctgatggacagttcgaacaaaaccccaaattaggttgaatcataattctattatgaatgtggaatcagaacaagagagatct

SEQ ID NO: 244220 - DNA, 621 bp, Homo sapiens
taatgataaatgtctacattaaaaaagaaatatctcaaaaaaacagcatctctttatatgtcaagaaactagaaaaataacaaactaagcccacagttaacaggagaaagtaataaagattaaagcagaaataaatagagagtaggaagacaactgaaaagatttttttttaaactgtgttttttaaaaaagataaacacaaagacaagtctttagcttgactaatgaaaaagaataaaattatattgcaagaggagatactataatttattcaatagaaatacaaaaaatcatgagactactatgaaaattatattccaacaaattggataatccaggaaaacatcaataacttccacaataatggatgttttaaatacaactaaccaagactaaattatgaaaaaaatagaaaatctgaaccagagcaataataactaaagagatcaaagcagtaatcaaaaaccttccaacaaagaaaagtacaggaccagatggcctcacagatgaattttaccmaacagttaaagaattaatgccaatccttctcaatttttcaaaatctaaagaaggggaacacttccaaactaattttatgaagtcagcattaccttcatacca

SEQ ID NO: 244221 - DNA, 552 bp, Homo sapiens
gaagtgtaaagttaagtagcattgataaaattaccattaatttttctkccttctaaatttagatatacttttcagaagtctatgggcttccaggaacatctattaataattccagctattccctacaacagtcctctcaactatttcctctaatcattaatttcaacatattttatttcaatttcaagactgtactttatattttaatcaaatttttatgttatgaagaaaacattcacattgtcaaaaactaaaaaaatacacaaatttcaagtagaatatttaaacaatttatgcttctttaaccaacataaaaaaatttcaaaatttgacatatttcctctcttttgtatttgttagtgctttatttatactttatatgttatattatagtttgctatttttattttaacactttttctgagtatttctcatgccaaaatttttttatgaacagcatgcataatgtcagcataagcttcttattaaatgaaaagaccattctttgaggatttttttattgtttatttttgttgagaagaaatttcatat

SEQ ID NO: 244222 - DNA, 475 bp, Homo sapiens
tgcaggtttaaaaaatagtgattctaaaagctcctcattaactacggcagactttgttattaatgaatttgagtccatgtgagaatgtgattttttttctcttaaaatatttctgtagaactactagattttctctatctctctacctgtaaatcacagtgaatcaaattatttttactgggttggggaccctatcattttgaaaaatgtaatggggcaataaagatgatgtgtctactacacatctrttttacagatctggaatggacagtttcaacagaaaatgttccttctgcatctacagaaaaacaagtttcttctaaaaatattcactcacttaacacaagctccacctttttaaaaagggcatgcatcactgcctagagaaaatcccacatgcatactcctacactttaccttattttggctctaatcacataggttaatatgtttacctttaaccacatttcacagg

SEQ ID NO: 244223 - DNA, 593 bp, Homo sapiens
ggtctcccactattgttatgtagatgtctcatttcttagatctagtagtaattgttttataaatttgggagctccagtgttaggtgcatatatatttagaatcatgatattttcctgttggactagtccttttatcattatataatgttcctctttcttttttaactgttgtttctttaaagtctgttttgtctgatataagaatagctactcctgtttgcttttggtttctatttgcatggaatatcttttttcaccactttatgttaagtttatgtgagaccttatgtgttaggtgagtctcctaaagacagcagatatgtggttcctggagttttatccattctgccatkttgcatcttttaagtggagcatttaagccatttacattcaacgttaatattgacatatgaagtactattctattcatcatgctaattgtgacctgaatatcttggatttttttcattgtgttgttgttttataggccttgtgagatttgtgctttaaggaggttctatttttggtgcatttgaggtttgtttcaagctttagaactccttttagcattttttgtagttctggcttggtag

SEQ ID NO: 244224 - DNA, 467 bp, Homo sapiens
tctctcatgcccctttctggaaaatttacccccttccacaggcaaccattttcagacttcacttggaataatgtttttttagatagaaccatattgatgtgtatattaatattccatttgttttcattcaacatggtgttattgagattcatccaagtttttgtgtgcatcagtaacccattccttttcmatgctaagtattattttattgtatggatataccataagttatgtattgatttttaattgactattctttgtgctgtatccaatttttggctactataaataaggctagtgtgagcattcttataaaagatttttgaggacctatattatcatttctcttggataagtatatagaaatataattaggtgaatatgtaagggtgattatattgtaaaagcatgtttcctttacagaaattgctagcttttcaaattgtgtaccacttttcactcctagc

SEQ ID NO: 244225 - DNA, 615 bp, Homo sapiens
agtaatgtgtattataaggcagcagtctccaacatttttggcactagggaccagttccctggaagacaatttttccacgaaccaaaggtggttggtcggtttgaaactgttccacctcagatcatcaggcatttgattctcataacgagctcacaatctaratccctcacatcacaattcacaatagagtttgcactcctatgagaatcctatgctgccactgatctgacaggaggtggagcttaggtggtaaagctggctgtctcgccactcacctcctgctatgcagcctggttcctagcaggctacttacaagtccacacccctattataaagtataattgagcagcaacatcatggaatcatggaacaatacttgactttctagggggaagtgtgaaggagtgaagaggacaggtagctgggaatctgggcctcatcaaagtctttgagggctcagggcaaatttcaaactatattggtgttaattgaaaaaaaaatcagaagctaatttgtatgaatcctgatggttaagagtttaggagaagatattctgcatgcttagggtacaaatagttgggaaatgagaaaagttagaattttaaatatacttat

SEQ ID NO: 244226 - DNA, 615 bp, Homo sapiens
agtaatgtgtattataaggcagcagtctccaacatttttggcactagggaccagttccctggaagacaatttttccacgaaccaaaggtggttggtcggtttgaaactgttccacctcagatcatcaggcatttgattctcataacgagctcacaatctaaatccctcacatcrcaattcacaatagagtttgcactcctatgagaatcctatgctgccactgatctgacaggaggtggagcttaggtggtaaagctggctgtctcgccactcacctcctgctatgcagcctggttcctagcaggctacttacaagtccacacccctattataaagtataattgagcagcaacatcatggaatcatggaacaatacttgactttctagggggaagtgtgaaggagtgaagaggacaggtagctgggaatctgggcctcatcaaagtctttgagggctcagggcaaatttcaaactatattggtgttaattgaaaaaaaaatcagaagctaatttgtatgaatcctgatggttaagagtttaggagaagatattctgcatgcttagggtacaaatagttgggaaatgagaaaagttagaattttaaatatacttat

SEQ ID NO: 244227 - DNA, 566 bp, Homo sapiens
gcaatgggttattcagccttaaaaaggaaataaatcttcacttatgctacaacatgaatgaaccatgaggacattatactaagtgaaattaatcactcacaaagacaaagactatatgactccacttatatgaggcatctagagtagtcaaattcatagaaacaaagtaagacagtaattgccagggacttcagagagatgaaaataaggagttgtgtaattagtgtagactttcagttttgccaaataaaaaatgttctggatattggttgcacaacaatgtggatacactcaacactactgaattgtacacttagaaattattaagggggtaaattttatgttatacagcatttactacagcaaaattaacrtttaaaaaatagtacccagcttatgaggctaatgtgaaaattaaattatatatgtacaatgcttagaaaaattcctgaaacattgtatatgctcagtaacttttgatgatcattattactgaatttttgttaattacagcatttccttttattaatgatgtgttttgctgaacactgctagatagtggatgt

SEQ ID NO: 244228 - DNA, 615 bp, Homo sapiens
ttttggcattatgtaagggtccagttctcagtcatytcttaattcattatgaaggaaacgtttattgaatgactgctatatgccaaatacctaggaaaaagggatttaccatcaatttagagagacataaataatcaaaaaaattacaatgtgggtggtgtgggggttgagggggtctgtaaatacatgtgaaagtggaagggattcaaaaaaagatctacagaaaagttgactcctgagccgagttgttgagtaaaaacacagttaagattattttgaaattaagaagaaggctatggggagggcaataagctaatacaaatagaattgggcaagaggatgcccagctcactcaggaaattgcaagtaagtcataaagcaaggcacaaagtggtaaagatgcgagcctagtattgtaataaggattcagaaaaaagaagtacaacataaaccaaagcatgctaagaagtttacatttcattttaaaagttataggtaagtatttgaaagagaattaagatgaatttgtcaatcttaaagatcaatctaatggaatagaagaagactaaaagatgggatgcaggaaaaacagttgagaacttaacacaatcattc

SEQ ID NO: 244229 - DNA, 598 bp, Homo sapiens
agaaattaaatcatctgtgtttgcaaaagacataattttatatgtagaaaaccctaaggatgctgcctgcacacacacacacatgcacacacacacatgcacacacagacacacacacacacaactggtagaataaacaattcagtaaacatatagctacaaaattgatattcraaaataagttgtgtttctatacacactaacaatgaaatgtcaacaaaaaactttaaaaaattccatatacaatagcattaaaaataataaagtatctagggataaccaggacttatacactgaaaaccatataacatttattaaagtaattttaaaagacacaaatacatagaaagacatcctgtcttcatggattagaagactttaatgtcattaaaatgtccatatatgtcaaagccatctcctgattcaatacaatccctatcaaaatatcaatgtacatttttataaaaatataaaagataaatcctaccattcatatggaaccacaaaaaaacccaaatagccagagcgatcttgaaaaaaaataataacaaagctggagggattacacttcctggaaaaaaatatgtgtgtgtgcgtg

SEQ ID NO: 244230 - DNA, 490 bp, Homo sapiens
aatacatacaaatggcaaacacataaaaagatatgtaatattattagtcattagggaaatgtaaatccaagaaatagtaaatgctataatgtgtataccagaatgaccaaaattaaaataactgacaaaaccaactttggaaaatgatgtgatacaactgaaacgctcatacatagtaagttaaaatgcaaaatggtagttactttgggaaagattgtgagtttcttgtaatgttaagcaattacatatcttatgtcccagaaattccatttctaggtttttaacccaaaagaaaaayacatttttatacaaaaatgtgacatgatacacataaaaacactatttttagtaccccgaaacggaaaaaaactaatgtccaccaactgatatatgtgtgaacaagttgtggtatatgtaaacaatgaaatactactcatcagtaaaaagaacaaactgctaatagatgcaacaacatgaatgaacttcaaaa

SEQ ID NO: 244231 - DNA, 462 bp, Homo sapiens
taattatatgacagttattaaatttgtttcctcttttgatcccatcaaaaggacataaactagaaatctgagggtttctaaagtttaggatttgcgtaactctggttcatagagaaatgtcattgtaaaataacttatccacatacattgcagttacctcatacaggaaaaaattaaaagcacaaccacatagatgctaaaaatccaaaaactgtaaagaataatagatatttttcttattagtaaaatcagtaaacttagtactttcaagttaggaatacttgaaatatattctccagtctcttctattgtgtctctacaattcttactaaaaaatgatttgtagtctatgaatttatygaaatttgagattaaactcaaccacttttgttcatcagtcacatagatggaaatttggaaatcagactgcagaagctataccccaaagttacataaactgta

SEQ ID NO: 244232 - DNA, 623 bp, Homo sapiens
tgatcttgcttcttgtatttataagcaaattttattattaaatgaagctatttctcatagactgtgaaacctttcttacccatgtgatgttttagaaaaatctgttttcacttttgttgtattgtgttttgataaaatcattgggaataattttgaggtttyatctcccttttgtcctctttacttttactcaatgaacttagagtatgcagtagccaggtttcaggtgttttgtgacatacaagaaatatataaatgagcaaggttcttctggtcaagcaacttcaagcatgtaataagattcttgacctctgtcagtggatggtttggttactagaaatatacttgcttaaaaagcaaataaagaaatacctggttatgcattgtatttcagaaaagcatactgaaaatgtaaatccatgtgactacaggcattaagaaagcgtagccataatgattgaacccctactaagttttgcttacttggcttatattatctctattattcatcataacaatattatgaggttggcattattatcttcatttctcatataaaaaagagtctgaccctttgagagttttgacaacatattcagagctaagctaataataagcagtag

SEQ ID NO: 244233 - DNA, 407 bp, Homo sapiens
atatgctctatgtttagctcccacctataagtgagaacatatggtatttggttttctgttcctgcattaatttgcttagaaatgtggcctctggttccatccaagttgttgcaaaagacataaattcacacttttcatggctgcatagtattccatggtgtatatgtaccacattttcttcatccagtccaccaytgatgagccactaggttgatctttttgctattgtgaatggtatggggatgaacttatcagtgcatgtgcctttttggtgtaatgacctggtttttttcgatatatacccagtaatgggattgctggttctaatggtagctatggtttaagtttttttgagtaatctccagactgtttttcatagtggccgaaccaatttaaattcccaacaa

SEQ ID NO: 244234 - DNA, 596 bp, Homo sapiens
ttattacttttgcccatcttcccatttttaaactatatgaatcatttgacttaggcatgcaagccacatacaattggtttsatttgtgatcttttgaaaattatttttaattggtaggttttcatgtattaatattactaggaatttttttctttgtagttacttgacacaaataatacacttattaatattacaaggaattggtaggtttacatgtattaatattactaggaattttcttatctctatcattgtttggcaccaatttttcatattgttttcattttgtgtaaaccttgatgtgcacaagaaattgtgtactttcattgtagcagttgctttagtgcaatattctgagccccttccttttaaacaatattgaatttttgcctataagtaaatcattattgacttattctctttcctcatttccctctccttcatatctattgtaatcaataatattatttttctttatgtttacttttatgtggataaatatgcttatatctctaaaacttgatttgtgagctatcatgtaagaggcaaacaatgagattattctactgctcaccttttcctcccattcctggacc

SEQ ID NO: 244235 - DNA, 640 bp, Homo sapiens
ttttttaaagaaaatatttatattatgcaaaaacaacaaagaagctgttaaattaaatttggcctaaaactacctccatatattatgaactgaaacctaacaatgtattttgaaaatgcatgtttaagaaaatgctctatatcaagtaacagagtctcagccaattatagcagccaggctttcagccaatcacaggctgcaaactgccaaaatatgtccagataagacaaacatccagctacaaccaatcaagttatttctgtataccacttcttttactgtctgtaactattccctgcccatgttgctgggtgaagctctttgaacctttgtgtttcagggtgctgtgcaattcaataatcatttctctgcccaaatacactaagytaaatttaatttttctaaagtttttgttttaacaaagctattactcgtaaacctttgaaataaatacttaagtatttagtatgtacacatatttatttctttaaatccattttaagaattaaaatgttggcaggtagaattataaagtttattattaaaattgtgtgggctttgtcacaagactctcataagtaggaatttatgcattcatctcttacatacttatatgcaccagatatcattaagtgctagg

SEQ ID NO: 244236 - DNA, 448 bp, Homo sapiens
gatgatgacttactagaatataagcctagtaacacatcaagaaactacaatgactcccttttgcctacactaccaaatttaaattattctatttggttttaattaaatattaaatttaaatttttagatatttaaatatctaaaattgctcaataaagcrcgaaatgtcttgataacaatgatctttcatacaaggaatatgcaatataaattatacttcaatttttcagtttcatacttctatgtagtttataatgactgaatataaaagaaagaacacagtaaaccactgtgtagttactgtgttgttaatggtttcatgctaatatgttttgcttattatatttaaatgtatgtatcttaactcctaattgaaatatatttttttcatgtttagggcaaagcgttagtcaaatgtatcattggtgccctcccaacactatattac

SEQ ID NO: 244237 - DNA, 471 bp, Homo sapiens
ccgctaatttatttttttaaatgttaaaaccccatagagcatgacaaataacacaggtttaaaatataaacatctaaaactcagcaacaggagaaagtagcttcttatttgccagtgacaaataacaagcctgcagaaatacgaaaaatgctctccaaaaaatatatggatattatctgataatggtgacttggtaaaaattatttcattctagtaaaatagaaagtgcaagttgctttttgctactccatccatttatgttttccattaagttcctttctatagaaggtttgctatataagttatgtcgtatattctcaggtatagatatatctggaaaaggagaacaacaaagactctcttaattttttcagagttgaatcyctaaactgttttccaactggcatgttgtactatgaaatccaactattttatttgcttaattccagaactggtctctatgtgagaaca

SEQ ID NO: 244238 - DNA, 602 bp, Homo sapiens
caactatgaattaaacacaaaccttattttttcaaaaaataaaacttttcagttttcaactaccttgtaattagaaacaatcacttcaaatattgctgatcttctttttttaacaaatattcattaacttatccacaataaatgtttacctagttactatagatggataagattatgcactaaatcattaagaattacatagttataggatgctttatgtgaagacacataattaattacaataacaattagaaataccataaatatattttattttgtgtgggattatttaaactctatttatcaacttctgagggtgtagaaascttttagagagccaaaaattccagaatcgtttcctcttcttcactagtaaatattcattgatagcttagtttgtgtaaaattctattctatatgcctagtatacattgaaaaacaatattgataaagatttctaccattatggatctcatataaaatcaaatcagcaaaactttggcctcatttttatatggcctattgtctacattaatggtaaaagataaccaaaattgagagtggaaatgctgaattgatccaaagtatattgtaaaaaatat

SEQ ID NO: 244239 - DNA, 579 bp, Homo sapiens
ataaaatttaataacactttatgataaaactctcaacagattagttatagaagaaacatagcttaaaacaataaagatcacatatgacaaatccacagctaacataatactgaatggagaaaagttgaaagctttttctctaataactgaaacaaggcaaggatgaccattttcacgtgttttattcaacataataatccaactactagccagagaaattagacaagagaagggaataaagtgcatccaaatcagaaaggaggaagtcaaattgttgctgtttacacgtagcatattatatttagaaaaatttaaagacttcatcaaaaaactgttagaaatgacaaatttaataaagttgcaggatacaaaacaaatattcaaaattaaatagtgttttatacttcaatagcaaacaatttgataaggaaatcaagaatataatcacatttactatagctacaaataataaartaaaataaatatctaggaataaatttaaccaaagagatgaaagatatctataatgaaagctataaaacactgatgaaagaaactgaagtgagcacaaaaggttca

SEQ ID NO: 244240 - DNA, 453 bp, Homo sapiens
ttaatacaaccaaatatccataaaaacttaatgaaactatatttgggggaaatattctaaaggatacttaatttatctattttgctagagtcttactgtaaccactgaagaggcaaaatacacagaattaggtgttgtatctcaccattgtttgattagctccaacttgccatgtgccatttccastacaccttagccaaacacacaaattcaagtgcatgtaccacacacatacactgacatacacattctggttacactgatttgctctaattgattgtgtttgctattgaggacatgaaattgcattggtaattaaagtaaatcttgctgctagaattattatgaaaaagccttcgaagttaaactctgcattacaatatattctttatgaagatacatgggcaaaaatgacactagtatcaggaatatttgtaccttttctaattaatt

SEQ ID NO: 244241 - DNA, 629 bp, Homo sapiens
aaaatacacagaattaggtgttgtatctcaccattgtttgattagctccaacttgccatgtgccatttccagtacaccttagccaaacacacaaattcaagtgcatgtaccacacacatacactgacatacacattctggttacactgatttgctctaattgattgtgtttgctattgaggacatgaaattgcattggtaattaaagtaaatcttgctgctagaattattatgaaaaagccttcgaagttaaactctgcattacaatatattctttatgaagatacatgggcaaaaatgacactagtatcaggaatatttgtaccttttctaattaattagtttgtttttctcttttggaccctgtgaattaggtagctgatcacctttctccctcagcattgacagaaataaagcttaagatttactagtgktctactgttagcagatataaagttgtcatggtaggcattttgtatcagccttaattctggctccatgtggaatctcaacctatatttctttcctacctagtaattttcacctatttctaatgtttggtcatcttgcttcatgttatccacattttatttacattaaacacttttgtgaattcacttttatcaaaaa

SEQ ID NO: 244242 - DNA, 629 bp, Homo sapiens
aaaatacacagaattaggtgttgtatctcaccattgtttgattagctccaacttgccatgtgccatttccagtacaccttagccaaacacacaaattcaagtgcatgtaccacacacatacactgacatacacattctggttacactgatttgctctaattgattgtgtttgctattgaggacatgaaattgcattggtaattaaagtaaatcttgctgctagaattattatgaaaaagccttcgaagttaaactctgcattacaatatattctttatgaagatacatgggcaaaaatgacactagtatcaggaatatttgtaccttttctaattaattagtttgtttttctcttttggaccctgtgaattaggtagctgatcacctttctccctcagcattgacagaaataaagcttaagatttactagtggtctactgttagcagatataaagttgtcatggtaggcattttgwatcagccttaattctggctccatgtggaatctcaacctatatttctttcctacctagtaattttcacctatttctaatgtttggtcatcttgcttcatgttatccacattttatttacattaaacacttttgtgaattcacttttatcaaaaa

SEQ ID NO: 244243 - DNA, 629 bp, Homo sapiens
aaaatacacagaattaggtgttgtatctcaccattgtttgattagctccaacttgccatgtgccatttccagtacaccttagccaaacacacaaattcaagtgcatgtaccacacacatacactgacatacacattctggttacactgatttgctctaattgattgtgtttgctattgaggacatgaaattgcattggtaattaaagtaaatcttgctgctagaattattatgaaaaagccttcgaagttaaactctgcattacaatatattctttatgaagatacatgggcaaaaatgacactagtatcaggaatatttgtaccttttctaattaattagtttgtttttctcttttggaccctgtgaattaggtagctgatcacctttctccctcagcattgacagaaataaagcttaagatttactagtggtctactgttagcagatataaagttgtcatggtaggcattttgtwtcagccttaattctggctccatgtggaatctcaacctatatttctttcctacctagtaattttcacctatttctaatgtttggtcatcttgcttcatgttatccacattttatttacattaaacacttttgtgaattcacttttatcaaaaa

SEQ ID NO: 244244 - DNA, 556 bp, Homo sapiens
tttatttacattaaacacttttgtgaattcacttttatcaaaaacatcttccacctaaaaaaaaagatggaaagaaggcaacttttctaaaaatgtttttgttttattttgttttttaatcaaccatgtatttagaataaagtttggaaataataacgcaatattcagtatatagcagtatcactgagaaagactttgagacaagcaaamtaccagtgtcattagaaacacattcaaatgaaatcttcctatccttttgtaaagaaactagctacctagggaaaagtttcagccaataaagcacttttggaatctgattttccttaatattcttaaattaaaagtaaacgtatagatttaattaacataaggctaggtctgtttttgataatttacatagaatttaataagggctcaaatattttcttctatgcaaagccctgatcaaatccataagaagcgtcagttctctttccttcattgttagtatacacaagaacaaagtataaatgtcttctccaactggcttgatttttaaaaagcatcgtgtaacaga

SEQ ID NO: 244245 - DNA, 556 bp, Homo sapiens
tttatttacattaaacacttttgtgaattcacttttatcaaaaacatcttccacctaaaaaaaaagatggaaagaaggcaacttttctaaaaatgtttttgttttattttgttttttaatcaaccatgtatttagaataaagtttggaaataataacgcaatattcagtatatagcagtatcactgagaaagactttgagacaagcaaactaccagtgtcattagaaacacattcaaatgaaatcttcctatccttttgtaaagaaactagctacctagggaaaagtttcagccaataaagcacttttggaatctgattttccttaatattcttaaattaaaagtaaacrtatagatttaattaacataaggctaggtctgtttttgataatttacatagaatttaataagggctcaaatattttcttctatgcaaagccctgatcaaatccataagaagcgtcagttctctttccttcattgttagtatacacaagaacaaagtataaatgtcttctccaactggcttgatttttaaaaagcatcgtgtaacaga

SEQ ID NO: 244246 - DNA, 573 bp, Homo sapiens
atttacatagaatttaataagggctcaaatattttcttctatgcaaagccctgatcaaatccataagaagcgtcagttctctttccttcattgttagtatacacaagaacaargtataaatgtcttctccaactggcttgatttttaaaaagcatcgtgtaacagaaagtacttgtgtattacagtaaatggaagtctttcaaataactattataaaaaaaattgtattaagcccagcactcctctgggtatgttgataatactgaatttctagtttcatcagagctacgttaatcacataccctgcaaggaattaaaacatctgcttaacagtaatttaaaaatatattttaaagaaaaaagtataaggataataatatatcaaattgctaaataaagtatccatgattaatcaaagggactttcaagataaagtaggaaaatgtacttataacaataatccatcaactagccctaagggctggatactgcaataaattgtcatttggcagcatgttatgtcttctataggccaccacagcaccatttataaattttattatactaaaagac

SEQ ID NO: 244247 - DNA, 573 bp, Homo sapiens
atttacatagaatttaataagggctcaaatattttcttctatgcaaagccctgatcaaatccataagaagcgtcagttctctttccttcattgttagtatacacaagaacaaagtataaatgtcttctccaactggcttgatttttaaaaagcatcgtgtaacagaaagtacttgtgtattacagtaaatggaagtctttcaaataactattataaaaaaaattgtattaagcccagyactcctctgggtatgttgataatactgaatttctagtttcatcagagctacgttaatcacataccctgcaaggaattaaaacatctgcttaacagtaatttaaaaatatattttaaagaaaaaagtataaggataataatatatcaaattgctaaataaagtatccatgattaatcaaagggactttcaagataaagtaggaaaatgtacttataacaataatccatcaactagccctaagggctggatactgcaataaattgtcatttggcagcatgttatgtcttctataggccaccacagcaccatttataaattttattatactaaaagac

SEQ ID NO: 244248 - DNA, 573 bp, Homo sapiens
atttacatagaatttaataagggctcaaatattttcttctatgcaaagccctgatcaaatccataagaagcgtcagttctctttccttcattgttagtatacacaagaacaaagtataaatgtcttctccaactggcttgatttttaaaaagcatcgtgtaacagaaagtacttgtgtattacagtaaatggaagtctttcaaataactattataaaaaaaattgtattaagcccagcactcctctgggtatgttgataatactgaatttctagtttcatcagagctacgttaatcacataccctgmaaggaattaaaacatctgcttaacagtaatttaaaaatatattttaaagaaaaaagtataaggataataatatatcaaattgctaaataaagtatccatgattaatcaaagggactttcaagataaagtaggaaaatgtacttataacaataatccatcaactagccctaagggctggatactgcaataaattgtcatttggcagcatgttatgtcttctataggccaccacagcaccatttataaattttattatactaaaagac

SEQ ID NO: 244249 - DNA, 589 bp, Homo sapiens
gatttataaatttattaattgtccacttgttgaaaaattagtactgtctgaacaaaaatttaaaatttgtggctttgtgattctttccaagagaaacttcatggagatatgaagcctgaccttgtggaggctactttgctcaccctgcattctccacccttgatagaactgaaggattgtatgaccctgtgaggcgatgtcataaagtcaaattatttctaaaatattactgttaaaattacatggcatctatgactctttaaaattactttattgaattttaagyactaggacttagaaaggaattagcctacattttctctaagaccagcattgaaacaaactttatatactagagaacctaccagtactgaaatccatgtattttgagtccttatttttcccccaaaattacacttgcttttcgaaagcactaagtcaattttacctgtgtctatcaataattgtttgacccagcagacaaaatttttgtaaaagaactatcccacagttcaggaagttgacttcttattaaacatttaatattaaattcagatgtcagtgttaagattgcaatattgaaatacca

SEQ ID NO: 244250 - DNA, 535 bp, Homo sapiens
aatccccaagacaatgtgggaaaatgccttcattatgtcagaggtcttcatggcagcccctcccatcagaggcccagaggcccagggtcccatgctgtgtacagtctagggacttggggccctgtgtcccagctgctgcaaccatgactaaaaggggccaaggtacagcttgggccatggcttcaaaggatgcaagccccaagccagcttccacgtggtgttgagcctgtgggtgcacagaagtcaagaattgaggtttgggaacytccatctagatttcacaggatgtgtggcaatgcctggatgtccaggcagaagtttgctgcaggggtggggctctcgtggtgaacctctgctagggcagtgcagaagggaaatgtgggattggcgtccccacacagagtccctactggggcactgcctagtggagctgtgggatgaagaccaccatcctccggaccccagaagggtagatccactaacagcttgcaccatgtgcctggaaaagccacagacactaaacaccagcccatga

SEQ ID NO: 244251 - DNA, 535 bp, Homo sapiens
aatccccaagacaatgtgggaaaatgccttcattatgtcagaggtcttcatggcagcccctcccatcagaggcccagaggcccagggtcccatgctgtgtacagtctagggacttggggccctgtgtcccagctgctgcaaccatgactaaaaggggccaaggtacagcttgggccatggcttcaaaggatgcaagccccaagccagcttccacgtggtgttgagcctgtgggtgcacagaagtcaagaattgaggtttgggaacctccatctagatttcacaggatgtgtggcaatgcctggatgtccaggcagaagtttgctgcaggggtggggctctcgtggtgaacctctgctagggcagtgcaraagggaaatgtgggattggcgtccccacacagagtccctactggggcactgcctagtggagctgtgggatgaagaccaccatcctccggaccccagaagggtagatccactaacagcttgcaccatgtgcctggaaaagccacagacactaaacaccagcccatga

SEQ ID NO: 244252 - DNA, 211 bp, Homo sapiens
aaaagtgttattaaaagatgaagctwcacacattgggtcaaaaaattaaatccaaacacatgctgtttataacactaatctaaagaaacctaaagaaagtgacacaaaattaaagtttaataaatagtccaaatacataataaatatacaataactagcaatcaatttatatgtcagaaatacacaattagaaaatatagtgagaataaac

SEQ ID NO: 244253 - DNA, 610 bp, Homo sapiens
gtatagatcctaatatctgaatgatctaactgaaagaaattatttttattgtttaatattaaattgcagttagatctcttagggaaagataaagaagtctattcttttcatttttttgttcaaaattttggtattccacacaaataaaaactgaggctgtcttttaagtatatactaggaatactaccttttaattgtcattaaatataatatttgatcaaatagaatcttttatgaaaaaattactttgaaattccaatgtaatgtacagtatagtattttgtgtttaagccaacattttgttgggaaaatgggagacaggtaagtctgaattacccaaagagccaaatgtaagaataagtctctgttgggtttctccartctttcaagaggtgtgtagctatctaatttactataataggtagtatagcatggctataagaaaagacatgtaattgtggagaagaaagatcttagagggatgacagacaggcactaccaacaagcttcaccagtaccattctttgccttctggtaatttgactaccattaattaaaaggcattggctaaggttcagatcatttggaccaggcaacttctagaatcaaa

SEQ ID NO: 244254 - DNA, 610 bp, Homo sapiens
gtatagatcctaatatctgaatgatctaactgaaagaaattatttttattgtttaatattaaattgcagttagatctcttagggaaagataaagaagtctattcttttcatttttttgttcaaaattttggtattccacacaaataaaaactgaggctgtcttttaagtatatactaggaatactaccttttaattgtcattaaatataatatttgatcaaatagaatcttttatgaaaaaattactttgaaattccaatgtaatgtacagtatagtattttgtgtttaagccaacattttgttgggaaaatgggagacaggtaagtctgaattacccaaagagccaaatgtaagaataagtctctgttgggtttctccagtctttcaagaggtgtgtagctatctaatttactataataggtagtatagcatggctataagaaaagacatgtaattgtggagaagaaagatcttagagggatgacagacaggcacyaccaacaagcttcaccagtaccattctttgccttctggtaatttgactaccattaattaaaaggcattggctaaggttcagatcatttggaccaggcaacttctagaatcaaa

SEQ ID NO: 244255 - DNA, 574 bp, Homo sapiens
aaaataaataaataggtgactgtgcccatggtttagtgcatatacatgttttctagctttgagagagcctagagacagtgacaccccagtagtaatgggcacacttagcatccagattttgatttctaaataccattctccagcatccttgtagaagacatygatcccagggttgtagccgggaaaatacaagatgaacctggaacatcttggggtacaaaattaaaggaaataatttttacgaaaatgatggggcatgccaaaggtaaacaggagccatctcaaagagctctcaaaggtcaaagctaaaaaatttgagtgcaaaatatatgatgattagattggattataaaccaataaataaaataaatacttatgtgtccaaactgacataaatatttgaataaataaattgaagagaaaggaaagcttttcccttaaaggataattccaattagtgaacgaaaaaggaataagggaagtagaaaatcatcactagaacatcacagtaataattgctatagacaagatccagttatggatgacaaatttagtggatatgttttaagaagaa

SEQ ID NO: 244256 - DNA, 532 bp, Homo sapiens
gtggtgcatggtgtaaattgaaccaaagaaaggaaggttttaaaaaaaaagtataaactaaatgtgagtaaacaaaattagtttattcagtctttaacacagttcattttgtggatgaaaactgaggattagaaagaaattctgactagctaaaggtacataactaactagtaaatgactaactggattccaacacaaattgatctgtctctacttgatacgcccatgatgatgttggctctcagtttaggggaaaaaggcaagataagaaataagggccaagagcgtggaaataggccctaagatttgacaaggagtatgtcattgtttactttggtgactatacttttttttgtagttatactgtcataaactgatataaatctttgaaaaataaaaasattgtgagaacatatcaaggtttaagaaggtaaatataagtcagttttggatttcctataatagacaggagtaaagtaaaatatttgaaatatctgacaagtgtaagattttattaaaaattttaactaaa

SEQ ID NO: 244257 - DNA, 620 bp, Homo sapiens
ctacaatgaaaattatagatcattggtaaaagaaattgaagaggacacaaaaaaggaaagatattctatgttcataaattaaaagaatcaatattgttaaaaatgtccatactactcaaagcggtctacagtttcaattaaagctctgtcaaaataccaatggcattcttcacagaaatagaaaacagaatcctaaaacctataagtaaccacaaagggcccagagtagccaaagctgtcctgagcaaaaagaacaaggctggaggaaaacattacctgacttcaatttatactacagaggtatagtaacaaaaacagcatggtactggaaagaaaagaaatagaccaatggaacagaatagagaactcatacatctatagtaaactsatttttgacaagggtgccaagaacgtatattgtggaaaggacagtcttttaataaatagttctggaaaaactgagtatccattttcagaagaatgaaagttgaccatctcttgcctttacaaaaatcaaataaaaatggattaaagacttgaatctaagaccacaaactacaaaactactacaagaaaacattagggacaatctccaggacattggagtgagtaaagatttt

SEQ ID NO: 244258 - DNA, 620 bp, Homo sapiens
ctacaatgaaaattatagatcattggtaaaagaaattgaagaggacacaaaaaaggaaagatattctatgttcataaattaaaagaatcaatattgttaaaaatgtccatactactcaaagcggtctacagtttcaattaaagctctgtcaaaataccaatggcattcttcacagaaatagaaaacagaatcctaaaacctataagtaaccacaaagggcccagagtagccaaagctgtcctgagcaaaaagaacaaggctggaggaaaacattacctgacttcaatttatactacagaggtatagtaacaaaaacagcatggtactggaaagaaaagaaatagaccaatggaacagaatagagaactcatacatctatagtaaactcatttttgacaagggtgccaagaacgtatrttgtggaaaggacagtcttttaataaatagttctggaaaaactgagtatccattttcagaagaatgaaagttgaccatctcttgcctttacaaaaatcaaataaaaatggattaaagacttgaatctaagaccacaaactacaaaactactacaagaaaacattagggacaatctccaggacattggagtgagtaaagatttt

SEQ ID NO: 244259 - DNA, 620 bp, Homo sapiens
ctacaatgaaaattatagatcattggtaaaagaaattgaagaggacacaaaaaaggaaagatattctatgttcataaattaaaagaatcaatattgttaaaaatgtccatactactcaaagcggtctacagtttcaattaaagctctgtcaaaataccaatggcattcttcacagaaatagaaaacagaatcctaaaacctataagtaaccacaaagggcccagagtagccaaagctgtcctgagcaaaaagaacaaggctggaggaaaacattacctgacttcaatttatactacagaggtatagtaacaaaaacagcatggtactggaaagaaaagaaatagaccaatggaacagaatagagaactcatacatctatagtaaactcatttttgacaagggtgccaagaacgtatattgtggaaaggacagtcttttaataaatagttctggaaaaactgagtatccattttcagaagaatgaaagttgaccatctcttgcctttacaaaaatcaaataaaaatggattaaagactkgaatctaagaccacaaactacaaaactactacaagaaaacattagggacaatctccaggacattggagtgagtaaagatttt

SEQ ID NO: 244260 - DNA, 591 bp, Homo sapiens
aatagctaagatttggaagcaacctaagtgtccatcaacagattaataggtaaagaaaatgtggtacatacacacartgaagtactatttggccagaaaaaaataatgagacccagtcatttgcaacagcatgaatggaactagaggttattatgttaagcaaaataagccaggcaacaaaagagaaacttactatgttctcacttatttgtgggatgtgaaaattaaaaccaccgaattgatggagacagagagtatagaatgattactaggggaagtaaagggtagtggggtggtgggggaaagtgtaaatggttaatgggtacaaaatatagtaagaaataatgaataagaactaatgtttgatagcatgacagggtgactatcaacaataataataataattgtacattttaaaatagctaaaatcggacaggtacagtggctcacacctgtaatcccagcactttgggaggctgaggcaggcagatcacgtggtcaggagttcaatatggtgactaatacggtgaaatgccgtctctactaaaaataccaatatggtgaaacatcgtctctactaaaaatacaaaa

SEQ ID NO: 244261 - DNA, 392 bp, Homo sapiens
ttgcttcaaaaagttaaaggtaatagatgaagaatgaatgctaaatgtgtgaattacaggactcaacattgataagagcaattttcccaaaactgatctatagttgttatgtatttgattgcagaacaatcaaaattccagcagaatttttctgttgttattgaaaagcctattgcatttaactgaaacagttttttaaatgaaaaagaagattgcaggacttaatctctcttatttaaagacttttctataaagctgcaaaaatcaagaccatttggtattgaagaaaatatgtacatayagatcaatggaaccaaaaagagtgcagaaatagacccacatatataaatatatacccaactcattattgacaaaggtaacaaagccattcc

SEQ ID NO: 244262 - DNA, 578 bp, Homo sapiens
cttctttaaatctttggtagaatttcctgttaagcctcctaggccaggagatttcatttccagaaaatttttaaccatgattccaaattatgtaatagacatactcttattttgggtttctatttcttcttgagttggtcttcatatatttttctaattcaaataattggtccatttaatctactatatcaaaattattggcaatattgtttattctctcattttatctctcatatctgtgrcatctgaagtggtgtccattctttcatttctgctattagctattcttacctaccctctttttgtcctggatcatctgtagaggtttatcaattttaatgatatttttatgaagttatatttttgattcattggtttctggtattatattcctgttttaattttatgtatccctcagtttaatattttcttccttctgctttctgtgcattaatttgttttttatattttaggttcttgaggtaaagcttatgttttttatttgagcccttgattctcttccactataagaaaatagtgccataaatttatctacaagcagtgcttgggtgcatgat

SEQ ID NO: 244263 - DNA, 497 bp, Homo sapiens
gtatttcaggctagaaataatagaacttgatgaattgaatatgaggatagaagaaactggcagactcaagaataaagtttttggcatgaattacttatgaaaatgttagtaggtttattaactgggatggggaagaattagggacaagatgaggaaaaaactagaacatattagtgggattgcagaattaatagtatacaggaagtaacatgtaagtgcggagctaaggaagattagagctgaatatatatatatataaatattcagccctattatatatgtrtgtgtgtgtgtgtgtgtgtgtgtgtagaactgggtgtgttactaaagaagacagttcatatagataagagaaaagggatcagaaaaaatgtcccaaagcacgtacaatgtacaattacagataaggcacaagatgaacaactataaaaagaaaaccatgttgtagtccttagtttggaaggatgaaagcaaaggataaccaagagaaaagtgtg

SEQ ID NO: 244264 - DNA, 607 bp, Homo sapiens
gtgtcagaccacccttacaagaaatgctcaaaggaattgtaaacgtggaaatgaaagagcaatacttgccatcatgaaaacacacagatttcataaagcaaccacataatttagatttcaaagcaactarggaacaactaacaccaggaaaggaacaaaacctcacatgtaacagtattaaccttgaatggagctgactaaatgcttcaccaaaaagatatagatgggcaaagtgaatttaaaaaccagatccaaccataggcttattacaagaaacccacctaacagatacagactcaaagaaaaggggcagaaaaagatactccatgcaaacagaaaagaaaactgagcagaagtcactatacttacatcagataaaacagattttaaaacaacaacagtaaaaaaaatacatatagacagtcattatgtaatgataaagggatcaattgaacaagaagatgtaacaatcctaaatatatatgtgcccaatactagaacacccagatagaaaaaaagaaacaaaaacaccactgctggacccaagaacatattgaaaatatttaaacatcagtaaaatgacagtggggtatttcaacacctaact

SEQ ID NO: 244265 - DNA, 607 bp, Homo sapiens
gtgtcagaccacccttacaagaaatgctcaaaggaattgtaaacgtggaaatgaaagagcaatacttgccatcatgaaaacacacagatttcataaagcaaccacataatttagatttcaaagcaactagggaacaactaacaccaggaaaggaacaaaacctcacatgtawcagtattaaccttgaatggagctgactaaatgcttcaccaaaaagatatagatgggcaaagtgaatttaaaaaccagatccaaccataggcttattacaagaaacccacctaacagatacagactcaaagaaaaggggcagaaaaagatactccatgcaaacagaaaagaaaactgagcagaagtcactatacttacatcagataaaacagattttaaaacaacaacagtaaaaaaaatacatatagacagtcattatgtaatgataaagggatcaattgaacaagaagatgtaacaatcctaaatatatatgtgcccaatactagaacacccagatagaaaaaaagaaacaaaaacaccactgctggacccaagaacatattgaaaatatttaaacatcagtaaaatgacagtggggtatttcaacacctaact

SEQ ID NO: 244266 - DNA, 556 bp, Homo sapiens
catatcctcattcttcttggatgcaatacaagagctgggaacagccaaacacggttacaagctatagcacagtcgagctggggcatgtcagcatggtgaagtgaggcccaggtggtgtgttgctggccagggctccctggcttgcaaatgactgagaagaaaaatcctacatcacaaacacaataaaaaaaaaaamaaaaaaaagacaaacgggacttaaactaaaaatcttctgcatagcaaaaaaaataattatcagggcaaacaggcaacatacacggtgcaagtaaatatttgaaaagtattcatccaacaaagggctaatatccagaatctgtaagaaactcaaacaactcaataagaaaaaaaaacaactccactaaaatttgggcaaagaacgtcaacagacatatttcaaaaaaagataaagacatacaagtgaccatgaaacatatgaaaaaaaatgctcaacatatctaatcattggagaaatgcaaataaggccacaatgagatatcatcttacaccagtcagaatggctactattaaaaattcg

SEQ ID NO: 244267 - DNA, 556 bp, Homo sapiens
catatcctcattcttcttggatgcaatacaagagctgggaacagccaaacacggttacaagctatagcacagtcgagctggggcatgtcagcatggtgaagtgaggcccaggtggtgtgttgctggccagggctccctggcttgcaaatgactgagaagaaaaatcctacatcacaaacacaataaaaaaaaaaaaaaaaaaaagacaaacgggacttaaactaaaaatcttctgcatagcaaaaaaaataattatcagggcaaacaggcaacatacacgrtgcaagtaaatatttgaaaagtattcatccaacaaagggctaatatccagaatctgtaagaaactcaaacaactcaataagaaaaaaaaacaactccactaaaatttgggcaaagaacgtcaacagacatatttcaaaaaaagataaagacatacaagtgaccatgaaacatatgaaaaaaaatgctcaacatatctaatcattggagaaatgcaaataaggccacaatgagatatcatcttacaccagtcagaatggctactattaaaaattcg

SEQ ID NO: 244268 - DNA, 526 bp, Homo sapiens
ttgggcaaagaacgtcaacagacatatttcaaaaaaagataaagacatacaagtgaccatgaaacatatgaaaaaaaatgctcaacatatctaatcattggagaaatgcaaataaggccacartgagatatcatcttacaccagtcagaatggctactattaaaaattcgaacaccaacagatgatggtgagggtgtggagtaaaaggaacacttactcactgttagtgggattgtaaattagtacaacctctatggaaaacagtatggtgacttctcaaagaactaaaactaaagcaaccacttatgagtgagaacatgcagtatttaactttctgtttatgaattatttcatttaggataatggtctctagttccatccatattgctgcaaaaaacataatttccttgttttatggtcgagtagaattttgtggtatacatacaccatattttctttatccagtcatcactttgctgtcatgtgtctgtataggagggttttgctttagttgacctgccaataa

SEQ ID NO: 244269 - DNA, 569 bp, Homo sapiens
ttcagtaatcctatgaatggcaagtttcaaaacaaacagagacagagagatcttgatgtgcaaatggcatgcacatccttgatgtcagctggaggcggtaaagccagtaagaagtatggcaagaagaggaaacaactatatagatgggcttcaggctcaaatgctgtgctgttaggctgagtcagtctctcagataactttgaggtctaatcagcaagccatagaaaaaggctggactygtgcttcacaaaagaaataattcaataccttccactgtcatcttctgaagatagtcaccctatgggccttctttattaagaattaagtttccagcattaagctgtatgcctttgagtgaaatcaggtctcctcatgttatctctgtcctggcctgaatgatgtaaaggagttaagaccaaaagatttcttttcatccatgagaattctgttctcaagtttcagaatctgaaaacttacaatatagacagacacagaggacaaggggcaaatagtagaatttcattacatgtaaattagtcgtcgggaaggtaacaaaggctctgttcatg

SEQ ID NO: 244270 - DNA, 598 bp, Homo sapiens
actcgtgcttcacaaaagaaataattcaataccttccactgtcatcttctgaagatagtcaccctatgggccttctttattaagaattaagtttccagcattaagctgtatgcctttgagtgaaatcaggtctcctcatgttatctctgtcctggcctgaatgatgtaaaggagttaagaccaaaagatttcttttcatccatgagaattctgttctcaagtttcagaatctgaaaacttacaatatagacagacacagaggacaaggggcaaatagtagaatttcattacatgtaaattagtcgtcgggaaggtaacaaaggctctgttmatgaatttcaagaagaaaaagaagaggagaagaagaaggtggagaagagaaagtagaagaaaggaagaagagaagaagagcaggaagaaagggaagaggaggagaaaagagaaggagataagattttagttgtcagagaaagagttacaaacatgaaccaagcacagatgttggacacagcactgtatatccggaagaagacacaatgattttctcaactaagaaaggaaagtcaaattagtgggcatgacaaaggttttgatctcc

SEQ ID NO: 244271 - DNA, 609 bp, Homo sapiens
gatgggcttcaggctcaaatgctgtgctgttaggctgagtcagtctctcagataactttgaggtctaatcagcaagccatagaaaaaggctggactcgtgcttcacaaaagaaataattcaataccttccactgtcatcttctgaagatagtcaccctatgggccttctttattaagaattaagtttccagcattaagctgtatgcctttgagtgaaatcaggtctcctcatgttatctctgtcctggcctgaatgatgtaaaggagttaagaccaaaagatttcttttcatccatgagaattctgttctcaagtttcagaatctgaaaacttacaatatagacagacacagaggacaaggggcaaatagtagaatttcattacatgtaaattagtcgtcgggaaggtaacaaaggctctgttcatgaatttcaagaagaaaaagaagaggagaagaagaaggtggagaagagaaagtagaagaaaggargaagagaagaagagcaggaagaaagggaagaggaggagaaaagagaaggagataagattttagttgtcagagaaagagttacaaacatgaaccaagcacagatgttggacacagcactg

SEQ ID NO: 244272 - DNA, 609 bp, Homo sapiens
gatgggcttcaggctcaaatgctgtgctgttaggctgagtcagtctctcagataactttgaggtctaatcagcaagccatagaaaaaggctggactcgtgcttcacaaaagaaataattcaataccttccactgtcatcttctgaagatagtcaccctatgggccttctttattaagaattaagtttccagcattaagctgtatgcctttgagtgaaatcaggtctcctcatgttatctctgtcctggcctgaatgatgtaaaggagttaagaccaaaagatttcttttcatccatgagaattctgttctcaagtttcagaatctgaaaacttacaatatagacagacacagaggacaaggggcaaatagtagaatttcattacatgtaaattagtcgtcgggaaggtaacaaaggctctgttcatgaatttcaagaagaaaaagaagaggagaagaagaaggtggagaagagaaagtagaagaaaggaagaagagaagaagagcaggaagaaagggaagaggaggagaaaagagaaggagrtaagattttagttgtcagagaaagagttacaaacatgaaccaagcacagatgttggacacagcactg

SEQ ID NO: 244273 - DNA, 609 bp, Homo sapiens
gatgggcttcaggctcaaatgctgtgctgttaggctgagtcagtctctcagataactttgaggtctaatcagcaagccatagaaaaaggctggactcgtgcttcacaaaagaaataattcaataccttccactgtcatcttctgaagatagtcaccctatgggccttctttattaagaattaagtttccagcattaagctgtatgcctttgagtgaaatcaggtctcctcatgttatctctgtcctggcctgaatgatgtaaaggagttaagaccaaaagatttcttttcatccatgagaattctgttctcaagtttcagaatctgaaaacttacaatatagacagacacagaggacaaggggcaaatagtagaatttcattacatgtaaattagtcgtcgggaaggtaacaaaggctctgttcatgaatttcaagaagaaaaagaagaggagaagaagaaggtggagaagagaaagtagaagaaaggaagaagagaagaagagcaggaagaaagggaagaggaggagaaaagagaaggagataagattttagttgtcagagaaagagttacaarcatgaaccaagcacagatgttggacacagcactg

SEQ ID NO: 244274 - DNA, 626 bp, Homo sapiens
gtttttcttttctgaatatcaggttaagaaaaaagttaaaatatttcttacattctcgtgtattataagtagaaaagtaacaactaaattaaattaaaaggctatagatttcaagaaaactaaagaaagtggatctctttgattaaaaaaattaaaaatcatacctggtttacaaaagttgtatctttgtcaaaacactaattaaaattaccttacaaaataaatcctgcccttttaagcatgggcattcttttcctggycactgtcagcaatgatacggctactcctattttacccactggtatgagaatattttgaggcatactctttttccttttctcttttcggatccccatcccctcccaccacacacacattcacgttcacattcacagtatgaatacctcagacttatattctgcctttgagtcttagttgctttgcatatactgatatttcttaaagtttcaaacccttaaaggtgtaaataattatcgttattttatgaaagagcatatcagaaagattgagaatattgtttgaaatcctaaggtttgtaaacagtattccaactcttggattaaacttcatggttgtacaactacacatttatataaatggtaaat

SEQ ID NO: 244275 - DNA, 626 bp, Homo sapiens
gtttttcttttctgaatatcaggttaagaaaaaagttaaaatatttcttacattctcgtgtattataagtagaaaagtaacaactaaattaaattaaaaggctatagatttcaagaaaactaaagaaagtggatctctttgattaaaaaaattaaaaatcatacctggtttacaaaagttgtatctttgtcaaaacactaattaaaattaccttacaaaataaatcctgcccttttaagcatgggcattcttttcctggcsactgtcagcaatgatacggctactcctattttacccactggtatgagaatattttgaggcatactctttttccttttctcttttcggatccccatcccctcccaccacacacacattcacgttcacattcacagtatgaatacctcagacttatattctgcctttgagtcttagttgctttgcatatactgatatttcttaaagtttcaaacccttaaaggtgtaaataattatcgttattttatgaaagagcatatcagaaagattgagaatattgtttgaaatcctaaggtttgtaaacagtattccaactcttggattaaacttcatggttgtacaactacacatttatataaatggtaaat

SEQ ID NO: 244276 - DNA, 576 bp, Homo sapiens
ttttcttatcttctgccttaaattaggaaataaatcacaggatggctacaaaataatactacatcctcttgaagccagactcttttttacagtgcaagttatgaaagaaactgtgttaaaccagtcaaaggtgccctccaatgagcccagctatacttgcctttcttggaattgtgtaaaccctttcttggaaatgtgtaaaatctgcaacttgcttgtaaccaattaagtatggcaaagataatgaaagaaacatctccctgattatctcacattatgtggcaaaggagaaaaaaatatgcagatgtaattaaggtctctaatctgttaacttgggacaacaaaagagagataatcctggttgagtcatttacaagagggcctaggcttttcttaaagtgagagacttcaaggarcagaggctttctaatgttagcttttaaggagtaagctgctatggattccatggtcatgataaaatgacatctgccaacaatgtgagggagcttgcaagcagatacttctctagtaggacacccatataagaatacagctcagccaaaagcttgattttag

SEQ ID NO: 244277 - DNA, 532 bp, Homo sapiens
tattttctttcttcttttcagtttgaagcaacattttatgtactctagatacaagaatttcactagatatatggacagcaaatgtcttacttggaggtttgcattttcactgtcttagacatactttctgatgatcaaatgttcttaatagaatatgcttatgtttttctgagttttttgacctcaaagaaacatttctatttaggaaaagratgttttcctctatgcataatatgttcgtgaattttatttctagaatgaccctttataaaaatgaaacaagtaactttggggtcaagagaaaattttttgtttctatgtgccaaaacctagaaaagtaaatattttttttagataatttaaattccgcttaaataacatcactaattgttgtttaatggcagaaagggtagtacattatggagcaaattttttttttttaccatgtatacctctgaaacctctacactctgtttatttacttgctttcatactgtgtatatctatgcaaatacatatgaaaatgtacttg

SEQ ID NO: 244278 - DNA, 532 bp, Homo sapiens
tattttctttcttcttttcagtttgaagcaacattttatgtactctagatacaagaatttcactagatatatggacagcaaatgtcttacttggaggtttgcattttcactgtcttagacatactttctgatgatcaaatgttcttaatagaatatgcttatgtttttctgagttttttgacctcaaagaaacatttctatttaggaaaagaatgttttcctctatgcataatatgttcgtgaattttatttctagaatgaccctttataaaaatgaaacaagtaactttggggtcaagagaaaattttttgtttctatgtgccaaaacctagaaaagtaaatattttttttagataatttaaattccgcttaaataacatcactaattgttgtttaatggcagaaagggtagtacattatggagcaaattttttttttttaccatgtatacctctgaaacctctacactctgtttatttacttgctttyatactgtgtatatctatgcaaatacatatgaaaatgtacttg

SEQ ID NO: 244279 - DNA, 488 bp, Homo sapiens
aaccccttccctttgacagctctcagagaaatgatagcagaagaaatgaggacttactgttgagttgtggagatatattaattgccatgatttaagaagagaatctcatctagaatctataagctagggagtctaaaaaatacatgtattatagttacttttaaaataatgatttctctatatagtatttccagcattattgttgaatttgctgccaagattacttcttaggataaaaatatgtttgttaaataaaagactaacaagcaaaaatatttattagatcacaaagaaaacgaaaagaaatagttattgtaaagtagttatmctcaaaatttatttggtcttagtaagttagccagtgttgttatatttttgactcccagagcgaagaagtaaaacacaaattatatctgaacaggtaaattgaatttcatgtgttacttttattatttgttccattttattgttcaaagtttatgattgtt

SEQ ID NO: 244280 - DNA, 542 bp, Homo sapiens
catcctgttatggcacagtgatttagtcaaattgtaatgatgctattgaatctttcatgtattaaaacccaagaatatattattcctatattacagtatctattgtaaacttttgtatatctaaatttgactttgttgtcaatttcccaacaccaggctgtaaaaatgctaatttctaatttccargcaaatccctctggcagattgtaagcatagtccctatgccagaaatttggttggctgcctttatttttgcaagaggacagtaaaaaaaaaaaaataccaacttggatatccatggaattattattcattgtcttcagtcaggtgaataatacacagttttaaaagcacatggtacacattttctattagcattttataagcttccacagggcaagaatattgtatttattggtttttatataccccttcaaaaattgtgaatagttttgttttctctgcctttttaagtgcttcccatttcctatcctccttcatgtatttttaaaagaatggaacaagaaaagaaaaaaaacaaa

SEQ ID NO: 244281 - DNA, 542 bp, Homo sapiens
catcctgttatggcacagtgatttagtcaaattgtaatgatgctattgaatctttcatgtattaaaacccaagaatatattattcctatattacagtatctattgtaaacttttgtatatctaaatttgactttgttgtcaatttcccaacaccaggctgtaaaaatgctaatttctaatttccaggcaaatccctctggcagattgtaagcatagtccctatgccagaaatttggttggctgcctttatttttgcaagaggacagtaaaaaaaaaaaaataccaacttggatatccatggaattattattcattgtcttcagtcaggtgaataatacacagttttaaaagcacatggtacacattttctattagcattttataagcttccacagggcaagaatattktatttattggtttttatataccccttcaaaaattgtgaatagttttgttttctctgcctttttaagtgcttcccatttcctatcctccttcatgtatttttaaaagaatggaacaagaaaagaaaaaaaacaaa

SEQ ID NO: 244282 - DNA, 645 bp, Homo sapiens
tgtgtgttagtatttccttatattttctttaagaaatatcctatagaatatcttagatatataaatataggacaaaacattaggtatccactgcatacattaagaattacattattataataatacagataaatctttcaatacattcatacctaatcatataatgataccttttttccaccccactctgcagatgatgtatatgctcaatgttctaatgtccagttttatgaatatctttttacttttattaaattataatgcattcctatataatacataagcaatatttttcatgtttaaaatttttctaataagtgatatacattgatcttataattcttttatttctttaatattatgtctgtgagcatcatagtcaatgaaaaattagtactagtgaatgtattaccaattctgtgtaacatctccttaagtgaatatatcacaactatttactgaacatgtatgtgatttccaattgttgctatacccattacactagtatgaamacttttgtgcccgttaccatgtgtacctagaggctttttctgggaattacgtagcaatgtaattgtcaggacttagatataacaaattgcccttcatataaaatgatgctttctttagcagcgtataaaattt

SEQ ID NO: 244283 - DNA, 645 bp, Homo sapiens
tgtgtgttagtatttccttatattttctttaagaaatatcctatagaatatcttagatatataaatataggacaaaacattaggtatccactgcatacattaagaattacattattataataatacagataaatctttcaatacattcatacctaatcatataatgataccttttttccaccccactctgcagatgatgtatatgctcaatgttctaatgtccagttttatgaatatctttttacttttattaaattataatgcattcctatataatacataagcaatatttttcatgtttaaaatttttctaataagtgatatacattgatcttataattcttttatttctttaatattatgtctgtgagcatcatagtcaatgaaaaattagtactagtgaatgtattaccaattctgtgtaacatctccttaagtgaatatatcacaactatttactgaacatgtatgtgatttccaattgttgctatacccattacactagtatgaacacttttgtgccygttaccatgtgtacctagaggctttttctgggaattacgtagcaatgtaattgtcaggacttagatataacaaattgcccttcatataaaatgatgctttctttagcagcgtataaaattt

SEQ ID NO: 244284 - DNA, 525 bp, Homo sapiens
tcttcatatctaacaaaattatccatttatttacttgatagtgtaataatgatggcaggggctgcccatctagaacagccactaccatgatgccagctgcagtgggggaggcgcagctggggctgcatgctccacaaagccagcgggagccaggaacaggtggaagccctgcccccttctgaatcagcagggtggcagctttgtgctctctggrcacagctgcagccaccaagtcatggctgcagacccaggcctccccgtgctcttgggggccaggagcaggcaggagccctgccctcccacgcatagctgcagctgcccaagcagcgtcctccgatccaggcactctcgggggcctaggaaggcccctctgcccttgcaagctgggaaatgcctgctcctgctgccttgcctctctccagtcctggcgcctgctctgatctcagagcaaggttggggccgagcccaggtactatcttagtctggccgggtgtggggcgcttgaggcagcactgatatgccaac

SEQ ID NO: 244285 - DNA, 371 bp, Homo sapiens
tctgaagtgatctatgtcttttattctccagtacccactctgccacttgtgtagtgaaacgtttatgtttcagtcacagaagatccacaaattaccaccaagagaaatagcaaattgcagagtaatagcaaatgcattgtactcaaaacttgaagtctacagtattagtcacagcaggaattctttctttatttaaaaaaagtcctatggttggaggtgatgttataagagatgctatagctgtacataagtcattcagtaagtgagcaaacaggaacactgacagaaccaytatgaaaaggatgcaaatccacacctggaacatacgtgtgttctggttccaataaagtgctatgtgtctgtgggatcaa

SEQ ID NO: 244286 - DNA, 371 bp, Homo sapiens
tctgaagtgatctatgtcttttattctccagtacccactctgccacttgtgtagtgaaacgtttatgtttcagtcacagaagatccacaaattaccaccaagagaaatagcaaattgcagagtaatagcaaatgcattgtactcaaaacttgaagtctacagtattagtcacagcaggaattctttctttatttaaaaaaagtcctatggttggaggtgatgttataagagatgctatagctgtacataagtcattcagtaagtgagcaaacaggaacactgacagaaccactatgaaaaggatgcaaatccacacctggaacatacgtgtgttctggtwccaataaagtgctatgtgtctgtgggatcaa

SEQ ID NO: 244287 - DNA, 499 bp, Homo sapiens
agcttcctgggcaaatgctggaagaatggtcatttcatccagctgattactggtagcctcttctatgatggatatcctcttgtgggtaattatttgggacgtgaatatcttcatactttgtgcccattttgaatattgtcattttcatggtctttcccagctctgtgtcaccaattttctatttttttacgtgtttctaccaattttcgggaccatgagccactgtgaatctataaytcaagccatctcttctttcacactaaataaccgaccaaatgtaccttcaaaattgtgccacctgggaaacttttcattcaacttggtagtataaggtcagtgcttagtggagtggtaatgtgaaagtcatcaacgtcagcctggtctagcagaccatgcaggcttacccattaaccatgtcactgcatttttctcctatgctcagggaggaaataactctagatgtcttgtgctatgattcttctttgggatttttcagatg

SEQ ID NO: 244288 - DNA, 542 bp, Homo sapiens
cacacaagtaggcttcttagacagcagagttttctgtgtctcataacatgatatataaattgttttttaaaagatgtgaaattacatgaaaatattggaatttctggaataatccaagataatactgagaagaagagtgattgattctctcctagatcaccctgaagtaaaggaacaagaacatctgtgttgatagaagccattgatattacgttcctacctgagactargagatgtgcctatggttatgcataaggtcttctatctgggagtgaccaccaaaatgtctttgaaatcatgatataaaaagactagtaacaggacttggaggaaaaattgaggaaggaagaatagggaaagagggcacaggcaaatccatgaaagagcaccaggaccatgaatcaatgccactgtttcttccactgatggtctaaaaacaaaagaacagaaagcatccctgtaggttaattgaatatttctaatgtttccatgtcatatttatcatttcctgacaaaatcgttttgcaaacttgaccatgaat

SEQ ID NO: 244289 - DNA, 635 bp, Homo sapiens
aagcgcaaagagcagaagtcaaatttcatggagatgatggcaagaaagaaatactcatactctgattaaaatattgaaatataatggaaatagcattgaggaatcctcagtggagttagtttcttctcacttgtaacaacctcgggaggcaggtgaataaataagttatttttacatgttaagaaatactacattttggcagtgctccatcaaagtttctatgaataattactaataattttatttaaatttatactgagctagtaaatatttgcatttaaattattgaccatttaccagtttttttacattgtgggccagatccttaccttatattgcaaacctgcctcattttggagacacatgtctgaacatagcactccctgcacttctgcgygtatatttgaactttgtcaacatgccattgataaaggacaatcatagctctgcaataaggcttattaatattcagaacaacacatgtctgctcatgtaaaaatgtagaagtaatatccttctacggaacctgagtgccatgctcaattaaaaggcaagcacaattccagcacatctgctgggtgcatattctggtcacagactaatagtcaattgtgcaatgacaaataaatgtataa

SEQ ID NO: 244290 - DNA, 525 bp, Homo sapiens
ttctgtgatgctcttagtgacctgacttaaaaccacatgtcttattatttctctttcaagctgatttatcagtttaattgaagagtccaaacatgagccaytaaaatacaacttcttatccttgtgaaacagaatttttctccatggtctacaagccaaaaatagcccaatcaattgtattacatttttttattatcttctaggctggatctacgttttgacgtatatgtaaaaaatctaatttttcttgacaaacactttaatgtgtaaatgctgtgttcctttacattgataagcctaatttattctaataaaattcattttaaatacggaaaccagatttatttcaacaaaacatcacttttatatttagggatttccacttgtagtgggtatgaacttttctctccaacctgagatataaaatcacacatttcttttgtttctttaaaatcctattttttctctcaaaactactaaaatgtgaagaaactttatctcgatgattatttggttgttgtcctt

SEQ ID NO: 244291 - DNA, 525 bp, Homo sapiens
ttctgtgatgctcttagtgacctgacttaaaaccacatgtcttattatttctctttcaagctgatttatcagtttaattgaagagtccaaacatgagccactaaaatacaacttcttatccttgtgaaacagaatttttctccatggtctacaagccaaaaatagcccaatcaattgtattacatttttttattatcttctaggctggatctacgttttgaygtatatgtaaaaaatctaatttttcttgacaaacactttaatgtgtaaatgctgtgttcctttacattgataagcctaatttattctaataaaattcattttaaatacggaaaccagatttatttcaacaaaacatcacttttatatttagggatttccacttgtagtgggtatgaacttttctctccaacctgagatataaaatcacacatttcttttgtttctttaaaatcctattttttctctcaaaactactaaaatgtgaagaaactttatctcgatgattatttggttgttgtcctt

SEQ ID NO: 244292 - DNA, 439 bp, Homo sapiens
ttttttttttttttttttttttttttgtcttaggtatttgcccagcagtttctgttttacaagttttatttctgttaacagtttttatggaatttcaactatgttccaattataaaccgctttgaataagagccctagagcccctccttattagcatgtgattaggctctaaaatatgtgttagtaatgttaagcaggagcttcagctatgaattccaaagcaaagttacctgaaaycaggtacaattaaactgcttttggagaaaacatcctatatgacatgaaatgtaaccaaaaacaggtaaataaacactaagagaactaatcactgtggtttatgaactgacagcttttactgtttatctgcatgcattatgaatagaaaaactaattttccttgttttttgtatataaataattcaaccagcagaaattctac

SEQ ID NO: 244293 - DNA, 495 bp, Homo sapiens
agcctgattcaactctatattccttccactattatcccacactcttaatatccattgccatgcctgctctccagatttctgcttatataaactagaaaactcaagcagttatttttgagagtagcacacctcctcatgggtcacactctcaacctcacctgtaggggcttgctgggagtttagcctggttataggactagaagyaaacaggggtgctcggggtaagtcctgaagagaatcaacattgtcttgcctcacaacttgctcaggagaggccatcactgttgcctcagccatgcagggtttatttcctcagacaaaggtggaaaggctgatgacagcatgggtcaggaaggggatgttgccactaccagggatggggaaactctttcttctggcaaaaaaggttcatcggagtttacaagctcagtgttcttagcttcattagggtcctcccacacatcccattacaagttgcagggtcccattctttac

SEQ ID NO: 244294 - DNA, 591 bp, Homo sapiens
ccactaccagggatggggaaactctttcttctggcaaaaaaggttcatcggagtttacaagctcagtgttcttagcttcattagggtcctcccacacatcccattacaagttgcagggtcccattctttaccaactgatgccctcactttaacagtagacacctggtgaggctgtgagtgcacctttaattgcagctcagccacttgcataataacagcctgattcttcattatctgtcttgtcattttcttattgtracatataatttttttgttttgaataaaaaaattttcactgagcctgttgcttaggtttcatttatataatggtgtatatcaaaaaacagaccattttaattttgataaaatcctattgtggtggttaatactgagtgtcaacttgactggattgaaggatgcaaagtattgttcctgggtgcgactgtgagagtgttgtcaaaggagattaacattcgagtcagtggactgagagaggcagacccacccttaatctgggtgaataccatctaaacagctgccagcacagccagaataaaaagcaggcagaagaatgtgaagagatgagacctg

SEQ ID NO: 244295 - DNA, 591 bp, Homo sapiens
ccactaccagggatggggaaactctttcttctggcaaaaaaggttcatcggagtttacaagctcagtgttcttagcttcattagggtcctcccacacatcccattacaagttgcagggtcccattctttaccaactgatgccctcactttaacagtagacacctggtgaggctgtgagtgcacctttaattgcagctcagccacttgcataataacagcctgattcttcattatctgtcttgtcattttcttattgtaacatataattttttkgttttgaataaaaaaattttcactgagcctgttgcttaggtttcatttatataatggtgtatatcaaaaaacagaccattttaattttgataaaatcctattgtggtggttaatactgagtgtcaacttgactggattgaaggatgcaaagtattgttcctgggtgcgactgtgagagtgttgtcaaaggagattaacattcgagtcagtggactgagagaggcagacccacccttaatctgggtgaataccatctaaacagctgccagcacagccagaataaaaagcaggcagaagaatgtgaagagatgagacctg

SEQ ID NO: 244296 - DNA, 591 bp, Homo sapiens
ccactaccagggatggggaaactctttcttctggcaaaaaaggttcatcggagtttacaagctcagtgttcttagcttcattagggtcctcccacacatcccattacaagttgcagggtcccattctttaccaactgatgccctcactttaacagtagacacctggtgaggctgtgagtgcacctttaattgcagctcagccacttgcataataacagcctgattcttcattatctgtcttgtcattttcttattgtaacatataatttttttgttttgaataaaaaaattttcactgagcctgttgcttaggtttcatttatataatggtgtatatcaaaaaacagaccattttaattttgataaaatcctattgtgrtggttaatactgagtgtcaacttgactggattgaaggatgcaaagtattgttcctgggtgcgactgtgagagtgttgtcaaaggagattaacattcgagtcagtggactgagagaggcagacccacccttaatctgggtgaataccatctaaacagctgccagcacagccagaataaaaagcaggcagaagaatgtgaagagatgagacctg

SEQ ID NO: 244297 - DNA, 625 bp, Homo sapiens
tggttctttaaaattgtgtagcacctcccccttcactctctctcctgctctgccatagtaagacatgcttgcttcccttttgccttctgccatgattacaagtttcctgaggtctcccagccatgcttcctgtacagcctgtggaaccatgaattaaacctcgtttcttcataaattacccagtctctcaggtagtcttcataaattacccagtctcaggtagttctttgtagcagtgtaagaacagacgaatacaactacttaatagattcttgatcttaggtaacttacaacttatttaaatttcagtgttcttgtattatatgtaagctataataataaycataattcagaaagttgtttccagaaagaaataattaatacatgctaaagccctttgaaaattgtactcgaacatacttatataattttagctatattttgtgtatatctgagagagaaacattttatgaagaatatctatttttaaattgtggataatatttaataataattataaatgtcatttatctatatgcttactcagggttaaactctgataaaaagtttaagatcattctttttaatcctaatcacagtcccatcaggtagtttttacttatac

SEQ ID NO: 244298 - DNA, 586 bp, Homo sapiens
atcaaaactcattaatattttaaacagaaagatcttttatgatttatgctgtctttgaaatacaaacaagcagtaagtcagataagaaaccagatcactgtgaataaatgactaaatctctagaagccttccaaaccaagatttccaggatataagttaacttgtttcattgaagtgattagagcagaagtgtcagataatataaaataaaaacttcattgtagaaaatgaaagaaaaatgtatgattacgtgtataaataacatctgctctatgcttacatatacacaatgaatatcaaacattaaattaaaacacattcaactaattatttttaaaatatagtgaagttcaaactaatgttgtcaaagaatctgaatttctaaatactgaygcatttcttttaactttaccctgtacaattaaactatgcaaaataatttggaatttacattattgtctatctttttttagaaaactgcatttttttttgttaaaagtgttaagcaaagagataaaagaaggttagatatattggggagatttaggtataaaaatcgtttaacaaacaaatttcttttattaag

SEQ ID NO: 244299 - DNA, 460 bp, Homo sapiens
atctagtttgtgaaacagaaaaccagtcactggtatctttatttgaatatcaatgatatgtcaccaaattcattagcagtcctctgcacatctcagtattttgataccaatgagtcrataacatttctgtaggtgctagtgtgttccattgaattaaataggtactatattgctacactttcagataaatccattacattggcagctttatgtctttttatacctcaatattgattcacaatcatattttgattgtacaaaatgataacatttaaagatatgattttaacagaatgtataatatgtgtgtggagaaagagaggggaaatgtgaaaactgtttaaaacatgaaagtattcataatatcttgtattacatgactgaatagtcactatgcaaacttgaaagctatcactaagaatatcttgattaaggatactaatgaaattctgtcatttaa

SEQ ID NO: 244300 - DNA, 469 bp, Homo sapiens
ttatcatattaaaaattaacctaaaatggattaaagatctaaatgtaagacctgaaattgtaaaaatcctagaataaaatgtagggacaagctccttgatattgatctcggcaatgatttctttggataggacamcaaaagtacagataacaaaagcaaaactagataagtgagattgtatcaaacttcaaaaattccgaaaagttccacaaagcaaaggaaataatcattagaatgaaaaggcaatttatggaatggggaaacatatttgcaagccaggtaactataaaggattaattttcaaaatatgtatggtaatcctacaattcaatagcctaaaaagtggtctaaagacttatagatgtctctccaaagaagacatccaaataactgacaggtatataaaaatatgttcaacatcagtaatcatcaggaaaacactggtaaaaaccacacacacacctacaaa

SEQ ID NO: 244301 - DNA, 621 bp, Homo sapiens
gagtgctgttaatcagtacgcataaatctcaattatgcaagatgaatctgtcctagagatctgctatacaacattgtgcctatagctaacaatactttattgtactcttaaaaatttgttaagacagtagggctcacattaagttgcttttaccacaataaaattaaattaaactaaaaratggattctccaaaaatatgcatttgatataccatttgatgttctataaatagtattccatggtaaactttatgaattcacaataaatttcttaaaatgtgtaaaacttttattatggaaaatttaaatgtataaagaagtagtgagaaaagcaaaataacctctcatataacaaccttcactttaagcaattattatttaatggtcaatcttatttcattgataccctaaccaataagctcctttctctggaacattggaagtaaaggtctaatttcatacatgcttcctgtaaatgctttagaatatctctaaagaataagaattatttatgttatataatactcaattcttaagaaaattataacattaccttaatggtaattaaatatccagtcagtgtcgacatgtccccaattgtcctaaaaagttttctgtttg

SEQ ID NO: 244302 - DNA, 607 bp, Homo sapiens
agctcctttctctggaacattggaagtaaaggtctaatttcatacatgcttcctgtaaatgctttagaatatctctaaagaataagaattatttatgttatataatactcaattcttaagaaaattataacattaccttaatggtaattaaatatccagtcagtgtcgacatgtccccaattgtcctaaaaagttttctgtttgtttcatagttggatatttaatatcttgatctatataaggttagtatattgtgactagttgattatgtctaacatttgggttctctctctcttccatttgagagtaagttacaagtgtgatattccattcctactttatagtttaatgtatatttacttacttcaagtttgaacacaattgcttaaacacaattaaaaaattagttaacattgagagaatgctataatgcaccaacccaaaatatcgaaattttagtgaagatcaaattcagtatagcacattgcacttagttgctatggcattttgtctcytttaatcttgaatatactttatctggccatcacgaatctgacatttgaaaagtatagacaagatttttctttttctttctttttttcttaaa

SEQ ID NO: 244303 - DNA, 581 bp, Homo sapiens
tagggcaatatttgctagatacattgaaagacagtgatattttcatttctgcccttatataacaatcattaccygttcctttttctggtggcaacaaatactggcatctcattaaatattgttaaggggattataacattattatctaatcatattggacattcataatacataaagcaattatattttgacacaaagtatattggaatatatatagaaaaagtacatttcaatgagacatagtttgtatctatttccaattgtcttcagccttgaaaactagacattaattatattgtattgtttttaatcagtgttttataaagaacccaaaaaataatagaataatagaacaaataaagtctttcagaaggtcaaatgtactaataattagtagatttttgtatccaatctctgaatgtatactgcataattttccagaatcacagtttaaaaatagaacagtagatttttgtttctccatataaaacactattagtgcaatataaaataccagataaaaaatggcatgtttaacgttttccctactttctaattccgattcttaagaaaatttacat

SEQ ID NO: 244304 - DNA, 362 bp, Homo sapiens
tttacctcaatgtaatcttacacaataaagtgcataaggatactaagcaaatggactatttttgagctctaagatacatgaacacacacacaccacacagacacacacatatgtgcatgtgttcaggtgtgtatgtgtgtgtatgtataatcttgtgcaaagtttatccatgtgatcccactggtagaatctggtaaaaamacaatatccctttgttaattaaggattatttctacaataagggtgtaaaagctcagattctttattctttatctggcctgaaaaccctggaagagtttcaaggactatatgaatactaaattgtacaccaaaaaatgtataatacattttttaaattttat

SEQ ID NO: 244305 - DNA, 582 bp, Homo sapiens
cgggtctgctcctggtttgtcccaggagcctatacatatagaaagagttaaaaagacaatctcatgtccttgctaaataaatatgctttagggttcaagaagcagtttactaagttaaataagtgcaataaatcaatggagaaatgccaaagttaactgcgcaaactcgaaagtgtagagggatttcttagragcaattggacaagaagggcaagaaatagctacagatgacctagaagatttgaccagtctgtaatttatctgagactgtaacctatctaacttatctctgatagctacaagtagaggatcgaagcctccaacttgtagcttacggactgcagtgaaaaagtcaggagattctagctgaagtacaatcaaactctttgattatgtggaggaatccagcaataatcaaaatgttgaattggtccagggtatcctttactgtgcagtcatatctgcttccttttccatcaaaggagtcctcaaacttgcacaattctacacacaaaaaaaacttaaccttgcaacaaaagagcataggctgtacactgttacatgttgtttgaacattattct

SEQ ID NO: 244306 - DNA, 582 bp, Homo sapiens
cgggtctgctcctggtttgtcccaggagcctatacatatagaaagagttaaaaagacaatctcatgtccttgctaaataaatatgctttagggttcaagaagcagtttactaagttaaataagtgcaataaatcaatggagaaatgccaaagttaactgcgcaaactcgaaagtgtagagggatttcttagaagcaattggasaagaagggcaagaaatagctacagatgacctagaagatttgaccagtctgtaatttatctgagactgtaacctatctaacttatctctgatagctacaagtagaggatcgaagcctccaacttgtagcttacggactgcagtgaaaaagtcaggagattctagctgaagtacaatcaaactctttgattatgtggaggaatccagcaataatcaaaatgttgaattggtccagggtatcctttactgtgcagtcatatctgcttccttttccatcaaaggagtcctcaaacttgcacaattctacacacaaaaaaaacttaaccttgcaacaaaagagcataggctgtacactgttacatgttgtttgaacattattct

SEQ ID NO: 244307 - DNA, 590 bp, Homo sapiens
gattagaagaatcctttcatctttctcctggacctactggagtattttctctaggaaaagcaaattaatgtataagaagtccaactaccctgaaactgccatgtgatgagacatacaagctatakgacaaaccaggaatattaagacactgtgtggaaagaaagaaaagtcaaagagaattgaggcactagatatttgaatgaaatgatcattttggatttggtgtctccagctccacgtgttcagctgataccaccatggatcagaaacaagccactcagtcaagattttacagaattcctgatgcacatatcataagaaaaattgtttttcaaaaataggtgttttgagcctcaaaatgttggggcagtatgttacaccaaaataaataagtgaaaccatttttaataccactcagaagagagggagaatttatttcacattaaattatgcaacatatgccaactatactggaattttggcacatatttaacaggatattctgatttaaaggctaaactacaaagaaacttatgaccaaaagagtttgactgttggatcaaagaacacattagggactcagatattgc

SEQ ID NO: 244308 - DNA, 582 bp, Homo sapiens
cgggtctgctcctggtttgtcccaggagcctatacatatagaaagagttaaaaagacaatctcatgtccttgctaaataaatatgctttagggttcaagaagcagtttactaagttaaataagtgcaataaatcaatggagaaatgccaaagttaactgcgcaaactcgaaagtgtagagggatttcttagaagcaattggacaagaagggcaagaaatagctacagatgacctagaagatttgaccagtctgtaatttatctgagactktaacctatctaacttatctctgatagctacaagtagaggatcgaagcctccaacttgtagcttacggactgcagtgaaaaagtcaggagattctagctgaagtacaatcaaactctttgattatgtggaggaatccagcaataatcaaaatgttgaattggtccagggtatcctttactgtgcagtcatatctgcttccttttccatcaaaggagtcctcaaacttgcacaattctacacacaaaaaaaacttaaccttgcaacaaaagagcataggctgtacactgttacatgttgtttgaacattattct

SEQ ID NO: 244309 - DNA, 602 bp, Homo sapiens
tttgttttcaatatgtccatgatccatctcccatcctgcatccagaattggagtctattcctctccacctcgcatctgggatgtaacttgatggacaaatggaatgggtgaaagtgacatcctggtactcctaaggctggattagaagaatcctttcatctttctcctggacctactggagtattttctctaggaaaagcaaattaatgtataagaagtccaactaccctgaaactgccatgtgatgagacatacaagctataggacaaaccaggaatattaagacactgtgtggaaagaaagaaaagtcaaagagaattgaggcactagatatttgaatgaaatgatcattttggawttggtgtctccagctccacgtgttcagctgataccaccatggatcagaaacaagccactcagtcaagattttacagaattcctgatgcacatatcataagaaaaattgtttttcaaaaataggtgttttgagcctcaaaatgttggggcagtatgttacaccaaaataaataagtgaaaccatttttaataccactcagaagagagggagaatttatttcacattaaattatgcaacatatgcc

SEQ ID NO: 244310 - DNA, 518 bp, Homo sapiens
tgttagaacaacctagagctctcaggtatttggatatccactcattatgctaggggacttcccaaccatcatttcttattattagccatcagtttatttctactgcaactttggaatcacagaagctgtatccaaatgtcactctcttttttttcattaaaataagccatatctacaacaaaataaagaaacayaaggaatataactgatattttttggagcaacaagaaaaataaaacaagaggaaaaaaaattttaagaatcatctccatattcaggccacaaaatgagctttataggctaatataatataatttttttatttaataagactacatagacaattgaaaaattatctttcactgataaagaacaaactataaagtttgtgttgttagaactgtgtccctgtggaatttttaaaatcgcaatttcctttactctcctgggatattaacatggatagcaaaccgaaacctcagcttaggttcagttagtaacagggctatcagcaaaca

SEQ ID NO: 244311 - DNA, 506 bp, Homo sapiens
tctaacacatttccatactgttttccatataagtagtactaatttacattctcatcaacagcaatagtaatgtttccttttctctacatccttgccaacatttgctgctttttaaatttttactaatacccattctgactggtgtaaagtgatatctcattgtggttttaattgcatttccctggtgattggtgatgataaacattttttcatatgcttgttattcaatatatgtcttcttttgcaaaatatctgttcctgtctttgctcaccttttaatgaaattgatttttttcttattgagttgtttgagtttcttgaagattctggatattagttctttgttggatgcacactttgcaatattttctaccattctgtctttttaccctgttgattatttattttgatgtgcagaagcttttwagtttacttaagtcccatttgtctattttaggtcctgttgcatttgcttttgatgtcttaatcctaaattctgtgtctag

SEQ ID NO: 244312 - DNA, 645 bp, Homo sapiens
ggatttcttactactgatcaaatctctctacttattatgcatctgttaaggatatctatttcttccagttcagtcttagggggttatatgtttccagaaatgtatccatttcctctaggttttctaccttgtgggcatacggatgttcatagcagtctctgatgatttattgtatttctgtgatatcagttgtaatgtctcctttttcatttctgattgtacttacatgaatcttcattctttccttggttattctagctggmagtctgttgattttgtttaccttttcagagaataaacttttaattatgttgatgctttttattcctttgctcaatttcatttagttctgctctgatctttttcttttcttctgcaagctcgaagtaggtttgttcttgtttttctagttccttgaggtgcaacattagtttgtgaatttgtggtctttttatcctttttatgtaggcatttaacactacaaaattccttttaatgctgcttttgctgtatcccagaggtttggggaccattgtagctctgttttcatgtttcagattattttttaaaatccatcttaatttcattattgacctaaagatttttcagaagcaggttttttaatttctatgtgtttgtatagct

SEQ ID NO: 244313 - DNA, 593 bp, Homo sapiens
gtttgttcttgtttttctagttccttgaggtgcaacattagtttgtgaatttgtggtctttttatcctttttatgtaggcatttaacactacaaaattccttttaatgctgcttttgctgtatcccagaggtttggggaccattgtagctctgttttcatgtttcagattattttttaaaatccatcttaatttcattattgacctaaagatttttcagaagcaggttttttaatttctatgtgtttgtatagcttcaagacttctttgaattgatttcaagttttattccactgtggcatgaaaagacatttgatatgatttccactttttaaaatttattgagttttttgttacctaacatacagtcaatcttaaaaaagagtgtatgttaagcacttgttgggtagaatgttttgtaaatgtctgttaggtctacttgatctayggtctacttaagcctagtgtttcgttctttatgtttctgtcttgatgatgtctactgctgtctgtgaaatgttgaaagtctccactataatatattgctatctccttttttatatctagtaatatttgttttatgaatctggctgc

SEQ ID NO: 244314 - DNA, 610 bp, Homo sapiens
tggcttaactcacactattatttcccatggtaatatattcctgtgttataatcttttgataaatttaatatattaaattataagaaaactgcctcaaattttctgtagaatgaatctgagtaaagtcatatttatgagatataaaagcagctcaaaaacacaagcagcacaataatgtaaataactgtagaaacagcagcaaagagcattagtggtaagataaataaaatgaagccagggatgtagtgtgtgccataagatcccgcacacttcttagaattgggccacgaatttgtcctgagcattctagaaatcactgtcaagggtaaaagattctcagttatttgatttgtagtgttcaaagtcaagaaaaagttagggatttctaaccattctagtttctaagactgagtgaattttgtctcctgcatcttcataagacaatacattctgatgcattaaacactatcatcaacaatattccaatcataaataaaacaactctcatagcactgttttaatagcactctcctggtaacacactttagyagaggaaattttatgagggatcagggcagtgtatccatgtacataattttgcaattaattg

SEQ ID NO: 244315 - DNA, 514 bp, Homo sapiens
agcaatagtttctattgctgccttgcctgagtaggcactcatgtaaatgtgttgtttccacatcaaggatttaaaacattttctacaactcacggctagcttttgacttagataaggaagtgaattggaatgaagtaacagttctatattaggtagttwcactaagctacttctatatttaaattttgaaggtatcactaataacccagaacacatgtattttggcatatttttaagaatcagttttgtgttgaccccactgcttcttccgcatggctaatggaacatatttgtaagctccctaaattggaagttaaaatttatgacatgaaataggaattaaaatggcatcagtagagattgcatgtaccactaccataccttgattaatgccatattttgttcaactgacctgatactgcagaaggacaaacataattcaagtataactcctcttgagacaataagttactactgaatttctgcattttgttttatgagaattgtgtaattt

SEQ ID NO: 244316 - DNA, 497 bp, Homo sapiens
gatttaatgcctttgcatctatcttttgagtatctcccttgggttttgctttgtagttagcatgattcttaataaaatatcatatacttataacagactagtaacaactgtaaattcttaagtagcaacttaactaaatttaaatagaaaactccgtattttctccctcatatgcatgcattgtgggtttttttatgttatgatatgcaactctttatattatgtatccctaaaaattactgtagctatgtatttttaaatagtttttgtcttttaaactttatgtttaaatgatagatgcaccaccattacagtattaaagtattctgaattttaatrtatatattcaattttacaccttttatataaaggtgagttttacacctttatgtcttatcatgttactaattaacctctttttatttcagcttgaaaaactctctgcagcatttcttacaaggcagatccagtaacaatgagcttcctcagccctggta

SEQ ID NO: 244317 - DNA, 446 bp, Homo sapiens
agtcacttcttccaggttttataaagtggctttggtaasggaagaccttcaactcaagaggtgtggagaatggtagggtaggtaggctggagtgtgctgtggatttggatgccaaatgtgggggtatgaagtgattccaggatggaatgggagttggcagattgttgattcaaggaggtggggtccataatgtcaacaatcacataactttagcaatgatatggtttggctgtgtccccacacaaatctcaacttgaattctatctcccaaaattcccacatgttgtaggagggacccagtgggaggtaatagaataattaaaagagaaacagcataaaagatcagaaaatgtgcattctgatgatgcagtagaacagaaaacccaattttttgagaagaaattaaggtggctgcagaaatttgcataagtagcaaggaacctaat

SEQ ID NO: 244318 - DNA, 568 bp, Homo sapiens
ttatatgtctggcacatatatggctttgcagaactaaaaacgttgggtcaaccagcacattgggtgatccagctattctctgcaattttttttctacacagatatccagcttcctactcaatgtagcctgaaaatctggctaagactttaackggagagctggccatatgctttcagttcaaccccttctcccaaaaggttctgatttctttagtacatcaaactctgaaagatttccctttgcctttggagaatttttttgtgtaactcagtgtcctacagaatctcagaactcagtgaatgtaacatggggaaatcagtcatgcatttgatgaccctcaatttccaatgtatttcactctaatctgtctcttccacaaagatgttttgagatttttttccttacctcaaatttgaatacctcagagtcttgagttttcagtacaagaagtaaagacttgtgacataacaagcctgagcacatgtgcatacacacacagacacacacacacacacacacacacacacacacacacacagtgtcaaacttaaatcctggacactttca

SEQ ID NO: 244319 - DNA, 568 bp, Homo sapiens
ttatatgtctggcacatatatggctttgcagaactaaaaacgttgggtcaaccagcacattgggtgatccagctattctctgcaattttttttctacacagatatccagcttcctactcaatgtagcctgaaaatctggctaagactttaacgggagagctggccatatgctttcagttcaaccccttctcccaaaaggttctgatttctttagtacatcaaactctgaaagatttccctttgcctttggagaatttttttgtgtaactcagtgtcctacagaatctcagaactcagtgaatgtaacatggggaaatcagtcatgcatttgatgaccctcaatttccaatgtatttcactctaatcygtctcttccacaaagatgttttgagatttttttccttacctcaaatttgaatacctcagagtcttgagttttcagtacaagaagtaaagacttgtgacataacaagcctgagcacatgtgcatacacacacagacacacacacacacacacacacacacacacacacacacagtgtcaaacttaaatcctggacactttca

SEQ ID NO: 244320 - DNA, 579 bp, Homo sapiens
agactttaacgggagagctggccatatgctttcagttcaaccccttctcccaaaaggttctgatttctttagtacatcaaactctgaaagatttccctttgcctttggagaatttttttgtgtaactcagtgtcctacagaatctcagaactcagtgaatgtaacatggggaaatcagtcatgcatttgatgaccctcaatttccaatgtatttcactctaatctgtctcttccacaaagatgttttgagatttttttccttacctcaaatttgaatacctcagagtcttgagttttcagtacaagaagtaaagacttgtgacataacaagcctgagcacatgtgcatacacacacagacacacacacacacacacacacacacacacacacacacagtgtcaaacttaaatcctggacactttcaacaaaaagaaccatcttaagaagacayacaaggaaaacttttttttcttagtgtaatttagggtgacaaatcttttcgctgaatctgtgaattaacacatttattattgaagtaacagtgtttctagtaaagaaaacccaaataacagaaatc

SEQ ID NO: 244321 - DNA, 579 bp, Homo sapiens
agactttaacgggagagctggccatatgctttcagttcaaccccttctcccaaaaggttctgatttctttagtacatcaaactctgaaagatttccctttgcctttggagaatttttttgtgtaactcagtgtcctacagaatctcagaactcagtgaatgtaacatggggaaatcagtcatgcatttgatgaccctcaatttccaatgtatttcactctaatctgtctcttccacaaagatgttttgagatttttttccttacctcaaatttgaatacctcagagtcttgagttttcagtacaagaagtaaagacttgtgacataacaagcctgagcacatgtgcatacacacacagacacacacacacacacacacacacacacacacacacacagtgtcaaacttaaatcctggacactttcaacaaaaagaaccatcttaagaagacacacaaggaaaayttttttttcttagtgtaatttagggtgacaaatcttttcgctgaatctgtgaattaacacatttattattgaagtaacagtgtttctagtaaagaaaacccaaataacagaaatc

SEQ ID NO: 244322 - DNA, 581 bp, Homo sapiens
tggtaattacaaagatggtggcatgttgtagaaactcctacaaccttggaaaacttacaaggagaaaagaaaaatgaaagtcttgaattctcgactaatattttaggtgggaaatagtctttattttaattgaaggagtttctatctccttttgcttcaggtcagatagagctaaggattaatgcaacaaaataaaatayattaagctataaaaacaaataaaaacaatgtccctgaattgctatagagtgatttccagaatacatttttaataaaaaaaatgaagacattgtcagagttctgtaatgaaaatcaagggaggcagggcattttctgtataatgccacagagaggaaatacaataaatgcaaagatgacccattggatttgacaattaggaagccatttggtaaatgttagaaagaattaagaagaagaaaaggaaagatgtaaaataaaagaagagattaaaatgtccctgaaagtattgcttcaccattttgcccaaggcttatgccagaaataatgtctgataaccttaattaaaatttttcaattttaatacaagttaaggagggaac

SEQ ID NO: 244323 - DNA, 505 bp, Homo sapiens
agttctgtaatgaaaatcaagggaggcagggcattttctgtataatgccacagagaggaaatacaataaatgcaaagatgacccattggatttgacaattaggaagccatttggtaaatgttagaaagaattaagaagaagaaaaggaaagatgtaaaataaaagaagagattaaaatgtccctgaaagtattgcttcaccattttgcccaaggcttatgccagaaataatgtctgataaccttaattaaaatttttcaattttaatacaagttaaggagggaacagtgaaacaaaacaaaacaaaataaagaaaraaagcaaacaggaaaatcccaaatgatagcttaaattaatctttttacaacaggatttgttttagctttctttgtttctctatgctcaaatgtgactatttttcaggaaaccatgtacagggctagattaattctctaaaggccttacactggaaatcctttcaggattttttagtcattttctcacgc

SEQ ID NO: 244324 - DNA, 633 bp, Homo sapiens
agtcattttctcacgcactgttgtgctttgcctctgagcccattgtttgaaatgtctattgctcttcaggtcacagaggaacaattctttcaaagtggccatgctggcttagcctgtggagaggaaagttgacacaagaagttcaattactgtgaatttaaaacagaaaggttgtctttgtaaagtcacagttatgttcaactaaaatgtatccacatctcaaaaatgatttctttcccattttaaatttacaatcattgctatcctgctgttttcccaagggctaagccagcgttactgaaggtatgtgctactctactgtgactggagtagccatgaacacttcacatgtgctctccataggtggacccagatctgcagagaaaaaaagatcttcaactatgatccctgaaataaaggctgctgatgaatttagaaagaaaatagatgatggatgatgataaacaggtagacagacagacagatagatagatagatagatagatagatagatagatagatagatagatgatagatagatagatagatgatagatagatagatagatagatagatagatagatagatagatagakgagagtaaatgggagaatactatttgaagccttaaaa

SEQ ID NO: 244325 - DNA, 534 bp, Homo sapiens
tccattggtacttttccccatttatcttctctttttcaaaagagctaattacattcactgattttcctttatgaattttcatggctgaaatagacattgttgaggtcatcaatgattatttggcatgctttaatatttaattttaacttgaaacatttctttatactttcatggttacactcatcttgttttctttgctcctcattgtactctctttctcaatatttctacccaatgactgtatcttatacatagctgttaatttagaaagacctgttcctctgttctgctgacaatcttttctttagatgatctcatccagttctaagtcttaaaacaacctgtgtaaactgaagactcacagattcacatcactagctatttcctcttttactgagtctaagctayatatatccacatatctatttgctacttcagcttgcatgtctagtacctcaaaccctgcaatgctagagtagaactgttccctcccttacacacatgcacacacacacttcaattccatccaaggtt

SEQ ID NO: 244326 - DNA, 576 bp, Homo sapiens
ctacattttatatttaggagaagtatattatattaaaacatctgtatcttatggtatatacttcatagtgacagatataaagaattctggtctaccaaaaaatactctgtttttttaaaaaaaaaaatcttgtctatattagcctctttaatatgggtaattccagatgaaaggtattttactataaaattattmtttaaaggaggcgtggactgaaccaattattttttataccctcccccaacacaaacacttaatacacatcatttttgaagtgcaatttctggtattcttgctcatatgactttaaagttcagggaataactgtttcctcctacttaatattattttactttgaagttcccccagcagtccttttcatatttcttgttgatttctcctattttcttttaaaattgcctgagttttctttctatttgtctgtctaaacctgtaagaagtattaattacttcttctttctattgattccctacctgtacaattaagaggtttgtttcagcagtttcctagatcccatctcctgaggagttacatcaggatgagctctgaaatac

SEQ ID NO: 244327 - DNA, 594 bp, Homo sapiens
agctatttcctcttttactgagtctaagctacatatatccacatatctatttgctacttcagcttgcatgtctagtacctcaaaccctgcaatgctagagtagaactgttccctcccttacacacatgcacacacacacttcaattccatccaaggtttatctcagttgagttgcttatcatccattagcttctcagctctaaattcagtraaacttggagtttcctaaatctctctctctcattcctcaaatccaatctgtaactgaaccctgatgtttataactctgagatatattccaattgaaccactgatactatctccactacagttattctagccaaagccacaaatgtagctcatttattcaactgcaacccccttcttacaggcctatttcactgcctgcctccccacaacacacactgtattctatcactaagaaagcagaagtgatttagtgtaaatcagatcatataatctcaacttaaaatgtctgatttttttccccttgaaacctaaacaaaatagatctttcattccatgaaccgtaagttgctacttgatttgctttctgcttccattgtgacctcc

SEQ ID NO: 244328 - DNA, 604 bp, Homo sapiens
acttgatttgctttctgcttccattgtgacctccttccttcaatttatgtctccttagttatccagrttttccctttgaaactacataagtaaattcagtttaagaggaaagagtgcacaatcctattttactttcagaaacaagacaagttctagaatccagccctcataatttgaataataaagttgtcattgcaatttaatccatgtgcttaattacgtttaagtggaggaataaagagtaattttattcccccaaacctcagaaaaacaaatagctgaaacatccatagggatttgatcgtgattacatggcatatttacattaattttaaaataaataacatttttacaatattgtcttgtgctatctaattatgtggtatatatttcctagtattaaagccacatttgagttcccctagttctgattcacagttgtattacaagattatggttcatgaataaggagtgcttactatacgacaataatcatgttaaatagttttcattaattaactcatgtttctacaattttttcctatacttttattgttaaataaaaacccctagttgtttgagagtgatctaattatggattaat

SEQ ID NO: 244329 - DNA, 604 bp, Homo sapiens
acttgatttgctttctgcttccattgtgacctccttccttcaatttatgtctccttagttatccagattttccctttgaaactacataagtaaattcagtttaagaggaaagagtgcacaatcctattttactttcagaaacaagacaagttctagaatccagccctcataatttgaataataaagttgtcattgcaatttaatccatgtgcttaattacgtttaagtggaggaataaagagtaattttattcccccaaacctcagaaaaacaaatagctgaaacatccatagggatttgatcgtgattacatggcatatttacattaattttaaaataaataacatttttacaatattgtcttgtgctayctaattatgtggtatatatttcctagtattaaagccacatttgagttcccctagttctgattcacagttgtattacaagattatggttcatgaataaggagtgcttactatacgacaataatcatgttaaatagttttcattaattaactcatgtttctacaattttttcctatacttttattgttaaataaaaacccctagttgtttgagagtgatctaattatggattaat

SEQ ID NO: 244330 - DNA, 526 bp, Homo sapiens
atctgtgtgaggtcagtcaatatttggaaatcttaaacctcctttgtatttaatgcataggtcaaaaatgaagatgatattttggaactgttaaacaagtaggcactagatggagataaaatccaatcaataaacaaatatttcaacttaacttttgatattgaaaatgtgaaggctggacctakgcactattttggacatttcagtttgggtacattatagatatttagcaaaaatctagttgggttaataagaggataaactgacctgtaaaattaaataaattttagatcatctttagtttcctcgaataatgataaataatctaattttggaaaatttggagacaggtagaagaaacaatctaaaaaaatacagtaacagaattctttaaagaatcttcggaaagaatactcatttttatggatctcgttttacatctgaaataagttgcctgatgtttttataagcctgtttactgacaacataagaaaatctgaccgcacaaagagatgctataaggtta

SEQ ID NO: 244331 - DNA, 452 bp, Homo sapiens
gtgacaattccattaatcaataggtcacttcaaggggaattgttaaccttccacaactgagtcttcaatacatgaacattaactatttagatcttcttaaatttttctcaatattgttatttcattttcttaatagaaattatattgtatygttatattgtatcactatatgtctttcggcgaaatttatgggttttttcgtatagttttcttttaaataaattttctaattttttgttgctagtgatatggtttggctctgtgtctccacccaaatctcttctagaattataattcccataattcccacatgctgagggtgggacctggtaggtggtgattggatcatggaggtggtttccccccatgctgttctcatgatagccagtgagttctcatgagatctgatggttttataagtgtttgaccattcctccttcacacacacactc

SEQ ID NO: 244332 - DNA, 452 bp, Homo sapiens
gtgacaattccattaatcaataggtcacttcaaggggaattgttaaccttccacaactgagtcttcaatacatgaacattaactatttagatcttcttaaatttttctcaatattgttatttcattttcttaatagaaattatattgtattrttatattgtatcactatatgtctttcggcgaaatttatgggttttttcgtatagttttcttttaaataaattttctaattttttgttgctagtgatatggtttggctctgtgtctccacccaaatctcttctagaattataattcccataattcccacatgctgagggtgggacctggtaggtggtgattggatcatggaggtggtttccccccatgctgttctcatgatagccagtgagttctcatgagatctgatggttttataagtgtttgaccattcctccttcacacacacactc

SEQ ID NO: 244333 - DNA, 452 bp, Homo sapiens
gtgacaattccattaatcaataggtcacttcaaggggaattgttaaccttccacaactgagtcttcaatacatgaacattaactatttagatcttcttaaatttttctcaatattgttatttcattttcttaatagaaattatattgtattgttatattgtatcactatatgtctttcggygaaatttatgggttttttcgtatagttttcttttaaataaattttctaattttttgttgctagtgatatggtttggctctgtgtctccacccaaatctcttctagaattataattcccataattcccacatgctgagggtgggacctggtaggtggtgattggatcatggaggtggtttccccccatgctgttctcatgatagccagtgagttctcatgagatctgatggttttataagtgtttgaccattcctccttcacacacacactc

SEQ ID NO: 244334 - DNA, 452 bp, Homo sapiens
gtgacaattccattaatcaataggtcacttcaaggggaattgttaaccttccacaactgagtcttcaatacatgaacattaactatttagatcttcttaaatttttctcaatattgttatttcattttcttaatagaaattatattgtattgttatattgtatcactatatgtctttcggcgaaatttatgggttttytcgtatagttttcttttaaataaattttctaattttttgttgctagtgatatggtttggctctgtgtctccacccaaatctcttctagaattataattcccataattcccacatgctgagggtgggacctggtaggtggtgattggatcatggaggtggtttccccccatgctgttctcatgatagccagtgagttctcatgagatctgatggttttataagtgtttgaccattcctccttcacacacacactc

SEQ ID NO: 244335 - DNA, 549 bp, Homo sapiens
tatttgaaaaacgtatatgctcttcaaggaatacagaacctagtattcaaaatatattaatctattacaatctattttacatgaagaaaaatgaaaataaaatttagaatgacaaaactacgtagttagttaatggtagaatttgagttggaatatttattttccaaatttctattcayatgttatttcatttatttattctgtaaattgaatatgtataacatgttgaataatataaacatgttgtaagctaagcaatataagattaggctatagtttagaatacattaatgagtttaagaataaagatacaaagaacctaagacattttgttaaattactaatccaaagataaacatgatagtggcttaacacagggcagtagtagtgggtgtttgattccaagattcaacagtgctcaataaattgcatgtgaacagcagttatgaagataaggggaccatatactgctctagttcctgacctggacagttgagaaaacaccaacgtgattattttatacattgaacatgagaataagattggtgg

SEQ ID NO: 244336 - DNA, 572 bp, Homo sapiens
tgttgatgtgagtatatttattaatttaatggcaagaagtcaagagggtcctttgtctttgtgttagattgtattttggctgcaacaatagattccatcccacatattcttctttaaagtgaattagccacagccccattaagaagtctagtctacatacccccacctttgatcaggcctaatagtttctttgaacatgtaagtatggtagaaatggtcatgtgtcagtcctaggtcaattattctaatatggtaacctctgcttccccctattggaatgctggtacttagaagccagtcttcacctgggaagactgactttcttgagacaatcacacccaagccaggtgtagatgcctaggagaattgagggccaggtgatgagasaggagccaaggaatactgtgggaagaagttatttgaaaatgggttctccaaccttaaccattccaaaagatctcacatggatgggagcaaatcagccaagttagttccatattcctgacccagaaaatcatgagcatagtaaaatggcagttttaaggcactaagtgtggcataactgttagtag

SEQ ID NO: 244337 - DNA, 422 bp, Homo sapiens
aaacttttaaggaaaaaaaaaaaatgaggatataagagatctctgtatcatggactgaaagttccaaaatacaaagctgaaagttttgagaaggcagggagctgtcttctcaaagagaagtttaggagacaacacactgtcaatcatatagtgaaaaacttctgaggaagtataaggagagggctttacttagtactctatgaccaaggttatgaaggtcctggggtttaagcatccatcagattttttaaaaagtgcctttagatgtctcctgatggatgtargtttgtaggaatcagggactctgaatcagtgagcctgtggtcaaatgcttgctaccttgccattctgacaaagatcctggtcatcagtgtcctttttgtgtaaatagaggcttgggtaatcagatgcctagtgtaatg

SEQ ID NO: 244338 - DNA, 617 bp, Homo sapiens
ggactctgaatcagtgagcctgtggtcaaatgcttgctaccttgccattctgacaaagatcctggtcatcagtgtcctttttgtgtaaatagaggcttgggtaatcagatgcctagtgtaatgattaataatggcatggaagtggtcctgagagactctgggcatgaaaaggaaagatggagcagagccctaatgaggataaggctgacattcaggctaaagcagtaatgtcagtggccagaagccttacaaatacagggccttgtcggtagttcattaaatattttaacccactagcattcatgtcaataaaatttaataaacaattcaaagtatataaaaggaagccttgtcctactttgtatatttggatgaagacagcaaaatatgctaactttgattaaaatatatctgaaaatcatctttcaaaggaatgatattcttcacacttttraggaaatgtaggcttaagcctagagaatcaaagcttttgttgaaaattctgttactattagattgtgatgaatcagctgctttaccattactagctttaaaagtgatccaagtttagaaagatcaatacgtaaaaactccagacttagccattttaaagcaaa

SEQ ID NO: 244339 - DNA, 545 bp, Homo sapiens
actatgtgaacagcaagaaaaaaattcacaattcatcagtaaaagtctaagcctttcaaaagtgcaaagaaaaaaggaataaatttagctcaggagtaacataatttgtgtattcatatgtcttgcccaaccctagacaaaaagaaaaaaaattttaaagaatttaggctgggtgcagtggctcacacttgcaatcccagcactatgggtggctgaagtggaaggaccgctcgaggccaggagttcgagaccagcctgggcaacacagtaagccctgtckcttaaaataaaaaataaaaaataaattaaaaataaagaacttaagtcataccaggcagaagaaaactcatgacaattaaagctgcattctttgttcttttccatcacccattacttacttcctgaacaccacactcaaaacacttattttcttctactggctcgggcgtttgacagtaccggcaaacaggacacctatccaggacaccaaaagataatggtgcaggttaaatataaaagacagctgttacagaacccaaaagtca

SEQ ID NO: 244340 - DNA, 541 bp, Homo sapiens
ggtttcaccacgttgggtctggtgacccaaatctttgggtgatttttctgctggaagaggacaaacaccattacattcaaagtcagattttctgttttttttttttttttgtttttgtttttttaatattcatttgtttattcatttgagactgggtcttgctctgtcacgcaggctggagtgcaacctccctgggctcagttgatcttccctcagcctcttgagyagctgggactacaggtgtgtgccaccatgcccagctagtgtttgtattttttgtggagatggtgttttgccgcattgcccagtgtggtcttgaactagtgctcaagaggcctgcctccttcaacctctcaaagtgttaggattacagatgtgaactactgtgcctgatccaaagtcagattttctttgcttacttagtcaagttcgtctatgcttttattatacttaatatattagtatagttactgtattagtatattagcatatttaatatattattatacttatcatacttgagtatattgagtatatttac

SEQ ID NO: 244341 - DNA, 554 bp, Homo sapiens
gatatatatatttttttcatgcttgcagtcccagacttgtcttcagcacatctgtgtgctagagaaatcttgcatcaggcaaggatggctgctgcacatgcatcttctattaaactataacttaaaaaaaaactttatgcatatgttttttctccatttagaagactatatacagttttcttacattttaaacaataacaaacctacaaaatatggaggtagaaaaaaactattttatttmtgaactatttgacagtaagttgctaacttgatggccctcgcttctgaatactttagtatgcatttcctaaaaaaaggacagtctctgacctaaccacattaggatcaatatcataaggacatttacattgatatattcttattatttaatctttagactccattctatgttaccagttgccccagtaactttttttatagggaaagtatccacttcagaatcccatgttaaattgaaatgtcatatccctttaatctccttcattctggaacaagttcttagcctttccttgattctcaagagttaagggatt

SEQ ID NO: 244342 - DNA, 554 bp, Homo sapiens
gatatatatatttttttcatgcttgcagtcccagacttgtcttcagcacatctgtgtgctagagaaatcttgcatcaggcaaggatggctgctgcacatgcatcttctattaaactataacttaaaaaaaaactttatgcatatgttttttctccatttagaagactatatacagttttcttacattttaaacaataacaaacctacaaaatatggaggtagaaaaaaactattttatttatgaactatttgacagtaagttgctaacttgatggccctcgcttctgaatactttagtatgcatttcctaaaaaaaggacagtctctgacctaaccacattaggatcaatatcataaggacatttacattgatatattcttattatytaatctttagactccattctatgttaccagttgccccagtaactttttttatagggaaagtatccacttcagaatcccatgttaaattgaaatgtcatatccctttaatctccttcattctggaacaagttcttagcctttccttgattctcaagagttaagggatt

SEQ ID NO: 244343 - DNA, 586 bp, Homo sapiens
tgattttagccaagaggaaaagcttctcaaaattattgtatatgtttttcatgcatgtctgaaggagctctttccaaaatgaataattccaaataacctgttataaaagaaaatgtctttagtaattacagatttttctcctaaatgtgagaatttcaaccatcattttcagttgcctcttattaaatacatacagattttaagcgttgttgaagtgatttcttaagtaatgataatgtttacagtaatacaaaagaatttgttagctgcctgaacagctcaaagtttaagatgtaatgacaacacaaattaaatattatgaataaaagataatcaagcattatgattttagaaaatatctcattttcatttctcctcaaataaygttttatttttgaatcccctatttttaaaaagatgcttaaagtattcattttctatgtattttcataaaatattcactaaatgctagctatctttctggagtaatttcatgttttaaacccatttttgagttgtgttatttcttatactgcatttgctccaaaagatggcacagattttttttcactctaaactgcatgac

SEQ ID NO: 244344 - DNA, 562 bp, Homo sapiens
tcactaaacactgttaagatcgaggatatggcaacratgtctgctcttgatgcttctatttaatattttagcaagtgtaataaagcaaagtacacaaaaaaactataaatattagataacgagttgtaactcttttcattcacagaaaatattattgtgatgtttaaaataaaaattttctgcacacaaactactaaaatgtataagggaatttaataaagttacaggatagtctatacaccaattaattttatttgtatataattgtaataaaaagtgcccaaacaaaatgttttaattgtaaaatacagtagcataaaaatacatatctggaaatatttttgaatatgccatacttctcatgtgaaagctacaaattatttctgtgaggaattaatgatgatttaaataaatgaaagatataccatgtctgtaaatatgaaaatttcatattattactgtgactgttcttcataaattgatatgcagattctagtcagattccttaacaaattcccaagcaattatttaaaaaatatagagaagataattctaaaattga

SEQ ID NO: 244345 - DNA, 592 bp, Homo sapiens
ttactataaaactacagaaagaagagagcatggtattagtgtatggaactaaataaatggaattaagtagagtgttcagaaatagaccttcatatatttaataaactgattttgacaaaaatgccaagtaaatacaatagaggaaaaatattttcacaaacgttgaaataatcgggtatccatataagaaataaaygaaattcacttatccataacccttccagaaattgacataaccaggataataaagcttcagaagaaaacagaagtgtattttcttgaatagaaaataaaaagcacaaattatgaaataaaataataaaatgagtagacaagcagatactggaggaaatatattacaacacatatttgtgaccaaaagcttttatccaatatatgtaataaatggtatgcaaattaatgataaaataattaacaactcaatataaaatgagttgaaggcttgaacactcttgacaaattaatacatgcaaatggcctataaacacgtgcaaagatgttcaacataaacagtcaatatgtaaatctaaactgaatccacaataaaatatcagttcactcccaccagaat

SEQ ID NO: 244346 - DNA, 592 bp, Homo sapiens
ttactataaaactacagaaagaagagagcatggtattagtgtatggaactaaataaatggaattaagtagagtgttcagaaatagaccttcatatatttaataaactgattttgacaaaaatgccaagtaaatacaatagaggaaaaatattttcacaaacgttgaaataatcgggtatccatataagaaataaatgaaattcacttatccataacccttccagaaattgacataaccaggataataaagcttcagaagaaaacagaagtgtattttcttgaatagaaaataaaaagcacaaattatgaaataaaataataaaatgagtagacaagcagatactggaggaaatatattacaacacatatttgtgaccaaaagcttttatccaatatatgtaataaatggtatgcaaattaatgataaaataattaacaactcaatataaaatgagttgaaggcttgaacactcttgacaaattaatacatgcaaatggcctataaacacgtgcaaagatgttcaacataaasagtcaatatgtaaatctaaactgaatccacaataaaatatcagttcactcccaccagaat

SEQ ID NO: 244347 - DNA, 576 bp, Homo sapiens
tagttaccctccaaaaactcaataattattcttttcaactgataactaagagagtggaaacaagaactcctctggttaattgcaaagcaatgtggttttcccaacagggtatcttttctaagtagtactctaccatctgcaacccttakgctataaattctgaagatggatgtaacagcagcttgaaaacaggacttttcaaactgagagatgttaatattctttccagtcttctggtatttgtgtagtaaggctatatcattttatgtataaaatgctttaatccccaggtaattatattttgctcctgatgcttgaaatcataatgaacctgaaacctaagattctgacaaaatcgcatgctattttgctaacaagtagctcggtggttttaaaccttgcctgactattataatcagctggggttaaaaaaagaaaaaaggtcttgccaggaattcatcccagaacaatttaattataaacttaggaagtcatgcaaaggcatcagtaattcttaaaaccttaccagttgattttaatatgcaggcaggatgtggagtcactgataaatactaa

SEQ ID NO: 244348 - DNA, 565 bp, Homo sapiens
acaatttaattataaacttaggaagtcatgcaaaggcatcagtaattcttaaaaccttaccagttgattttaatatgcaggcaggatgtggagtcactgataaatactaaatgttgatgcctatacatatcatcagaggaaataagtggggagcagacaggtgggaataaaagtcgtgttgtcactaaatcctgcactcctggaagcaataatcagatggcagagagctatgattggcagcctagaagaatatgggttataccgagtgacagaaaagatgacagctgcagattgtaatagttgcctgcaacttattgtgcaaactatttttattagtgaatttgttattctacacaaagtgagatttaggacataagaaaggcctaaagtggttttcaggtgcataaaaattacctctcattcaagttataaaatgaggtttggttgaagtkgttctttggtagggctcaagaatctgcatttttaatcaaagttattctgatgcagcttgaccacagtatatgtgtatataagtaatgatctaaaggatgatgatgccctacac

SEQ ID NO: 244349 - DNA, 571 bp, Homo sapiens
gtgaatgatgtaggcattgggatgtagtgttttctactactgactccacatccctgaatctgtgtaaccatcccttacttgcagtaaatggcgtggtgtcactcgtttcaggggatcccttgctaaattctttctataggctcaatgctttctggtgcaacacrttgccataaatcagaacacgtttctgtttatgtcttccacccacacatgcaatgtcttttccatcttaactaagcacttaccaagcactattgctgtaactgttgcagtttgaggtgtgacaggaaaactagcacaaatatctctctcttctacgatttcatggatagaggatttactcttactgtagatcttagaaatctacagcacacaatgattttcccttcacctttcatttaaaggaagcactttgtggcttctctttggcatatcccaattgccagcatcactagtgttgtgctttgaggccattcttaagcaaaataagggttactggagcacaagtacttcagtactgagacagtcaatctgataaccaagatggctcttaactagaagcagggagtgt

SEQ ID NO: 244350 - DNA, 637 bp, Homo sapiens
aactgaaactgcaggaagcaaaatcgtggataagaagggactaccgtgtgtgccattttcccacattttaaagactggcattaaatgattttataaaatatagctatgagttattaaaaaatcaaaaaagtaaaattcaagcaaaatcataactaaaacctaaaatgcctgtgatagttaattttaggtgtcaatttgactagattagggaatacctacagaactgataaagcattacttccatgtgtgtctgaaagtgtttccagatgaagtaggcctgtgagtcagtggactgaaagagtggggaagatctgtcctccatgcaggcaggtaccatttaatcagctgggggcttgggtacaacaaaatagcagagcgaggcgggggggggttcttttctttctctcctgaagctggggcatgctcctcctcctgcccttgtgcattaggccataggactctacagcttcctcagcttccataataatggaagccaatttccctaatacatgctctctctatctatctatctgtcatctatcatctatcccttattggttctttctccctggagaaccctgataacatagtgcytaatatatttattcattagctgaataaaagctgaagaaaggca

SEQ ID NO: 244351 - DNA, 567 bp, Homo sapiens
tgctattctcatgatagtgaataagttctcacaagatctgatggttttataasgtgctttcccctttgctcagctctcatttttccccttcctgctgccattgaagaagaatgtgtttgcttccccttctgccatgattgttaagtttcctggggcttccacaaccctgcagaaatgtgagtcaattaaacttctttcctttatacattacccagtctcagatatgtccttatagcagcatgagaacaaactaatacacttataccttgacaaattctgtcctttccataaaattaatatttcctctgaccctaaagacatattatggtaactttaaaattaatttaaatttaatatttctattgattttatttgcaatatctattatagaaacttacaagatataataaagagaggtaattattactctatggtgccaacttaacatatatattatgagtaagttatgcataattttaattaataattatcattttgttctccattccagatttgtttagattttccatggctcagcttaaaatcatctatcccatgaaactcaac

SEQ ID NO: 244352 - DNA, 521 bp, Homo sapiens
ttttttttttttttggtggacttgagctcagactgagttctggcctttctcccctattgtaatcaacttggaacgtcttccttgtttgtttaatggtctcttgcaatttttgctttgaaactggacacaagttttctagaatgggagggtgtagagagttggatggggcaacggacctaggatgggtagcccagtttcatgcccaggatccctgggggtgatgcaggggggcctaatctggacacagtctgggatgttyctgggacagtggtgcccagaaggctgctgctggtctgaacaccatcgcagtgcctatgtgccgggctatgcagtggtagaggttgtttggagagaggagggggacatggccgccatgcttactactccactctattctggtcgatctttaggagggagtggccaggagccactgtgccatggacactgacagactagggcatggtgctctgttgctttttctctgttctcttgttgtggctgctgtcagggcactctgaagg

SEQ ID NO: 244353 - DNA, 516 bp, Homo sapiens
tttgcaatatctattatagaaacttacaagatataataaagagaggtaattattactctatggtgccaacttaacatatatattatgagtaagttatgcataattttaattaataattatcattttgttctccattccagatttgtttagattttccatggctcagcttaaaatcatctatcccatgaaactcaacctaggtttattttgatgattctgtgataactaattttctcactactataatatttccctgaacttattttatagattcaacataaaacacacactatctactgtaaaaattattttaaaatttaaaaatttatctatctatatctatacatatactccctaaataacttaattttccctttgttctatttttgtaccattctgctttcacattgamctaattaatgcctggtaaagccttttattaatttttaattcaacaaaattttattgattaattatattcaaaacaggtattgaacatgaaatgaaatgagtcta

SEQ ID NO: 244354 - DNA, 561 bp, Homo sapiens
tgaatgtaataaatatagattgcttaataaggttgatggtgaagaatactttcaaaaaataggtaaggattttctggagcattttattctaggccttccaaggtaattaacaaaataataaatgtttccatgctaaagcattagtatgaaaagaatgctatgtttctagakctgggagaaaaaaaatctcttgtaaagagactgtattagtctgttctcacactgctataaaaaactatctgagactgggtaatttatgaagaaaagaggttaactgatttacggttccatggactgtacaggaagcatggctgggaggccttgggaaacttaaatcatggtggacggtgaaggggaagcaagcaccttcttcacgtggtggcaggagagagagacagcatgaggtgggagctgccacaaaattttaaaccatcagatctcatgagaattcactcactatcacgagaacagcaagggggaaaccaccctcatcatctgatcacctcccactaggctcctcctccaacacacacggatggcatgagatttgggtggggacac

SEQ ID NO: 244355 - DNA, 561 bp, Homo sapiens
tgaatgtaataaatatagattgcttaataaggttgatggtgaagaatactttcaaaaaataggtaaggattttctggagcattttattctaggccttccaaggtaattaacaaaataataaatgtttccatgctaaagcattagtatgaaaagaatgctatgtttctagatctgggagaaaaaaaatctcttgtaaagagactgtattagtctgttctcacactgctataaaaaactatctgagactgggtaatttatgaagaaaagaggttaactgatttacggttccatggactgtacaggaagcatggctgggaggcctygggaaacttaaatcatggtggacggtgaaggggaagcaagcaccttcttcacgtggtggcaggagagagagacagcatgaggtgggagctgccacaaaattttaaaccatcagatctcatgagaattcactcactatcacgagaacagcaagggggaaaccaccctcatcatctgatcacctcccactaggctcctcctccaacacacacggatggcatgagatttgggtggggacac

SEQ ID NO: 244356 - DNA, 577 bp, Homo sapiens
ttgatattttcatttgaagttcacttctttagtatatttgtttgtcaggcacctagaagcaccaccaatttgggactatactaaaataaaactttgtgtcctttgaacaatgcaggtagtatgaattcataaactaaattcaggtgcatgtggacattggttagaaattgtatgtatgcttacttcagattatctgctttacttacagataatttgagaaagacatatattcccaycgtattttttttcttttctctacaaagtaatatctcctggggattccagttttatgagggatggaattggagggactttctaatatggcctgaaagtcttggcagtattcaagctctgcctcttatatttcaaggtagacgcctgttagaaaccaggatttatcctaccagatatctccagtggcagttcccctctccttctggagtaaagctttcttaacatttgtgtaattgattttcctgccattttaaccatggaataaaaaaatggaagatatttcatggaggaatattcagtgtattaaactggcaggaggatttcctctgaaaattcagtcagc

SEQ ID NO: 244357 - DNA, 586 bp, Homo sapiens
taccatgaaaaaattgcaagtgtgtgaagctctaattgaactggcttatcaggaatgtattatgcaagtttaattcatgcacagtgacatttagtataatgtatgctttcccatttgttagattgtttatcctctcccaacagtatatcataacaaatttaccaaaaatcattacttgaacagtcttctgttcttgaggactacatttttatttgccattttatattcacaagtgtcttgatgcttgccacagtaatttttcattagaaartgtatttcttacatagcctattaaatacaacagtctgtggtttatttaatgtaattgctagctatatgcagttcttttattttataagcaaccagcatataaccacatgcagttattttaccaatggcaataaaaattgcacttaggatatacatactaaatactatctccattatcttttgattcaaagtcagaagaaaaattaccaaatgtcattgaaatttattttaatacactcaaagtacaaaataagtattagaatgctaatacagatggttttggtggttaaataattaaaagagcaatgttttcagg

SEQ ID NO: 244358 - DNA, 558 bp, Homo sapiens
aatgcttacctgcatattaagtaggatgggcaatgggtggcttaactaaatgaaagggagagtggcgcattggctactggtggaatgaactgtgctaaattaaattgtgggaaagaaaacatttaagatgatgatttcaaataaccaagtaaagtaaattgtgggaaaaaagagtgattcaagcaaaagaataaccttcttttgtttagttcccaataaatttttgtatttttattttgtaacagaaaatgaaaggtgcataaggaattatcaaaaaattcaccaaactgtactcctattctggacccacccactagtaatattggagctactgacctttagaagtcactaayattcatatcaagtgtagacatctggccttctctttttgatttggcctagaatgctaataaggactctgtttaattttaaatgtcttgcacatttattataaggggatttagcaagtacaagacctttatcccccaagactccataagtgatcaggcatctccagggataatccaggctgaacctgtgaaatgtgctcaacctgta

SEQ ID NO: 244359 - DNA, 549 bp, Homo sapiens
gggcataagcgagaaaaagagatggagggaagtttcagagcagaagtggaagtttattaaaaagctttagagcagaaaagaaaggaaagtgcgtttggaagagacctaaataggcaaccggaagaacaagtgcaatgtttaaccttgatccttggactcgataggctggcccacctccacagtcctgtgtccctttcccatgatccttcctttagggttgactgcccacctgtgcagtgccctggttacccttgggaagtgagcacacgcagkgtgtttaggaagttgaacgcatgcccatctgaggttttcttcccttttccagtgatgtgccctagtaggtcatcctctgccatttcatctcttaatgcacatgctcgggaggttgtatctccctggcatctgcatttaatcaacactttagttcaacagttgtggaccatgaggaaatggcttctcccagcactggctgtgagtttgtcacttctagagaggcaatgtagtaattgccagaccatcacctgacattcctagtgggtgggggaagag

SEQ ID NO: 244360 - DNA, 549 bp, Homo sapiens
gggcataagcgagaaaaagagatggagggaagtttcagagcagaagtggaagtttattaaaaagctttagagcagaaaagaaaggaaagtgcgtttggaagagacctaaataggcaaccggaagaacaagtgcaatgtttaaccttgatccttggactcgataggctggcccacctccacagtcctgtgtccctttcccatgatccttcctttagggttgactgcccacctgtgcagtgccctggttacccttgggaagtgagcacacgcagggtgtttaggaagttgaacgcatgcccatctgaggttttcttcccttttccagtgatgtgccctagtaggtcatcctctgccatttcatctcttaatgcacatgctcgggaggttgtatctccctggcatctgcatttaatcaacactttagttcaacagttgtggaccatgaggaaatggcttctcccagcactggctgtgagtttrtcacttctagagaggcaatgtagtaattgccagaccatcacctgacattcctagtgggtgggggaagag

SEQ ID NO: 244361 - DNA, 641 bp, Homo sapiens
gacaaatttaaagtgacttatgaatatgtataataatgcaagagaccaaagagtgccaaagtaattttgaaaaagaagaccaacatgggagccttacattacttgagtttaagaatcactacaaataaacaataataaagatattgtaatattgtcataagaataaagaatatcaatgtaacagaaaagatagctaagaaayagcatcacctttatgcagtcatttgaaatctgaaaaatgctgtagagcaacctaatgaggaaagccaagtgctttcagcaaatgattttggaatagctagtatccccatagtgaaaagataaactttgatacgtacttcataccaaacagaaatgttaactttagatcatgcatctaaatattaattacaaccacagtattaagaggtaaacataaaaatactttcagacttaggtgtatgcaaagaaagatttctcaaactggacagaggaaaaaccagagataaaagtttagacttgaaccaatttaagcacttctactcaccaaaagacattggattagtcagaggtttccaggaaacaaaatcaataggatatctacatatcaaatacacagaggcacacatatatatgtgggggaaagagagatttattacaag

SEQ ID NO: 244362 - DNA, 554 bp, Homo sapiens
cttagtctggtatttatgcatggatatgaattttactagctrctaacaacttatactatagcaagggtagtatttgagaggtctcacttgtccaaattcttgccaacacttgatattgcaagactatagtttagtacaaatttgacatttatgaattaaaatcttatttttagtttaatatatatttatttgaatatatattaatagtatgttaatagatattttatatgtttgcaatatttttaatgaaaaatcagaattctgtatggtgcattgatgaagcgattttgttctttactcccaaatgcttgtaaaacatccaagtatggttcctttttccctatccctggataaacataaaacaatgccttgacctagggcaagtcccttaacttttatataataattgtacctttgtctcttctagtttcaaaaaactcttatttcggctgggcattatggctcacacctataattccagcactttggtaggccgaggtgagcggatcacccgagttcaggagtttgagaccagcctagccaacatggctaaa

SEQ ID NO: 244363 - DNA, 589 bp, Homo sapiens
tgcaataagcatgggaaaacagacatctcttcaacatgctgatttcagatctttggggtagatactcagaagtgggattgctggatcatagagtaattttattttcagttttttgagaaacctctktaaagtttttgtaatgactgttctaatttacattcccaggaaagtgtgtgcaagcgttccctttttgccccatcctcttcagcacttatcttttgtgttttttatagtagccaaacaagtgtgatataatagctcattgtgattttacttggcattttcttaatgatctgtggcattgaggattttttttcatatacctgtggccatttgtatgttttcttttaagaaatattgattcatgtcccttacccagttttagctgaattatttgtttcatttgtatagagtagtttaagttacatatatatacactttggatattaaccccttatcagtaggatggcttgaaaatattttctcccaatctgtagtttgtctgtttattaattgctttatttgtttttgtagaagctttttaaaaactgtaatcccatttgtctatttttgcttttgtttcctgaac

SEQ ID NO: 244364 - DNA, 589 bp, Homo sapiens
tgcaataagcatgggaaaacagacatctcttcaacatgctgatttcagatctttggggtagatactcagaagtgggattgctggatcatagagtaattttattttcagttttttgagaaacctctttaaagtttttgtaatgactgttctaatttacattcccaggaaagtgtgtgcaagcgttccctttttkccccatcctcttcagcacttatcttttgtgttttttatagtagccaaacaagtgtgatataatagctcattgtgattttacttggcattttcttaatgatctgtggcattgaggattttttttcatatacctgtggccatttgtatgttttcttttaagaaatattgattcatgtcccttacccagttttagctgaattatttgtttcatttgtatagagtagtttaagttacatatatatacactttggatattaaccccttatcagtaggatggcttgaaaatattttctcccaatctgtagtttgtctgtttattaattgctttatttgtttttgtagaagctttttaaaaactgtaatcccatttgtctatttttgcttttgtttcctgaac

SEQ ID NO: 244365 - DNA, 589 bp, Homo sapiens
tgcaataagcatgggaaaacagacatctcttcaacatgctgatttcagatctttggggtagatactcagaagtgggattgctggatcatagagtaattttattttcagttttttgagaaacctctttaaagtttttgtaatgactgttctaatttacattcccaggaaagtgtgtgcaagcgttccctttttgccccatcctcttcagcacttatcttttgtgttttttatagtagccaaacaagtgtgatataatagctcattgtgattttacttggcattttcttaatgatctgtggcattgaggattttttttcatatacctgtggccatttgtatgttttcttttaagaaatattgattcatgtcccttacccagttttagctgaattatttgtttcatttgtatagagtagtttaagttacatatatatacactttggatattaaccccttatcagwaggatggcttgaaaatattttctcccaatctgtagtttgtctgtttattaattgctttatttgtttttgtagaagctttttaaaaactgtaatcccatttgtctatttttgcttttgtttcctgaac

SEQ ID NO: 244366 - DNA, 461 bp, Homo sapiens
atcttacattccttcactttcagtcaatgtgtgtctttaaaaggaaggtgaatctcttgtatgaagcacatagtaagaccctgcattttaaaaaatccattcagttattctacaactttttattggaaaacttcattaatttaaatttaaaataattattgatwggtaaggacttactactgtcaatttgttaattgttttctggtgcttttgcaaatttttaagttatttcttcttctcttgctgtctttatttgtgttttgatgtttttcttaaaagtggtatcttttaatcttttctatttctacttttggtgaatgtgtctactatagaactttgtggttaccataagacttacatgaaatttcttatacttatgacagtctattttaagttgataaaaacttagctttgattacatatcactctacacttttatccgccacacacattttgttttt

SEQ ID NO: 244367 - DNA, 611 bp, Homo sapiens
agtaatatacaaatatataatttctttttttattaaatygtttgtggtttaattcataataaatctagaacatatgggtagaatttaaagttagctagctgaatgctctgagaagtaattgtcagaatcctactagtgttaattaaaacactacagctaatgtatcatacatcaaaattagattagacttcatggtataaaattctggcaagagataaacataaggtgtttcttaaaaatttgagataatatttgtgagagattatacctgaggggaaaatgatatctatatggtgaataataaaattatttactacctgaattcttgaaagctgaatgccaggaaaatgcctccaacctctggtaaatttaggtttacaatcatcagaatagcatgtgaaaaaaaaaatttgattcaaggctgcatataatcagtaattagtttttatatgtaaacacagcactttaaattcacaaaactaattagccacactatgattcaataatatttttgtgtttattaagcccataggattctctttttattggaaatgaatagctattaaaatagtgcctagtcaatggttactactttcagaataaattctatg

SEQ ID NO: 244368 - DNA, 611 bp, Homo sapiens
agtaatatacaaatatataatttctttttttattaaattgtttgtggtttaattcrtaataaatctagaacatatgggtagaatttaaagttagctagctgaatgctctgagaagtaattgtcagaatcctactagtgttaattaaaacactacagctaatgtatcatacatcaaaattagattagacttcatggtataaaattctggcaagagataaacataaggtgtttcttaaaaatttgagataatatttgtgagagattatacctgaggggaaaatgatatctatatggtgaataataaaattatttactacctgaattcttgaaagctgaatgccaggaaaatgcctccaacctctggtaaatttaggtttacaatcatcagaatagcatgtgaaaaaaaaaatttgattcaaggctgcatataatcagtaattagtttttatatgtaaacacagcactttaaattcacaaaactaattagccacactatgattcaataatatttttgtgtttattaagcccataggattctctttttattggaaatgaatagctattaaaatagtgcctagtcaatggttactactttcagaataaattctatg

SEQ ID NO: 244369 - DNA, 611 bp, Homo sapiens
agtaatatacaaatatataatttctttttttattaaattgtttgtggtttaattcataataaatctagaacatatgggtagaatttaaasttagctagctgaatgctctgagaagtaattgtcagaatcctactagtgttaattaaaacactacagctaatgtatcatacatcaaaattagattagacttcatggtataaaattctggcaagagataaacataaggtgtttcttaaaaatttgagataatatttgtgagagattatacctgaggggaaaatgatatctatatggtgaataataaaattatttactacctgaattcttgaaagctgaatgccaggaaaatgcctccaacctctggtaaatttaggtttacaatcatcagaatagcatgtgaaaaaaaaaatttgattcaaggctgcatataatcagtaattagtttttatatgtaaacacagcactttaaattcacaaaactaattagccacactatgattcaataatatttttgtgtttattaagcccataggattctctttttattggaaatgaatagctattaaaatagtgcctagtcaatggttactactttcagaataaattctatg

SEQ ID NO: 244370 - DNA, 611 bp, Homo sapiens
agtaatatacaaatatataatttctttttttattaaattgtttgtggtttaattcataataaatctagaacatatgggtagaatttaaagttagctagctgaatgctctgagaagtaattgtcagaatcctactagtgttaattaaaacactacagctaatgtatcatacatcaaaattagattagacttcatggtataaaattctggcaagagataaacataaggtgtttcttaaaaatttgagataatatttgtgagagattatacctgaggggaaaatgatatctatatggtgaataataaaattatttactacctgaattcttgaaagctgaatgccaggaaaatgcctccaacctctggtaaatttaggtttacaatcatcagaatagcatgtgaaaaaaaaaatttgattcaaggctgcatataatcagtaattagtttttayatgtaaacacagcactttaaattcacaaaactaattagccacactatgattcaataatatttttgtgtttattaagcccataggattctctttttattggaaatgaatagctattaaaatagtgcctagtcaatggttactactttcagaataaattctatg

SEQ ID NO: 244371 - DNA, 202 bp, Homo sapiens
gatgcccagacacaacacctgtctgtttggactgagtttcttcatagcatggtggcctcaggatagccaaactttttacagccaaactttttacatgaagcttcaggactccaaaagaatgttccagcaatcaaggtagaacacttcaatgattacagtccagctgccaggtgacttcaacyacatgagacatctccaagca

SEQ ID NO: 244372 - DNA, 603 bp, Homo sapiens
gtgtaaacacagcactttaaattcacaaaactacttagccatgctatkattcaataatatttatgtgtttattaagcccataggattctctctctctctcttttttttttttgagacagggtcttgttctgtcacccaggctggagtgcagtgcaacttccacctcccaattcaagtgatcctcccacctcagcctcccaactaactgggaccacaggtgcatgccaccatgcccagttaatttttgtactttttactagagaaaggattttcctatgttggccaggctggactcgagctcctgagctccagtgatctgcctgcctcagcgtcccaaagtgttgggattacaggcgtgagccactatgctaggctttgccaagataatttaattaaaatatctgaattaggacattggaaacggaggtggcaagaagttgagatacataggtttggttcaatgtagttaggtaactgggtactggtgcataatatcagtttccacataaggaaaagcataagaacaactgagttaaagaataataatctaaagatagaaatattatttttggaaaaattgaaaggaatgcacatttattaagc

SEQ ID NO: 244373 - DNA, 603 bp, Homo sapiens
gtgtaaacacagcactttaaattcacaaaactacttagccatgctattattcaataatatttatgtgtttattaagcccataggattctctctctctctcttttttttttttgwgacagggtcttgttctgtcacccaggctggagtgcagtgcaacttccacctcccaattcaagtgatcctcccacctcagcctcccaactaactgggaccacaggtgcatgccaccatgcccagttaatttttgtactttttactagagaaaggattttcctatgttggccaggctggactcgagctcctgagctccagtgatctgcctgcctcagcgtcccaaagtgttgggattacaggcgtgagccactatgctaggctttgccaagataatttaattaaaatatctgaattaggacattggaaacggaggtggcaagaagttgagatacataggtttggttcaatgtagttaggtaactgggtactggtgcataatatcagtttccacataaggaaaagcataagaacaactgagttaaagaataataatctaaagatagaaatattatttttggaaaaattgaaaggaatgcacatttattaagc

SEQ ID NO: 244374 - DNA, 578 bp, Homo sapiens
gtctagtaacacagtgtgagatgatttatcattgctatttgttagctatgagtttacttaacttacagtaagactatcctaagttgccataggygatctgcaaattcttactaatgtcaggctacagaaacacacacacacaacacacacgatagcaatggtaaagtgagccaattgccaaagctcttatctctctcctctaatcttaaagtagtggattgtagccatttccatgcccattcttagtgtggacataattgaaaacttctgtgatggaagcaggtcaaaacaaagcaaaataaaaaccatgctaaaaaaaataggaaggggaagaagaagaagaaggaggaggaggaggaggggaaggggaagaagaggaagaaggaggaggaggaggaggaggaggcgaatgcctctaggaccagggcctggctgttgtccaacaccaattttttggggggaatattaagggataaagccctgaatcacagctgtcttggaagaagctcaagtgtgcacattgactgccccacttcttcatattaggcacccttccccacccctgcccattagaacaa

SEQ ID NO: 244375 - DNA, 578 bp, Homo sapiens
gtctagtaacacagtgtgagatgatttatcattgctatttgttagctatgagtttacttaacttacagtaagactatcctaagttgccataggcgatctgcaaattcttactaatgtcaggctacagaaacacacacacacaacacacacratagcaatggtaaagtgagccaattgccaaagctcttatctctctcctctaatcttaaagtagtggattgtagccatttccatgcccattcttagtgtggacataattgaaaacttctgtgatggaagcaggtcaaaacaaagcaaaataaaaaccatgctaaaaaaaataggaaggggaagaagaagaagaaggaggaggaggaggaggggaaggggaagaagaggaagaaggaggaggaggaggaggaggaggcgaatgcctctaggaccagggcctggctgttgtccaacaccaattttttggggggaatattaagggataaagccctgaatcacagctgtcttggaagaagctcaagtgtgcacattgactgccccacttcttcatattaggcacccttccccacccctgcccattagaacaa

SEQ ID NO: 244376 - DNA, 421 bp, Homo sapiens
gaagctcatctacttcagcctcagacctcagggctcaggagggaaaaaactgtcttcttgtatttttttaaatggctcagccagaggtgaggatggggagctgggtccttgcccagagtcaaaatctgcattacaaatgcctctcaaaccttcccagggaggaagggatgctctcgataaagtctgttctcccagctgagctgagaaagactgtagtctcctttgtctctgccaggaagctgcaggctcccaaatttcagctgttggatcagcatttggccactggttttaaggcatctgacagctgatcactcctgtccatcactctgggtggatamttaagagatcaggtgagaaaggaaaggagaatgttccttgaggtccattgaaaagcagacttaggttcaaatgtcagcttcac

SEQ ID NO: 244377 - DNA, 565 bp, Homo sapiens
actatgtaaaagccttttttcccaggataatagacctttgttatgaaggcgtacttcacaatgattaatcttccccttccacttccaaagccacactgtgatttttcttgaatcttcaycgtccgaacttaatagggattgggaaggtaaaatgatgaaagtgaggaatgccctgaagaacgtggcccctgggagttactcacactaatacacactcagcctttaacaattcatcaaagttgtcatttacatatttttactagttcatagctgcagaggatactgcttcaggtaaacacatcttgactgtggctctctggatttacctgtctccccagataccagagaggaagttgtcctgcaacctacattctctggtgtatctaagaaaatttacaaatgtttggtttgttgaccattttctaggagtagaaagaaatgacttcaacataataaaatccatatgtgaaaaacacacagggaatattagactcaatgtgaaagtctaaaaaatttacctccaacatcaggatcaaggcaagcatacccacttttgccatttcta

SEQ ID NO: 244378 - DNA, 544 bp, Homo sapiens
tacaattggacagtaagcacatgaaaatatgttcaaccttactaatcattaggaaaatgraaatcaaaactacagtgagatattatttaataccctttagagtgactatcaaaaacacagataacaataagtattggcaaggatgtggagaaactgaaacccttgttcactgttggtgggaatgtaaaatgatacagctgctgtagaaaacagtatggaagttctccaaaatattaaaaatataattaccatatgatccagccattctgctccagaatatatccccaaaaattgaaatcagggtctcaaagagatattcatacacccatatttatagcagcattattcacaatagttaaaatctgaaagtaacccaagtatccatcaacagataagcaaaatgtggtatctacatactatgggatattgtttaactttaaaaaggaagaaaatccagacatatgctacaacatggatgaatcttgaggacattatgctatgtaaaattagtcacaaaaagtaagtatgattccacttatatgag

SEQ ID NO: 244379 - DNA, 588 bp, Homo sapiens
agaattaaatagttacaggaatattaaaagttattaaataatccaaaaaatattaagtagaataaaagaaataaaacgggaaactctaatccaactatacccatcattatattaaatattaatggattacacatgtagaataaaggaagagattatcagagcatatttttaattataaagaaaattattgtcaacaagaaatacaccttaaaattaaaggcatatacaggttggaaataaatgaaagaaaaaacatactatgtaaaccttaagcttcagatagatacagatgctatgcygagataagataaaatgaatgtcttttcaactacacatgatacaggtttcagaaatcaatctatgtaaatgtataacgactaaaattacacaaaatatgttttaaaattccactgaaatgtagttagatattaataaaaaacataaatatcagagcccagctaattggaaatgaaacaaaacacttctgtgtaatacatgagtcaaagaaaaaatcaaaatgataaattactattaattgaatgataataaaaataaacatatgataatttccagaatgcagctagaaca

SEQ ID NO: 244380 - DNA, 588 bp, Homo sapiens
agaattaaatagttacaggaatattaaaagttattaaataatccaaaaaatattaagtagaataaaagaaataaaacgggaaactctaatccaactatacccatcattatattaaatattaatggattacacatgtagaataaaggaagagattatcagagcatatttttaattataaagaaaattattgtcaacaagaaatacaccttaaaattaaaggcatatacaggttggaaataaatgaaagaaaaaacatactatgtaaaccttaagcttcagatagatacagatgctatgctgagataagataaaatgaatgtcttttcaactacacatgatacaggtttcagaaatcaatctatgtaaatgtataasgactaaaattacacaaaatatgttttaaaattccactgaaatgtagttagatattaataaaaaacataaatatcagagcccagctaattggaaatgaaacaaaacacttctgtgtaatacatgagtcaaagaaaaaatcaaaatgataaattactattaattgaatgataataaaaataaacatatgataatttccagaatgcagctagaaca

SEQ ID NO: 244381 - DNA, 395 bp, Homo sapiens
tactttttatttcccctggaaattaaattgggactaatatctaaaattcaataaatatctatcataatgataataaaaaacaatatgatcatatcaakagatatagaaaattatttgattaaatacaatacctttatattacataaactaccaataactaagaatgtaagtgtgcttctatagtttggtgggtttttaaaatttatcatgccaggaattccagtcctaggtgactatctgagagaagtaaaaataaatacatgcacacaaaatttttagtagcattattcataaaaatcagtgagtagaaacaactgaaatcaacatgtgaataattctatcaacatgtgaataattctaaaatgtagtttcaccatacaatgaaatactactta

SEQ ID NO: 244382 - DNA, 296 bp, Homo sapiens
gtgacagggaacccttgagaccctagagcagcaatgcctgggccrggcctgatccttcccaccagcccccagccattcctggccttctgccatgcttcctggttggtctgcaaagtgcctggggcaaataccttctgggagaagagtagagagggtatccaggctccatgggcctcaggattcctgaagtaggaggctctgatggggccaccctgctctggacagaaattccctagcctcagggacatgttgaatcttgtcacccagaggaaccaagtggctgggtggtagcccag

SEQ ID NO: 244383 - DNA, 296 bp, Homo sapiens
gtgacagggaacccttgagaccctagagcagcaatgcctgggccgggcctgatccttcccaccagcccccagccattcctggccttctgccatgcttcctggttggtctgcaaagtgcctggggcaaataccttctgggagaagagtagagagggtayccaggctccatgggcctcaggattcctgaagtaggaggctctgatggggccaccctgctctggacagaaattccctagcctcagggacatgttgaatcttgtcacccagaggaaccaagtggctgggtggtagcccag

SEQ ID NO: 244384 - DNA, 296 bp, Homo sapiens
gtgacagggaacccttgagaccctagagcagcaatgcctgggccgggcctgatccttcccaccagcccccagccattcctggccttctgccatgcttcctggttggtctgcaaagtgcctggggcaaataccttctgggagaagagtagagagggtatccaggctccatgggcctcaggattcctgaagtrggaggctctgatggggccaccctgctctggacagaaattccctagcctcagggacatgttgaatcttgtcacccagaggaaccaagtggctgggtggtagcccag

SEQ ID NO: 244385 - DNA, 296 bp, Homo sapiens
gtgacagggaacccttgagaccctagagcagcaatgcctgggccgggcctgatccttcccaccagcccccagccattcctggccttctgccatgcttcctggttggtctgcaaagtgcctggggcaaataccttctgggagaagagtagagagggtatccaggctccatgggcctcaggattcctgaagtaggaggctctgatggggccaccctgctctgracagaaattccctagcctcagggacatgttgaatcttgtcacccagaggaaccaagtggctgggtggtagcccag

SEQ ID NO: 244386 - DNA, 365 bp, Homo sapiens
gtgaatggatgaaggaacgaacgaatgaatgaatgaaaaacaggtgtggggacgaggccgtggaaaaaacaaacgcccccatmcccccatccctcggttgggccggccccgtcgccacggcggggggagggattccgctgagcgcggttacccagagcagaaaatcataaaatcattagtgggtgtttatctcaaggtgcctacgaggcttgctgcggacggcctggaattgcgggggggaaacggggggtgggcgagggccagggaggggctgcagaggacgtgattctttctccttggggtcctggaaagggggtggggggggtgttttgcccaaccgtagaaggggaggagcaggcatgttt

SEQ ID NO: 244387 - DNA, 378 bp, Homo sapiens
cagtgacggatccgtgaatggatgaaggaacgaacgaatgaatgaatgaaaaacaggtgtggggacgaggccgtggaaaaaacaaacgcccccatccccccatccctcggttgggccggccccgtcgccacggcgkggggagggattccgctgagcgcggttacccagagcagaaaatcataaaatcattagtgggtgtttatctcaaggtgcctacgaggcttgctgcggacggcctggaattgcgggggggaaacggggggtgggcgagggccagggaggggctgcagaggacgtgattctttctccttggggtcctggaaagggggtggggggggtgttttgcccaaccgtagaaggggaggagcaggcatgttt

SEQ ID NO: 244388 - DNA, 365 bp, Homo sapiens
gtgaatggatgaaggaacgaacgaatgaatgaatgaaaaacaggtgtggggacgaggccgtggaaaaaacaaacgcccccatccccccatccctcggttgggccggccccgtcgccacggcggggggagggattccgctgagcgcggttacccagagcagaaaatcataaaatcattagtgggtgtttatctcaaggtgcctacgaggcttgctgcggacggcctggaattgcgggggggaaacggggggtrggcgagggccagggaggggctgcagaggacgtgattctttctccttggggtcctggaaagggggtggggggggtgttttgcccaaccgtagaaggggaggagcaggcatgttt

SEQ ID NO: 244389 - DNA, 378 bp, Homo sapiens
cagtgacggatccgtgaatggatgaaggaacgaacgaatgaatgaatgaaaaacaggtgtggggacgaggccgtggaaaaaacaaacgcccccatccccccatccctcggttgggccggccccgtcgccacggcggggggagggattccgctgagcgcggttacccagagcagaaaatcataaaatcattagtgggtgtttatctcaaggtgcctacgaggcttgctgcggacggcctggaattgcgggggggaaacggggggtgggcgagggccagggaggggctrcagaggacgtgattctttctccttggggtcctggaaagggggtggggggggtgttttgcccaaccgtagaaggggaggagcaggcatgttt

SEQ ID NO: 244390 - DNA, 645 bp, Homo sapiens
cttcccattttactctgtcctgtgtcctgactgaagcgacaaggtgtgtctgcagctgtgctcacacctggaggaaacctcaatggtgtgagtaaattgtaaatgtttacttattatgggttattttattatttatgragtatgtattttgatttcattctactgacaacacaataaaccaggacatgatgaccctagcagcacatcctctttcctgtgtcaagaagcatcgtccggggaggtgagaagaagacagtcctccctagaattgaagaaccagggagaaccagatgggctgggcaggtgggttttcacctggaacctggaggatgagcaatgacatctctccaccctgagctcagccccggcatccacctcctgggctcatgagcagtgcagtggtgcctcctagtggtctctgctcttccttttccagatcaagcacaaacctgagatccaactgtccctcttatgcgcctgggtttcttcactggacaccagtatgagtcaactttcctgtaaagcagaacaagcacgagattggaccatgttagaggaggaatggtgtcatctccacttctggagagatcactgtccccgtgtttgggggaaggaccaagcctcactcccatgcagagaagaagc

SEQ ID NO: 244391 - DNA, 645 bp, Homo sapiens
cttcccattttactctgtcctgtgtcctgactgaagcgacaaggtgtgtctgcagctgtgctcacacctggaggaaacctcaatggtgtgagtaaattgtaaatgtttacttattatgggttattttattatttatgaagtatgtattttgatttcattctactgacaacacaataaaccaggacatgatgaccctagcagcacatcctctttcctgtgtcaagaagcatcgtccggggaggtgagaagaagacagtcctccctagaattgaagaaccagggagaascagatgggctgggcaggtgggttttcacctggaacctggaggatgagcaatgacatctctccaccctgagctcagccccggcatccacctcctgggctcatgagcagtgcagtggtgcctcctagtggtctctgctcttccttttccagatcaagcacaaacctgagatccaactgtccctcttatgcgcctgggtttcttcactggacaccagtatgagtcaactttcctgtaaagcagaacaagcacgagattggaccatgttagaggaggaatggtgtcatctccacttctggagagatcactgtccccgtgtttgggggaaggaccaagcctcactcccatgcagagaagaagc

SEQ ID NO: 244392 - DNA, 645 bp, Homo sapiens
cttcccattttactctgtcctgtgtcctgactgaagcgacaaggtgtgtctgcagctgtgctcacacctggaggaaacctcaatggtgtgagtaaattgtaaatgtttacttattatgggttattttattatttatgaagtatgtattttgatttcattctactgacaacacaataaaccaggacatgatgaccctagcagcacatcctctttcctgtgtcaagaagcatcgtccggggaggtgagaagaagacagtcctccctagaattgaagaaccagggagaaccagatgggctgggcaggtgggttttcacctggaacctggaggatgagcaatgacatctctccaccctgagctcagcccsggcatccacctcctgggctcatgagcagtgcagtggtgcctcctagtggtctctgctcttccttttccagatcaagcacaaacctgagatccaactgtccctcttatgcgcctgggtttcttcactggacaccagtatgagtcaactttcctgtaaagcagaacaagcacgagattggaccatgttagaggaggaatggtgtcatctccacttctggagagatcactgtccccgtgtttgggggaaggaccaagcctcactcccatgcagagaagaagc

SEQ ID NO: 244393 - DNA, 645 bp, Homo sapiens
cttcccattttactctgtcctgtgtcctgactgaagcgacaaggtgtgtctgcagctgtgctcacacctggaggaaacctcaatggtgtgagtaaattgtaaatgtttacttattatgggttattttattatttatgaagtatgtattttgatttcattctactgacaacacaataaaccaggacatgatgaccctagcagcacatcctctttcctgtgtcaagaagcatcgtccggggaggtgagaagaagacagtcctccctagaattgaagaaccagggagaaccagatgggctgggcaggtgggttttcacctggaacctggaggatgagcaatgacatctctccaccctgagctcagccccggcatccacctcctgggctcatgagcagtgcagtggtgcctcctagtggtctctgctcttccttttccagatcaagcacaaacctgagatccaactgtccctcttatgcgcctgggtttcttcactggacaccagtatgagtcaactttcctgtaaagcagaacaagcacgagattggaccatgttagaggaggaatggtgtcatctccacttctggagagatcactgtccccgtgttygggggaaggaccaagcctcactcccatgcagagaagaagc

SEQ ID NO: 244394 - DNA, 568 bp, Homo sapiens
caatgcctacttgaattaaaaaaaataaaatacacagaagaaataccacctaggtctcccctcaaaaatatcactgctattgtattgttgaaccttcctggactcagtgtgactgttggtccctggagctgtcctttgcgtggtgctgatttccattttgttggtggtggtttgtttttgttttcgtttttgtttctgaaacacaatttcactttgtcactgaggctggagtgcagtggtgcgacctcagctcactgcaacctccgcctctcgggttcaagtgatttccatgcctcagcctcctgagtagctgagattacacrcatgcgccaccaggcccagcaaattttttgtatttttagtagagacagggttttgccatattggccagtctggtctcgaactcccgacctcaagtgatccacctgcctcagcttctcaaagtgctgggattacaggaatgagccaaggcgcctggcccattttgttgttctctatgtatatatttttataggtatctttattgtacaaggttgcattcatatgtcatgggttatcttgaatgttg

SEQ ID NO: 244395 - DNA, 568 bp, Homo sapiens
caatgcctacttgaattaaaaaaaataaaatacacagaagaaataccacctaggtctcccctcaaaaatatcactgctattgtattgttgaaccttcctggactcagtgtgactgttggtccctggagctgtcctttgcgtggtgctgatttccattttgttggtggtggtttgtttttgttttcgtttttgtttctgaaacacaatttcactttgtcactgaggctggagtgcagtggtgcgacctcagctcactgcaacctccgcctctcgggttcaagtgatttccatgcctcagcctcctgagtagctgagattacacgcatgcgccaccaggcccagmaaattttttgtatttttagtagagacagggttttgccatattggccagtctggtctcgaactcccgacctcaagtgatccacctgcctcagcttctcaaagtgctgggattacaggaatgagccaaggcgcctggcccattttgttgttctctatgtatatatttttataggtatctttattgtacaaggttgcattcatatgtcatgggttatcttgaatgttg

SEQ ID NO: 244396 - DNA, 568 bp, Homo sapiens
caatgcctacttgaattaaaaaaaataaaatacacagaagaaataccacctaggtctcccctcaaaaatatcactgctattgtattgttgaaccttcctggactcagtgtgactgttggtccctggagctgtcctttgcgtggtgctgatttccattttgttggtggtggtttgtttttgttttcgtttttgtttctgaaacacaatttcactttgtcactgaggctggagtgcagtggtgcgacctcagctcactgcaacctccgcctctcgggttcaagtgatttccatgcctcagcctcctgagtagctgagattacacgcatgcgccaccaggcccagcaaattttttgtatttttagtagagacagggttttgccatattggccagtctggtctcgaactcccgacctcaagtgatccacctgcctcagcttctcaaagtgctgggattacaggaatgagccaaggcgcctggcccattttgttgttctctatgtatatatttttataggtatctttattgtacaaggttgcattcatatgtyatgggttatcttgaatgttg

SEQ ID NO: 244397 - DNA, 551 bp, Homo sapiens
cttctcttactgccaagtatatcagtcctaatcgtatagccagtgactgtgggaacgactattggatgtgcctacagtactgggtgacgtactgtaagctaaactttaacatgactccattcgtaatctggcttctgtatgctcattgtaacakttgggccatggtgatgctttggctcttggagtatcggtgtcaactcagacaactgtacttgaaatatttgggtattccccctttcccagtgtgcagtaatttgcataaataatgttagctccctctcgggaaaaactataggtgtctttccagtaaatgcttaccacaatgttgaagttcacttctttctggaggacatgactaaatgttcaggtaataagttatgcacctaaatattagcttgcgtctgtgaactgagcaggaaattaggccattttattagagagaccaccctcagtgtcctgttcctctactcttgccttcttttgattgtagtttttaagcagcaacctcatcagctgtcctgtaatttcgtctttagggacacatgttatat

SEQ ID NO: 244398 - DNA, 551 bp, Homo sapiens
cttctcttactgccaagtatatcagtcctaatcgtatagccagtgactgtgggaacgactattggatgtgcctacagtactgggtgacgtactgtaagctaaactttaacatgactccattcgtaatctggcttctgtatgctcattgtaacatttgggccatggtgatgctttggctcttggagtatcrgtgtcaactcagacaactgtacttgaaatatttgggtattccccctttcccagtgtgcagtaatttgcataaataatgttagctccctctcgggaaaaactataggtgtctttccagtaaatgcttaccacaatgttgaagttcacttctttctggaggacatgactaaatgttcaggtaataagttatgcacctaaatattagcttgcgtctgtgaactgagcaggaaattaggccattttattagagagaccaccctcagtgtcctgttcctctactcttgccttcttttgattgtagtttttaagcagcaacctcatcagctgtcctgtaatttcgtctttagggacacatgttatat

SEQ ID NO: 244399 - DNA, 642 bp, Homo sapiens
tgccaactactagcttccagtggttcaatgctaccatatatttttattgctgtaggccccttttctccagcaattcaaactctgtgattacttctgtaaccattatccctggtctacaaagagtcaccactgaatttcttagtaattccagaacgcctctgccagagcattctgaattgtgaatggtgtgtctcctctgagtactcttgtggaacataatattctggtggcttttctgacctacatatagtatattcttccaatacccccactttcctgagtctctttattcctttccataccatctgtcagggcaactcagtaattttaactttgatcatcatgggccaatgccttccctgtgcttgtaagagccacactagcagcacatttacttaagccccagattccgtgtctaagaaytcaatgtcccctagttaatatattctcatttatccagtttagtgttctagtcccttgatcatgcacactcaaaattcaatcccatggtactcctgctggcacattgtaactactatttgcactcctgtcagtttaatctcttttctattttaacatctctagcacaaccctaattaatttatggggatttaactctaattgttggcctggcggtcaaga

SEQ ID NO: 244400 - DNA, 397 bp, Homo sapiens
gttctattggcttgtatgtctgtctttatctcagtactatactattttaattaaatggaaggcattcaaattgaatataaaattaacatacaaaatcaattgcattcctatacattaacaatctagcttttctgagctatcagaaaaggaagaaccaaaacaatttcatttaaaatagcataaaaaagaataaaatgcttagcaataaacttaaccaaggaagtgaatgacttgtacactggmaactgtaaaaacattgatgaaaggaattgaagaagactcaaataaatagaaacataacctatgttcagggcttagaagaattaaaattgtaaaatgtccacactaccataacttgtctatgaattcaatgcaatcactatcaaaatcccaaaag

SEQ ID NO: 244401 - DNA, 539 bp, Homo sapiens
ccacaaaacagccactaccacycctatctgagcattccatctgtggcctggggatccccctgcccctgcctaccatagccagtgcctcatacaccaccaaggagcccatgggaaggtctactcagcctggcttcacccacccacagaatctgagcacaccgtacaggggcccgagggtcacttagcccagtccatcactggtagctcctcagcacccctcctgggatctgaggtcagccccactcaaccttcccctggcaccacagctgacatccacactcatgtgcctcctgtggatctgggaactgacctgcccaacctgtcacagccattgccaatatcagcatggactacacgggtcccagagggctgtcccaccactgctactgccatcacccacaccacatccactgccaaagggctcaagaattcaacttcatacctgaactactgatgccattcccagaagccaagcaagccacttggaagcacaagaactgtcttgcctaaacccgctaacattggtgccagtgtatgct

SEQ ID NO: 244402 - DNA, 613 bp, Homo sapiens
cccagtcctccccagtccatgaccacaaaacagccactaccactcctatctgagcattccatctgtggcctggggatccccctgcccctgcctaccatagccagtgcctcatacaccaccaaggagcccatgggaaggtctactcagcctggcttcacccacccacagaatctgagcacaccgtacaggggcccgagggtcacttagcccagtccatcactggtagctcctcagcacccctcctgggatctgaggtcagccccactcaaccttcccctggcaccacagctgacatccacastcatgtgcctcctgtggatctgggaactgacctgcccaacctgtcacagccattgccaatatcagcatggactacacgggtcccagagggctgtcccaccactgctactgccatcacccacaccacatccactgccaaagggctcaagaattcaacttcatacctgaactactgatgccattcccagaagccaagcaagccacttggaagcacaagaactgtcttgcctaaacccgctaacattggtgccagtgtatgctgccctggggcccaaggacacacatgctcatcccactgattctaccaatggaa

SEQ ID NO: 244403 - DNA, 585 bp, Homo sapiens
catccgttacaatgtccttcagctatgtttatgattcctgaaattaattctcttctctccactatcaataatttcactttgaacatttattctgtatctatacccacggaatacagctcctaggtttttgtgycaattcaccaatcttataattaaatattcaatactacttactgatgctaattaatcaataagaattattaatgccattgagagcaggtcatgccaaaaatgaattgtggaaaaacctgtacctattggctaaaaaccattactttttctacaaatatacatgtttatgttctgtgttgccatgtcctttgataaaaatggaggaatcttcattttttgatttgttaatgtaattgttattggtgttgtttataaaagaaattttggtagaagagtgagggtaaaattttaattggtataggtgtaggagggaatggaaagaggattgcaaacagctggtataggcaaatgtttacagaatttaattgtaaaggggaacacagaaatggaatggaggtagaaaggtagtacaggagaggaaaattttcatgatttaagacagagatgagaaaa

SEQ ID NO: 244404 - DNA, 514 bp, Homo sapiens
aataagaattattaatgccattgagagcaggtcatgccaaaaatgaattgtggaaaaacctgtacctattggctaaaaaccattactttttctacaaatatacatgtttatgttctgtgttgccatgtcctttgataaaaatggaggaatcttcattttytgatttgttaatgtaattgttattggtgttgtttataaaagaaattttggtagaagagtgagggtaaaattttaattggtataggtgtaggagggaatggaaagaggattgcaaacagctggtataggcaaatgtttacagaatttaattgtaaaggggaacacagaaatggaatggaggtagaaaggtagtacaggagaggaaaattttcatgatttaagacagagatgagaaaataactggagcagtgttcttagaagatgagagagaatgggttcttggacacaggtggaagaggtggtcttcatcaggagtatcaattatgaaaccattagaaacagagtgaatgcacag

SEQ ID NO: 244405 - DNA, 587 bp, Homo sapiens
catccgttacaatgtccttcagctatgtttatgattcctgaaattaattctcttctctccactatcaataatttcactttgaacatttattctgtatctatacccacggaatacagctcctaggtttttgtgtcaattcaccaatcttataattaaatattcaatactacttactgatgctaattaatcaataagaattattaatgccattgagagcaggtcatgccaaaaatgaattgtggaaaaacctgtacctattggctaaaaaccattactttttctacaaatatacatgtttatgttctgtgttgccatgtcctttgataaaaatggaggaatcttcattttttgatttgttaatgtaattgttattggtgttgtttataaaagaaattttggtagaagagtgagggtaaaattttaattggtataggtgtaggagggaatggaaagaggattgcaaacagctggtataggcaaatgtttacagaawttaattgtaaaggggaacacagaaatggaatggaggtagaaaggtagtacaggagaggaaaattttcatgatttaagacagagatgagaaaata

SEQ ID NO: 244406 - DNA, 585 bp, Homo sapiens
catccgttacaatgtccttcagctatgtttatgattcctgaaattaattctcttctctccactatcaataatttcactttgaacatttattctgtatctatacccacggaatacagctcctaggtttttgtgtcaattcaccaatcttataattaaatattcaatactacttactgatgctaattaatcaataagaattattaatgccattgagagcaggtcatgccaaaaatgaattgtggaaaaacctgtacctattggctaaaaaccattactttttctacaaatatacatgtttatgttctgtgttgccatgtcctttgataaaaatggaggaatcttcattttttgatttgttaatgtaattgttattggtgttgtttataaaagaaattttggtagaagagtgagggtaaaattttaattggtataggtgtaggagggaatggaaagaggattgcaaacagctggtataggcaaatgtttacagaatttaattgtaaaggggaacacagaaatggaatggaggtaraaaggtagtacaggagaggaaaattttcatgatttaagacagagatgagaaaa

SEQ ID NO: 244407 - DNA, 514 bp, Homo sapiens
aataagaattattaatgccattgagagcaggtcatgccaaaaatgaattgtggaaaaacctgtacctattggctaaaaaccattactttttctacaaatatacatgtttatgttctgtgttgccatgtcctttgataaaaatggaggaatcttcattttttgatttgttaatgtaattgttattggtgttgtttataaaagaaattttggtagaagagtgagggtaaaattttaattggtataggtgtaggagggaatggaaagaggattgcaaacagctggtataggcaaatgtttacagaatttaattgtaaaggggaacacagaaatggaatggaggtagaaaggtagtacaggagaggaaaatkttcatgatttaagacagagatgagaaaataactggagcagtgttcttagaagatgagagagaatgggttcttggacacaggtggaagaggtggtcttcatcaggagtatcaattatgaaaccattagaaacagagtgaatgcacag

SEQ ID NO: 244408 - DNA, 612 bp, Homo sapiens
accaaattgttgttttctttttattgctaagtagcattccatggtatggatataccacagtttgtgtaagcatttctccattgcaggacatttggggtatttccagtttttggctattacaaatagtctatgaacattcacatacaagtttttgtgtgaacatgtttttattgtactgacataaattccaaagcgtgcaattgttgggtcatatagtaagtgtatgtttaattttgtaagaaacgactatactctctccagmgcagttgtaccattttatatcctgaccagttttatattcatgatccagtctttctgtatcctccctagcatttggtgttgtcactatttttattttatctattttgatagatgtgttgtagcattttactggttttaatttgcattgtgctgatgaaaatgattttgaacaccttttcctgtgttaatttgccatttatatatcattttctgtttatgtttgtatgtcttttcctagtttttgcccatgtttttggacttttaagaatactattaagttttgagagttctctcagatatgtgatttgaaacagtatttctttttttcagtcttcagcttgtctttccatt

SEQ ID NO: 244409 - DNA, 545 bp, Homo sapiens
gggatcccagaagttcccactcagtgaggaaaaacaggatcaggaggtgcattaaaaagcagtctggccactttttcatagagcagctatgctgtctttggggtctactccagcccccagttgcttccagctctccaaagcccaaaagtgacaatggctaagcctgcaaaacagtaaagatggaggcctacccctcctctgggagctctgctagggaggtttgggattgctactggccggaaaacaccagcagaagtggttgtagacctcggtcaggggattcctcccagtaaacagaaatgggatctgagacccacatgraaaagtggtctggccatctctttgtagagctgctatgttgtgctggggtaccactccagtccctagtcacctcagattccccagagcctgaaggcaccaatggttaaggctatgaaacagcaaagaaggcagcccaagcctccctctgagatctccatctcagggaggtataatgttgctacccatggcagcctagagttcaaagctattgggtcttatcctgt

SEQ ID NO: 244410 - DNA, 622 bp, Homo sapiens
tgctggggtaccactccagtccctagtcacctcagattccccagagcctgaaggcaccaatggttaaggctatgaaacagcaaagaaggcagcccaagcctccctctgagatctccatctcagggaggtataatgttgctacccatggcagcctagagttcaaagctattgggtcttatcctgtgatgttccatggaaatggggcttgcagatagtcattgctcagccccgtggatttagaccgttttctargggtatatatgggggggggtgtctaacctcccagtttgccagagttgcagttacttttgctgggaagcctgggtatctaaagctcctgtggcttccagtgtgcctgagtggatgctctgacgagactccacatagctttgcatgtcagactgaaggccctggtggagtgagttcatgagggatctcctgacctgagggttgcaaagttctgtgggaaaagtatgggttcccaaggtcgctcactcactcaccacttctctgggcaggggaggctaccctggctacatgtcattcccaagtgggtggttctcctgccttgcttttctctgttctctgtgggttgggttgttttcttgatgaatcccaatgc

SEQ ID NO: 244411 - DNA, 622 bp, Homo sapiens
tgctggggtaccactccagtccctagtcacctcagattccccagagcctgaaggcaccaatggttaaggctatgaaacagcaaagaaggcagcccaagcctccctctgagatctccatctcagggaggtataatgttgctacccatggcagcctagagttcaaagctattgggtcttatcctgtgatgttccatggaaatggggcttgcagatagtcattgctcagccccgtggatttagaccgttttctaggggtatatatgggggggggtgtctaacctcccagtttgccagagttgcagttacttttgctgggaagcctgggtatctaaagctcctgtggcttccagtgtgcctgagtggatgctctgacgagactccacatagctttgcatgtcagactgaaggccctggtggagtgagttcatgagggatctcctgacctgagggttgcaaagttctgtgggaaaagtatgggttcccaaggtcgctcactcactcaccacttctctgggcaggggaggctaccctggctacatgtcattcccaagtgggtggttstcctgccttgcttttctctgttctctgtgggttgggttgttttcttgatgaatcccaatgc

SEQ ID NO: 244412 - DNA, 443 bp, Homo sapiens
cttgacagggaagtcactgactctggattgggctatgatcaaccaggggtagatgtcaatgcttcaaaggctatacaagaaccagaaaaatggagattacaccaatttggactgttgagtcacatttctttacacaagaaaacacactttacagccttaaaaagccaacagtgcacagggaaatgtactattcaggggaaactttgatagaatattgaaatggctgaccaggcgcggtggctcatgcctgtaatcccagcacttttggtggccgaggcgggcggatcacctgagtttaggagtttgagactatcctggccaatatggtgaaacccygtctctactgaaaatacaaaaattagctgcgtgtggtggtgggcgcctgtattaccagctactcgggaggctgagacagtagaattgcttgaacctgggaggcagag

SEQ ID NO: 244413 - DNA, 588 bp, Homo sapiens
cacccattaggccctaagtccaacattggggatcagattttaacatgaggtatctggggataaatatttatatcattgcatcctgtccctagccagccaaagctcacattcttctcacattgcaaaagacaataatcttctcccaattgtccaaaatgtgttgggttgatccagcatcaactctaaattccaaagtctcatctgagactcaaggtaagttcttatagctgtgcacctgtaaaattaaaaaaagttatttacttctaaaatattaatacaacagtggtagagacatttcctatacatttccattccaaaagaaataaatggrccaaaagaaatgaatgcagtgtcctcacaaggttgaaactcatcatggcagacattaaaacttaaagctctaaaataatctcctttgactctatatcttgaaccctgagcacactggctggtgcaagcaatggactcacaatgccatcttcagcctcatatccgtggctttggtgaacataatccatatagctgctctcatgggtgaacattgaatgcttatggcttttccaggctgagcttgcatattgccagtgg

SEQ ID NO: 244414 - DNA, 588 bp, Homo sapiens
cacccattaggccctaagtccaacattggggatcagattttaacatgaggtatctggggataaatatttatatcattgcatcctgtccctagccagccaaagctcacattcttctcacattgcaaaagacaataatcttctcccaattgtccaaaatgtgttgggttgatccagcatcaactctaaattccaaagtctcatctgagactcaaggtaagttcttatagctgtgcacctgtaaaattaaaaaaagttatttacttctaaaatattaatacaacagtggtagagacatttcctatacatttccattccaaaagaaataaatggaccaaaagaaatgaatgcagtgtcctcacaaggttgaaactcatcatggcagacattaaaacttaaagctctaaaataatctcctttgactctatatcttgaaccctgagcacactggctgstgcaagcaatggactcacaatgccatcttcagcctcatatccgtggctttggtgaacataatccatatagctgctctcatgggtgaacattgaatgcttatggcttttccaggctgagcttgcatattgccagtgg

SEQ ID NO: 244415 - DNA, 546 bp, Homo sapiens
caccctgggctgctgcccaatcacatcccccagaatgagaccccatcctgagtcttgtttttattattactttgtatttctttaaatatttgtacaataagtatatataatctcaaaccaaatattagtttcactggtttttaagcttcctgtacagaaattcctactacatttcttttctcatgatgcacattatgtataggagttatctgttktgtgggaggctgtcattcactcatttttactgctgaaggtttacattttatggttataccacaatttcactactttgctattgatgtataggaggctgattccagtttttgccataaacattagtgtgcatgtctcctgggcacataggcgagaaagccgccagagtgtatgattaggagtgggatggttggatgatatgttgtatggcctttaaccatactaaataatgataatatgatttccaaagtaattgtgccaacttaagcttttacaataaatgtgtaatatgtgatgttgatgtgttctgaaaacactgagttgaaggaatta

SEQ ID NO: 244416 - DNA, 400 bp, Homo sapiens
cttagcaagatgtcaatagctttggttggatgcagtagcccaaaatggttagctccaactgaggcataagatttttcaaaaactggctatttggtgagcattctataataaacttaacatcttttgttctggtattgaatcagataygatagaagtgatttggacaccactatgattctaaatagcactgcaattttgtgctttcaagtttttttgagcaatcctgttgtgttttccattcatatttgctattccatcactggttgttcctttatactcttttattgtttcatctattttgatcaatgatgtgcatttccaattctgtaaaagtttaattcagttgtatgtgtggaatatgtaacaaatcaaatcctttgcaaaatggaattaccttgca

SEQ ID NO: 244417 - DNA, 559 bp, Homo sapiens
gtttcagaggtttccctttggcctttggcatcaagagatcccttataccacagactggggacccagtgtgggggtgactccacttaccagagcatcagtgtcaattatgcactcagggaattggaagataatcagggttgggtctatgcatccagtggtcccattgcgggccataatgtgtccaggtttactccctggcctccgtaagccccactgtgatggagaagatgattgtgctgtgggcatctgggcatcaatatcagcttacatgcagtgaaaatgatcccccctagttctgcctatttcccttccccaatgtacagtctcctgagtaaatggctataggttcccttgctgaaagactgagggaattgtcccagccatatayctccatggtgtcccagggtcctttctctagggatatggactcctcctctgtcactgagatctgagtctgaatcttgattgaggtctaggcattgagaaggggatcatggctttgtatttggtcgaacaccctcagtctcctgctcctcaattcttgctttcttatcatata

SEQ ID NO: 244418 - DNA, 428 bp, Homo sapiens
tattctgccaggaatgagatgcagaaacacagagggtctcttgttggcgtaaatatcactgycatcattactcaaccctagagtacttctagatccatcactgatgctccagaaggaccagattcctctgtttcatgcagagaagactgaattccacatgcatagtcttgctgattggtaggacctaatttccatggttgttaccagctgttaaggaatctaggaaatgatcacaatgtagtgggggtgttcacagatgtaaaagcactataatgaatgtctactcttggcacagtgcgaaaggataatgttaggtactaatttttttttcttttgacattttaaaatacaaacatttcacgcatatactaaatacaaaaatttcctttgtccactttttaatggggttatttatttgtttttcttgt

SEQ ID NO: 244419 - DNA, 586 bp, Homo sapiens
ctagagtacttctagatccatcactgatgctccagaaggaccagattcctctgtttcatgcagagaagactgaattccacatgcatagtcttgctgattggtaggacctaatttccatggttgttaccagctgttaaggaatctaggaaatgatcacaatgtagtgggggtgttcacagatgtaaaagcactataatgaatgtctactcttggcacagtgcgaaaggataatgttaggtactaatttttttttcttttgacattttaaaatacaaacatttcamgcatatactaaatacaaaaatttcctttgtccactttttaatggggttatttatttgtttttcttgttgagttgtttaagttccttgtaagttctggataccagtcccgtattaggtgcataatttgcaaatatgttttcccattctgtaggttgtttgtttactctgttgattattcccttcactgtgcagaagccttttagtttaattaagttctgtttgtctatttttatttttgttgcatttgcttttgaggtcttagtcacaaattctttgcctaggccaatgttcagaagagtttt

SEQ ID NO: 244420 - DNA, 593 bp, Homo sapiens
cctgcctgtggctctttccttctggctgtcacctggttgctccagtaggtcattcagatctccaygtcctactaagaaactcccctcatttatcccactaggaaacatccattacccttatcattttctatccactcagcccaatttatttttctccttgcagttatcacaatgtaaacccaaagaaggtacagacagttctaccttagcactgtcttatcctcatgccaaagataagtttgtggcaagtgacatttgcctactgaagaggcaatttcctgaggagactgttgagtagagatgatgaaacggtctttggaggagcttcaaaaagggaggtctagaagaagagcccagtgtgtttcacagatcccagagcgggaggcagaggtcagagaagccttgcgaagtctgctccacaattccagattctataaaaataacaattattattagttttttgaatattaataataattattcattagaaacaagatataatagtactacttgttaatcataatataatcataaataattaataatcacatacaactattaatcacattatattattaatatattgttattaa

SEQ ID NO: 244421 - DNA, 544 bp, Homo sapiens
tggccctgacctttgacaaatctacttgtgcatggtaccagtatgagctatatttttattttatctgttttaattttgagacagtgtttcactctgtcacccaggttgaagtgcagtggcacgatccctgctcactgtagcctccacctcccgggctcaggtgatccttccacctcagcctcctgagtagctgggactacaggcttgtgccaccacaccgggctaatttttgtaattttcatagagacagggttttgccttgttgcccaggctggtcttgaactcctgggctcaagaaatcctctggycttgcaaggcctcccaaagagcggggattacaggcatgaaccaccatgtctggccttgagctatctttattgttcaaactgttacaataggtaattagtcagacatgaataggtcaggagagggaccctcgcccaggaatgtcaggcaaccatcagatggtggtcaggaggttgttaaactgcctcttgaaaataataattggctgcagccggtgccagggaaaggcagcctccca

SEQ ID NO: 244422 - DNA, 643 bp, Homo sapiens
cgaaaaactcatttgtttaaccttaagcttcttacttaggtaaacacctgaaattcacaggctatataaatgattaacaggaaaatacctttaaatgttgattatcacagttttcataagtaatctaggtaaactattaaaaataasttaggtaaatgtaatggaaggaatgcttgtaaataagcataatataatttagaatctaaagttatattacataacaggcatttattaaatgtctgggtcattcacaattaaaaaaattacagaaaaacattttgctaagaatatgttcttatttaaaggaaaataatttttgttgaattcaaaggttatttaaaggttatgaaacaagataaaaggaaccactaaataagagcgatataaagacagttaaaaatataaagagatatttttggtaagaaaggttaaaaggaaaattttatatgagaaaaaaatcttgcatggtaaatgtttgttctaaaataaaatggctggatgcaaatagctcatgcatgtaatcctagcactttgtaaggctgaggtgagcagattgcttgagcctgggagttccagaccagcctgggcaacatggtaaaaccctgtctatacaaaaaacacagaaaattaactgagtatgctg

SEQ ID NO: 244423 - DNA, 647 bp, Homo sapiens
cagagttcttgtggctccacatcctctatggtgtttggtgttgtcagtgttgcctgtgaagtctgagcccctcttgtgggtctctacctcaggtacttgtgggtcatagagagaacttttcaccatgcagcatgattgtgtttgctactgcttgtttcctcagtagccacttgggttctggacccacatgccccagctcggcccatggtttggagctcagtagatgctctgtgatgctggctgctccctggccaagagagcccttggggggctctgtcacgtcctatcttggactcctgcatgggatgcccctattcctctgaattcctccgtctcccctgggaccctccatcccccataggccttacctgactctgtagtgctcccaaaacatgacatggtgtctgaaggtgcacttcatgtccaggtcaatctggtttattttcgctgaggacatcttgccctgctgctttattttctgctccctctgctcccaaatcctaggccctcctgagtgtgagcccatagaaagaccctcttcccttccctaagtggccaccwggactgataacctgtggtggatgaggatggggctggtccttccctggggctcactctcccgcagttgctttacagtgagagccctg

SEQ ID NO: 244424 - DNA, 598 bp, Homo sapiens
caagccaaatggccccacctctgccaggatttctggagtccctgggcctgaccagaggtgggccctttcctgaggactttaaaacaaggagacctagacaacaagacttgttgtccctaaatgtcctgaaatgggcacacactccacagcaggatgaacggcatctacctgctcagggtgaagggccatgatgactataatggacacctggaggcagactagggccaggaaccagaaatctctatatgatcagcctcctgctattgttcagacaccatgaagatgcccagttttctataggaaagaagaaatctcatgagtgttctgttccactcaaatctttactcactgtggccagtgaatccatttgaagaataacaccagtcaagaaggaggatgtttggttcggagaaggcttgatctattgtctccaaagcagcctccctttggtggagggagggcagattccacagtcctgagcagttgatacaggaaraggctttgttttcccaggtcaccaaagaacaagtgaactcttggggacaggttctggagaacacccagaggggccatctctcctgggaatacctgagacaaa

SEQ ID NO: 244425 - DNA, 506 bp, Homo sapiens
cctggcagcgatgtgttagtcctgttgctccacatcctcgccggcactactagtgtctgtggtttttattttagacattctaatgggtgtgtaacaggatctcactgtggttttgatttgtagtcccctagtgagtcatagtattgagtaccttgtctgggctgctctgcctgctgcgtgccctcgttgctgaagtttrtgtctgagtctttgtctcatttctgaaactggttttgttttcttgtttttgaattgaattgattgttttaattgggttggcttgagcattcttaagtgttctgaatatgagtccttgtcagacgtgtgcttttttaaaatattttctccaaatctacagctcatcttttcattcacttaacaatgtattttacagaacaaaagttataattttgatgaagtacaacttattgaatttatttttgccttttgctatactttgctttcagtgtcacatctatgaactctttgcctaactagattggaaa

SEQ ID NO: 244426 - DNA, 506 bp, Homo sapiens
cctggcagcgatgtgttagtcctgttgctccacatcctcgccggcactactagtgtctgtggtttttattttagacattctaatgggtgtgtaacaggatctcactgtggttttgatttgtagtcccctagtgagtcatagtattgagtaccttgtctgggctgctctgcctgctgcgtgccctcgttgctgaagtttatgtctgagtctttgtctcatttctgaaactggttttgttttcttgtttttgaattgrattgattgttttaattgggttggcttgagcattcttaagtgttctgaatatgagtccttgtcagacgtgtgcttttttaaaatattttctccaaatctacagctcatcttttcattcacttaacaatgtattttacagaacaaaagttataattttgatgaagtacaacttattgaatttatttttgccttttgctatactttgctttcagtgtcacatctatgaactctttgcctaactagattggaaa

SEQ ID NO: 244427 - DNA, 506 bp, Homo sapiens
cctggcagcgatgtgttagtcctgttgctccacatcctcgccggcactactagtgtctgtggtttttattttagacattctaatgggtgtgtaacaggatctcactgtggttttgatttgtagtcccctagtgagtcatagtattgagtaccttgtctgggctgctctgcctgctgcgtgccctcgttgctgaagtttatgtctgagtctttgtctcatttctgaaactggttttgttttcttgtttttgaattgaattgattgttttaattgggttggcttgagcattcttaagtgttctgaatatgagtccttgtcagacgtgtgmttttttaaaatattttctccaaatctacagctcatcttttcattcacttaacaatgtattttacagaacaaaagttataattttgatgaagtacaacttattgaatttatttttgccttttgctatactttgctttcagtgtcacatctatgaactctttgcctaactagattggaaa

SEQ ID NO: 244428 - DNA, 460 bp, Homo sapiens
tcaaaatataagatgtgtgcactttgaaagaccctgtggggagaatgaaaaggcaagttccaggctggaggaagtggtttcaatctcacatctgatgaaggactcatatgtaggatctataaagagctcagatgaatgggcccctggcagcccttgggaatcacaggggtgmtgtgccatggacagacatggaagacacctcccaccctgtcattcatgtcttctgagctgcagtactcaatgtcccctacaaatgccccctcctgggcccacagaccctcctctccccacatccacaccctcaggccaggccctggggctcttgttgggacagggcccctcctgcaggatacagggagggaggaactgtcagtctcaggctctgggtgcccagcttcaagcttacccacctcaaggccctctgggcccatctcacaggatataatgaggtagtctggca

SEQ ID NO: 244429 - DNA, 453 bp, Homo sapiens
agcttttaatttctagcttatatgtttatttatatgacccatgttaatttttttgtatgttgtgatataggagtcataattcattttcatacatataataaaatattatgaaaatggctgcttttttacacttgatcttagccaaaaggccgagamgcgataaaaaaaatggctgcttttttaaacaaatcataatggtacagtttttatacctatatctggttcctccagtaccatttgttgcaaagaatatcgtttcctgtattgaattatcttggtgtctttgtgtaaaatcaatagatcttatgtgtttggctctatttctgcactttctattcagttccactgatctcaccagttgatgacatttggattgtttctactttttgggtgttactaataatgttcttatgaagagtcattgaaggcatatgatttaaattgtcttggata

SEQ ID NO: 244430 - DNA, 469 bp, Homo sapiens
caattctaggtatttacccaaaataaagaacacatgtgttcacacaaagaacgaagaaccatatacaacacaactaactgttctctccttcttcttcttcttcttcttcttcctctycctcttcctcttcctcttcctcttcctcttcctcttcttcttcctcttcctcttcttcttcttcttcttcttcttcttcttcttcttcttcttcttcttcttcttctttttttcggacccaggctgttgtgcagtggcatgatcatggctcactgcagcctcaacttcctgggctcaagtgatcctcccacctcagccccccaagtagctgagactacaggatgcaccacgatgcccggccaatattttgtattattttgtagagacagggttatatcatgtttcccaggctggtctcaaactcctgggctcaagtatcctcccaccttggcctcccaaagttctgggatta

SEQ ID NO: 244431 - DNA, 469 bp, Homo sapiens
caattctaggtatttacccaaaataaagaacacatgtgttcacacaaagaacgaagaaccatatacaacacaactaactgttctctccttcttcttcttcttcttcttcttcctctccctcttcctcttcctcttcctcttcctcttcctcttcttcttcctcttcytcttcttcttcttcttcttcttcttcttcttcttcttcttcttcttcttcttcttctttttttcggacccaggctgttgtgcagtggcatgatcatggctcactgcagcctcaacttcctgggctcaagtgatcctcccacctcagccccccaagtagctgagactacaggatgcaccacgatgcccggccaatattttgtattattttgtagagacagggttatatcatgtttcccaggctggtctcaaactcctgggctcaagtatcctcccaccttggcctcccaaagttctgggatta

SEQ ID NO: 244432 - DNA, 608 bp, Homo sapiens
cagtctattgccttttccagagttgtaatgtaaaaatgagatcatttctgccttgattgtaattgtaatctgtaattaaatatatgtgcagatttactcctccgggcgggcccctcgctccttcccgcagaggccttttccctcccgaccccgcactcacctgcccaggtctggatcagggccacggctcccgagaacagcaggaggagggttcgggactccatgacccgcaaccttggcgtctggggagaatctgagtcccggtgggccggcgaggactttagaaccaggaaccgcggcgacactgattggctgatctaggaacccaacacccaatggaagtgagaactgaggccgcatcatgagtatccaggtaaaaggacctgacacaggttgggaaaggtggaagagagagagmggagctcgggaaaccccaaagctgagccggcccatcccaggcaccgccctcggggcctgaagcccagagagccaagctccgggccctgggacttggctcttacccccttcttttatatcaaacgctctgtctcaatgtctccccgaatcttggccccggagctgtctgagaaaccagagaaaaaccctca

SEQ ID NO: 244433 - DNA, 526 bp, Homo sapiens
atgataactacaattcaagatgagatttgggtgggcaaacagccaaaccatagcacacagtctgcctttcatgtctgtgagttccacatctgtgaattcaacaaccttaggattgaaaatgttatgttgctgctgatgtatactctgtagttaggagtacctacagtggttatgtctgtactgaagatgtacagacatttttcttgtcattatttcctaagcaatacagtgtaacaactatttacaaatmatttacattgcattaggaattataagtaatctagagatgatttaaagtatatgggaggatgtgcatagctaataggcaaatactaggctattttatatatgggacctgagcatccatggattttggtatccacaggtgccctagaacccatcccaaaaggtaccagaggaagactgtataaggctgacatgccttttaaaaagtttttgaaagaattgacaggtgaagaaatctgggcatggagtttctctggtgggaaggaatgtatttagaact

SEQ ID NO: 244434 - DNA, 560 bp, Homo sapiens
agatgacctcatctgagcttcctaacaaaggagctggtattagaccccattttacagtgtgcctgggtagggaagagagtgtagtggattgagcagaggccttggcaccagacactgcttcctagccatgtgctcttgggcaagttgcttaaccctgctgagcctcagtttcctcagaaggagtctgtataagcaagggragggattggtcatagaagtggtactgtgtttcatttatctagttatggcagactctcaaaaacaaatggttctatacaactaacattgtctgcaattcccctgaatccattcacttgttcagtaaatgtgtattgagcttctacaaggtgtcaagcaccatgatctctgtatcagtgatttaaccatttttgatggttactacagacctctttaagaatgtgatagaaaactgtagctccctccccagaaaacttttctagctttttattttgctttgcagtgagccaagatagttccactgcactcgggggacagagtaagaccctgtctcaaaaaaaaaaaaaaagaaaggaaccatt

SEQ ID NO: 244435 - DNA, 604 bp, Homo sapiens
ttacaggtgtgagccacaacacccagcctaaacttcatttctttattgtggataagaacatttttttcatatggttgtgataaatactgaacaaaataacttatgtagktacttaagccaatgcctggaatacagcaagtgccctttaaatgcagccactattattattatagttgttgctatcgttattttccatgtaatacattgaggactttctttttcataggttcccatgaaggctctctaaggacttgctgaatgagcaagatttgttaagatcatgaaaattctctaggcatagccctactaaaatttttcagaagttcccaatatcttatccacagatttcctttgatgtcagaatattagtcttggttaggggcatcttctggagtttgagtgtagtctggtgttttgggaaaagaattatttcaataatagtaaggctcaataatgttaaaactgagagtttcaaaatgtttaatctgaagcaagggtagagcagatacttcctcaatgggaagaggagaatgtaccaattgcaagacagctaaagaaatatgtgtttgcttattgtcagtgttaataacagtgtttttattag

SEQ ID NO: 244436 - DNA, 604 bp, Homo sapiens
ttacaggtgtgagccacaacacccagcctaaacttcatttctttattgtggataagaacatttttttcatatggttgtgataaatactgaacaaaataacttatgtaggtacttaagccaatgcctggaatacagcaagtgccctttaaatgcagccactattattattatagttgttgctatcrttattttccatgtaatacattgaggactttctttttcataggttcccatgaaggctctctaaggacttgctgaatgagcaagatttgttaagatcatgaaaattctctaggcatagccctactaaaatttttcagaagttcccaatatcttatccacagatttcctttgatgtcagaatattagtcttggttaggggcatcttctggagtttgagtgtagtctggtgttttgggaaaagaattatttcaataatagtaaggctcaataatgttaaaactgagagtttcaaaatgtttaatctgaagcaagggtagagcagatacttcctcaatgggaagaggagaatgtaccaattgcaagacagctaaagaaatatgtgtttgcttattgtcagtgttaataacagtgtttttattag

SEQ ID NO: 244437 - DNA, 604 bp, Homo sapiens
ttacaggtgtgagccacaacacccagcctaaacttcatttctttattgtggataagaacatttttttcatatggttgtgataaatactgaacaaaataacttatgtaggtacttaagccaatgcctggaatacagcaagtgccctttaaatgcagccactattattattatagttgttgctatcgttattttccatgtaatacattgaggactttctttttcataggttcccatgaaggctctctaaggacttgctgaatgagcaagatttgttaagatcatgaaaattctctaggcatagccctactaaaatttttcagaagttcccaatatcttatccacagatttcctttgatgtcagaatattagtcttggttaggggcatcttctggagtttragtgtagtctggtgttttgggaaaagaattatttcaataatagtaaggctcaataatgttaaaactgagagtttcaaaatgtttaatctgaagcaagggtagagcagatacttcctcaatgggaagaggagaatgtaccaattgcaagacagctaaagaaatatgtgtttgcttattgtcagtgttaataacagtgtttttattag

SEQ ID NO: 244438 - DNA, 621 bp, Homo sapiens
tacaaaatcaaaatataaaaatcaattgtgtttctatacagtatcaatgaatgaaaaatgaaaaatgaaaatcttgaaactatatataaaaagtagctcaaaatgtatcaaagacctaagtgaaagagttaacattagaaaactcttagaaggaaacaggccaggcacgatggctcatgtctgtaatcccagcattttgggaggccaaagtgggcagattgcttgagcccaggagttggtagaccaaactgggcagcatggcaaaaccctgtctctacaaaaaatacaaaatttagccgggtgtggtggcatgcacctgtagtttcacctactcaggaggctgaggtgggagaatcacttgagcctgaggaagttgaggctgcaatgaaccgtgattgcaccactgcactccarcctgggtgacagagtgagactgtgtctcaaggaaaaaaaaggaaagaaagtaaggaaggaaggaaggaaagaaggaaggaagggagggaggaaggaagggaggaagagaggaagaagaaaaaagaaagaaagaaagaaaataaaacataggcataaatcttcatggctttggattaagtaaaggcacctaatcttaaatgtgacacc

SEQ ID NO: 244439 - DNA, 590 bp, Homo sapiens
tgagatctgattgtttaaaagtgtgtgccacctcctcccactttcctcctgctccagccatgtaagacaggcttgcctccccttcaccttttgtcatgattgtaagtgttctgaggcctccccagccatgcttcctgtacagcctgcagaactgtgagccaattaaacctcttttctctatatattacccagtctcgggtatttctttatagcagtgcaagaatagactaatacagggttcaattcagcaagaggatataacaaatataaatatatatgcactcaacaytgcagcacccagatatataaagcaaatacgattagagctaaagagagagagtgaccccaatacaataatagctggagacttcaacaccacattttcagcactggacagatcttccagacagaaaataaaaaagaaacatcagacttaatctgcactgtagatcaaatggatctaatacatacttgcagaacattttatccaatggctgcagaatacacattcttttttagcacatgtatcattctcaaggatagaccatatgttaggtcacaagtcttaaaacattaaaaaagttgaatac

SEQ ID NO: 244440 - DNA, 590 bp, Homo sapiens
tgagatctgattgtttaaaagtgtgtgccacctcctcccactttcctcctgctccagccatgtaagacaggcttgcctccccttcaccttttgtcatgattgtaagtgttctgaggcctccccagccatgcttcctgtacagcctgcagaactgtgagccaattaaacctcttttctctatatattacccagtctcgggtatttctttatagcagtgcaagaatagactaatacagggttcaattcagcaagaggatataacaaatataaatatatatgcactcaacactgcagcacccagatatataaagcaaatacgattagagctaaagagagagagtgaccccaatacaataatagctggagacttcaacaccacattttcagcactggacagatcttccagacagaaaataaaaaagaaacatcagacttaatytgcactgtagatcaaatggatctaatacatacttgcagaacattttatccaatggctgcagaatacacattcttttttagcacatgtatcattctcaaggatagaccatatgttaggtcacaagtcttaaaacattaaaaaagttgaatac

SEQ ID NO: 244441 - DNA, 628 bp, Homo sapiens
taaaagatataaaaccaaaccagctttattatccaaatgcaaagggtagtactttaccaagaatctttcatgctaaagaatttgaactgtcttacacctcttagaaatgctattatattttttaaaagataagaagcgttggtgaggatgtggagaaaggggaaccctgatacgctgttggtggaaatgcaaactggtacagccattataaaaacagtaagaagctcctcaaataattaaaaacagaactaccatatgatccagcaatttcacttctgggtatttatagcccatatacttcccatgttctttgcagcactattcacaataaccaagatttaaaaaaccctaaatgttcactgatggatgaataaagaaaatgtggtatatacatacaatgcaatattattcagccttaaaragaaggaaattctgccattggtaacaacatggatggaccttgagaacattatgctaagtgaatatgccagatacatactgtgcgacctcacttatatgtggaatctaaaacagtcaaacttacataaacagagtagaatggtggttgccagggactggtggggacggggaatggagggttgatggtcaaagttacaaagtttcagtt

SEQ ID NO: 244442 - DNA, 628 bp, Homo sapiens
taaaagatataaaaccaaaccagctttattatccaaatgcaaagggtagtactttaccaagaatctttcatgctaaagaatttgaactgtcttacacctcttagaaatgctattatattttttaaaagataagaagcgttggtgaggatgtggagaaaggggaaccctgatacgctgttggtggaaatgcaaactggtacagccattataaaaacagtaagaagctcctcaaataattaaaaacagaactaccatatgatccagcaatttcacttctgggtatttatagcccatatacttcccatgttctttgcagcactattcacaataaccaagatttaaaaaaccctaaatgttcactgatggatgaataaagaaaatgtggtatatacatacaatgcaatattattcagccttaaaaagaaggaaattctgccattggtaacaacatggatggaccttgagaacattatgctaagtgaatatgccagayacatactgtgcgacctcacttatatgtggaatctaaaacagtcaaacttacataaacagagtagaatggtggttgccagggactggtggggacggggaatggagggttgatggtcaaagttacaaagtttcagtt

SEQ ID NO: 244443 - DNA, 590 bp, Homo sapiens
ttgttgtttgtttgttttttaaatctggaaaagttgtgcctgagtgcatgagatagaatagagaccagtttgctttttgtttattaactacagtgggtagcagaatcttggtaactcctaatgatcaggaatctaatyggccaaaaatgtgactttggtcccttgacatataaatgtgtctaaaagcattacaacaggaatcacaaagctcctaagtttcactttcccagacaatgtatctgtgactcccgcttgtagtattttaaatttaccttcattccatagccctgagtttctgtgtgagtccaggacatctcctaatacaaggtagccactgtgttactatatgttgtaaccaggagccagtacggactttattcatctcacagtggcaagcactcaatgcagtcacaatgcccctcaccagtgctcatgcactgcctgtttttaggaagtatccacttctaagtgttgtgtatattttatatgaacacttagtattttttaaacctgattaacataaaaaaattagtttttaggcagacccacataaggtattaaaggccaactgcaaagatcaccctgcaagg

SEQ ID NO: 244444 - DNA, 590 bp, Homo sapiens
ttgttgtttgtttgttttttaaatctggaaaagttgtgcctgagtgcatgagatagaatagagaccagtttgctttttgtttattaactacagtgggtagcagaatcttggtaactcctaatgatcaggaatctaatcggccaaaaatgtgactttggtcccttgacatataaatgtgtctaaaagcattacaacaggaatcacaaagctcctaagtttcactttcccagacaatgtatctgtgactcccgcttgtagtattttaaatttaccttcattccatagccctgagtttctgtgtgagtccaggacatctcctaatacaaggtagccactgtgttactatatgttgtaaccaggagccagtacrgactttattcatctcacagtggcaagcactcaatgcagtcacaatgcccctcaccagtgctcatgcactgcctgtttttaggaagtatccacttctaagtgttgtgtatattttatatgaacacttagtattttttaaacctgattaacataaaaaaattagtttttaggcagacccacataaggtattaaaggccaactgcaaagatcaccctgcaagg

SEQ ID NO: 244445 - DNA, 590 bp, Homo sapiens
ttgttgtttgtttgttttttaaatctggaaaagttgtgcctgagtgcatgagatagaatagagaccagtttgctttttgtttattaactacagtgggtagcagaatcttggtaactcctaatgatcaggaatctaatcggccaaaaatgtgactttggtcccttgacatataaatgtgtctaaaagcattacaacaggaatcacaaagctcctaagtttcactttcccagacaatgtatctgtgactcccgcttgtagtattttaaatttaccttcattccatagccctgagtttctgtgtgagtccaggacatctcctaatacaaggtagccactgtgttactatatgttgtaaccaggagccagtacggactttattcayctcacagtggcaagcactcaatgcagtcacaatgcccctcaccagtgctcatgcactgcctgtttttaggaagtatccacttctaagtgttgtgtatattttatatgaacacttagtattttttaaacctgattaacataaaaaaattagtttttaggcagacccacataaggtattaaaggccaactgcaaagatcaccctgcaagg

SEQ ID NO: 244446 - DNA, 599 bp, Homo sapiens
tgggtcacatggctgttggaaaagccctagttctttgttttctgttcccagaaggccccagttctcagccacatggaccttccttcagggctgcttatggcacagcaggtggcttcccccagagctcatgattccagagacattgagagagaagggggaggctgcagtragttttatgttctacacccagagtcacaaactcttatgtcagcattaccagttagaagttgtattagtccgttctcacattgctataaagaaatacctgagactgggtaatttataaaggaaagaggtttaattgactcatagttctgcattgctgagaaggctgccccatgaaacttacaatcatggcagaagtggaggcaaacacgtccttcttcacatggtggcaggagagagaattgcagatcgaagtggggaaaaatacctcataaaaccatcagatctcatgagaattccctcagcatcataagagcagcatgggggtaccatacccgtgatccactcacctcccaggaggtccctcccccgatacatagggattacaatttgcatgacaattcaagatgagaatttggtgggaactcagagcc

SEQ ID NO: 244447 - DNA, 599 bp, Homo sapiens
tgggtcacatggctgttggaaaagccctagttctttgttttctgttcccagaaggccccagttctcagccacatggaccttccttcagggctgcttatggcacagcaggtggcttcccccagagctcatgattccagagacattgagagagaagggggaggctgcagtaagttttatgttctacacccagagtcacaaactsttatgtcagcattaccagttagaagttgtattagtccgttctcacattgctataaagaaatacctgagactgggtaatttataaaggaaagaggtttaattgactcatagttctgcattgctgagaaggctgccccatgaaacttacaatcatggcagaagtggaggcaaacacgtccttcttcacatggtggcaggagagagaattgcagatcgaagtggggaaaaatacctcataaaaccatcagatctcatgagaattccctcagcatcataagagcagcatgggggtaccatacccgtgatccactcacctcccaggaggtccctcccccgatacatagggattacaatttgcatgacaattcaagatgagaatttggtgggaactcagagcc

SEQ ID NO: 244448 - DNA, 599 bp, Homo sapiens
tgggtcacatggctgttggaaaagccctagttctttgttttctgttcccagaaggccccagttctcagccacatggaccttccttcagggctgcttatggcacagcaggtggcttcccccagagctcatgattccagagacattgagagagaagggggaggctgcagtaagttttatgttctacacccagagtcacaaactcttatgtcagcattaccagttagaagttgtattagtccgttctcacattgctataaagaaatacctgagactgggtaatttataaaggaaagaggtttaattgactcatagttctgcattgctgagaaggctgccccatgaaacttacaatcatggcagaagtggargcaaacacgtccttcttcacatggtggcaggagagagaattgcagatcgaagtggggaaaaatacctcataaaaccatcagatctcatgagaattccctcagcatcataagagcagcatgggggtaccatacccgtgatccactcacctcccaggaggtccctcccccgatacatagggattacaatttgcatgacaattcaagatgagaatttggtgggaactcagagcc

SEQ ID NO: 244449 - DNA, 599 bp, Homo sapiens
tgggtcacatggctgttggaaaagccctagttctttgttttctgttcccagaaggccccagttctcagccacatggaccttccttcagggctgcttatggcacagcaggtggcttcccccagagctcatgattccagagacattgagagagaagggggaggctgcagtaagttttatgttctacacccagagtcacaaactcttatgtcagcattaccagttagaagttgtattagtccgttctcacattgctataaagaaatacctgagactgggtaatttataaaggaaagaggtttaattgactcatagttctgcattgctgagaaggctgccccatgaaacttacaatcatggcagaagtggaggcaaacacgtccttcttcacatggtggcaggagagagaattgcagatcgaagtggggaaaaatacctcataaaaccatcagatctcatgagaattccctcagcatcataagagcagcatgggggtaccatacccgtgatccamtcacctcccaggaggtccctcccccgatacatagggattacaatttgcatgacaattcaagatgagaatttggtgggaactcagagcc

SEQ ID NO: 244450 - DNA, 599 bp, Homo sapiens
ctgtctcaaaaatagtaataatcatggtcataaatttagagcaaatgaaaattgaagtgcaataaatcatcctctcttatgaaaatgtattagttatttactattgcataacaaattacataaaacttagcagcgcaaaacaacaaacatcatctaccgcagtttccaatggtcaggaatccaggagcaaggtttccctgagtgcttctggctcagagcctctcacaaggttacagtccagtccagggctgcatcatctgagagcttcactagggcttgggatttacaagaaacatggctcactcacatggttccttgttgtccggtcccaggaggcctcagtttttagccacatggaccttcctgcagggctgcttatggcacagcagttggcttcccccagagctcatgatcccagagacagagagagagaagctgcagtgagttttatgttctrcacccagagtcaaaaactgttatatcagcactactctatcagttagaagttgtatttgtctgttctcacactgctataaagaaatacctgagactgggtaatttataaaggaaagaggtttaattgactcacagttctgcat

SEQ ID NO: 244451 - DNA, 596 bp, Homo sapiens
tatatatacataattataatttatatatctataaaagagataatcagtattccataaattgatgatattctcagtgttgacttcattgcccaggtgaacactgtaacagaaggatgagtcatggattgtagaggaacaatattttttttactctctggaggagccatcagtaggcatttctgccatatggacttcaaatgagaaatttgttttaggttgagattggaaggagatctgaacttctttttattattattattttaaatatgaggtctcactatgttctccaggctggagagcagtgactattcacaggtgtgaccatagcctcaaattcgtgagctcgagccattctcctatctcagcctcctgagtagctgggactacaggtgcccaccacagtgttcagccacttttcattgttattttacttcaaatgttttattttgaatgttaaaaatacatgtttctacaytagaaatatgaaaatgtatttgattacacaagaatttaaaatgcacacatcaacacctggttgaattttaaagaaaaaaaaatgcagagaagaaagaaatatcacccaggcttcccctcca

SEQ ID NO: 244452 - DNA, 596 bp, Homo sapiens
tatatatacataattataatttatatatctataaaagagataatcagtattccataaattgatgatattctcagtgttgacttcattgcccaggtgaacactgtaacagaaggatgagtcatggattgtagaggaacaatattttttttactctctggaggagccatcagtaggcatttctgccatatggacttcaaatgagaaatttgttttaggttgagattggaaggagatctgaacttctttttattattattattttaaatatgaggtctcactatgttctccaggctggagagcagtgactattcacaggtgtgaccatagcctcaaattcgtgagctcgagccattctcctatctcagcctcctgagtagctgggactacaggtgcccaccacagtgttcagccacttttcattgttattttacttcaaatgttttattttgaatgttaaaaatacatgtttctacattagaaatatgaaaatgtatttgattacasaagaatttaaaatgcacacatcaacacctggttgaattttaaagaaaaaaaaatgcagagaagaaagaaatatcacccaggcttcccctcca

SEQ ID NO: 244453 - DNA, 594 bp, Homo sapiens
gttgtgggttattttgaagttgctttttgaatgtattattatgaaagtagttttccatgtcataaagtctgcataaaatttacacacttctagaagctgcatcccatctcaaacaaggagaagtcaccagggttcttttagatccatgtgctttcatcttgtcttttggtaaagaatattttgacaagcatgtttgtacatgaagattcttctatggttgtgattttaaaaattcatagaacactcaggayggacatggtggctcatgcctgtacttccagcactttgggaggctcaggctggcagattgcttgagcccctgagtttgtgaccagcctaggcaacatagagaaaccctgtctctagaaaaaattcaaaagaattagccgggcttggtggcacatgcctgtagtcccagctacttgggtgtctgaggtgggagggttgcttaagcctggaagattcaggctgcagtgagccatgaacaacactgcactccagccagcaagcccaatctcaaaaaaataaattatagactactcaaattgtaagtattaaaccagtgtctgtgagagtttttctggaagggatgtg

SEQ ID NO: 244454 - DNA, 594 bp, Homo sapiens
gttgtgggttattttgaagttgctttttgaatgtattattatgaaagtagttttccatgtcataaagtctgcataaaatttacacacttctagaagctgcatcccatctcaaacaaggagaagtcaccagggttcttttagatccatgtgctttcatcttgtcttttggtaaagaatattttgacaagcatgtttgtacatgaagattcttctatggttgtgattttaaaaattcatagaacactcaggacggacatggtggctcatgcctgtacttccagcactttgggaggctcaggctggcagattgcttgagcccctgagtttgtgaccagcctaggcaacatagagaaaccctgtctctasaaaaaattcaaaagaattagccgggcttggtggcacatgcctgtagtcccagctacttgggtgtctgaggtgggagggttgcttaagcctggaagattcaggctgcagtgagccatgaacaacactgcactccagccagcaagcccaatctcaaaaaaataaattatagactactcaaattgtaagtattaaaccagtgtctgtgagagtttttctggaagggatgtg

SEQ ID NO: 244455 - DNA, 535 bp, Homo sapiens
tgctttgcaattagaaaaatgtgagtctcacatctttgtctgtacaactggcttagcatcatgacaatgatttggtttgatgtggtaggtggaaatggttaaattcaatctaggaacaagatttttcagtaactggctattcagtgggcatcctgtgatcagtttaacatctttcactgtggyttttaattagatgtggtagaagtgatttggactccagtatgattctgaaaaacactgttattttgtgcttctaatgttgctttaaaagcagctctttcgtgtttttcattcttattgctatttcatcactagttattcatttatgtcttttcatttaatttattttgctcaacaatgctttttttctattctgtaaaagtttaattcacttgtatgtgtggtaaaatgtgagcaacatatcaaattctcaaattctttgcaagatactattgccttacctatcagattgaacactgtgtatcagaaaatgtagagagttgccaactagccaaggatcaaatgacctatttgt

SEQ ID NO: 244456 - DNA, 535 bp, Homo sapiens
tgctttgcaattagaaaaatgtgagtctcacatctttgtctgtacaactggcttagcatcatgacaatgatttggtttgatgtggtaggtggaaatggttaaattcaatctaggaacaagatttttcagtaactggctattcagtgggcatcctgtgatcagtttaacatctttcactgtggcttttaattagatgtggtagaagtgatttggactccagtatgattctgaaaaacactgttattttgtgcttctaatgttgctttaaaagcagctctttcgtgttttycattcttattgctatttcatcactagttattcatttatgtcttttcatttaatttattttgctcaacaatgctttttttctattctgtaaaagtttaattcacttgtatgtgtggtaaaatgtgagcaacatatcaaattctcaaattctttgcaagatactattgccttacctatcagattgaacactgtgtatcagaaaatgtagagagttgccaactagccaaggatcaaatgacctatttgt

SEQ ID NO: 244457 - DNA, 583 bp, Homo sapiens
aaatatataaataaataaataaataaagttttatgatcaagtaactaactacctggatatcccctcctggcataagaaacagaacctatgaagccaccctaggctgttgtccaatcctatcccctaaaaggaacctatgtcttgagtcttgtatttgctattccttggcattgtcactgaagatttttacaataatacccaaatcacagtttgacctgtatttttttaacttccccatacagagaactcacacygtatgtatattatgtgttggggagttatctctgatgtgggagggtgcttatccttttaatttttttttctttttgagatggagtttcactcttgttgctcaggctggagtgtaggggcgggatctcagctcacttgatctcagctgcttggttcagctccatctagcatctttccccacactgtcacccccagcaccaggggactgagagttgatgacctggtacaccaccgcctggatctgctgcagtgtcctttcctgtctagtccgcactcaaagctgacctcttcctatattatacccagacagtgggccaaacaatatacttag

SEQ ID NO: 244458 - DNA, 583 bp, Homo sapiens
aaatatataaataaataaataaataaagttttatgatcaagtaactaactacctggatatcccctcctggcataagaaacagaacctatgaagccaccctaggctgttgtccaatcctatcccctaaaaggaacctatgtcttgagtcttgtatttgctattccttggcattgtcactgaagatttttacaataatacccaaatcacagtttgacctgtatttttttaacttccccatacagagaactcacactgyatgtatattatgtgttggggagttatctctgatgtgggagggtgcttatccttttaatttttttttctttttgagatggagtttcactcttgttgctcaggctggagtgtaggggcgggatctcagctcacttgatctcagctgcttggttcagctccatctagcatctttccccacactgtcacccccagcaccaggggactgagagttgatgacctggtacaccaccgcctggatctgctgcagtgtcctttcctgtctagtccgcactcaaagctgacctcttcctatattatacccagacagtgggccaaacaatatacttag

SEQ ID NO: 244459 - DNA, 583 bp, Homo sapiens
aaatatataaataaataaataaataaagttttatgatcaagtaactaactacctggatatcccctcctggcataagaaacagaacctatgaagccaccctaggctgttgtccaatcctatcccctaaaaggaacctatgtcttgagtcttgtatttgctattccttggcattgtcactgaagatttttacaataatacccaaatcacagtttgacctgtatttttttaacttccccatacagagaactcacactgtatgtatattatgtgttggggagttatctctgatgtgggagggtgcttatccttttaatttttttttctttttgagatggagtttcactcttgttgctcaggctggagtgtaggggcgggatctcagctcacttgatctcagctgcttggttcagctccatctagcatctttccccacrctgtcacccccagcaccaggggactgagagttgatgacctggtacaccaccgcctggatctgctgcagtgtcctttcctgtctagtccgcactcaaagctgacctcttcctatattatacccagacagtgggccaaacaatatacttag

SEQ ID NO: 244460 - DNA, 517 bp, Homo sapiens
agaatctgcttcctttaaaaagattggagacaagatgaaaactacaatccaggaaagagtcctgggaggagggcaagagctggacaggtctgaaaattagtctcttgataccacaatgagatttgtatgcagggaccaccgtaggtgacatccaastccctgtgatcacaggtggtggtgggacaaggttctactgaagggccaaggagaatgaaggagcaaagatgacccagctgagcagtgaccacataaagtccatactggcctgagcacccactaggcacagccccatctattctcctcccctgcaacaaatcagcacaagaaacacatggactctggaaggttctcatgtgttccatttattttgtctctcaaattttaggaatcttctcctttaattaagtcatcaacctctcatggcaagaatttgaaaaagtaaatgtttactcagattctaattttaagagggaagtaagaagttacagctcagtgcacataaagttgagaaaaagat

SEQ ID NO: 244461 - DNA, 583 bp, Homo sapiens
tgcctggcactgaatcaaaactcaaaaaacttgctgaattaagccaaatgcacctcctgtgggttttyccccctaatatcctcagaggcagtaatcaattccctccccaaattccccagtccccaccccatccccacctttccttttgcagtataatctcaactcctgtgatgggggcaggcaggatagcatggtagtgagatcaacagactgtgacttgggttcttgtcgctacttagccattcgttctctatgtgaccttgggatgggactttagggggatttctttaataacctctaaactcccgtgcaatgctgagagccaaggtagcggctctcaggtcttgttccaagaactgccaccagagggcagcctagagactcctctcaggtgttttcctccagagcctttgctctttccctcactaatgtcatccactccctgggtccaccatcaaggcacacaggtgtccctttagccgtcaaggtgaccgttctaaggtgagccaggcatgtgaggcgaggcgagacaggctctgaagccctcaggaaaattcaggcacaggctgcttgtccaagtgga

SEQ ID NO: 244462 - DNA, 583 bp, Homo sapiens
tgcctggcactgaatcaaaactcaaaaaacttgctgaattaagccaaatgcacctcctgtgggtttttccccctaatatcctcagaggcagtaatcaattccctccccaaattccccagtccccaccccatccccacctttccttttgcagtataatctcaactcctgtgatgggggcaggcaggatagcatggtagtgagatcaacagactgtgacttgggttcttgtcgctacttagccattcgttctctrtgtgaccttgggatgggactttagggggatttctttaataacctctaaactcccgtgcaatgctgagagccaaggtagcggctctcaggtcttgttccaagaactgccaccagagggcagcctagagactcctctcaggtgttttcctccagagcctttgctctttccctcactaatgtcatccactccctgggtccaccatcaaggcacacaggtgtccctttagccgtcaaggtgaccgttctaaggtgagccaggcatgtgaggcgaggcgagacaggctctgaagccctcaggaaaattcaggcacaggctgcttgtccaagtgga

SEQ ID NO: 244463 - DNA, 583 bp, Homo sapiens
tgcctggcactgaatcaaaactcaaaaaacttgctgaattaagccaaatgcacctcctgtgggtttttccccctaatatcctcagaggcagtaatcaattccctccccaaattccccagtccccaccccatccccacctttccttttgcagtataatctcaactcctgtgatgggggcaggcaggatagcatggtagtgagatcaacagactgtgacttgggttcttgtcgctacttagccattcgttctctatgtgaccttgggatgggactttagggggatttctttaataacctctaaactccsgtgcaatgctgagagccaaggtagcggctctcaggtcttgttccaagaactgccaccagagggcagcctagagactcctctcaggtgttttcctccagagcctttgctctttccctcactaatgtcatccactccctgggtccaccatcaaggcacacaggtgtccctttagccgtcaaggtgaccgttctaaggtgagccaggcatgtgaggcgaggcgagacaggctctgaagccctcaggaaaattcaggcacaggctgcttgtccaagtgga

SEQ ID NO: 244464 - DNA, 521 bp, Homo sapiens
cctagcctcctgagcagctaggactacaggcacaccatcatgcccagctaatttttttaactttttgtagaggcggggttctcgctgtgttgccgaggctgatctcaagctcctggactcaaacaagcctcctgccttggcctcccaaagtggtaggattacaggcatgagccatcatgcctgactcaaaacagtttttcaaagttacttaggccagctccttcttctccatccgtttcactgtgcttacatgagtcatttgtcagagtctgctttccatctttccctccacatcctggttgatttgctgaatttccataccctaaaaatcactttttgtagtgtacagttctatggattttgataaatggtagagtcacgtattcggcgcaccgaatcccttcatcctcctcaatctccccccatgccgttcctttagagccaacccttctcccacttcccaaaccctggmaacatggatcttgtttctttccctataattttgccattttcagaatgtc

SEQ ID NO: 244465 - DNA, 485 bp, Homo sapiens
gctgatttgtagtgtttgacaattgctgtggtgtaagtatttccaacccagcatattttaagctaccagtgtcacatcactcagctcagaattgggaagaactgcacaatctcttgtgggccrggatgagccagctccagcacaccactgatttatactctgcttcactcctcaaatggtaacttacccgcaggatcacaagaaaacaggaagaacatcaataaatgtgaaatcgatgtaagaaaaatatgtattcaaagaacaatcaagaccagagagcagagatggagtgggaggtcagagagtaacagtcacaggccacacaaggaattgctgtgaggaccagaaatttgtcatacatgagacaatcggaagcccgcattttggatggctgaacatttttatgcttctttcttttctctatttctctctctctttctttccttctttcttttttctttctctttctctctcagtttctttct

SEQ ID NO: 244466 - DNA, 514 bp, Homo sapiens
gaggctgaggttgtctcagagcctgtggtagagtctgtggtgatcttagagcctgtagttaaggccgtagtagaggccatggtggaggccatggtggtctcagagcctgtgatggaggctgtggtggtgtcrgagccttttgtgaaggctgtggtattctcagagcctgaggtggagaacaaataaggtggtgggaatgggttaaagatgaatttgcaggtttagtatagtgttactttcacatatactcagtacttcttattcatttatttattcagttattgagggcttaacatgtacctggtattttactaaactctgggcatactcctgtcagcaaaagggatatgggcttataatttagtaaagaagagagctacaacataaaatataaatacacattggcttaagtgctgttaaagaaagcagtggtgctgctttagatactggagtcagaaaaggtctctctgaggaactgacatatgaactgagatctgaaggataagaaggcagc

SEQ ID NO: 244467 - DNA, 514 bp, Homo sapiens
gaggctgaggttgtctcagagcctgtggtagagtctgtggtgatcttagagcctgtagttaaggccgtagtagaggccatggtggaggccatggtggtctcagagcctgtgatggaggctgtggtggtgtcagagccttttgtgaaggctgtggtattctcagagcctgaggtggagaacaaataaggtggtgggaatgggttaaagatgaatttgcaggtttagtatagtgttactttcacatatactcagtactkcttattcatttatttattcagttattgagggcttaacatgtacctggtattttactaaactctgggcatactcctgtcagcaaaagggatatgggcttataatttagtaaagaagagagctacaacataaaatataaatacacattggcttaagtgctgttaaagaaagcagtggtgctgctttagatactggagtcagaaaaggtctctctgaggaactgacatatgaactgagatctgaaggataagaaggcagc

SEQ ID NO: 244468 - DNA, 505 bp, Homo sapiens
ctctcttgctaattttcctcttctattctctctctgtcatcccctgtttcctttctgtctcacactcagcttcttcctctttctctgggcatgagccgaactgtgctgtgccctggctccccttgtctgtctgcaaaaacaggcagctctgcggaaatgactcagcagtaacctttatcaacagcttttagaagccagctgccacacacagctgtgccgctggctctctcttccttcaggtatagcagcttaactctctctctctctctctttctytcacacacacacacaaactttctgagcttccctcagtatttccttaattggttttttattccatccgttaatcttttgcagtttcttgtaatattacatcagcttttagttacaaaattaacctttaaaaggccttgccctactgggtcctctggatttaatcctgaatattttttcacttgatccctgagcctctgcagaaatgcagagggagtctcctcttcttgtt

SEQ ID NO: 244469 - DNA, 527 bp, Homo sapiens
aaaggccttgccctactgggtcctctggatttaatcctgaatattttttcacttgatccctgagcctctgcagaaatgcagagggagtctcctcttcttgttgttggatcttgaatgctttggggacgttttgtgtcctatgagtggactgcataatccctctaattattagctccctawggtcttgcatttggacccgatccctggggtcattattatcccatccagggtctgcatttgggaatttctgcttagctggcaggactccttacccaggaggatgctgctgtctctcccaaatgattatggctgcccttctaattattcccgtctttttcccagtaaacagaatattcatgattgaattatctcagcccaagtataaaaattaggttctaaaaattgatctagctgttctgctaaactgaggggatcttccgagagtggcctaatttcctttttaaaattcctaacctcagtacttgttaaaggcacacttacaaatccaatttattattattatcatt

SEQ ID NO: 244470 - DNA, 527 bp, Homo sapiens
aaaggccttgccctactgggtcctctggatttaatcctgaatattttttcacttgatccctgagcctctgcagaaatgcagagggagtctcctcttcttgttgttggatcttgaatgctttggggacgttttgtgtcctatgagtggactgcataatccctctaattattagctccctaaggtcttgcatttggacccgatccctggggtcattattatcccatccaggrtctgcatttgggaatttctgcttagctggcaggactccttacccaggaggatgctgctgtctctcccaaatgattatggctgcccttctaattattcccgtctttttcccagtaaacagaatattcatgattgaattatctcagcccaagtataaaaattaggttctaaaaattgatctagctgttctgctaaactgaggggatcttccgagagtggcctaatttcctttttaaaattcctaacctcagtacttgttaaaggcacacttacaaatccaatttattattattatcatt

SEQ ID NO: 244471 - DNA, 527 bp, Homo sapiens
aaaggccttgccctactgggtcctctggatttaatcctgaatattttttcacttgatccctgagcctctgcagaaatgcagagggagtctcctcttcttgttgttggatcttgaatgctttggggacgttttgtgtcctatgagtggactgcataatccctctaattattagctccctaaggtcttgcatttggacccgatccctggggtcattattatcccatccagggtctgcatttgggaatttctgcttagctggcaggactcmttacccaggaggatgctgctgtctctcccaaatgattatggctgcccttctaattattcccgtctttttcccagtaaacagaatattcatgattgaattatctcagcccaagtataaaaattaggttctaaaaattgatctagctgttctgctaaactgaggggatcttccgagagtggcctaatttcctttttaaaattcctaacctcagtacttgttaaaggcacacttacaaatccaatttattattattatcatt

SEQ ID NO: 244472 - DNA, 527 bp, Homo sapiens
aaaggccttgccctactgggtcctctggatttaatcctgaatattttttcacttgatccctgagcctctgcagaaatgcagagggagtctcctcttcttgttgttggatcttgaatgctttggggacgttttgtgtcctatgagtggactgcataatccctctaattattagctccctaaggtcttgcatttggacccgatccctggggtcattattatcccatccagggtctgcatttgggaatttctgcttagctggcaggactccttacccaggaggatgctgctgtctctcccaaatgattatggctgcccttctaattattcccgtctttttcccagtaaacagaatattcatgattgaattatctcagcccaagtataaaaattaggttctaaaaattgatctagctgttctgctaaactgaggggatcttccgagagtggcctmatttcctttttaaaattcctaacctcagtacttgttaaaggcacacttacaaatccaatttattattattatcatt

SEQ ID NO: 244473 - DNA, 554 bp, Homo sapiens
ggattactacaactcagagcaggaagaagagtaggagggcagaagaggagttccaacagaaagttaatcatgatgagaaactatgggacccctcctctctgcaaatgtcacaatctggttcctttaaaaagaytggagaaaaatcaaaaatacaattgaggaaaaagccctgggaggaaggcaagacctggacaggtctgaaaatttgtctcttgataccacaaggagatttgtatgcagggaccaccgtaggtgacatccaactccctgtgatcacaggtcttggtgggacaagtttctactgaagggccaaggacaatggagcagcaaagatgacccagccaagcagtgaccacataaagcccatggtggccggaacagaaactgggcacagccccatctactctcctcccctgcaacaaatcagcataagcaacacgtggactctggaaggttctcatgtgttccatttattttgtctctcaaattttaggaatcttctcctttaattaactcatcaacctctcatggcaagaatttgagaaagtaaattt

SEQ ID NO: 244474 - DNA, 567 bp, Homo sapiens
acttacatatctttgtttattaactgttctggaagttttttactttcttcattataggaggagaagtttagtttggcttttaataatagtaagtcattctgttgggacattaggggcatttgtttactaatagctgctttaattaacctttgtgttaaataaacccttcacacaaggtatgatacaacatcctatggctgttaagaccccagccataatcacgagagatgtaagaaytgaaggtaccattcctttctatttttcaaaccaaccttctaaccagttagtaaaaaggtcatttactcctgtgttttctgccagctcgttgactagagttgttagtccctgccatccctttatgatggttccatttggggcagcattgttgtgaatggaagtgtcacattttccacccagcatatcacatatatcacctttctctgctaatattatgtccagtgtaattctgttttcccaagccatttagctagtggcatttagttgtctggctactcccttaagggcattttgcgtgtaattgatgaatctttgctgattataagacat

SEQ ID NO: 244475 - DNA, 567 bp, Homo sapiens
acttacatatctttgtttattaactgttctggaagttttttactttcttcattataggaggagaagtttagtttggcttttaataatagtaagtcattctgttgggacattaggggcatttgtttactaatagctgctttaattaacctttgtgttaaataaacccttcacacaaggtatgatacaacatcctatggctgttaagaccccagccataatcacgagagatgtaagaattgaaggtaccattcctttcyatttttcaaaccaaccttctaaccagttagtaaaaaggtcatttactcctgtgttttctgccagctcgttgactagagttgttagtccctgccatccctttatgatggttccatttggggcagcattgttgtgaatggaagtgtcacattttccacccagcatatcacatatatcacctttctctgctaatattatgtccagtgtaattctgttttcccaagccatttagctagtggcatttagttgtctggctactcccttaagggcattttgcgtgtaattgatgaatctttgctgattataagacat

SEQ ID NO: 244476 - DNA, 583 bp, Homo sapiens
aaagtgaaaggtcagagatctgtcacaataagawtgtgtgctgtgacatgaggcaccagaagtctgtggacagtgaagccaataaatccttttaacccctagatgtagaaaattataagcgtattactcagtctcatcaaagtctagtcaaaatggaagctctcttctttaggaatatacttattaaatatgcatatacaattatacatacatcatgaaataaaatgatctcttgcatatttgcacatgaaattaatagaagttattctgacatcagaaaaggaattggaagaagaaaaaaagtttggttccagccaaaaccagcaatttattgaagggaagggatacattttaaatagaatagatgcctagattgtttgacaatcacttgatgaagaattaaccacataaacacattaaaacttaaaaaacttgttgttttggcataaaatattgacatctacaaacagtttcatactacacctttacaacaaggacttaacgaaaaacaggccaatgactttcagcaacttaaaagagtatttaagattagtcactgcccaagaaaacttgaaatgccctg

SEQ ID NO: 244477 - DNA, 583 bp, Homo sapiens
aaagtgaaaggtcagagatctgtcacaataagaatgtgtgctgtgacatgaggcaccagaagtctgtggacagtgaagccaataaatccttttaacccctagatgtagaaaattataagcgtattactcagtctcatcaaagtctagtcaaaatggaagctctcttctttaggaatatacttattaaatatgcatatacaattatacatacatcatgaaataaaatgatctcttgcatatttgcacatgaaattaatagaagttattctgacatcagaaaaggaattggaagaagaaaaaaagtttggttccagccaaaaccagcaatttattgaagggaagggatacattttaaatagaatagatgcctagattgtttgacaatcacttgatgaagaattaaccacataaacacattaaaacttaaaaaamttgttgttttggcataaaatattgacatctacaaacagtttcatactacacctttacaacaaggacttaacgaaaaacaggccaatgactttcagcaacttaaaagagtatttaagattagtcactgcccaagaaaacttgaaatgccctg

SEQ ID NO: 244478 - DNA, 583 bp, Homo sapiens
aaagtgaaaggtcagagatctgtcacaataagaatgtgtgctgtgacatgaggcaccagaagtctgtggacagtgaagccaataaatccttttaacccctagatgtagaaaattataagcgtattactcagtctcatcaaagtctagtcaaaatggaagctctcttctttaggaatatacttattaaatatgcatatacaattatacatacatcatgaaataaaatgatctcttgcatatttgcacatgaaattaatagaagttattctgacatcagaaaaggaattggaagaagaaaaaaagtttggttccagccaaaaccagcaatttattgaagggaagggatacattttaaatagaatagatgcctagattgtttgacaatcacttgatgaagaattaaccacataaacacattaaaacttaaaaaacttgttgttttggcataaaatattgacatctacaaacagtttcatactacaccttyacaacaaggacttaacgaaaaacaggccaatgactttcagcaacttaaaagagtatttaagattagtcactgcccaagaaaacttgaaatgccctg

SEQ ID NO: 244479 - DNA, 577 bp, Homo sapiens
actcaagtatggtggctgtgttggtcaatctgtgagcttagaaagaattaaacgtgagcggctatgtgaccacagagagaaatggagagaatagcttcctatttttcagttgagttttttgctactacaaaattatataaccaaaaatagatgattttaactatgtaacttaaagggttatacatacacttggctcaaaaaataatatattaaaaggtatagattaagtaggactgtgaccaccttgcccttcttmattcattccacctaccactacccccgtccctggcccaccggtacacacttttattagttttctgcgtatcctttcaatgtttctttatgtaaatagaagttaaatacaactatatatattggtatttctcccctttattaagcaaagttttgcatactaaacactgttctgtcacttaacaatgttgcctaaagattgttgtcattggaatatagagagcctgtatacaatggctgttcagtatggcaactgaaaaattagctgttttgtgccaggtaccatggtaagtgctgaggatgtcaagatgaaaaactatggcca

SEQ ID NO: 244480 - DNA, 577 bp, Homo sapiens
actcaagtatggtggctgtgttggtcaatctgtgagcttagaaagaattaaacgtgagcggctatgtgaccacagagagaaatggagagaatagcttcctatttttcagttgagttttttgctactacaaaattatataaccaaaaatagatgattttaactatgtaacttaaagggttatacatacacttggctcaaaaaataatatattaaaaggtatagattaagtaggactgtgaccaccttgcccttcttaattcattccacctaccactacccccgtccctggcccaccggtacacacttttattagttttctgcgtatcctttcaatgtttctttatgtaaatagaagttaaatacaactatatatattggtatttctcccctttattaagcaaagttttgcatactaaacactgttctgtcacttaacaatgttgcctaaagattgttgtcattggaatatagagagcctgtatamaatggctgttcagtatggcaactgaaaaattagctgttttgtgccaggtaccatggtaagtgctgaggatgtcaagatgaaaaactatggcca

SEQ ID NO: 244481 - DNA, 473 bp, Homo sapiens
tttttaaattaatgattaaatgtttgagacatgacagagccttgggtgctgcagggaaaacagtttgagacagagaaaggagaaacaacagtatctctgagtttttcttgtaaatacctttaataacaatgttcttcaataagttaacacagttgagaacatagagtaactagatcaaatagttccaagacttcagtgccataaraatcatgccttgaaaataagtctttgttttgtctaagatgtctcaaatttagtggaagtatgccccaagcgccaattttcttattgacatatcatcttcagaaaacatttgcctacacttaaaaaaaaatacacacacactgctctgtctatggagtagccattcttttctttctttacttctctaataaacttgctttcacttagaaaaaattgcataatcagattgcttctcatttataaaaatgggaatctcatacttcagtcaa

SEQ ID NO: 244482 - DNA, 473 bp, Homo sapiens
tttttaaattaatgattaaatgtttgagacatgacagagccttgggtgctgcagggaaaacagtttgagacagagaaaggagaaacaacagtatctctgagtttttcttgtaaatacctttaataacaatgttcttcaataagttaacacagttgagaacatagagtaactagatcaaatagttccaagacttcagtgccataaaaatcatgccttgaaaataagtctttgttttgtctaagatgtctcaaatttagtggaagtatgccccaagygccaattttcttattgacatatcatcttcagaaaacatttgcctacacttaaaaaaaaatacacacacactgctctgtctatggagtagccattcttttctttctttacttctctaataaacttgctttcacttagaaaaaattgcataatcagattgcttctcatttataaaaatgggaatctcatacttcagtcaa

SEQ ID NO: 244483 - DNA, 473 bp, Homo sapiens
tttttaaattaatgattaaatgtttgagacatgacagagccttgggtgctgcagggaaaacagtttgagacagagaaaggagaaacaacagtatctctgagtttttcttgtaaatacctttaataacaatgttcttcaataagttaacacagttgagaacatagagtaactagatcaaatagttccaagacttcagtgccataaaaatcatgccttgaaaataagtctttgttttgtctaagatgtctcaaatttagtggaagtatgccccaagcgccaattttcttattgacatatcatcttcagaaaacatttgcctacacttaaaaaaaaatacacacacactgctctgtctatggagtagccattcttttctttctttacttctctaataaacttgctttcacttagaaaaaattgcataatcagattgcttctcatttayaaaaatgggaatctcatacttcagtcaa

SEQ ID NO: 244484 - DNA, 600 bp, Homo sapiens
tggggtgtttgataaacccatgccttgagaaagtgcctccaagccaaaggatttttattcttccagcttgaaattctggttccttgatcaaacaccctcaaattccaatcccagaagtgctcctcggcctcctatggggacgtgccagctagttcctgcaaagctcttcagtgggattcctgctgtatcatgggggtgagacttctgtagcatcttccagcataggaagtgggaaccattactagagaagggtgagcctcctatgcatgcccagaggatcctggagggcacccatcggataaccctgttcctgtttgcagaatctcaggtttccccaccagggtcctgactttcctstaacaggcctgccttggctgagtggcaaacctctctggagcactgtggccctcatagtgatgtcttcagctaccattccacggtatctgccctttcgctacaagagataaagacctctgcatgagacactgcagaggctgtcacatgtagccagtgacagctgttaacaatctgcagattctcatgatactttcacagggcatcattgcagctgagcagcaaccagccaactccactgtcttt

SEQ ID NO: 244485 - DNA, 600 bp, Homo sapiens
tggggtgtttgataaacccatgccttgagaaagtgcctccaagccaaaggatttttattcttccagcttgaaattctggttccttgatcaaacaccctcaaattccaatcccagaagtgctcctcggcctcctatggggacgtgccagctagttcctgcaaagctcttcagtgggattcctgctgtatcatgggggtgagacttctgtagcatcttccagcataggaagtgggaaccattactagagaagggtgagcctcctatgcatgcccagaggatcctggagggcacccatcggataaccctgttcctgtttgcagaatctcaggtttccccaccagggtcctgactttcctctaacaggcctgccttggctgagtggcaaacctctctggagcactgtggccctcatagtgatgtcttcagctaccattccacggtatctgccctttcgctacaagagataaagacctstgcatgagacactgcagaggctgtcacatgtagccagtgacagctgttaacaatctgcagattctcatgatactttcacagggcatcattgcagctgagcagcaaccagccaactccactgtcttt

SEQ ID NO: 244486 - DNA, 592 bp, Homo sapiens
acctggctaatttttgtgttttttgtagagatgggtttttgtcatgttacccaggcttgtcttgaactcctgggctcaagcaatccacccaccttggcctcccaaagttgtggsattacagacatgagccactgcacccagccctaatcttattttaattttagaaatctaacttgacagtttctggtgcctggatccatatttgtctcagaagattgaattgtggactgtgaccttctctcccaaaagtctctttcagggtagaacttctggttatggcaacatgaagagatagaccagcaagttttcctccaacagcaacatgaaaactgtactaaatactaaaaacaaacatttgaagtcactggaaaattaacaaaggcaagcaatatgtgataagagctttcttgtttaagactcctgtcttaggtaaggactgcaagttggtggcctttccttcttacctatgagtgctcttcagcctcccagcagataactgcagccctagtggctcaatatgggcagtttatagagttcagagcccaaatcagctagaaatgtaaatgagaatgttgaaagagagctgcagaag

SEQ ID NO: 244487 - DNA, 592 bp, Homo sapiens
acctggctaatttttgtgttttttgtagagatgggtttttgtcatgttacccaggcttgtcttgaactcctgggctcaagcaatccacccaccttggcctcccaaagttgtgggattacagacatgagccactgcacccagcyctaatcttattttaattttagaaatctaacttgacagtttctggtgcctggatccatatttgtctcagaagattgaattgtggactgtgaccttctctcccaaaagtctctttcagggtagaacttctggttatggcaacatgaagagatagaccagcaagttttcctccaacagcaacatgaaaactgtactaaatactaaaaacaaacatttgaagtcactggaaaattaacaaaggcaagcaatatgtgataagagctttcttgtttaagactcctgtcttaggtaaggactgcaagttggtggcctttccttcttacctatgagtgctcttcagcctcccagcagataactgcagccctagtggctcaatatgggcagtttatagagttcagagcccaaatcagctagaaatgtaaatgagaatgttgaaagagagctgcagaag

SEQ ID NO: 244488 - DNA, 482 bp, Homo sapiens
gcagaataaagaacaagcctgtgactttgaatataaatctccagaatgtgctcaattctaaaatccaaaacacagattgaaataagattaaagaaaaaaatgaagagaacctcatgaacccatcagagaatataaagcaggtgaccagatatgcaagtggatcctcaaaagaagacacaggatcagaaaaaaatatttgagaaaataatagttgaaagtttcccacatttggtgggggattttagctcatatctaaggygttcaataaatgaaagcaaaataactgcagagaaaattacaaatagggtgaccaaggccttggcctggcctgaggcaacttagctagcaccagggatgtgtgttctggtgtggagtaagatcagggagctaccagtgcaatctctgcctctacatcagcgggactgatcattttaattttgattgcagttactgctggtatctgaatcaaagtggtgatgctt

SEQ ID NO: 244489 - DNA, 574 bp, Homo sapiens
tgtggtgtgaagtagggatccagctttattcttttgcataggtatagmctgttgtttctgcactgtttgatgaaaagataatttcttcccctcactgaattatattagcactgttttataaaaccaattaaccatataagtgaagagtattgctgggccctcaattttcttctgacttcattctttttaatgctgttgtaagttggatttttaaataacatttgtattaatgcattgatactctatagaagcacactcaatttttgtattttgatcttgtagcctaccaatgtgctaaactaatttagtattagtggtttagtagttgctaagcttgtttttagtgaattcttttgtatttctatataagattttatcatctgcaattgagatagttttacctcttgctttttaatctagatgacttttatttcatcttattgctcattgtagcttttgaaaaattacattgtattcacagtgccctaccatttgatatttttatttctattatatcatgaacatcctttgaatttcacagaaaaaatggtttaactcatcattttaatgctgt

SEQ ID NO: 244490 - DNA, 574 bp, Homo sapiens
tgtggtgtgaagtagggatccagctttattcttttgcataggtatagcctgttgtttctgcactgtttgatgaaaagataatttcttcccctcactgaattatattagcactgttttataaaaccaattaaccatataagtgaagagtattgctgggccctcaattttcttctgacttcattctttttaatgctgttgtaagttggatttttaaataacatttgtattaatgcattgatactctatagaagcacactcaatttttgtattttgatcttgtagcctaccaatgtgctaaactaatttagtattagtggtttagtagttgctaagcttgtttttagtgaattctttygtatttctatataagattttatcatctgcaattgagatagttttacctcttgctttttaatctagatgacttttatttcatcttattgctcattgtagcttttgaaaaattacattgtattcacagtgccctaccatttgatatttttatttctattatatcatgaacatcctttgaatttcacagaaaaaatggtttaactcatcattttaatgctgt

SEQ ID NO: 244491 - DNA, 639 bp, Homo sapiens
ctcataatctgactgtaagaaaccttcagataaggtattgggaacttctgtaaaattgtagctgggytgtgattagagaattttcacaatatcaacaaatcttacaaaagagctgctgatccaacaggtcctcagagatcctgtgtgggaaccagaaggtattctgtgaaaaacgacaataagaataaccataataacaataatggctgcatttaaaaggctcttgctatatttcaggcactggtttttgtacctacatggattattttgttcaatatttatcacaaccatatgagaaggatgttattatccacaataaataaatgaaatctgtaaactgtaacttgttcaagaaaattaggtacagagatgttaagttacttgcccaaagttccataattttgaagatatgaggctagaattcagttccaggccattttacactagatctactaatttagccactgtatgattgtaccaagactgacctaaagctacctccccttccccaacaggttcttttatgacagtgagtataaaatacagggctaatgacgtattgggtgcagagaggggttggaaagaatgtggtatttcagactatgcttactatgcttaaaaatcacaattccgtggtga

SEQ ID NO: 244492 - DNA, 639 bp, Homo sapiens
ctcataatctgactgtaagaaaccttcagataaggtattgggaacttctgtaaaattgtagctgggttgtgattagagaattttcacaatatcaacraatcttacaaaagagctgctgatccaacaggtcctcagagatcctgtgtgggaaccagaaggtattctgtgaaaaacgacaataagaataaccataataacaataatggctgcatttaaaaggctcttgctatatttcaggcactggtttttgtacctacatggattattttgttcaatatttatcacaaccatatgagaaggatgttattatccacaataaataaatgaaatctgtaaactgtaacttgttcaagaaaattaggtacagagatgttaagttacttgcccaaagttccataattttgaagatatgaggctagaattcagttccaggccattttacactagatctactaatttagccactgtatgattgtaccaagactgacctaaagctacctccccttccccaacaggttcttttatgacagtgagtataaaatacagggctaatgacgtattgggtgcagagaggggttggaaagaatgtggtatttcagactatgcttactatgcttaaaaatcacaattccgtggtga

SEQ ID NO: 244493 - DNA, 529 bp, Homo sapiens
ccactcagcaccaaggtgactttctggggagaccttcaagcaaggatgttttccttatactgaggagctggctttgggatcctggtgaaatgaggagaacactctattaaatttcccactctgagtgctacctgaactctgtcttctattccaaatgccttaggaggccatgaaaactaaaccttaattatcctacattaagtaaataagctcagcaaaaaaagtaaatgcacaattccgtgatttaggatttgacaatttttattaaagtttaagcctctcaatgcttctacattgtgttttattttttcaccatccatttttgttagcatgagggtaggtatgtttacctaaatgtgccatgtgagtggttcaaatctcctccccaaygctccttatcacaaaccttaccatcttattcctttaaagtcactgactatctaagcaaactactagctactgctgtgcattgattaggacccaacagtaagacatttctccttttggtaaactgcacttccagatggtc

SEQ ID NO: 244494 - DNA, 529 bp, Homo sapiens
ccactcagcaccaaggtgactttctggggagaccttcaagcaaggatgttttccttatactgaggagctggctttgggatcctggtgaaatgaggagaacactctattaaatttcccactctgagtgctacctgaactctgtcttctattccaaatgccttaggaggccatgaaaactaaaccttaattatcctacattaagtaaataagctcagcaaaaaaagtaaatgcacaattccgtgatttaggatttgacaatttttattaaagtttaagcctctcaatgcttctacattgtgttttattttttcaccatccatttttgttagcatgagggtaggtatgtttacctaaatgtgccatgtgagtggttcaaatctcctccccaatgctccttatcacaaaccttaccatcttattcctttaaagtcactgactatctaagcaaactactagctactgctgtgcattgattaggacccaacagtaagacrtttctccttttggtaaactgcacttccagatggtc

SEQ ID NO: 244495 - DNA, 427 bp, Homo sapiens
cttctgtccatagtaccttccccagcacacacattttcatcctcctcgtgtaggcaggtggagattttgagtgcattgagagccagagttaaaattactgacttacgtgamtgctactcagacctgagccacatggtaaactctcttagtttttctttccacatatgctgaagttttcaagatttgatcattgcctagtattttcattttcttactttccatgaaccttaaatgaattcaccaactgttccttagttgagtaaatgtcttctcaatacctttaaacttatgttggctgttgtcaaggtcatcttcttggagatggcttcccctctgctgtccacccacccaggtgaccctcttcctttctggtcctgttgccctttcaccttttcatgggttgatgcctgatttcatacatcccata

SEQ ID NO: 244496 - DNA, 427 bp, Homo sapiens
cttctgtccatagtaccttccccagcacacacattttcatcctcctcgtgtaggcaggtggagattttgagtgcattgagagccagagttaaaattactgacttacgtgactgctactcagacctgagccacatggtaaactctcttagtttttctttccacayatgctgaagttttcaagatttgatcattgcctagtattttcattttcttactttccatgaaccttaaatgaattcaccaactgttccttagttgagtaaatgtcttctcaatacctttaaacttatgttggctgttgtcaaggtcatcttcttggagatggcttcccctctgctgtccacccacccaggtgaccctcttcctttctggtcctgttgccctttcaccttttcatgggttgatgcctgatttcatacatcccata

SEQ ID NO: 244497 - DNA, 427 bp, Homo sapiens
cttctgtccatagtaccttccccagcacacacattttcatcctcctcgtgtaggcaggtggagattttgagtgcattgagagccagagttaaaattactgacttacgtgactgctactcagacctgagccacatggtaaactctcttagtttttctttccacatatgctgaagttttcaagatttgatcattgcctagtattttcattttcttactttccrtgaaccttaaatgaattcaccaactgttccttagttgagtaaatgtcttctcaatacctttaaacttatgttggctgttgtcaaggtcatcttcttggagatggcttcccctctgctgtccacccacccaggtgaccctcttcctttctggtcctgttgccctttcaccttttcatgggttgatgcctgatttcatacatcccata

SEQ ID NO: 244498 - DNA, 589 bp, Homo sapiens
caatgtcttgagtgactaaaaggcattttctttcactttgtagtcttgggcttccttcagtctgcctctctcctcttttcctgtgaccccaggcaggctttgtcattcccttcctcctctggggtgccctctgggcttcagagcagccctggtgagaatctgcagggcaacctgcacactagctggctgggcttctgagcccctccacactcactcatatgcctctcccacctccctccagtggtgagatcgggaatacaactcactgagtctccaagtccartggattttctatcccagggatgagcatgtcctagtcatcttctgtgaagtagagggaggcttctgttcccttctgggcttcaattctgcacttccagagttccccattcttcacgtttagtcactctacctccctacacatatttttggaatcaaccaaccaggctagatggaccagccagtccccaacgtgagagctggcagggaagttcttaaataacggtttagttttcctatagtgtgacaaaactggctccaaatgccaaatgaaacccctttagtgcatgccccgtgtgctcagaaattt

SEQ ID NO: 244499 - DNA, 589 bp, Homo sapiens
caatgtcttgagtgactaaaaggcattttctttcactttgtagtcttgggcttccttcagtctgcctctctcctcttttcctgtgaccccaggcaggctttgtcattcccttcctcctctggggtgccctctgggcttcagagcagccctggtgagaatctgcagggcaacctgcacactagctggctgggcttctgagcccctccacactcactcatatgcctctcccacctccctccagtggtgagatcgggaatacaactcactgagtctccaagtccaatggattttctatcccagggatgagcatstcctagtcatcttctgtgaagtagagggaggcttctgttcccttctgggcttcaattctgcacttccagagttccccattcttcacgtttagtcactctacctccctacacatatttttggaatcaaccaaccaggctagatggaccagccagtccccaacgtgagagctggcagggaagttcttaaataacggtttagttttcctatagtgtgacaaaactggctccaaatgccaaatgaaacccctttagtgcatgccccgtgtgctcagaaattt

SEQ ID NO: 244500 - DNA, 589 bp, Homo sapiens
caatgtcttgagtgactaaaaggcattttctttcactttgtagtcttgggcttccttcagtctgcctctctcctcttttcctgtgaccccaggcaggctttgtcattcccttcctcctctggggtgccctctgggcttcagagcagccctggtgagaatctgcagggcaacctgcacactagctggctgggcttctgagcccctccacactcactcatatgcctctcccacctccctccagtggtgagatcgggaatacaactcactgagtctccaagtccaatggattttctatcccagggatgagcatgtcctagtcatcttctgtgaagtagagggaggcttctgttcccttctgggcttcaattctgcacttccagagttccccattcttcacgtttagtcactctacctccctacacatatttttggaatcaaccaaccaggctagatggaccagccagtccccaacstgagagctggcagggaagttcttaaataacggtttagttttcctatagtgtgacaaaactggctccaaatgccaaatgaaacccctttagtgcatgccccgtgtgctcagaaattt

SEQ ID NO: 244501 - DNA, 523 bp, Homo sapiens
tccctgcttctagtgagcaaaggccgccgcccgagcttcttagcccttcatatttactgggtaataagggcaaggaggaggaggtaatgattggtcagctgcttaattgatcacaggttcatattgttactggcaggcttcaattgtggcaaatcataagaaacattcgtgcggcctccaacatctactcctttttgttttaaaattaattgagcaaggtaattgcaggctgtgcagctcttaattgccggttggtgatccagcttcatttttcttagcccttattcaaaatagagttgctgtggtttgaatgyttcttacatatctcccccttccctttttacaagaggacgcttaatcctaagggttgcagaaggatgaaggtctgtcttctgcaacttcttcatgcagaataagggcgatgatattcctgcctaactattagggtctcttgtattcagggtagagaggagctgagtcagaaagcactggtccgttaaacatcgattgtacttctgagttc

SEQ ID NO: 244502 - DNA, 492 bp, Homo sapiens
gatatttttccctggactcaaaagttgctcaggcaaaactaagactcctgggctcaagagatccttctgcctcagttcttcttgtagctggaaatacaggtacacctggaaakcacttagaaataaatgcttgttgatttcaatcaccttccaaacctggaggagggttattctgaggggcattgaactaattgaactattctgagggaatggtactaaacgattcatgagaagccacccccatgatgcaatcacctcccttgaggcctcacctccaacactggggattatatctcaacatgagatttgggtggggacaacacccaatttatatcagacatcaacacgccttacattaatgcacccctcaaattaccatagtgatttccacaggactgtgtcctatacgggtattcttttcataggccagttttccattgctctcttaattatatggccaggccatcagtcaatgcccataagtcagtaaaa

SEQ ID NO: 244503 - DNA, 538 bp, Homo sapiens
tgctgcagccctcagtgtctacttatttcacggacccaggtgatcaccacaagcaaacgtggatttttttgagatgtggtattgatatttttccctggactcaaaagttgctcaggcaaaactaagactcctgggctcaagagatccttctgcctcagttcttcttgtagctggaaatacaggtacacctggaaatcacttagaaataaatgcttgttgatttcaatcaccttccaaacctggaggagggttattctgaggggcattgaactaattgaactattctgagggaatggtactaaacgattcatgagaagccacccccatgatgcaatcacctccctygaggcctcacctccaacactggggattatatctcaacatgagatttgggtggggacaacacccaatttatatcagacatcaacacgccttacattaatgcacccctcaaattaccatagtgatttccacaggactgtgtcctatacgggtattcttttcataggccagttttccattgctctcttaattatat

SEQ ID NO: 244504 - DNA, 538 bp, Homo sapiens
tgctgcagccctcagtgtctacttatttcacggacccaggtgatcaccacaagcaaacgtggatttttttgagatgtggtattgatatttttccctggactcaaaagttgctcaggcaaaactaagactcctgggctcaagagatccttctgcctcagttcttcttgtagctggaaatacaggtacacctggaaatcacttagaaataaatgcttgttgatttcaatcaccttccaaacctggaggagggttattctgaggggcattgaactaattgaactattctgagggaatggtactaaacgattcatgagaagccacccccatgatgcaatcacctcccttsaggcctcacctccaacactggggattatatctcaacatgagatttgggtggggacaacacccaatttatatcagacatcaacacgccttacattaatgcacccctcaaattaccatagtgatttccacaggactgtgtcctatacgggtattcttttcataggccagttttccattgctctcttaattatat

SEQ ID NO: 244505 - DNA, 538 bp, Homo sapiens
tgctgcagccctcagtgtctacttatttcacggacccaggtgatcaccacaagcaaacgtggatttttttgagatgtggtattgatatttttccctggactcaaaagttgctcaggcaaaactaagactcctgggctcaagagatccttctgcctcagttcttcttgtagctggaaatacaggtacacctggaaatcacttagaaataaatgcttgttgatttcaatcaccttccaaacctggaggagggttattctgaggggcattgaactaattgaactattctgagggaatggtactaaacgattcatgagaagccacccccatgatgcaatcacctcccttgaggcctcacctccaacactggggattatatctcaacatgagatttgggtggggacaacacccaatttatatcagacatcaacaygccttacattaatgcacccctcaaattaccatagtgatttccacaggactgtgtcctatacgggtattcttttcataggccagttttccattgctctcttaattatat

SEQ ID NO: 244506 - DNA, 538 bp, Homo sapiens
tgctgcagccctcagtgtctacttatttcacggacccaggtgatcaccacaagcaaacgtggatttttttgagatgtggtattgatatttttccctggactcaaaagttgctcaggcaaaactaagactcctgggctcaagagatccttctgcctcagttcttcttgtagctggaaatacaggtacacctggaaatcacttagaaataaatgcttgttgatttcaatcaccttccaaacctggaggagggttattctgaggggcattgaactaattgaactattctgagggaatggtactaaacgattcatgagaagccacccccatgatgcaatcacctcccttgaggcctcacctccaacactggggattatatctcaacatgagatttgggtggggacaacacccaatttatatcagacatcaacacgycttacattaatgcacccctcaaattaccatagtgatttccacaggactgtgtcctatacgggtattcttttcataggccagttttccattgctctcttaattatat

SEQ ID NO: 244507 - DNA, 567 bp, Homo sapiens
aatgaaaatataaggaacaatatttttgtacagctttgtaacatgttggtcttttaagctaagtgctattacaaaagctgaaaagttttaaaaattaaagtttataaagttaaaaaagttacattaagctaaggttaatttattattaaagaaagaaaattatttttaaaatcaatttagtgtaacctaagtgtacagcatttataaaatctacagtagtgcacagtaatggcctaggccttcagttcactcaccactcacttgctgactcacccagagcaacttccagtcctgtaagctccattcatgatgagtaacctatataggtgtgccattktaaaaatctttttaccatatttttactgtactttttctgtttacatatgtttagatccacaaatacctaccattgtgttacaattgcctacagtactcagtatagtaatgtgctatccaagtttgtagcctaggagcaataggctttatgatatagcgtaggtgtgcagtaggctatatcatctagctttgtgtatggacactttatgatgttcacgtaagaccaaatca

SEQ ID NO: 244508 - DNA, 576 bp, Homo sapiens
taataaaatgaatgcccttataaaagggaccccagattgcttgctccttccaccacgtggggacaccaagaaamggcaacatccatgaatcaggaagcagccctcaccatacactgactcttcccaggccttgatctttgacttcccagcctccggaactgtgagaaatagatttctgttgtatgcaagccacatagactatggaattcttttataactgcccagattgactaagacggacgatcatgaaaataccaaggattggaaattaaacatcaaaattctgaataacaacttattcaaagaggaaatcacaggagaaattagaaagtcttctgttttctgaagaatactgaagcacaacatatcaaatgtatgggatgcagttgaagtagtgttagatataaaaagagttcctctttaagggttaacttgctcagcatcctggctctttgttccctgctttcaaggccagacttccttacgctctgtatcccctgccctggtaaacaaatttcccgccagtccttatctatggagaccacatcccacatctgctacccactctatagatta

SEQ ID NO: 244509 - DNA, 579 bp, Homo sapiens
cactcgccatcgttccatcataagtagcaycctttctgcagaagtcaattgccttgctgagagatcctttgtctcagtgctgatctttctttacaacactgagcatttgttcccaacaagcagtactgaagaaaaaactgatatccttaaatgcctatattaagaaagaaggtaggtctcaaattagtaaattagtttctcctgtaagaagcaaagaagaacaaattaaaccaatgcatgcagaaggaaggaaataataataaaataaaaaactgaagcagaaagagaaaattaatgaatccaaatattggttctatagggaaaaatcgtacaccttataaatttctagccagactgatcaagacaaaaacatacacattaacaaggtcagcaataaaagagagaacatcagtacacactctagatctcaaaaagaaatattgataatctcatgtcaataagtttgacaagcaaatgaaatgaacaatttccttgagagggaaaacttatgaaaactgacctgagaagagatagaaaatgtggtcagccatatattgattgtagaaattgaatttgtaa

SEQ ID NO: 244510 - DNA, 593 bp, Homo sapiens
tgcttgagtccaggagttccagaccagccagggcaacatggcgaaaccccatctctacaaaaaatacaaaaaaaattaggcatggtggcaccctcctgtagtcccaggaggatcgcctgagccggggaggtcaaggctacggtgagctgtgatcacaccactgcactccagcctgaggaacagagtgagacyccatctcaaagaaaaaacaccccagtgtctaaagagcatttttggaaaatgtctcaagaagatcatgttgatgcaaaaaacttatcttctaaaaatgtagcctaagaagaaaatcacacgtttttaaaaatatataacaagaatattccttgaattatcgtttataaaacaaaagaatgaaaacaaccaaaatagtataatcaatatgatgttagctatgaattgtggacacttaatatgtctcagtcagtaataatgtgtataatacatagacaatatataatttaatcatcagagaaaacccatcaggaatctactatgtgactcagagaggttgaggaggtggtgaagctggattgaagccaggagatcttctctcagacacctaattgactcatctt

SEQ ID NO: 244511 - DNA, 519 bp, Homo sapiens
gggccatgagtgggggacatttcctacaccacacactacatctggtccaacttactcctaaaggagttcccaacgtggagaccacaaggttctggggaggcccccaggagctccccctcccaaagtttaattagtggtttaataagcagcagttcccctgccctagcttaggaagagagagaagtgacatacccacccagaagggcaatgcggaggttctggcggaaaatggggttgaggatgaggccctggagcccgcctgggagcagctgkgtgtgccagatccggaggccgctcagcagccctgtactttcctcctgagccctggaacagaagcagagaggtgagtagggtatttggaaaacaaaaaggaggcccataaaagccaccatctctgcctgttctgaacttgctgacccttggaacactgttccacagagtgaaattagtatcttcctaagacaaattctttactgcattacttatcagagcctcattacagatatcacacataactct

SEQ ID NO: 244512 - DNA, 494 bp, Homo sapiens
ctttttatactttgtagcccacccatgttttctgttgtccctgtctttttagcaattaatgttttaaaatcttcaaagaacagctaaaaattgacagagcttctttatggcaaactttaggtaaggttgaaagacaatttacaatctaggaagaaatggttgatgaaataaacaaaatacaaaaagctgttacaaagcaataagaaaaagaaacataatagaargattgggacagaccactgcttactagttagccctgctcagcaaggagcagcttaaaaaaaaaaaaagaagaagaaaagaaaaagaaaagaaagaggcctggcggggtggctcaggcctgtaatcccaacactttgggaggccaaagaaggtggatcattttagctcaggagttccagaccagcctgggcattatacagaaactctatcgctacaaaaacaaaacaaaacaaaaattagctaggtgtagtggtgtgctctcctgcggtccc

SEQ ID NO: 244513 - DNA, 592 bp, Homo sapiens
taaattcatagactactcaagtgataaatattaaaccagagactgctttaaacattttaaagccttattatactgtcatactgtgattgtactgacatatttattcatttaacaaatacttactgagagctatttactgattatgatggtgagaaacaatggtaaggaaacagaccagatccctttatcaaagaacatacatttcagtgatactgactgtaatggttaattttaggtgtcatattgactgggttaagggatgcctagatagctggtataacattatttctgggtgtgcctgygagggtgtttctggaagggattggcatgtgagtgactgagcggggaaaatcctctctcgctgtgggcagccacaatccaatcacctaggggcccagatagaacaaaaaagcagaaaggagtcaaattttctctctctctctctctcaatctgggacacttttcctgcccttggacatcagaactccaggttgtatggtctttggactcttgagtgttgcaccagtcaaccctttatcctcccacctcctcctctggcccctcaggcctttggccttggactgagccaggc

SEQ ID NO: 244514 - DNA, 538 bp, Homo sapiens
aatttggctgtatggggtcagaaagagtcctggtaaccctaggctttgtgtgcctcctgatgtgatgaatgtgcggtcacagctcctcctgtaaacattgctgccaaatgtttaacccagagctacataggtccttaggaggcatagcagttagaggaaaaaagttaaaggcatcaggggaaataatatgataaattcagtgtggagaagattccacaggtatttggcctcatctctgaaacaggtaatgccattctaaaagaaaaaagatgggttgattgttatagattgtaggtaattaaagaaayataaccaaaggcaacgagtggacattttaaggaaacaagctataaaaaataggtacaaaaatgtactgaaagaagtggagatatttgaacataaaaggactttaaataatattatggaattatttattttctttggtgtgataatgttggttcttattcttaggaggtgtgtgatgaagtatttagtggtctagtatcatgggtcttgcaacttactttagaatgactca

SEQ ID NO: 244515 - DNA, 538 bp, Homo sapiens
aatttggctgtatggggtcagaaagagtcctggtaaccctaggctttgtgtgcctcctgatgtgatgaatgtgcggtcacagctcctcctgtaaacattgctgccaaatgtttaacccagagctacataggtccttaggaggcatagcagttagaggaaaaaagttaaaggcatcaggggaaataatatgataaattcagtgtggagaagattccacaggtatttggcctcatctctgaaacaggtaatgccattctaaaagaaaaaagatgggttgattgttatagattgtaggtaattaaagaaacataaccaaaggcaacgagtggacattttaagraaacaagctataaaaaataggtacaaaaatgtactgaaagaagtggagatatttgaacataaaaggactttaaataatattatggaattatttattttctttggtgtgataatgttggttcttattcttaggaggtgtgtgatgaagtatttagtggtctagtatcatgggtcttgcaacttactttagaatgactca

SEQ ID NO: 244516 - DNA, 592 bp, Homo sapiens
taaattcatagactactcaagtgataaatattaaaccagagactgctttaaacattttaaagccttattatactgtcatactgtgattgtactgacatatttattcatttaacaaatacttactgagagctatttactgattatgatggtgagaaacaatggtaaggaaacagaccagatccctttatcaaagaacatacatttcagtgatactgactgtaatggttaattttaggtgtcatattgactgggttaagggatgcctagatagctggtataacattatttctgggtgtgcctgcgagggtgtttctggaagggattggcatgtgagtgactgagcggggaaaatcctctctcgctgtgggcagccacaatccaatcacctaggggcccagatagaacaaaaaagcagaaaggagtcaaattttctctctctctctctctcaatctgggacacttttcctgcccttggacatcagaactccaggttgtayggtctttggactcttgagtgttgcaccagtcaaccctttatcctcccacctcctcctctggcccctcaggcctttggccttggactgagccaggc

SEQ ID NO: 244517 - DNA, 571 bp, Homo sapiens
ctgtggtccactcccaatactgcggcccctcttgctccacccacggctcccgcggctccatcctcggaatcgcggcgtcgctgtcgaaccgcaggaattgcgtgtcgtctacgtactccacggcgatgtagcggggctccccgcggccgggccgcgacacagcggtgctgaaatacctcaaggagtgggagcctgggggcgaggaggggctgagacccgccagaccctcctccggrggcggctccctgagtcctgcgcccccaccgggcgggcccctcactcctccccacagaggccgtttctctctggaccccgcactcacccgcccaagtatcggtcagggccagggcccctgagagcagcaggaggaggcttcggggcgccatgaccccaacctccgcgtctgggaaaaatatgagtcccgcggggtgcgtgggactttagaacctgggaactgcggcgacactgattggcttctctagaaacgcgacgcccaatgggagtgagaaatggggccgcgttatgagtatccaggaagaaggacctgacacgggttgggagagaaagagaa

SEQ ID NO: 244518 - DNA, 571 bp, Homo sapiens
ctgtggtccactcccaatactgcggcccctcttgctccacccacggctcccgcggctccatcctcggaatcgcggcgtcgctgtcgaaccgcaggaattgcgtgtcgtctacgtactccacggcgatgtagcggggctccccgcggccgggccgcgacacagcggtgctgaaatacctcaaggagtgggagcctgggggcgaggaggggctgagacccgccagaccctcctccggasgcggctccctgagtcctgcgcccccaccgggcgggcccctcactcctccccacagaggccgtttctctctggaccccgcactcacccgcccaagtatcggtcagggccagggcccctgagagcagcaggaggaggcttcggggcgccatgaccccaacctccgcgtctgggaaaaatatgagtcccgcggggtgcgtgggactttagaacctgggaactgcggcgacactgattggcttctctagaaacgcgacgcccaatgggagtgagaaatggggccgcgttatgagtatccaggaagaaggacctgacacgggttgggagagaaagagaa

SEQ ID NO: 244519 - DNA, 597 bp, Homo sapiens
cttaaaacatttttaaaaaaatattgtttcataatatacctgatctaaactagcattaatatgttgtgtctgtaatatcattcaaaatccagataaatagatgtttcagatggaaaataaacacttcattatcagcattagggtagatcgaacttagttaaattaaggaaaaattaagtcttagggaaacaaagagattatagattatcttaaattagacttgaaacaagacacaaggaaagcagccattctcttctattacattatttgttaatattaatcaataacagcaatattattattgacacaatcatttacatatgaagtctatgatttcatgagcttcataacaaccttgtcaaataactatgaaataacatgatgatggtcattacctttattttataaagcacaattaagataatttaaagcattttcttcaaagtgcaacaattttcaacaacttgtaagtagtaaagtcagtgtatgtaccttttacaagccctatattttattatatgtaaaagaatatgtcattattaatatttcratgtctaatgtaagtacttacattatgttatgtgacaaaaaactaag

SEQ ID NO: 244520 - DNA, 426 bp, Homo sapiens
tttatgtgcagcaaagtataattttctctcggtgttcaatgcctatttggaattggcaaccacaaatctaaagcaaaccagtcagtatggttgtttctcactataaatgttcagctgtttgtttataagcattaattatgcccacaggttggatcaaacaggtttagcatttttataaactgatatagtagtagaagagacakaagaaagttggggttgtttgtaaagatgtggtttaaccatggggtgatgaattagcactcttagggagtttggacaatcactggcctgggaatagaggcataagtgaactggaaggatcagagatggtgactagaaagtgagatgtcagaaagtacaatctgagggatcggagggatgttgctactgctaaggaagatacattcaacctaataaacaggtgag

SEQ ID NO: 244521 - DNA, 543 bp, Homo sapiens
ctgagacagggcttctgaacaaggtatgacatgtgtccaattgacatgtcctggacacgcctcagcctgaaatttttactttagaattaaaccaaaactaaaatatctgagtttcacaaaccagttagatttgctagcaattcttgttagataacacaaattgaaagcttatcttcaccacctgtaargctgtaactggttttattcctaatcaccttatataaatttgacccttgacatataataattttggtttattttgctaaagccacctatgcatttttcttgacttgtcattaccaagaaattacacagtatctggtagcgtctcggtctaaatttttttgatcagaagggcacatctctataataggttatctctaaaatcaagtacttctctctctttccctttctctccctttttctctctcaatagaatcagggcattcagcatattaaaacaatttttcacccctaaggctgaatttaaattcatgtttctctttgaatccttccccaacatcttactgatactttaaccaa

SEQ ID NO: 244522 - DNA, 561 bp, Homo sapiens
aaacaaaaaaacaactaaaagcactcagattctgtttaacaaagtaatgaagaaagaagtttcttcagtttaatatrtggggcagaatagtaacgggctaattttaattgaagagctatatcaagtatcttgatccttattaaataaggaaattctttttaacattcattcagctttacttgacagtactatattttttaagttcctctaagttgaaagtttcacacatttagaaaccatcttagttcatgagatttaggttatttgtggtgacagccagcctctctaattccattcactctgttaccagcccgtgagttaagcatacattatcttttaccagaatcaatatcttatctattcagctccccgaaatgagctttcattaaccaggtagttttagatagatggcttgtaacttttattacctttagtatagcctgctaggatgtgttgggacttttgtatagcagatacaggcataaatcagactaggtcaccttgagattaaaaaatcaatgaagaggaaaataacagttgagtacttctgagtttagcact

SEQ ID NO: 244523 - DNA, 561 bp, Homo sapiens
aaacaaaaaaacaactaaaagcactcagattctgtttaacaaagtaatgaagaaagaagtttcttcagtttaatatatggggcagaatagtaacgggctaattttaattgaagagctatatcaagtatcttgatccttattaaataaggaaattctttttaacattcattcagctttacttgacagtactatattttttaagttcctctaagttgaaagtttcacacatttagaaaccatcttagttcatgagatttaggttatttgtggtgacagccagcctctctaattccattcactctgttaccagcccgtgagttaagcatacattatcttttaccagaatcaatatcttatctattcagctccccgaaatgagctttcattaaccaggtagttttagatagatggcttgtaacttttattacctttagtatagcctgctaggatgtgttgggacttttgtatagcagatacagkcataaatcagactaggtcaccttgagattaaaaaatcaatgaagaggaaaataacagttgagtacttctgagtttagcact

SEQ ID NO: 244524 - DNA, 549 bp, Homo sapiens
gtcagtaatgaaagaaatttctttcaaactttaaaagatcttgcaatcttaaaagaatatgaatcaaatattataaccaacattaagtcaataaattttactactttttgaattatataaattcagtgaaatacatgtaataaaaaagaccaaagaaataattcaaaattaaataattctgataattaaaaaataaatttataattaaaaactttcccacaaataatatccaggcccaagtggtttcactgacaatttctatcaaaaacctaggaaaggtattcgaggaaggaagactttcaaattgactttataatcttaatattaarttttatagctaaaccagacaaaaacatcactataaaagagagctaaactaatagtgcaaatgatatggcttcaaaaattcttaaaagatgagcaaaactttttcaattatgtatacatatattatggccaaatgtactttttatttcccctggaaattaaattgggactaatatctaaaattcaataaatatctatcataatgataataaaaaacaatat

SEQ ID NO: 244525 - DNA, 591 bp, Homo sapiens
ttaaacaaaaaagtgaatgtatggaattaatgaccactaggtttcttctagttctgaaattctgcagtttgcaaaaatcacaaatattaaggtaatttctgaattcagtctttacaagwctcttgaaagcttcctctgaaagagtgttttcaaatgactttcaggtttgaattattttcttttactataacaaaatgttttattgtatattatctgtttacactccatttaataagcagacaagaattcattgggttcttactgcatgacatacattagaggagagcttggtatgttttgttaacactgcattcttcacacaaatattttaggaaatggttttcattctcattttgtaaatgaggatacttaagcctggcatattaactcattctgggtttcactacttccactttaatttcattattctttagagtacgctatacctgccagtgacttaaggcaaacaacttagtggtacacaagtgattactatttttttaggcattaagattttcaaagctctatagaaatgtttattagaataacagactatattctcaaccaccaactctctacctggataataac

SEQ ID NO: 244526 - DNA, 563 bp, Homo sapiens
ccagttcttgaaggttagagacgacgtctaacagcaagtaatatttagtcattcggccagggggtaaagtaattacatgaaataatagcacagtaactctctcctgatttgccctcctacgacttacacagctccatctagagtcctcttgctccaaaagcaaattcttagaaacacctgaaaaactactgtttccccatttccacatggccagtatgctcccagtactttttgccatycactctattttcctcccagtatcttattcatcctcacagctcctacatagctatgtgttcagaaagatccacaagatgactcatctgtttctctctcaacagacatctttggcagttttccttcctgctatctcacagttacagcaactcctgggattaaatatatttgaacatgcagattatagactctagtatatcccgctttaggttatctttgttatacgagtttgatcctatttgtttttttcaccaaagtacaagtgcatttctcacccagacaagcttcagaatgtgttgaagttgtatcatacattcttatccctc

SEQ ID NO: 244527 - DNA, 563 bp, Homo sapiens
ccagttcttgaaggttagagacgacgtctaacagcaagtaatatttagtcattcggccagggggtaaagtaattacatgaaataatagcacagtaactctctcctgatttgccctcctacgacttacacagctccatctagagtcctcttgctccaaaagcaaattcttagaaacacctgaaaaactactgtttccccatttccacatggccagtatgctcccagtactttttgccatccactctattttcctcccagkatcttattcatcctcacagctcctacatagctatgtgttcagaaagatccacaagatgactcatctgtttctctctcaacagacatctttggcagttttccttcctgctatctcacagttacagcaactcctgggattaaatatatttgaacatgcagattatagactctagtatatcccgctttaggttatctttgttatacgagtttgatcctatttgtttttttcaccaaagtacaagtgcatttctcacccagacaagcttcagaatgtgttgaagttgtatcatacattcttatccctc

SEQ ID NO: 244528 - DNA, 479 bp, Homo sapiens
gatcctcccaactcagcctcccaagtagctaggactacaggcactcaccaccattcccgggtaattgtttttactttttgtagagagagggtctcaccatgttactcaggctggtctcgaattcctgggctcaaacgatcttccttccttggtctgtcaaagtgctgagattacaggtgtgagccacaacacctagaccaactcagtttacattttaaaaagatggtgtataatattttgtaaaccctcaaggttgtcaagtttcttaataaatttgaaaaaagaaactgtggaaattattaactaaggtcacttcaatgaaattcatcagttttagaaaatagccaggagctgttctagtaaaagacattttgaacatatttttatgtattaaatrccatcatcaatatgaacattttaaactggattgaatgtattctcccttaacttattctgattctctgactcccaccatatcc

SEQ ID NO: 244529 - DNA, 533 bp, Homo sapiens
ttatggttaatatgatttggtcacagaaatcttgtgcaagtggtcaaagatatgtgtcatacttcactaacaaggcaggtgggattaatttgagwttttatcttcccatgatttatatatggagaagtgaaaggaagtttgggagtcaggtttattcatactactgttcagagagggattgcttttgtttttattttctttagataatgtatttacattttgttaaaatattcttcgacatatatgtatgaaatatgttacaaatttggttgtcattatcatacgtaaaatttccaaacttggctgaaaaggcaatagttgtagtataaatatttcagtgcccatttcttttgaaagaaaagaaaatacgacataattttctcatctttagtcagaggtttgtgatttcagaagcagaatattgaggcattcataacctgtgattatgacctcaaatttattgcacagaatacaagatggataattcacattccttgaaccctgacttctaaactagaactggacaccctcat

SEQ ID NO: 244530 - DNA, 519 bp, Homo sapiens
tgtgtttttccgtgacaggtaggtttaagacaataatgattctttattatcatgtccctattttaaaaaatcatttattttccatttcatgtttatggttaggaggaattttttaatgttatacttcaatttatattctactttttcattgtcatacacatacttttcacattgtttattctcaatggaataagaagactcattttactcattcattttagaagacattgtacctctatttcctaaactacagaaaggaaacaaaaaatggcaattacttaatagaaattaatttttttwaaaaagataaacctgaataacctgcttggaagactgcctgaaacattgagtccaaaattgttagtcaatattattgtcattatctctgagcctatttgtaaaaagatactatctagaaaatgtaggaggtgccatgtttccccatttggaaacactgacagcctggctgtgaattctataaggacttggcggacttttgcctgtcctgctgtctgacat

SEQ ID NO: 244531 - DNA, 605 bp, Homo sapiens
tttttctcttatatacttttaaaatttatttttggtttggtttttatgttgtggattagcaggggtcatttcttttggcatttcccaattctcattcttttggcgtttctcaattccctagcatttgtaagtaaacgaaagaaaccatagggttggaattttgagatatcagtgataggggagacagggaagtgataaaatattaaacatatggaaaataaatgtgactataattagaaaaagggaggggagagcatagttgtatactatatacagatatatatatataatacatatatacacttaccagaagtatrtatatatatacttttatatatatgtaaatacacacattcatatatacgtgtatatatatatatagagagagacacacacacacacagagagagagaaagacagacagagagagacagagaaagagaaggagatttattatgagaattagctcactcagttgtggaggccaagaaatcccacaatatgcaatctgcaagctggagacccaggaaaattggtggcataattcagcttgagtccaaaggcctgagaactgaaagggctactggtgtacattagtcccccct

SEQ ID NO: 244532 - DNA, 526 bp, Homo sapiens
tttcaaagcaaaatatattcaatgtttacacttaaaaaatcataattttcaatggtattcttaaaaagcagtagtatctgctattaggaattcagcctgtcctgctggtcactaaaatttcttcttttatttctcctcctyctccttcttctcttcttcctcttccttctccttttacttgcccttcaattgctcccaatttaatacctctatcatatcaaaaagttataaaaatttccttgaaagtaattgaactacatttaaaaatctcttcattgcatgtgaaaaaaaaaaaaaaagagttgtcctgaatgaaagacagcctcgattttagttaactagtgcttacaatctcacattatcttaaatgcacatatattttaaggaaaatttatcatatgtgaacataggatataaaatttacaaaacctcattaagatttttaaatctaaatgagataaaaaagtctcattaagatttttaacagcccatggtaaaaataattatagttcttttacataaattt

SEQ ID NO: 244533 - DNA, 563 bp, Homo sapiens
gtaatctaaagatcctcaaatgacctgactagtcagtaatattctgattgctataggcttgcatttctcagcttggctttttttcttcattatgtatatcttttttatcatgctggctatgtccagaatatcataaatgaaaaactgccaagatgaagtgaaagatacatttcctctctattttctagttgcattttccacctctttgtgtattttcttacacacatttctgtgtgtaagaaatacaaacctttgcaacttttccagctgaagcaaagattttttctctttaaaaatctaagcatatttcctccaatatacatttctacatgyttgctctccacttgtcagtgaaatgtgaagtgactattataacaattatctaaaaaatgtttcaatatttaaaatggcatttaataatagacttttttcaaatgtctacagttctgctataacatattaaaatataaattattaaaatgacagagtctacttaaattgttgtagcatttgataacaatttaatgtatgtttgctaatgaaagaataaatgtattaaaaat

SEQ ID NO: 244534 - DNA, 635 bp, Homo sapiens
cttaaaaaaagtaaaactgaagaaataagcctaaagaaatagaactcttaataagacagtaaacttttttccagaacaaatctaaaaaatattaacaagaatctaaaaacaaccagtaccaaactaggtcaaaccccaatatgtagcatcatttcagaatttgtaatgcatgcaaagaagtgagaaaatttgattcattaattaatcaaaaccatataaaatcatacaggtaatagaattggtagaaaggacactgaaataattgtgataactgtattctatatgttcaagaatctaaagcagggataagtatttttttctggaaagaaccacataaaataagagggttaacaactttcacaactattaaactattagctttgctgtygtagcatagattagacaaacagatagataaatagataaaaacaaatatggctttttcttaaaaaaagggctgtggactgtgtttattctatggactatagttggctaaggtctgatctagaagaaatatggagcatattaagattaatagaaggtttttgttttaaatcaagggatagaaactacaatgcctaaaatataaaatacatggcataaaattaacaaaaaattaagcttaaaaaacacag

SEQ ID NO: 244535 - DNA, 609 bp, Homo sapiens
tgtgcagccaacagccagggtgcatttgtctaaagtgagtttgtgcgtgtagggaatgggcaacttcagcaaagtttcaaaataaaaaatcagagtgcaaaagtcattaacattcttatacaccaataacagtcaagctgagatccaaattgggaacatratcacattcacaattgccacacaaaaaataaaatacctagtaatacagctaaccagagaggtgaaagatcactacaaagagaaccataaaacactgctcaaagaaattagagatgatgcaaatggaaaaacattgcatgctcatggataggaagaatcaatatcattaaaatgaccatattgcccaaagcaatttacatattcaatgctattcctattaaactaacattgacattcttaacaaaacttcaaaaaactgttttgaaatacatatgaaattgaaaacagcatgaataaccaaggcaatcataagcaaagagaacaaagctcgaggcatcacactacccaactttaaactacactacagggctatagtaatcaaaacagcatggtgttggtataaaaccagacacacagacaaatggaacagaatagagaacccagaaataa

SEQ ID NO: 244536 - DNA, 609 bp, Homo sapiens
tgtgcagccaacagccagggtgcatttgtctaaagtgagtttgtgcgtgtagggaatgggcaacttcagcaaagtttcaaaataaaaaatcagagtgcaaaagtcattaacattcttatacaccaataacagtcaagctgagatccaaattgggaacataatcacattcacaattgccacacaaaaaataaaatacctagtaatacagctaaccagagaggtgaaagatcactacaaagagaaccayaaaacactgctcaaagaaattagagatgatgcaaatggaaaaacattgcatgctcatggataggaagaatcaatatcattaaaatgaccatattgcccaaagcaatttacatattcaatgctattcctattaaactaacattgacattcttaacaaaacttcaaaaaactgttttgaaatacatatgaaattgaaaacagcatgaataaccaaggcaatcataagcaaagagaacaaagctcgaggcatcacactacccaactttaaactacactacagggctatagtaatcaaaacagcatggtgttggtataaaaccagacacacagacaaatggaacagaatagagaacccagaaataa

SEQ ID NO: 244537 - DNA, 616 bp, Homo sapiens
aatcaagcaataatttaagaagacatatcagatttgttgtctcagctttcccttattgtcttacagatgctaaaaaaaattagagtaggtcacaaaggaaagaaaaaatagaaaagacatgtttatgagacttatcacagcatgcaagaagtctttaaatactatgaaagtaaggggtgaataaagtcaacattgccaaggtaaacacaaggctataatatagcaccattgtratttggtgaaccaatgagaactcctgcttttcatccaacatcaagggaccctaaacaaatctactctctttatcctagtttggagaaattaaaaaaaaaaaaaaaagaaaagcaaagatatcaaggagaaacctgagcttgaatggctgagaatgattgcccccaaaattaatctgggtggagattgacaaaagatctaggatctcttggcctatcctccagttggagacccagggacttcaggccatatgcatacatgtgggtaaaatggccacatggccattaccattaccctacccaggtggaaataaaaactttctggggctgcttgccacagtgcatttactgtaacttcaacacttgttgatattctaaatggggca

SEQ ID NO: 244538 - DNA, 616 bp, Homo sapiens
aatcaagcaataatttaagaagacatatcagatttgttgtctcagctttcccttattgtcttacagatgctaaaaaaaattagagtaggtcacaaaggaaagaaaaaatagaaaagacatgtttatgagacttatcacagcatgcaagaagtctttaaatactatgaaagtaaggggtgaataaagtcaacattgccaaggtaaacacaaggctataatatagcaccattgtaatttggtgaaccaatgagaactcctgcttttcatccaacatcaagggaccctaaacaaatctactctctttatcctagtttggagaaattaaaaaaaaaaaaaaaagaaaagcaaagatatcaargagaaacctgagcttgaatggctgagaatgattgcccccaaaattaatctgggtggagattgacaaaagatctaggatctcttggcctatcctccagttggagacccagggacttcaggccatatgcatacatgtgggtaaaatggccacatggccattaccattaccctacccaggtggaaataaaaactttctggggctgcttgccacagtgcatttactgtaacttcaacacttgttgatattctaaatggggca

SEQ ID NO: 244539 - DNA, 616 bp, Homo sapiens
aatcaagcaataatttaagaagacatatcagatttgttgtctcagctttcccttattgtcttacagatgctaaaaaaaattagagtaggtcacaaaggaaagaaaaaatagaaaagacatgtttatgagacttatcacagcatgcaagaagtctttaaatactatgaaagtaaggggtgaataaagtcaacattgccaaggtaaacacaaggctataatatagcaccattgtaatttggtgaaccaatgagaactcctgcttttcatccaacatcaagggaccctaaacaaatctactctctttatcctagtttggagaaattaaaaaaaaaaaaaaaagaaaagcaaagatatcaaggagaaacctgagcttgaatggctgagaatgattgcccccaaaattaatytgggtggagattgacaaaagatctaggatctcttggcctatcctccagttggagacccagggacttcaggccatatgcatacatgtgggtaaaatggccacatggccattaccattaccctacccaggtggaaataaaaactttctggggctgcttgccacagtgcatttactgtaacttcaacacttgttgatattctaaatggggca

SEQ ID NO: 244540 - DNA, 616 bp, Homo sapiens
aatcaagcaataatttaagaagacatatcagatttgttgtctcagctttcccttattgtcttacagatgctaaaaaaaattagagtaggtcacaaaggaaagaaaaaatagaaaagacatgtttatgagacttatcacagcatgcaagaagtctttaaatactatgaaagtaaggggtgaataaagtcaacattgccaaggtaaacacaaggctataatatagcaccattgtaatttggtgaaccaatgagaactcctgcttttcatccaacatcaagggaccctaaacaaatctactctctttatcctagtttggagaaattaaaaaaaaaaaaaaaagaaaagcaaagatatcaaggagaaacctgagcttgaatggctgagaatgattgcccccaaaattaatctgggtggagattgacaaaagatctaggatctcttggcctatcctccagttggagacccagggacttcaggccatatgcatacatgtgggtaaaatggccacatggccattaccattaccmtacccaggtggaaataaaaactttctggggctgcttgccacagtgcatttactgtaacttcaacacttgttgatattctaaatggggca

SEQ ID NO: 244541 - DNA, 652 bp, Homo sapiens
tttacttgaacccacacagcttgttaatatataatagtatcagatatctagtaaaaccaaaggcattaccacttgtcatcatccctgttatctgtgaatgttttgaattatttggaaataggttctttgcacgtataatcacactggatactaatccaatgtgacttgtacccttataagaagagaaatatgttattgtttattatttattattattatttttgagatggagtctcactctgtcacccaggctggagtgcaatggcacgatctcagctcactgcaatctccacctcctgggttcaagcgattctcctgagtagctggggttgcaggtgcacaccaccatgcctggctaatttttgaatttttggtagagatggggtttcaccatgttggtcaggctrgtcttgaactcctgacctcaggtgatctgcctgccttggcctctcaaagtgctgtgtttataggcatgagccattgcacccagccctgaagagaaatatttggacacagacacacaggaaaagttctgtgtgttgacagagattagaatgaggccactgatgattaattttttgtgtgtaaactatactgagctaagggatgcccagatagttggtaaatattgtttctgggtgtgtctgtggag

SEQ ID NO: 244542 - DNA, 621 bp, Homo sapiens
tataatcaccttttagatattaaaaatatactattatacttaattcttatgtttgtgaaacatttttattaaaacaagattaaatggacactatcttaatatgaacctaaaagcttgcattgtgttgaatgtgaaaaaactagaaattttcctataggagctgaggatgaatcaaatgtggacaatcaccactatgatatacttaaaaaaaattctagacaatgaaattacaaaagaggtataaattaattttaataaaatggaaagaagaaaatgaaatcagcaatatttwcagaagtgatatttatacttggaaacctaaaataatcaactccaaaatcagaaaccttatagaactctaaaaaaaagacatttatataactagttacagcattaatatacaaaaatgaatatgtgtgtgtgtaatcagttaaaatatacaaaatatgacttcgtttatcatatgaagaaaggataaaatacaaatagtaatagtagtatgaaatatgcaagatctatacagagaaaagtgaagacatgaggaggagagaaaggaaattgttccatatttttggataggaagactcagtatcagaaaaatgaaactgttcctcaaaataa

SEQ ID NO: 244543 - DNA, 571 bp, Homo sapiens
tagatatatttcaaaataagtcatgggaaagatcaagtatcatgatagtttcagttacttcagttcctagtaatgtctggtttcttgcttttaaaaactgtatttgcaaaaccataaaaggaaataaatgaacaatagccttctgatcatctacaatatgttgcctatagcacatttcaaatacatccatatcggtttctaatatttggttgacagagtcctctgtttccttttccagtgattaggaaatggaaaaacaattrctttaaaagaacatgaactgtgacctaataactctataacttcatactatgtggtattattaaatgaaactatatgtgtgatatgatattatgaaaaggttgccttaaagaaactccacaaaaatagcaactagaaaaaaataattctaaaaccaaatgagtctcctgccaaaaaaaggtaagaaataaatagaaaaggcaattcttgacatattttctactagagtggtagtactaatgacttatatacattgcagtcataataatatgaggttgtgaaaaccgtgtaaaagaagttttcattgaat

SEQ ID NO: 244544 - DNA, 584 bp, Homo sapiens
gtaaataaaaagtgtgagtatactaaaggtggtagactttttaactttttgkaatgcattgacattcttaatctctgtgggtaattttaacacaggaatcagacagtttaacctaccttgaaattagatgtacgctattgatttgtcttttcttgatggtcagaaagggacaattgatggcattctcaattcctatttacttttaatttttctggaagtttcacatttgttattattttctcactgatttttcaactctttctcaattttacttattctgaatcaaaatttgacatggcaccattagttggaaaactcatttctattttcagatgttaatctgttacttactcatgatacatttcatattgtctctagatactattaatttgttccatatattcatttcttgcagaaaactttattagacttcacccattatccacctttaatttttgaaaccataatctcaattctcttcttcagactttatatcaaatacctgtcaaaaactaaggatatataaatgttactagtttaaactagacacatgcttcatttagcaattcagcctgaaagtctct

SEQ ID NO: 244545 - DNA, 584 bp, Homo sapiens
gtaaataaaaagtgtgagtatactaaaggtggtagactttttaactttttggaatgcattgacattcttaatctctgtgggtaattttaacacaggaatcagacagtttaacctaccttgaaattagatgtacgctattgatttgtcttttcttgatggtcagaaagggacaattgatggcattctcaattcctatttacttttaatttttcyggaagtttcacatttgttattattttctcactgatttttcaactctttctcaattttacttattctgaatcaaaatttgacatggcaccattagttggaaaactcatttctattttcagatgttaatctgttacttactcatgatacatttcatattgtctctagatactattaatttgttccatatattcatttcttgcagaaaactttattagacttcacccattatccacctttaatttttgaaaccataatctcaattctcttcttcagactttatatcaaatacctgtcaaaaactaaggatatataaatgttactagtttaaactagacacatgcttcatttagcaattcagcctgaaagtctct

SEQ ID NO: 244546 - DNA, 607 bp, Homo sapiens
tttgggtcttgtatcaagtgttttagtcttctaaaggagaaattatgaaaataggaaaggaggatggtaaacagtgaatgtagtctgagaaamataactcagttatgccgttcttgccttgctataaaagaaacctgagcctgggaaatttataaaaagaggtctaattggctcacaactctgtaggctttacaggaagcatagcactggcatctgcttctggtgatgccttagcaagtttacaatcatgagagaaggtgacagggaacaggcacatcacatggtgacaacgggagcaagagagagatggggggcaggtgccacacacctctaaacaaccagatttcatgtgaactcactcattacccagggtatggcactaagccatccatgagggatctatcttcacgattcaaacacctcccatcagggtccacctccaacgccaggaattacattttaatgtgagattatgaggggacagatattcaaatcatatcataagtctacacgattatttaagtgagatagttcagcactttctacagaatacatgcagaggacattttgaaacccttttcagcataacatgcaaataaatacagat

SEQ ID NO: 244547 - DNA, 626 bp, Homo sapiens
gttattataaaggcattcaagatctcaaaatcaatttttcctaaagaataaacagattgtgattttcagaaggcaaactgaatctatataaaacaatccaacagaaattctaggacaaaaaatgacaacatttaacataaaacacatatatttaaaacacagattacaaaccaaagaagtaaatgtcagtaaaatgtggaggtacctgaatagaaatcagccaatctgaagaataaaatttttaaaaggtgaactgtgggatgtatcaaaaggtataccacatatgtaattccacttcaagaataaaagaaaagaaggaaagaatggagaacattgttgaagaaataatggctataamtatcccaaatttgataaaaactctaaacatacagatactaaaagcataataaaaatcaagaaggatatagtcaaagaaaccaacagctgaacacattgtaattaaactgctgcaacacaaatattaacagaaatgtcagaaacagccagagaaaaatcacatataacatacaatggaacaaacatatgaatatctgactttcacacaaaagcagtgctgatcagaagtcagtgaaattatatctgaaaagtcctgtagtatgataaaa

SEQ ID NO: 244548 - DNA, 636 bp, Homo sapiens
atctgaaaagtcctgtagtatgataaaacgaattctatatcttttaattgtactatatatgatacaaatatgtagtataatatactacatatttttgtagtggagtggggggaagtccttcaaaattgaatacaaaagaaaacacgattctaaacaatcaaaaacaaatagsatacttggccagcagacctctcatacaaaaaatgctaaaggaagtttgtcaacctcaaagaaaatgacacaagataaaaacgtttatctatctatagggaagaattaagtcacagaatattataagttgttactagatattatgggctttttaacatgtgtagttataatctatataagaaaacaaataatgctaaataaaactatatagtttcatgcttataaaattcatatgaaatggtaaatatttactctaagtagacagttataacttaaggatgcatattttcatcctagagcagtcactaaaaatggtgaagtataacaataaaggcaatggagaaatataattgttatgtaaaccaaaaatccctaaaatgtcctccgtaaaggatgcaggaactatgagacaaagaaaactacaaaaacatcaacaaaagagattagagaaataaaaaataaatt

SEQ ID NO: 244549 - DNA, 561 bp, Homo sapiens
acattattaaacccccatcttagtcggctctggatgctataacacagtaccagaaactgaaaagcttaaaaaaaaaaaaaagacatttatttctcatggtgctgcaggctgggaatatcaaaatcaaggtgctggccagtgtggttcctggtaagagccctcttcctggctttgcagatatatccttacatggcaaagaggaaaagaaagagcaagagaatgagagagagagagagagagagagagagagagagagagagaaagtgagagagctctattagctttctctttttataaggcactgatcccacctttatgatctgatctaaatctaattagcttccaaaggccaacctacagataccatcatattggggagcagggtttcaatatgtgattttaggtgggacacaaatatgtagcccataacaaccccaaaccttgttttaagtcacccacttctcaatactgactttaatgtttaatatgtccaatttgttttttgaaaktaagataagctatttgcttatttgtgttcaataacatatgcagaattcttta

SEQ ID NO: 244550 - DNA, 547 bp, Homo sapiens
gcctcttttgttttatttatttatttattttaaaagacagggcctctttctgtcccccaggctggagtccagtggtgcaatcataactcactgaagtgttgaactcccaggctcaagcaatcctccctcctcagcctcctgagtaactgggattacagatgtgtaccagctgtagtctacaaatttgacctgtacccaatccttggcttaatattaatttttaatttttaaaaaartttttgtagagatgggggtctcactatgttgcccaggctggtcttgaactcctggtttaaagcaatcctcccgccttggcatcccaaagtgttgggattacaggcatgaaccacagtgccctgcctgtggcctcttttgatattgctatggcagcccagagtactgtgttgagaaggattcagaagttgaacaagggcaaatgagcagagagggctgccagagagttgcccaattggaccatccacagctcttctagctgtgttatagtcttacaaaatgcttcctttatgtcctgctgataaaagttata

SEQ ID NO: 244551 - DNA, 603 bp, Homo sapiens
acgatgttacagcaagccacacgaaaatggtttcagaacaggaagctcctataagtatttcaaacaacaaatagcattgaaaatgtacaaatgaattatttgagagtcctaaatttcagaaacgaaatcaagtcaatttacttgattgtccgctcctyttaacccctattcacctgggtaattagatttagttgactattgctgtttggatttttgctatgagattatctttattatagaactataggtgaaatattttttaaagactgcagagtgatgtttctatcttggaccagcagaaatacagactttcagaggactcaaaactactgaagtgtgaaacactggaaatcaacctgagtttgggaggcagattgcaacggggacccaactcagaagggacttgctctcatcttaaataagcataatttctcaactcaaaaacttgtctaacacaaactcaataaaaactggctgctacatccaagatgaattcatcatagggtattttgaataacataatacaagcactcagcatctgcatattcaattatgccatttagtatttgactttgagtgataaagaccaccgaataaagacac

SEQ ID NO: 244552 - DNA, 372 bp, Homo sapiens
cttgttagttatgtgcgggtytggttattaacagaccttgtagcaaacctaacataggttctgggtggatagtcctggacaggcagcgctactcagacatggacaggcattgctgtggcgcccttggacgatacctaacagtatttgtgccacctctctcagtgatctcatagatcaaagaacatggagtgaatgtttgtgtaagtaaaaaatggctgaatatcagcaatttcacataggttattttaatgtgtgtcaggacacatcaaaagtcaatgaaaatcaagctgaagttgtctatgcagccacctggacagtgcccagtacaagtgcacagactttgggagctatgaaaagagcatgtttattctc

SEQ ID NO: 244553 - DNA, 512 bp, Homo sapiens
ataactccataatgcttgtcccctaggaagccctggacaaaggatagtggttcctctttccatcactattgttattccttgaatgcctctatctttaccccgttattctaaattttaagccttttctgtagttatatggacaatgcagttggccctccatatttgtgggttctgcatctgaggattcaaccaatcgtaaatcaaaaatatttgaaaaaaaaacaattaaaaaagataaaaacacaaataaaaaagtataacgactatttattgtattattaattattaataattattgtattattataagtaacctagagatgatttaaagtattkcaggatatgggtaggttatatgcaaatattataccattttatatcagagagttgagcatccatggatttttggtatctgtaggagggtcttgaaaccaatcccctgtagatattgaggaatgactgtatatgttcttatacaaagtcaaacaatacagtttatgtaagtgaatcct

SEQ ID NO: 244554 - DNA, 539 bp, Homo sapiens
gatttgtttataaaaaataaattttgtaagaaagatgcagtaagtttgactaaacacaatatatactctaactaatttaaggtgttttaactttttttttttttttttttgagatgagggctggctctgttgcccaggctagagtgcagtggtatgatcatggctcactgcagcctcgacctcttgggctcaagtgatcctcctaccccagccttccaagtagctgggaccacaggtgtgcaccactgcacttggttaatttttttttttttggagacagggtctcactgtgttgcccargcttgtcttgaactcgtgggctcaagtaattctcttgcctcagcttcccgaagtgctgggattataagcgtgagccactgcacctggcccttaactttcacattattattttttgacatccagaggaatcctttaaaatagggatgatggatattaacagttctagctttggagaaagaaatatatattcagagaggctaaatgactatcaaatatacatagcttgagtacatctattt

SEQ ID NO: 244555 - DNA, 539 bp, Homo sapiens
gatttgtttataaaaaataaattttgtaagaaagatgcagtaagtttgactaaacacaatatatactctaactaatttaaggtgttttaactttttttttttttttttttgagatgagggctggctctgttgcccaggctagagtgcagtggtatgatcatggctcactgcagcctcgacctcttgggctcaagtgatcctcctaccccagccttccaagtagctgggaccacaggtgtgcaccactgcacttggttaatttttttttttttggagacagggtctcactgtgttgcccaggcttgtcttgaactcgtgggctcaagtaattctctygcctcagcttcccgaagtgctgggattataagcgtgagccactgcacctggcccttaactttcacattattattttttgacatccagaggaatcctttaaaatagggatgatggatattaacagttctagctttggagaaagaaatatatattcagagaggctaaatgactatcaaatatacatagcttgagtacatctattt

SEQ ID NO: 244556 - DNA, 592 bp, Homo sapiens
cataagactttcacaagcgcacatatgccagaattaatggaaaaatctgctcatttttactgggtgcataaatgacaggatttgttgttcaactccacctataagcatgtaaaataaagagcgctcacagtctttattaaggtcttctttcttttaattcaaataaatcaagttatttattaattcagacatacactgaaatgttattggggtcttctttgagtagtgagattttctcaattgtccaaaattttaataataagcgtgtattactttaaaaattagaaaaacawtaaagatttaagaaatgattcttgagaatcaatttataatgcattgtttgaagccctatagttgacatttttcaaatccttttaataacattttgatccttagaactataaatttttagagtaggtggaaatcttgccagatcatctgatatagctccctgttgtttcacaggtaaatttttgactagccagggtccctcccccactgcatgagattctaatgagattgtcaatcatggagataggtggggagtcagggaattcagagaggctagagaacaaaatccaaattaaactaa

SEQ ID NO: 244557 - DNA, 592 bp, Homo sapiens
cataagactttcacaagcgcacatatgccagaattaatggaaaaatctgctcatttttactgggtgcataaatgacaggatttgttgttcaactccacctataagcatgtaaaataaagagcgctcacagtctttattaaggtcttctttcttttaattcaaataaatcaagttatttattaattcagacatacactgaaatgttattggggtcttctttgagtagtgagattttctcaattgtccaaaattttaataataagcgtgtattactttaaaaattagaaaaacattaaagatttaagaaatgattcttgagaatcaatttatamtgcattgtttgaagccctatagttgacatttttcaaatccttttaataacattttgatccttagaactataaatttttagagtaggtggaaatcttgccagatcatctgatatagctccctgttgtttcacaggtaaatttttgactagccagggtccctcccccactgcatgagattctaatgagattgtcaatcatggagataggtggggagtcagggaattcagagaggctagagaacaaaatccaaattaaactaa

SEQ ID NO: 244558 - DNA, 552 bp, Homo sapiens
tttagagtaggtggaaatcttgccagatcatctgatatagctccctgttgtttcacaggtaaatttttgactagccagggtccctcccccactgcatgagattctaatgagattgtcaatcatggagataggtggggagtcagggaattcagagaggctagagaacaaaatccaaattaaactaaactcacagagtaattgaaatatttatttctctggaaactaattaatccagaagtgttcacatgactcaaacagggataatcagactatttctgtagagaagaggattgttctctttatcttggctcacargtcaacagaacatgtgtgtttggaactgtcattcaaactttgagtgatagatctgcttggcccaactccttggacttcccagaagttgtattaagccaaaaagttgtctatgtgtgtgtgtgtgtgtgtgtgtgtgtgtgtgtgcgtgtttgctgaaggtttgcattcattttctgtcacatacatcagaaggaattcttaataaacaatcacccataactaatgccatctgtcccc

SEQ ID NO: 244559 - DNA, 610 bp, Homo sapiens
tataataagtggtagcaaaaacaaaattacatttaacttaaactttctgctaaaatataaagttaagaacttctgtttccaccagatatagagtaacaggaactgtatatatgttcttactgaaataaccaagaaaaacagacaaaatatatgaaayaaatgttttcaagttactagatattagacaacaaatagagtgattcctgagatgactagctaatgaggtgagccctgtcattgtccataatacctttttcagagagttcacaggctatagcatcaggagaaaaagcctagatagaacttgacagattccttgaagtcaagaaacatagctgagagtctagaaagatgaagagaggtagagtttgcaagacagagtaccaaaaaggtgagaactgcacagagagtgatctgtggaggttccttttcaagtattcagcaaagcactgattagcatatatttttaaggaaatgacctgaggctgagggaaaatcacctggaaggatcagagaacagtgtccagggcaaacacaggatagtgaatagtgcctgttctaaccagccagactggaaaaaaacataaattgtggtagactggtggagtac

SEQ ID NO: 244560 - DNA, 610 bp, Homo sapiens
tataataagtggtagcaaaaacaaaattacatttaacttaaactttctgctaaaatataaagttaagaacttctgtttccaccagatatagagtaacaggaactgtatatatgttcttactgaaataaccaagaaaaacagacaaaatatatgaaataaatgttttcaagttactagatattagacaacaaatagagtgattcctgagatgactagctaatgaggtgagccctgtcattgtccataatacctttttcagagagttcacaggctatagcatcaggagaaaaagcctagatagaacttgacagattccttgaagtcaagaaacatagctgagagtctagaaagatgaagagaggtagagtttgcaagacagagtaccaaaaaggtgagaactgcacagagagtgatctgtggaggttccttttcaagtattcagcaaagcactgattagcatatatttttaaggaaatgacctgaggctgagggaaaatcacctggaaggatcagagaacagtgtccagggcamacacaggatagtgaatagtgcctgttctaaccagccagactggaaaaaaacataaattgtggtagactggtggagtac

SEQ ID NO: 244561 - DNA, 573 bp, Homo sapiens
atgtatacatatgtaacaaagctgtacattgtgcacatgtaccctaaaacttaaagtataataataacaaaaaaaatgcaagaaaaaaaaagaagcatcagtgagctgcagggcaattataagagcataatacctatgcagttggagcctccaagagataatggagagagaggtgtggacagaaaacatattttaagaaataataactgaaaatttcccaaatttcatgaaaactgtatatctatggatcaaagaagctgaatgaaacataaagaaaactataccaagacacatatgatcagattgtttaaaaccagtgaaaaggggsaaatcctgaaagcatccagagaataacaatgtattacacacagagaaacaaagacgagaattacagcagatttctccttgaaaacagtgaaagtagaaggacagtggagaaacatttttaaagcactgagaaaaaactgtaaacctagagtttatgcccagtaaaaatatatcccaaagcaagggcaaaataaagacattttcaatcatacggtagctgaaagacttcatcaccactagacacac

SEQ ID NO: 244562 - DNA, 567 bp, Homo sapiens
taatcaaattaagtaacaaaagtcctgaaattgttaagtataaacctttctgaaaagctcactttggacataattaagcaatgtactatcacagttgtaataatgtcattttactgtatatagactaaacatattagtaagttcatccttccatcgacagaaaaccgcatasaattaaatgcaagcaatctgatattattaagtcacactaaaataatgatgtctttcaatgcaagcacgggtacctaaaaagattccacagaatgacaaagaccatgtcagaaataagtgtttcctatattttcgctgtacctcagactactgaatatttctagtgctgctatagaaagactgagccaatttactgctcttttctaacaagctcaccatcctttatgaaactgacatacatatctatttatgaatgaactactcacacaagagaatgctgaaaagattgaaaaggtcccctgataatgtatactgttgttactagaatgcaatttttaaaagctgttagtttattagattaactggagagttcagtatgattgacagtaagataca

SEQ ID NO: 244563 - DNA, 365 bp, Homo sapiens
aaatgtgtgtgttctaactgctccaccaatcagccactctcccatctgtctccctcccatcgggcctccaaattccctgagacacaatattaaaattaggaaaattaataagcctaaaagggcctctaagtgttcaattaatacaaagagttgttcatctctcactttaagtcaaaggctagaaatgattaaacttagagaagaaggcatgtcaaaagccragagaggccaaaagctaggcctcttatgcctaacagtcagaaatgcaaaagaaaaattattgaaggaaattaaaagtgaaacaaccttattgctgatacgcagacagttttaatgttctggatggaagatcaaaccagccacat

SEQ ID NO: 244564 - DNA, 549 bp, Homo sapiens
ggctcccctgctcagtggtgtctgtggcattgcactcccagcctttcaggataagtctaaaatagtttggcactcagttccaagctcacctatggaaaaggaggaactccaaaatctgtagaataaataaagtaataaggtatgcctgccctaaatggagaaagtccagccagtattattaaaaactttcagtctttaaaatttataacatggaaagctgtactatattgaagtatctgagtctccccaaaaacaatgacattagggaggaaatcaaatgagaagaatctaagattgacagttcaactagccaaatcgccaaataatctgcaggcacagtgggagagtggactgttattaaataaacctctggtgaattttctttattaaagagcaagaagtcagctggtttcaaagcccmgggaatgtggggatgtagaccctttcagcgatagccaaaagtgagagttaggaagggtctaaaacctctgctcccccttcactagaaagccagccctggggagggagggaccaggcagcagccccact

SEQ ID NO: 244565 - DNA, 609 bp, Homo sapiens
caatggtggcacaagcattgggtaaacattcccattccaaaagaaagaaattcaccaaaagaaaggggcagtaggcaccacacaagtctaaaaccaagaaggacagtcatcrcgttttaaagctccaaaataatccccttagacttcatgtcccgcaccctggtatgatgggtgggctcccaaggccttgggcagacccacccctgtggctttgcagggtgcagtacacatggctgttctcaagagttggagtggagtacttgtggcttttccaggcagagtttgcaagctgccaatctaccatgttggcatctggaaggcagtggcccccttcccatagctccactaggcagtgtcccagtggggactctgtgtagaggctccaatcccacatttccccctgccattgccctagtagagtttctctgttggggctccaccctgcaacaggcttctgcctgggcaccaagctcttccataatcatctgaaatctaggtggaagcctcattcatgcttacattctgagcatctgaagacttaacatcacgtgacaactgccaaggcatggcttgcaccctctagagctgcagcccaagctgtaccttggc

SEQ ID NO: 244566 - DNA, 541 bp, Homo sapiens
tttccagtagtcccccaaagtcttaagtctttccagcatcaagtccaaagtcatcagagactcattctccttccaccatcagcctgtaaaatcaaagacaagttatttgcttccaagatacaatggtggcacaagcattgggtaaacattcccattccaaaagaaagaaattcaccaaaagaaaggggcagtaggcaccacacaagtctaaaaccaagaaggacagtcatcacgttttaaagctccaaaataatccccttagacttcatgtcccrcaccctggtatgatgggtgggctcccaaggccttgggcagacccacccctgtggctttgcagggtgcagtacacatggctgttctcaagagttggagtggagtacttgtggcttttccaggcagagtttgcaagctgccaatctaccatgttggcatctggaaggcagtggcccccttcccatagctccactaggcagtgtcccagtggggactctgtgtagaggctccaatcccacatttccccctgccattgccctagtagagt

SEQ ID NO: 244567 - DNA, 609 bp, Homo sapiens
caatggtggcacaagcattgggtaaacattcccattccaaaagaaagaaattcaccaaaagaaaggggcagtaggcaccacacaagtctaaaaccaagaaggacagtcatcacgttttaaagctccaaaataatccccttagacttcatgtcccgcaccctggtatgatgggtgggctcccaaggccttgggcagacccacccctgtggctttgcagggtgcagtacacatggctgttctcaagagttggagtggagtacttgtggcttttccaggcagagtttgcaagctgccaatctaccatgttggcrtctggaaggcagtggcccccttcccatagctccactaggcagtgtcccagtggggactctgtgtagaggctccaatcccacatttccccctgccattgccctagtagagtttctctgttggggctccaccctgcaacaggcttctgcctgggcaccaagctcttccataatcatctgaaatctaggtggaagcctcattcatgcttacattctgagcatctgaagacttaacatcacgtgacaactgccaaggcatggcttgcaccctctagagctgcagcccaagctgtaccttggc

SEQ ID NO: 244568 - DNA, 636 bp, Homo sapiens
gccccaactgacactgctggcagtaaatgaccctcacaactctctcctccactcattcccagagatagtgatatgttggtattaacaacacatctctttaaaaattcaattacatttgcatctatttgacagactagaataattactatctgctgctaagstttcccctgcagatgcaagaaaaaagtgaccttacattttctgtctgtctgattgtggcagccaagattgaatagggaaatacagagggtagaaatctaattatataacagtattgtggtcatttctttaaagttcttatcttttggagacacatattgaaatatttacaaatataatcatatgattgtgggattagcttcaaataatgcaggatgggtatgatttcatttacatgaagtacaaaagcaaaaagaaaatcataaacccatgctgttgaggtgaggagagtggggcggagggtggagatagtgaccagtagataggacgaggtgggtatctgggatttgcatttacacaaatggttttgggttatgaaaattcactgtgctttaattttatagcatatgcttttctgtgcctgtgtatatgtatacatgtgcatgtacatcatacttcaacaaacctttttgaaaa

SEQ ID NO: 244569 - DNA, 636 bp, Homo sapiens
gccccaactgacactgctggcagtaaatgaccctcacaactctctcctccactcattcccagagatagtgatatgttggtattaacaacacatctctttaaaaattcaattacatttgcatctatttgacagactagaataattactatctgctgctaaggtttcccctgcagatgcaagaaaaaagtraccttacattttctgtctgtctgattgtggcagccaagattgaatagggaaatacagagggtagaaatctaattatataacagtattgtggtcatttctttaaagttcttatcttttggagacacatattgaaatatttacaaatataatcatatgattgtgggattagcttcaaataatgcaggatgggtatgatttcatttacatgaagtacaaaagcaaaaagaaaatcataaacccatgctgttgaggtgaggagagtggggcggagggtggagatagtgaccagtagataggacgaggtgggtatctgggatttgcatttacacaaatggttttgggttatgaaaattcactgtgctttaattttatagcatatgcttttctgtgcctgtgtatatgtatacatgtgcatgtacatcatacttcaacaaacctttttgaaaa

SEQ ID NO: 244570 - DNA, 636 bp, Homo sapiens
gccccaactgacactgctggcagtaaatgaccctcacaactctctcctccactcattcccagagatagtgatatgttggtattaacaacacatctctttaaaaattcaattacatttgcatctatttgacagactagaataattactatctgctgctaaggtttcccctgcagatgcaagaaaaaagtgaccttacattwtctgtctgtctgattgtggcagccaagattgaatagggaaatacagagggtagaaatctaattatataacagtattgtggtcatttctttaaagttcttatcttttggagacacatattgaaatatttacaaatataatcatatgattgtgggattagcttcaaataatgcaggatgggtatgatttcatttacatgaagtacaaaagcaaaaagaaaatcataaacccatgctgttgaggtgaggagagtggggcggagggtggagatagtgaccagtagataggacgaggtgggtatctgggatttgcatttacacaaatggttttgggttatgaaaattcactgtgctttaattttatagcatatgcttttctgtgcctgtgtatatgtatacatgtgcatgtacatcatacttcaacaaacctttttgaaaa

SEQ ID NO: 244571 - DNA, 547 bp, Homo sapiens
taaattaaaaactttgagaaccctgagagtttactttccagtataactaagcattctaaatgcaactttgaatgaaaatttctttatatgcctcaaatttgaaaatatgtaagctagtcaaagaatgtgtatttattattggagactcaataattwatgatgacaagctgttaagctagagaagtggttctcaggcaggcatgattttgctccctagggagcactatcaacttctggagacatttttcgatgtcatgctatggggaggagggaggagatgctgttggcatcttgtagatagaggccaaggatttcttgtaatacataggacagcctcaatgtcaactgtgctaaggttgggaaatgctgagtaagaagaattgaaagcccagggccagggtcttccaaaaaaaactaggcacacctgtccagcaagagctggacccagtgagttgtcacctatggcagacagagaggaagaaataccctcccactccactttctatctttttggctgtgaagtaaatgagcataacaaggaaaaatc

SEQ ID NO: 244572 - DNA, 547 bp, Homo sapiens
taaattaaaaactttgagaaccctgagagtttactttccagtataactaagcattctaaatgcaactttgaatgaaaatttctttatatgcctcaaatttgaaaatatgtaagctagtcaaagaatgtgtatttattattggagactcaataattaatgatgacaagctgttaagctagagaagtggttctcaggcaggcatgattttgctccctagggagcactatcaacttctggagacatttttcgatgtcatgctatggggaggagggaggagatgctgttggcatcttgtagatagaggccaaggatttcttgtaatacataggacagcctcaatgtcaactgtgctaaggttgggaaatgctgagyaagaagaattgaaagcccagggccagggtcttccaaaaaaaactaggcacacctgtccagcaagagctggacccagtgagttgtcacctatggcagacagagaggaagaaataccctcccactccactttctatctttttggctgtgaagtaaatgagcataacaaggaaaaatc

SEQ ID NO: 244573 - DNA, 547 bp, Homo sapiens
taaattaaaaactttgagaaccctgagagtttactttccagtataactaagcattctaaatgcaactttgaatgaaaatttctttatatgcctcaaatttgaaaatatgtaagctagtcaaagaatgtgtatttattattggagactcaataattaatgatgacaagctgttaagctagagaagtggttctcaggcaggcatgattttgctccctagggagcactatcaacttctggagacatttttcgatgtcatgctatggggaggagggaggagatgctgttggcatcttgtagatagaggccaaggatttcttgtaatacataggacagcctcaatgtcaactgtgctaaggttgggaaatgctgagtaagaagaattgaaagcccagggccagggtcttccaaaaaaaactaggcacacctgtccagcaagagctggacccagtgagttgtcacctatggcagacrgagaggaagaaataccctcccactccactttctatctttttggctgtgaagtaaatgagcataacaaggaaaaatc

SEQ ID NO: 244574 - DNA, 357 bp, Homo sapiens
tatttaaaatgcacctcttgcaggcagyccatagataggttttgctcttgtattcagtttgccaatctccaccttttgtttggaagaatttagtcctctttcactttgaaattactgatatggtttgatataggcttgctattgtgctcttttgtttttttaaaaaaactttttatttcaagacatttggagatccacattaagtgagagataatacaagtagctcttgtacagtctttagacagtgtcctccgccatggtaacatcttcaacatttgtataatatcacagccagataattcacattgatagaatggtgatagagagcatttccatcaccacagagatcccttgtat

SEQ ID NO: 244575 - DNA, 446 bp, Homo sapiens
gcataggcatattgcctgtaatctcagcactttcaacaacaacaacaataataataataatgggccaggcataggcatattgcctgtaatctcagcactttcaacaacaacaaacaacaataataataatgggccaggcataggcatattgcctgtaatctcagcactttcaacaacaacaacaataataataataatgggccaggcataggcatattgcctgtaatctcagcactttcaacaacaacaacaataataataataaygggccaggcataggcatattgcctgtaatctcagcactttcaacaacaacaacaataataataataataatgggccaggcataggcatattgcctgtaatctcagcactttcaacaacaacaataataataataatgggccaggcataggcatattgcctgtaatctcagcactttcaac

SEQ ID NO: 244576 - DNA, 626 bp, Homo sapiens
gtgtctgctatacctgggtaccctagaacctggagaacctacagcttgaggcaagagcgtatgtgctattattttttcaagaagtgtgctctcaggaagcagaggtaggggaaaggtgagtgaagggagaaggaagattaagtcagttcaagggtgcattttgaagttggttgcccttggtgcaagtacagttggttgcttgttctcctaaagctgtctcccaggaggatgtatacataactgcattccagggcaatccatctaaaggaagggtggacggacccctcagcttctgtatctcactggaaaaaggtttgcttcatggcacattaattcccatagacttctaggttgtrcatgtgtgggtaccaggtgggtcccacagacccttacacctccaaggcaagcagcaagccacgggtgggaagtgataggtacccagtatgagcaggaggtaagggaccgtggggttgtgcctgtgggcagttggttataacccagacgtgtttgatcagcccagtgacagctggagtggacaaagtgaccaagggcctcaaggacacacaaggccaagaagatttgaagtgctgtgtaagatatgcctaatgcatttggattctaccttt

SEQ ID NO: 244577 - DNA, 626 bp, Homo sapiens
gtgtctgctatacctgggtaccctagaacctggagaacctacagcttgaggcaagagcgtatgtgctattattttttcaagaagtgtgctctcaggaagcagaggtaggggaaaggtgagtgaagggagaaggaagattaagtcagttcaagggtgcattttgaagttggttgcccttggtgcaagtacagttggttgcttgttctcctaaagctgtctcccaggaggatgtatacataactgcattccagggcaatccatctaaaggaagggtggacggacccctcagcttctgtatctcactggaaaaaggtttgcttcatggcacattaattcccatagacttctaggttgtgcatgtgtgggtaccaggtgggtcccacagacccttacacctccaaggcaagcrgcaagccacgggtgggaagtgataggtacccagtatgagcaggaggtaagggaccgtggggttgtgcctgtgggcagttggttataacccagacgtgtttgatcagcccagtgacagctggagtggacaaagtgaccaagggcctcaaggacacacaaggccaagaagatttgaagtgctgtgtaagatatgcctaatgcatttggattctaccttt

SEQ ID NO: 244578 - DNA, 604 bp, Homo sapiens
cggcttccttccatctacctcgtctttgatctagaaactgaggagggtggggtttccagccttttaaggaaaagaggggactctgcttaggtgaaaggttttcctggtactcttccatccgaggcagggtttggggagccttcggctcattttcaccagcaaagaatgggcacgtttttatttatcgcaaaacttgggactggtcagtatcacggcagtgaacttccaacaatccaaggacattgaygtttcttctttcgtttttacattcttgggcaaaattatggcttataaaatgaaaagaccaggacgttggttctcaaaaaatgcaaaacagcacatagcgtgtataaagatgtttttcatgtaggtgagctcaggagccgttcgttacagcagctcttctgtagagtagttgataaagtggagggagctgcccttgttcttgctcattccttacacttgatttgccattttccccatttgcaccttaattaatctttagatgacatgtagccagatccgtcagcctaaaacttatttgcctcaaagcagcagtgtgcggtgtcttaagagtgggctgacggagcccaggctggagtcc

SEQ ID NO: 244579 - DNA, 523 bp, Homo sapiens
ttggaatctcctggccgcacctttcgcagcatgattctgtgaggagtttagttttcactttgctagagcttggcagggtgcgtggtgccctcagttggcagtggatyacaagattggctgtttcattaattctggttgatagaaacatatgggcaattgcagactgtccagagacttgtgtaagtcttctaggtcataaaacataggcaagcagaggcaccttgtaccttccaaacatgctgcgtgacacgcctctcctgaggtttggcatggacgctggggccaccgcatgggctccatcccatgcccgtggctgttggggttttcgcttgtgcaagtctgagacccctgcccctgccagggtgcactgccctcccacatctcctcccctcctccccacgtcagcctgccccatgcctcttttttggatgtaccacaggctgaggggagagaggccacaggttgtcagctctgtttgagatgcagggagcatatgctctgagggggacttgagccagcccca

SEQ ID NO: 244580 - DNA, 564 bp, Homo sapiens
ggggctgcaggccggtgctacaagaagtgacaagggtggcccccaagcccgggtgtcaccaccccagtaaaggctggagggtgctgcgtagatgcagctccctgcttggaggaccgcctagcgcaccctgtgatcacagtagcccctcacgagctccaagctgcacacaacctccaggaagaacaggatcctgaagctggagaggtcgaggccaggttagggtatggggtacccagggtaggggaggcaggagcaagaagctgctcagcctccactcttgagcctcagtttcctcacaagggccctggcccccagcaaagggctgtgatctcacctcctagctggccaacctcccaaagctcctttctcacgtgcgggcctcatcgmgtcccttagtgggacagggcagagcccacccggaggtcccatggagagcctgcctttgcccccatccctaccctggagctctgcactccctcaagtataccctactcttcaggcagggagactgaggccctgcccagagctgccccgtctcagctccctggttcctgcccagagccc

SEQ ID NO: 244581 - DNA, 579 bp, Homo sapiens
gggaccgtggaggacacgtgcacatctcctgtcctattttcctcatagtggcttccagcgatcgagccacaatatgatacattttgagcagcttggagttgacgcttccttttttttttgagatggagtttccctctttcacccaggctggagagcagtggcacaatcttggctcaccataatctctgccttcyggtttcaagcgattttcctacctcagcctcccaagtagctggaattagaggcaaccaccaccacgcccagcttatttttgtattttgagtagagacggggtttcaccatgttggtcaggctggtctagaactcctgacctcgtgattctcccgccttggcctcccaaagtgctgggattacaggcttgagccaccagacctggctcgacccttcctttttttcctcgacttctagttctatggcttccaggttcaggctccaaaacacagaaacccctgaccctgctcaccaaaatatttctagaagataaaaaacatcttcatgaacaaggaagttcgctaaagtagcaaacccatattcccacttccactgacaagaagcaaa

SEQ ID NO: 244582 - DNA, 579 bp, Homo sapiens
gggaccgtggaggacacgtgcacatctcctgtcctattttcctcatagtggcttccagcgatcgagccacaatatgatacattttgagcagcttggagttgacgcttccttttttttttgagatggagtttccctctttcacccaggctggagagcagtggcacaatcttggctcaccataatctctgccttctggtttcaagcgattttcctacctcagcctcccaagtagctggaattagaggcaaccaccaccacgcccagcttatttttgtattttgagtagagacggggtttcaccatgttggtcaggctggtctagaactcctgacctcgtgattctccsgccttggcctcccaaagtgctgggattacaggcttgagccaccagacctggctcgacccttcctttttttcctcgacttctagttctatggcttccaggttcaggctccaaaacacagaaacccctgaccctgctcaccaaaatatttctagaagataaaaaacatcttcatgaacaaggaagttcgctaaagtagcaaacccatattcccacttccactgacaagaagcaaa

SEQ ID NO: 244583 - DNA, 579 bp, Homo sapiens
gggaccgtggaggacacgtgcacatctcctgtcctattttcctcatagtggcttccagcgatcgagccacaatatgatacattttgagcagcttggagttgacgcttccttttttttttgagatggagtttccctctttcacccaggctggagagcagtggcacaatcttggctcaccataatctctgccttctggtttcaagcgattttcctacctcagcctcccaagtagctggaattagaggcaaccaccaccacgcccagcttatttttgtattttgagtagagacggggtttcaccatgttggtcaggctggtctagaactcctgacctcgtgattctcccgccttggcctcccaaagtgctgggattacaggcttgagccaccagacctggctcgayccttcctttttttcctcgacttctagttctatggcttccaggttcaggctccaaaacacagaaacccctgaccctgctcaccaaaatatttctagaagataaaaaacatcttcatgaacaaggaagttcgctaaagtagcaaacccatattcccacttccactgacaagaagcaaa

SEQ ID NO: 244584 - DNA, 622 bp, Homo sapiens
aaacaattcccgtgccaaatacatttttgcacatcttgaatgaataccatggacatcaatatttaaagttttcaaakgtggcaaatgaacatatttcttacttcctcatttatctaatttaaattggattaatgaatttctaaattttgatcttcacttctgtacttattttatcacaaaccataacaaacagcaagaatgtaataagagaattagaccttccccacaaattcttgctgctgtggcctcttgaactctcttctctgtctcctcaattcagcaagaccttaaatctggtgctgccagttggaaaatgcttccacagagttagtgcctgtaattgtaggcctcactttgtttaatagccttctcgcatggatcatattcctgcactatctgttgaattcctgcaataaatgtctgaaaacatttgtttcatatttttccccctattccctagttgtttaagaaggaaaggtaaattcagcttgactaggagcagaagttccatatcttgcatacattctacactgttatattttcattataaatcacaccaaaatattttctactttgcttgattttttttacttaaaccttgaaatactaagaaatgtattat

SEQ ID NO: 244585 - DNA, 622 bp, Homo sapiens
aaacaattcccgtgccaaatacatttttgcacatcttgaatgaataccatggacatcaatatttaaagttttcaaaggtggcaaatgaacatatttcttacttcctcatttatctaatttaaattggattaatgaatttctaaattttgatcttcacttctgtacttattttatcacaaaccataacaaacagcaagaatgtaataagagaattagaccttccccacaaattcttgctgctgtggcctcttgaactctcttctctgtctcctcaattcagcaagaccttaaatctggtgctgccagttggaaaatgcttccacagagttagtgcctgtaattgtaggcctcactttgtttaatasccttctcgcatggatcatattcctgcactatctgttgaattcctgcaataaatgtctgaaaacatttgtttcatatttttccccctattccctagttgtttaagaaggaaaggtaaattcagcttgactaggagcagaagttccatatcttgcatacattctacactgttatattttcattataaatcacaccaaaatattttctactttgcttgattttttttacttaaaccttgaaatactaagaaatgtattat

SEQ ID NO: 244586 - DNA, 622 bp, Homo sapiens
aaacaattcccgtgccaaatacatttttgcacatcttgaatgaataccatggacatcaatatttaaagttttcaaaggtggcaaatgaacatatttcttacttcctcatttatctaatttaaattggattaatgaatttctaaattttgatcttcacttctgtacttattttatcacaaaccataacaaacagcaagaatgtaataagagaattagaccttccccacaaattcttgctgctgtggcctcttgaactctcttctctgtctcctcaattcagcaagaccttaaatctggtgctgccagttggaaaatgcttccacagagttagtgcctgtaattgtaggcctcactttgtttaatagccttctcgcatggatcatattcctgcactatctgttgaattcctgcaataaatgtctgaaaacatttgtttcatatttttccccctattccctagttgyttaagaaggaaaggtaaattcagcttgactaggagcagaagttccatatcttgcatacattctacactgttatattttcattataaatcacaccaaaatattttctactttgcttgattttttttacttaaaccttgaaatactaagaaatgtattat

SEQ ID NO: 244587 - DNA, 622 bp, Homo sapiens
aaacaattcccgtgccaaatacatttttgcacatcttgaatgaataccatggacatcaatatttaaagttttcaaaggtggcaaatgaacatatttcttacttcctcatttatctaatttaaattggattaatgaatttctaaattttgatcttcacttctgtacttattttatcacaaaccataacaaacagcaagaatgtaataagagaattagaccttccccacaaattcttgctgctgtggcctcttgaactctcttctctgtctcctcaattcagcaagaccttaaatctggtgctgccagttggaaaatgcttccacagagttagtgcctgtaattgtaggcctcactttgtttaatagccttctcgcatggatcatattcctgcactatctgttgaattcctgcaataaatgtctgaaaacatttgtttcatatttttccccctattccctagttgtttaagaaggaaaggtaaattcagcttgactaggagcagaagttccatatcttgcatacattctacactgttatattttcattataaatcacaccaaaatattttctastttgcttgattttttttacttaaaccttgaaatactaagaaatgtattat

SEQ ID NO: 244588 - DNA, 599 bp, Homo sapiens
tcatgctttcttccattatttcactttcaaccattctgcattcttatatttaaagtgtattcttataaacaatatatagttgttgttttatatcttaaacataattgttttttccttaatamatttgatctattttcatttaaaataataatggatagagctgtgattatgtctgctatcctgcaaagtccctttttaactgctttcttgatgacttttgattttgtcaaatattgtgagaacgtttttcttatattaactcattaactacaactactttgtagtgattaccctagagagtatataactcattctatacttattacaatttaaaacaagctattatttatcactttcattatactacttgaaccatagaccttttaactccattactccccaacttcattttgcattcttattacttttacagtggacacatcttttaagattttgctgatgcataatgttggcttaaatatttcctgttgcctagttgaactaaacatatcatgatagtatttagtgaggaaatgtgtctgataccagaaattgaattcaatttattaaagatttcttggcatctgtcaaaaagttca

SEQ ID NO: 244589 - DNA, 599 bp, Homo sapiens
tcatgctttcttccattatttcactttcaaccattctgcattcttatatttaaagtgtattcttataaacaatatatagttgttgttttatatcttaaacataattgttttttccttaataaatttgatctattttcatttaaaataataatggatagagctgtgattatgtctgctatcctgcaaagtccctttttaactgctttcttgatgacttttgattttgtcaaatattgtgagaacgtttttcttatattaactcattaactacaactactttgtagtgattaccctagagagtatataactcattctatacttattacaatttaaaacaagctattatttatcactttcattatactacttgaaccatagaccttttaactccattactccccaacttcattttgcattcttattacttttacagtggacacatcttttaagattttgctgmtgcataatgttggcttaaatatttcctgttgcctagttgaactaaacatatcatgatagtatttagtgaggaaatgtgtctgataccagaaattgaattcaatttattaaagatttcttggcatctgtcaaaaagttca

SEQ ID NO: 244590 - DNA, 608 bp, Homo sapiens
tcattatactacttgaaccatagaccttttaactccattactccccaacttcattttgcattcttattacttttacagtggacacatcttttaagattttgctgatgcataatgttggcttaaatatttcctgttgcctagttgaactaaacatatcatgatagtatttagtgaggaaatgtgtctgataccagaaattgaattcaatttattaaagatttcttggcatctgtcaaaaagttcatcaaaattttccsctttgcccgtgtaatatgattgattatggaaatctatttttgaataatgaaaaatatttgaatcttctcagagactatcacttaataatggtactttctgaatttaaagctctgatgaatttgacttactaatatctttcactttgtatctctctatctataacctaaatttgtctgtagattgctgtatctttttttgttctgtttatttaatatttattacaagcttgctaacagcatcatcctagcttaaaaaattaattagaaagtttctgttcttttctccgtgtcttggaagggattgaaaagcaaagaaattgtgtcttcttaaaagtttgcagcactgttcac

SEQ ID NO: 244591 - DNA, 580 bp, Homo sapiens
tatacctatgtttattctaccagtgatttatcttaaaattttgagcataaatgtatgaacatacatgaactcatttttaaatttattttcctctagcaatagagaatgatctttttaataaaataaaaccaataatctcattttcccacttaatgttctttctatttttgaagataaaagtcaaaatyttagcttagacatgaaggcccttcattaactgagtgatgtctctttctcttgcgttgtaacttctgttctccttctctttagctatgttctgttgtttcaggattccgacattcacactgctgttatgcaaaatgctgtttttcaaactgaaatgcttgtgcttctcttttacctgctaaattctattcaaacttcaacattcagttcaaataattatgtcccctggaaaacttttcctagtcacattctccatgcaatctgattttaaaaaccctctccttcactgatgtggcactctgtagataccccatcacaggacctatcatcttgccctacattattaggttactcattcatcttctcttcttcttggagctcagtaagggcaggg

SEQ ID NO: 244592 - DNA, 580 bp, Homo sapiens
tatacctatgtttattctaccagtgatttatcttaaaattttgagcataaatgtatgaacatacatgaactcatttttaaatttattttcctctagcaatagagaatgatctttttaataaaataaaaccaataatctcattttcccacttaatgttctttctatttttgaagataaaagtcaaaattttagcttagacatgaaggcccttcattaactgagtgatgtctctttctcttgcgttgtaacttctgttctccttctctttagctatgttctgttgtttcaggattccgacattcacactgctgttatgcaaamtgctgtttttcaaactgaaatgcttgtgcttctcttttacctgctaaattctattcaaacttcaacattcagttcaaataattatgtcccctggaaaacttttcctagtcacattctccatgcaatctgattttaaaaaccctctccttcactgatgtggcactctgtagataccccatcacaggacctatcatcttgccctacattattaggttactcattcatcttctcttcttcttggagctcagtaagggcaggg

SEQ ID NO: 244593 - DNA, 580 bp, Homo sapiens
tatacctatgtttattctaccagtgatttatcttaaaattttgagcataaatgtatgaacatacatgaactcatttttaaatttattttcctctagcaatagagaatgatctttttaataaaataaaaccaataatctcattttcccacttaatgttctttctatttttgaagataaaagtcaaaattttagcttagacatgaaggcccttcattaactgagtgatgtctctttctcttgcgttgtaacttctgttctccttctctttagctatgttctgttgtttcaggattccgacattcacactgctgttatgcaaaatgctrtttttcaaactgaaatgcttgtgcttctcttttacctgctaaattctattcaaacttcaacattcagttcaaataattatgtcccctggaaaacttttcctagtcacattctccatgcaatctgattttaaaaaccctctccttcactgatgtggcactctgtagataccccatcacaggacctatcatcttgccctacattattaggttactcattcatcttctcttcttcttggagctcagtaagggcaggg

SEQ ID NO: 244594 - DNA, 580 bp, Homo sapiens
tatacctatgtttattctaccagtgatttatcttaaaattttgagcataaatgtatgaacatacatgaactcatttttaaatttattttcctctagcaatagagaatgatctttttaataaaataaaaccaataatctcattttcccacttaatgttctttctatttttgaagataaaagtcaaaattttagcttagacatgaaggcccttcattaactgagtgatgtctctttctcttgcgttgtaacttctgttctccttctctttagctatgttctgttgtttcaggattccgacattcacactgctgttatgcaaaatgctgtttttcaaactgaaatgcttktgcttctcttttacctgctaaattctattcaaacttcaacattcagttcaaataattatgtcccctggaaaacttttcctagtcacattctccatgcaatctgattttaaaaaccctctccttcactgatgtggcactctgtagataccccatcacaggacctatcatcttgccctacattattaggttactcattcatcttctcttcttcttggagctcagtaagggcaggg

SEQ ID NO: 244595 - DNA, 519 bp, Homo sapiens
tctctgccttttttcttctattcaagccttcaacagattgaatgcttcccacccacgttgggaagggagatcttctttccccagtctattgattcaaatgctcacctcatccaaaaacaggtatttgtttaaccaaacatctgtgcaccccttgacccaatcaagttgacacataacattaatatcacaggacacaatcctactgattgttcrgaattattctgtcatcagtatttgtgcttattttatctttttgttcatgtttcagagtttataattaatttcttataatagatttccagatatggaattaccagatcaaattgcataattaactttaaattttcagctgggcacagttgctcttgcctgtaatcccagcactttggaaggctgaggcaggaggatcacttaagcccagaagtcggaagaccagcctgggcaacatagggattctctgttgctacagaaaactttctagaaattagctgggcgtagtggcacacacttgtggtctca

SEQ ID NO: 244596 - DNA, 606 bp, Homo sapiens
tctattacaacaagtactccttcaagcaaatgttgaataaatgaatgaaaggacaaacaaataaatctgttctgtcaatccttaacagccagctgaaggcttaaatcagagaacttaaattgcccctgaaataatcactgcaatctgtactactcttcagacaattccctatttctgtcaacctacccctaactcaatatttwactgatttctaactttgtgtctcaactacgtgatgctttccaaaactagaattaccttggcagctaggtttacagacttcaaagaaacctgatgctgctatggatggaaatagggggcaagctggtttgtgtggtgagtgccaaggttaagtaaatagacatagtggagccaaacattcacctgcatttcaatatgatcagatttacacacacacacacacacacacacacactcttaaagttagcgatttatgctatgagaatgagaatattttagacttgaggaaactcaaatttaataaaacctgtaagatggctggctatgactttatgtaagctgaataaacatatcttcattcagactgatacttctgcctttcttctttgagtctctaatcatcca

SEQ ID NO: 244597 - DNA, 470 bp, Homo sapiens
ggggcaagctggtttgtgtggtgagtgccaaggttaagtaaatagacatagtggagccaaacattcacctgcatttcaatatgatcagatttacacacacacacacacacacacacacactcttaaagttagcratttatgctatgagaatgagaatattttagacttgaggaaactcaaatttaataaaacctgtaagatggctggctatgactttatgtaagctgaataaacatatcttcattcagactgatacttctgcctttcttctttgagtctctaatcatccaaagccaacttttcagttcctgaatgctacaaattatcttctatgaaagtcattgttttgtctatgaagcttatcataacttcagggaatttcacatttgcatttctgatggactacagtctaaggtgttagaaaattggtttcagctttccccacctttttttttttccactgtgaagca

SEQ ID NO: 244598 - DNA, 470 bp, Homo sapiens
ggggcaagctggtttgtgtggtgagtgccaaggttaagtaaatagacatagtggagccaaacattcacctgcatttcaatatgatcagatttacacacacacacacacacacacacacactcttaaagttagcgatttatgctatgagaatgagaatattttagacttgaggaaactcaaatttaataaaacctgtaagatggctggctatgactttatrtaagctgaataaacatatcttcattcagactgatacttctgcctttcttctttgagtctctaatcatccaaagccaacttttcagttcctgaatgctacaaattatcttctatgaaagtcattgttttgtctatgaagcttatcataacttcagggaatttcacatttgcatttctgatggactacagtctaaggtgttagaaaattggtttcagctttccccacctttttttttttccactgtgaagca

SEQ ID NO: 244599 - DNA, 512 bp, Homo sapiens
cttcttaaaagaatgccagtcatattggacaagagctacccatacaacctcattttaattaactctttaaacatcctactcctgatgaagagtaaactgaggctyaataaaaccttaaagagtttatttgagcaagcaacaattcatgagttcggtagctccaaaccagaagtggttcaagagctccaatgaggaaatgcaaggaggaggcttttataggatgaatacagagggaaagcaaagaaaatatttgattgagtacaattatacaattgccttctttggcctatcccattggaaagtctctagttttacaattataagtttatcggctacttctgattggttgagcttaagctctgcttttctttaatacaggcatttacaagaagtagctcaagttaagtttcactgatgtttgcaaatcaagcaaggtttaagtcatttatgaggcctcactggtttcatcttctcagagattttttaggccttgtctccattttaaggtattt

SEQ ID NO: 244600 - DNA, 512 bp, Homo sapiens
cttcttaaaagaatgccagtcatattggacaagagctacccatacaacctcattttaattaactctttaaacatcctactcctgatgaagagtaaactgaggctcaataaaaccttaaagagtttatttgagcaagcaacaattcatgagttsggtagctccaaaccagaagtggttcaagagctccaatgaggaaatgcaaggaggaggcttttataggatgaatacagagggaaagcaaagaaaatatttgattgagtacaattatacaattgccttctttggcctatcccattggaaagtctctagttttacaattataagtttatcggctacttctgattggttgagcttaagctctgcttttctttaatacaggcatttacaagaagtagctcaagttaagtttcactgatgtttgcaaatcaagcaaggtttaagtcatttatgaggcctcactggtttcatcttctcagagattttttaggccttgtctccattttaaggtattt

SEQ ID NO: 244601 - DNA, 512 bp, Homo sapiens
cttcttaaaagaatgccagtcatattggacaagagctacccatacaacctcattttaattaactctttaaacatcctactcctgatgaagagtaaactgaggctcaataaaaccttaaagagtttatttgagcaagcaacaattcatgagttcggtagctccaaaccagaagtggttcaagagctccaatgaggaaatgcaaggaggaggmttttataggatgaatacagagggaaagcaaagaaaatatttgattgagtacaattatacaattgccttctttggcctatcccattggaaagtctctagttttacaattataagtttatcggctacttctgattggttgagcttaagctctgcttttctttaatacaggcatttacaagaagtagctcaagttaagtttcactgatgtttgcaaatcaagcaaggtttaagtcatttatgaggcctcactggtttcatcttctcagagattttttaggccttgtctccattttaaggtattt

SEQ ID NO: 244602 - DNA, 512 bp, Homo sapiens
cttcttaaaagaatgccagtcatattggacaagagctacccatacaacctcattttaattaactctttaaacatcctactcctgatgaagagtaaactgaggctcaataaaaccttaaagagtttatttgagcaagcaacaattcatgagttcggtagctccaaaccagaagtggttcaagagctccaatgaggaaatgcaaggaggaggcttttataggatgaatacagagggaaagcaaagaaaatatttgattgagtacaattatacaattgccttctttggcctatcccattggaaagtctctagttttacaattataagtttatcggctacttctgattggttgagcttaagctctgcttttctttaatacaggcatttacaagaagtagctcaagttaagtttcactgatgttygcaaatcaagcaaggtttaagtcatttatgaggcctcactggtttcatcttctcagagattttttaggccttgtctccattttaaggtattt

SEQ ID NO: 244603 - DNA, 618 bp, Homo sapiens
agctgtgttgtgattggaatagatgaatgaatgaatgaatgttttttcagaacctgttagtaccagcatattagcaaggttagcaaayaatcctaagccctccaaatctagggctttctcactcccctatccccgcaaaaagatggatttcttactcacctcacatgatagctgcaaataactgctggtctgctccatgtattttctccatcatggaatccagcctgaaggtgaagctcctgtctcccacattgctgatctggtggcagagggaaaggagcaattgaataacaacgtgattatgctttaagttgctgctcagcaatgtcataagttatttctactaacacgtacattgaccaaagtcagtcacctgactcaatgggatgaacttacaaaccactcacagaaactaatactgcaaataacatggcaatgagaagtaggatatggaaagacccaagacatttctggattaggtattgttccctgaaagcaaaacatcttcagttctttatttgtcatggatcttggaactgacgtctacaaagaccttctttttccattctcttcctcggccatatctgaagaggttattaaaggatatgcccttcttgg

SEQ ID NO: 244604 - DNA, 618 bp, Homo sapiens
agctgtgttgtgattggaatagatgaatgaatgaatgaatgttttttcagaacctgttagtaccagcatattagcaaggttagcaaacaatcctaagccctccaaatctagggctttctcactcccctatccccrcaaaaagatggatttcttactcacctcacatgatagctgcaaataactgctggtctgctccatgtattttctccatcatggaatccagcctgaaggtgaagctcctgtctcccacattgctgatctggtggcagagggaaaggagcaattgaataacaacgtgattatgctttaagttgctgctcagcaatgtcataagttatttctactaacacgtacattgaccaaagtcagtcacctgactcaatgggatgaacttacaaaccactcacagaaactaatactgcaaataacatggcaatgagaagtaggatatggaaagacccaagacatttctggattaggtattgttccctgaaagcaaaacatcttcagttctttatttgtcatggatcttggaactgacgtctacaaagaccttctttttccattctcttcctcggccatatctgaagaggttattaaaggatatgcccttcttgg

SEQ ID NO: 244605 - DNA, 618 bp, Homo sapiens
agctgtgttgtgattggaatagatgaatgaatgaatgaatgttttttcagaacctgttagtaccagcatattagcaaggttagcaaacaatcctaagccctccaaatctagggctttctcactcccctatccccgcaaaaagatggatttcttactcacctcacatgatagctgcaaataactgctggtctgctccatgtrttttctccatcatggaatccagcctgaaggtgaagctcctgtctcccacattgctgatctggtggcagagggaaaggagcaattgaataacaacgtgattatgctttaagttgctgctcagcaatgtcataagttatttctactaacacgtacattgaccaaagtcagtcacctgactcaatgggatgaacttacaaaccactcacagaaactaatactgcaaataacatggcaatgagaagtaggatatggaaagacccaagacatttctggattaggtattgttccctgaaagcaaaacatcttcagttctttatttgtcatggatcttggaactgacgtctacaaagaccttctttttccattctcttcctcggccatatctgaagaggttattaaaggatatgcccttcttgg

SEQ ID NO: 244606 - DNA, 558 bp, Homo sapiens
taatataaagggaggttgaattttcttgaatgctttttcagcatgtattgaaatgatcatatggattttgttcttggttctgttaacgtgatgtatcatcttcattgatttgtgtatgttggactcattgcacccttgtgataaagcccatttgatcatggtgaaaatctgttgttgcattcagtttgctagtattttgtggaagatttttgcatttatatttttcagtgatattggcttatagtttttgtccttgttgtgtccttgtctagttttgataastgagtaatgttggcttcatataacaagtttgaaagtatttcctgctgttcgattttgattttgaagaatttgaataaattattattagcttttctttaaatgcttggtagaattcagccatgaaaccatcgggtcttgagcttttctttggtgggagacttgttttatggcttcagtcctttacttgctattggtttatttaggttttctagttcttcatggttcaatcttggtagttgcatgtatccaggaaattaaccatttcttctaggcttt

SEQ ID NO: 244607 - DNA, 558 bp, Homo sapiens
taatataaagggaggttgaattttcttgaatgctttttcagcatgtattgaaatgatcatatggattttgttcttggttctgttaacgtgatgtatcatcttcattgatttgtgtatgttggactcattgcacccttgtgataaagcccatttgatcatggtgaaaatctgttgttgcattcagtttgctagtattttgtggaagatttttgcatttatatttttcagtgatattggcttatagtttttgtccttgttgtgtccttgtctagttttgataagtgagtaatgttggcttcatataacaagtttgaaagtatttcctgctgttygattttgattttgaagaatttgaataaattattattagcttttctttaaatgcttggtagaattcagccatgaaaccatcgggtcttgagcttttctttggtgggagacttgttttatggcttcagtcctttacttgctattggtttatttaggttttctagttcttcatggttcaatcttggtagttgcatgtatccaggaaattaaccatttcttctaggcttt

SEQ ID NO: 244608 - DNA, 622 bp, Homo sapiens
tataatatttttgactttcattcattcaatcytagggtttccgtgattctggagaaattctgaaataatctgaacaaagttgccaagtgtttgtggtaaatcagggtttggtgtcccaataaaacaatagatttgaaatccagacttaaataaaagacaaaagaatttacaaattccaaattttcttacaagttaaaacattttggagatctgaattttatgttttattatgtagaatataggtggaaagaaagcaactacaggctattccagagaaaacacatatgtgagtctgtagactgaacagggtaggagagagagagagacaggggaaaataaaaaagtaggaggcaagataccagtgtctttagttctccatttcatctcaatctggttcactataggataagcctcaagatgaagattgagcagtgatggaaagccccaagagagggatggaggtgggggtggctaaaagaaaaggaggctggggccctacaacctattgggacttgaggaggccacttggctgaatatcccacaacaatagtaagcaaccgcagctgagtaatgatggctaaatgttcgtagatagtcctccaccctactctcacctttgatt

SEQ ID NO: 244609 - DNA, 622 bp, Homo sapiens
tataatatttttgactttcattcattcaatcctagggtttccgtgattctggagaaattctgaaataatctgaacaaagttgccaagtgtttgtggtaaatcagggtttggtgtcccaataaaacaatagatttgaaatccagacttaaataaaagacaaaagaatttacaaattccaaattttcttacaagttaaaacattttggagatctgaattttatgttttattatgtagaatataggtggaaagaaagcaactacaggctattccagagaaaacacatatgtgagtctgtagactraacagggtaggagagagagagagacaggggaaaataaaaaagtaggaggcaagataccagtgtctttagttctccatttcatctcaatctggttcactataggataagcctcaagatgaagattgagcagtgatggaaagccccaagagagggatggaggtgggggtggctaaaagaaaaggaggctggggccctacaacctattgggacttgaggaggccacttggctgaatatcccacaacaatagtaagcaaccgcagctgagtaatgatggctaaatgttcgtagatagtcctccaccctactctcacctttgatt

SEQ ID NO: 244610 - DNA, 622 bp, Homo sapiens
tataatatttttgactttcattcattcaatcctagggtttccgtgattctggagaaattctgaaataatctgaacaaagttgccaagtgtttgtggtaaatcagggtttggtgtcccaataaaacaatagatttgaaatccagacttaaataaaagacaaaagaatttacaaattccaaattttcttacaagttaaaacattttggagatctgaattttatgttttattatgtagaatataggtggaaagaaagcaactacaggctattccagagaaaacacatatgtgagtctgtagactgaacagggtaggagagagagagagacaggggaaaataaaaaagtaggaggcaagataccagtgtctttagttctccatttcatctcaatctggttcaytataggataagcctcaagatgaagattgagcagtgatggaaagccccaagagagggatggaggtgggggtggctaaaagaaaaggaggctggggccctacaacctattgggacttgaggaggccacttggctgaatatcccacaacaatagtaagcaaccgcagctgagtaatgatggctaaatgttcgtagatagtcctccaccctactctcacctttgatt

SEQ ID NO: 244611 - DNA, 622 bp, Homo sapiens
tataatatttttgactttcattcattcaatcctagggtttccgtgattctggagaaattctgaaataatctgaacaaagttgccaagtgtttgtggtaaatcagggtttggtgtcccaataaaacaatagatttgaaatccagacttaaataaaagacaaaagaatttacaaattccaaattttcttacaagttaaaacattttggagatctgaattttatgttttattatgtagaatataggtggaaagaaagcaactacaggctattccagagaaaacacatatgtgagtctgtagactgaacagggtaggagagagagagagacaggggaaaataaaaaagtaggaggcaagataccagtgtctttagttctccatttcatctcaatctggttcactataggataagcctcaagatgaagattgagcagtgatggaaagccccaagagagggatggaggtgggggtggctaaaagaaaaggaggctggggccctacaacctattgggacttgaggaggccacttggctgaatatcccacaacaatagtaagcaacygcagctgagtaatgatggctaaatgttcgtagatagtcctccaccctactctcacctttgatt

SEQ ID NO: 244612 - DNA, 530 bp, Homo sapiens
cctttaaatgacaaatttaaaataccatctatcctggctcctcccaccaccattaaagagaatccaagtttcagaaaattagataaaaagaatatgacttttttcaggtataagttcagcatatgtgaaatttaaccacttaycctacagtagtaacacatgatttctcttaaggccaaagttctaagaaatgccagcactgagcagagaaagaggaggctgtttctgttgatcccaaccctatatcagaagggatattgtcgtggctatgataactagtagcaagacagcggccatccctacacttctgttatgtggcagcatgatcattattacataattaaattgtttatgttttacacatctgttttgttctatgacagattatcacaaatactctttggttatccttggttaaagaccattagtatttaatcaaataagtttagtgtagataattcttacttttaagcaatttgttgaattaaatcattatgaagatcagaattccaatttggacatttgttttc

SEQ ID NO: 244613 - DNA, 530 bp, Homo sapiens
cctttaaatgacaaatttaaaataccatctatcctggctcctcccaccaccattaaagagaatccaagtttcagaaaattagataaaaagaatatgacttttttcaggtataagttcagcatatgtgaaatttaaccacttaccctacagtagtaacacatgatttctcttaaggccaaagttctaagaaatgccagcactgagcagagaaagaggaggctgtttctgttgatcccaaccctayatcagaagggatattgtcgtggctatgataactagtagcaagacagcggccatccctacacttctgttatgtggcagcatgatcattattacataattaaattgtttatgttttacacatctgttttgttctatgacagattatcacaaatactctttggttatccttggttaaagaccattagtatttaatcaaataagtttagtgtagataattcttacttttaagcaatttgttgaattaaatcattatgaagatcagaattccaatttggacatttgttttc

SEQ ID NO: 244614 - DNA, 541 bp, Homo sapiens
tgattcattattcttacactcgaataaggagaatcttcatttctcaccatgatcaaccagtataaattttttaatcagtcagaaagctttctagtcctaaaagcacygggacccatgattatcactaaggatattacttagaggtggaaagatgaagatatgaacagctggtttagtagtcacagcagaagaccttgaaatatccctagaagagaagattttaggttgtttggcttatttggagaagaagagaaagccactgctctgttcctcctttgcatttttccctcttcagaaaagcaggctcttataaattttttaaaataattgagccattttgaaatggtatatttttgaccattttaattatttgatttgttttcgtttctgccttgtgcacagtcagaggtaaactaaaatggcttgtgctggtagtgggccatcgtaaaaagctcagatgacagtgggaaattgcttttgtgatgaagggaaacattaataaaagcttctctcatgtttacccttttaaattggccctaga

SEQ ID NO: 244615 - DNA, 541 bp, Homo sapiens
tgattcattattcttacactcgaataaggagaatcttcatttctcaccatgatcaaccagtataaattttttaatcagtcagaaagctttctagtcctaaaagcactgggacccatgattatcactaaggatattacttagaggtggaaagatgaagatatgaacagctggtttagtagtcacagcagaagaccttgaaatatccctagaagagaagattttaggttgtttggcttatttggagaagaagagaaagccactgctctgttcctcctttgcatttttccctcttcagaaaagcaggctcttataaattttttaaaataattgagccattttgaaatggtatatttttgaccatttyaattatttgatttgttttcgtttctgccttgtgcacagtcagaggtaaactaaaatggcttgtgctggtagtgggccatcgtaaaaagctcagatgacagtgggaaattgcttttgtgatgaagggaaacattaataaaagcttctctcatgtttacccttttaaattggccctaga

SEQ ID NO: 244616 - DNA, 488 bp, Homo sapiens
atttagctgaatatgtgtacaaattcacatgtctggactctgttcacaaccaccaaaaaacaaccatcccaaaggaagacaaaacattgttctagaaatatagggatgccaggtggaaagatgaatatggaagtgtttgcagyaggctttacaatgctagtgatgtgctgtaatttgaattgccaccttgagtgggttttgcttttcttaccactgaagtttagatgacctgtgacgtggtttttcaaaattaacaaaacaagtacagagacagaatcatccagaagctttcaaggatattacattctggacatgaattcatgagataggaaccaccctcagaagtgggaacttttaaaataaagctattgcctcagcccatggtgggaagtttacaaaaccagctgcactttgcatctctgggtctaacaaagatcacatatcaaagcttcatgaccaaattaatgtgtagcttatccccctcccca

SEQ ID NO: 244617 - DNA, 488 bp, Homo sapiens
atttagctgaatatgtgtacaaattcacatgtctggactctgttcacaaccaccaaaaaacaaccatcccaaaggaagacaaaacattgttctagaaatatagggatgccaggtggaaagatgaatatggaagtgtttgcagcaggctttacaatgctagtgatgtgctgtaatttgaattgccaccttgagtgggttttgcttttcttaccactgaagtttagatgacctgtgacgtggtttttcaaaattaacaaaacaagtacagagacagaatcatccagaagctttcaaggatattacattctggacatgaattcatgagataggaaccaccctcagaagtgggaacttttaaaataaagctattgcctcagcccatggtgggaagtttacaaaaccagctgcactttgcatctctgggtctaacaaagatcacawatcaaagcttcatgaccaaattaatgtgtagcttatccccctcccca

SEQ ID NO: 244618 - DNA, 573 bp, Homo sapiens
tttctactctaagcaatacgccaaagaattttcccaataaatgttgatcttcttctacaaggactccttttccaactgcaaaatatatatatacacacacatatatatgtgtatatattcatatatgtatatatacatatatgtatgtatatatatattcccattgaaaagtgcacttctttttcaaatttatgtgaaaattggcttaattaggaggaagatgttctwaggatactgcacctacaaaataaaattcccaaatatgaccaggagcatccttctgaatcagtgtgactctcaactccaaatgaagtttaggttttgcctgaccccttcccaagtagaaaatgtttctcaggcaacaggggcttttcccacaaaaaaggtcagttttgggattaaagagaggtacaaatgaatggttttaggagtagatacatcttaggtaagaaatagagaaaaggattcatacaagaactgtaaggctctgaattcccaggagagtatgtagagcactcagtcctgacagtaagcaccctctttgaataaatagagtcctgctagatggcagga

SEQ ID NO: 244619 - DNA, 542 bp, Homo sapiens
accagcctggccaacatggtgaaaccttgtctctactatttttacaaaagttagtcggacgtacagacgggtgcctgtagtcccagctrcttgggaggctgaggcaggagaatttgtttgaacccagaggtgaaagttggagggagccgaggttgtgccactgcactccagcctgggagacagagcaagactctgtctccaaaacaaacaaacaaaaaaaccctgtagcttgggatcagccttctcttctattgtttttctttaaaaaataaaaattaaaaatagatgtagatgctatgttgctgaggctggcctcaaactcctggcctcaggtgatcctcccgccatgacctccaaaactgcagggattgtaggtgtgagcactgcacccagccttatgtttttttctacataaaaaacagcacaggattatcttccagagctaataaatatgttcaaataaccacaaccccattaaggaaaaatatcactgggcagcaaataatcaatccagaccaatatgatcacagttgctgtgaagg

SEQ ID NO: 244620 - DNA, 542 bp, Homo sapiens
accagcctggccaacatggtgaaaccttgtctctactatttttacaaaagttagtcggacgtacagacgggtgcctgtagtcccagctgcttgggaggctgaggcaggagaatttgtttgaacccagaggtgaaagttgsagggagccgaggttgtgccactgcactccagcctgggagacagagcaagactctgtctccaaaacaaacaaacaaaaaaaccctgtagcttgggatcagccttctcttctattgtttttctttaaaaaataaaaattaaaaatagatgtagatgctatgttgctgaggctggcctcaaactcctggcctcaggtgatcctcccgccatgacctccaaaactgcagggattgtaggtgtgagcactgcacccagccttatgtttttttctacataaaaaacagcacaggattatcttccagagctaataaatatgttcaaataaccacaaccccattaaggaaaaatatcactgggcagcaaataatcaatccagaccaatatgatcacagttgctgtgaagg

SEQ ID NO: 244621 - DNA, 542 bp, Homo sapiens
accagcctggccaacatggtgaaaccttgtctctactatttttacaaaagttagtcggacgtacagacgggtgcctgtagtcccagctgcttgggaggctgaggcaggagaatttgtttgaacccagaggtgaaagttggagggagccgaggttgtgccactgcactccagcctgggagacagagcaagactctgtctccaaaacaaacaaacaaaaaaaccctgtagcttgggatcagccttctcttctattgtttttctttaaaaaataaaaattaaaaatagatgtagatgctatgttgctgaggctggcctcaaactcctggcctcaggtgatcctcccgccatgacctccaaaactgcagggattgtaggtgtgagcactgcacccagccttatgtttttttctacataaaaaacagcacaggattatcttccagagctaataaatatgttcaaataaccacaaccccattaaggaaaaatatcactgggcagcaaataatcartccagaccaatatgatcacagttgctgtgaagg

SEQ ID NO: 244622 - DNA, 282 bp, Homo sapiens
tatcagtggctaattccaaagctcctgctattacagaatgacagcatccgatggaggaggatgttcatgtatcaccaaacagctcaagcatggcttcattrcagtgtaacatgcatcatgtcatgtgttattgcttacttaacaaacctcactctatcccacggattaatcaagataaagtagctaaatattgcctgtctacagatgaggtttccatttgtcaaaaggagatataaaactaagtaaggaattggtagattttctcttcatccactctcagtg

SEQ ID NO: 244623 - DNA, 282 bp, Homo sapiens
tatcagtggctaattccaaagctcctgctattacagaatgacagcatccgatggaggaggatgttcatgtatcaccaaacagctcaagcatggcttcattgcagtgtaacatgcatcatgtcrtgtgttattgcttacttaacaaacctcactctatcccacggattaatcaagataaagtagctaaatattgcctgtctacagatgaggtttccatttgtcaaaaggagatataaaactaagtaaggaattggtagattttctcttcatccactctcagtg

SEQ ID NO: 244624 - DNA, 601 bp, Homo sapiens
agaaagagttgtgacagggttgttttgaaatatgtgcttactggagccaaactgctaaatttaccagccatctgacatgagaaaaatcatttgatttttgtgtgccttagtttcctcatctttcaatgcagataataatacccattgcaaagattgcagtgagtattaatatacataaagaactacggtgtctgtccacaaaatatcacatggattgtgacatggcattataacaagcataatgttgtgttggcaaaataytgtatcagttttataatttagtgctttgaggtccaccaaatgtagtttttaatttattgaacaagcatatttgagctctgaaatagttaagatcaactccctaaaattattggtgctacttaggaggccagaggtataaattgttactgttgtcaatgttccacacaaatcacttaggatatgtgaatgtctgctggacagaattcgacttcttttgtggggaactatcttttgtagggaaatgggctcatctttgaagacactgtacaaccaaaatcaaatcatagcaagagacccactttattaatttgtccaatttgattactaagaatttaaccag

SEQ ID NO: 244625 - DNA, 624 bp, Homo sapiens
cgaaagaaactgagtcccacaaaggtaaccaaggagtgcttctgagggctactggcggggacactaagagggagggccttgttctgaaaatgtgcaggaagtattccaggaagatgagaatttttgccacatagcagaacaacacacatttagatgttataaatggtagctggaggcactttccagaagcccacaggtatagccatgttccaggctgaaagggcaaccctaagcaaacctagaatgcttggaggacagtcagtggtttgtggatcacctacatgagatcaaatgccagttctcagcctcctccagatccaccaagtgagaacctctacttggaaatttatatcaaacataccgatcaggargcacactatcccagtaagggtgattttaactggcagtacttgaaagtgtgttcgcaaggttaatctactgcaaagttttatttttccctttgaaatgcataagtaactaatgggggacacctctgataccatgtaaatctacttcaatcttcagtcttgtatctactagttttatgacccatggatggttttaaccaaaaccattattactaagacagtggcaaaatgataaccatggtcaatttcaagctac

SEQ ID NO: 244626 - DNA, 392 bp, Homo sapiens
acttgggaggctgaggtgggaggatcatttgagcctgggaggtcgaggctgcagtgagccatgattgcaccactgcactccagcctgggcaacagagggagaccctgggaaaaaaaaaaaaaaaaaagaaaagagaaagaaagaaagagaaaagaaaactgaataaaatcctctcgtctggaagtgactgaaaaaaatacyttatcttcttcatttaggagattctcactgaaaaatgtggaagcttcaccaggtgacaaaatattttcatgggagtggatgggggagaagattttaatgctttttgaaagacagcgtaggattgaggaagttggctactctaattagtttgtatgttgacctaggtggctgggcttgtctaatgatattct

SEQ ID NO: 244627 - DNA, 515 bp, Homo sapiens
agtattaataacaaaacattttcaagtactgaaagaaaagaactgtcaattctatctgatgaaaatatattgcttcagaaatcagtgggaaataaagacattctcagatgaatgaaaatagaatttgttaactgtagtcaataatatattttgatcatgtgcaggcttagccattgcttcattattttgtgtttattattccagctaaatctactctctcagtgtttttggtttttatagttattaasaagatatgaagatatgaatcttgggttggtttttatttcaacaaatttttaccatgtgtggttttattttgaattgtttctcccattactagttactataaattgctggtttgtaattgttatctggctaattcattagataatttaaggaattctttcagatatctcaggattatcaataaaaagtcaatcaaaaccagtcccccccgtttttttacccccactgtagagtaccaggaaatccctggacaaaatgtgaggcaggcc

SEQ ID NO: 244628 - DNA, 373 bp, Homo sapiens
cacctgtaatcccagcactttgggaggccaaggcaggcagatcacttgagcccaggagttttgagagaagcctgtacaacatggcaaaaccccatctctacaaaaaaaaatgcaaaaattagccaggcatggtggcacacacctctagtcctagctacttgggaggcttaggtgggagaattgcttgagcccaggaagcagaggttgcagtgagccamgattgagccactgcactctagcctgggcaacaaagtgagaccttgccacaaaacacaataaactatgtgccacctagtttactctatacttgtcaaagccaaaagtcaagtcaccaataatttttgagagacatatgaggtcttcaaagaaaaca

SEQ ID NO: 244629 - DNA, 518 bp, Homo sapiens
ttgccttcatcttggttcaaaactttggggctctgatagacttggaggaatgtgactggaggtttggataaggccagatgtggaaggataaagggatatggaaggagtgagagctggaaggaggaagtgatgggccaggagtggaaygttatgtattgtcattttggagtagttctgggtgatcagtagtccagacagtgccatggaaatgagtggctgatgttgaggggaggtgaaagttagaaatcagaacacagggcagcacatgactatgatgtttattgtaatgtaacttgctgtaatggcctttgatgtatttttctttggaatacatgtatttattattttacctgttttattgcttgcaattttctacactaaaatattctattgcttatgtccttagagacttttgatttttttgttgttggtcaaaacactcaattgtttcttagagtcagaatctacagaaaaaaaaataaaaaggtgaagtaaggtcccctggctcactcactggc

SEQ ID NO: 244630 - DNA, 607 bp, Homo sapiens
caactaataatggtttgatttacaatttttctactttatgatggtgagaaaatgatatgcattcagtagaaatcacacttcaagtacccacacaaccactctgtttttcattttcaataggttattcaataaattacattagctattcaatactttattataaaataggctttgtgttgatcttgcccagctgtatatgggcaaacatacagatgagtttgttctatggatgggctttttctggactgttcaactatttgtctctctttgcctataccaatattgtactgttttgtttaatatggttttacagtaagtttttgtatccagtactacaagttacccctttctatttcttcattaatcatgtcaggcatatatttttcttgcaattgcctattttgaaaactaaatgcaaaactttatcttcttccctttcaaaattccttttgttcatttagactattactatagcacactgaaaacattttaaataatatttttgctatctgatacattatctagccctyataattttaatatattcacctcattgatgaaaatttgcaacaggacaaagtgcacttttctgagtctccggtaagga

SEQ ID NO: 244631 - DNA, 608 bp, Homo sapiens
tgggtaacgagggaaaagaaagtaaggagggatcctttcatttaggtagcctaaggttccctgctccaggccctgcttttgcccttttaatgcctgctctgggctgtcatgcagcatcctatagagaaagaaactgagggggattctaaggattcagcatggtcactttaaacaattaccggatcatatagttcaattgctctcttactgtaattaaaagacaattcacagttcgcaatgtagtcccttttgacatttaattarggcttccaatctgcaaagcctgagtgctatcaatcaaattggagccagcagcagtagtgctcatttccacgtaaatagcagagaggtggttgttaccatacaaggtcccctctcaatctatgatgattaatcaggcaggtttttccagcaaacttattgagaaccttttccccaaccactgtgtagctcagagtctaaaagggtttttgcctgttttaaggtaaacaaatgggagttttaacacagtgtagaagcaaatagataactttttctcacccattttgcaagggtcactcctataaaagaagacagattaacaagagaaaagcacaacaaattgatag

SEQ ID NO: 244632 - DNA, 543 bp, Homo sapiens
agatctttgggtcttcatttctgaaggctcccatgtcacataaaactgtgactaaatcaatgtattatggctttctcttatgtgaaaggaaaataaatactcaggaccccaattcactctgccaaaagaaaaaactaagctgaaagctgagtcatgcaagaagctgcctttccttttgttcctaactggacagctacagataacaggttacrtatctccacagatagctactctatgttctccttatcttatgtaaaatgctgctttactgaacacgagaagaatacataattggctattcccctacctgctccttttctcttgcaacatgtggattaccataccctcccacccacttttcccctttaaatactggcacccttaaattcatctttggagaaagtcatagaccacagactgttcctgtgattttctattttttgttccgtgcattgtccttaaccttggcaaaataaagttctaaattgagacctgtctcagatactttttggcttatacttgttaatctgtcttttgtcatag

SEQ ID NO: 244633 - DNA, 462 bp, Homo sapiens
gctcctgtcacttgctcccatccamataatttgtctctgggttctcatatgcccctgttccttatttctttgtttccattcctgggttctctgaatcccagtctaagcaacatgccttagtttgaaaattacaatgtctcaagtttctaccctttgctccgaggattgaacataactgagactgcaactgctaacaagaccccttttcttggagaaccttgtctctttgctcccttccacctgagtccttagatctgacatctagccacagtccttaaaccacactgagaatgtcttgaatgaacagcctttcctggtaaagaaagttattggcaaaccctggattgctgcagctattactcaattctccctacagtcaggttgtgccacagcctgggcaagggttggtccttgtgatctggactctagctcctgcagattaggtgtataacagaactgctt

SEQ ID NO: 244634 - DNA, 589 bp, Homo sapiens
gctttaaaagaaaatgggatgacttttcctatcaagaagttactcttttagagcatgtgaagatatttttatctctgactctgaataatggatctgattcttattartgttttgaaattaatttaagtttagtgttctatctatccaacattcatacatgttgttttagtaacagctttaagtaaccagtgaaaaatgagaaattatcatatagaacatagttggagaggtgtgcccttttagatacacatggatctcatcccatcttctaaatgtacaaacataactttagcttaacaacaggcaaatagagaaatggagaaaagaacgaactagctgggtaaacaggccatgacatatggactggaaagatcaagatgcttaaggcttaacagatacttagtctgttaaactaagttaaaacttacatgggattttttaaagctctttctttaaaacattatcttataaattatgacagcagtcacttccagcctagcaatgtaggctgctggcttctcagcacactgacagcaaagctggcctaaccaagctaccagtactgtcttagcatttaaccctgaaggag

SEQ ID NO: 244635 - DNA, 589 bp, Homo sapiens
gctttaaaagaaaatgggatgacttttcctatcaagaagttactcttttagagcatgtgaagatatttttatctctgactctgaataatggatctgattcttattagtgttttgaaattaatttaagtttagtgttctatctatccaacattcatacatgttgttttagtaacagctttaagtaaccagtgaaaaatgagaaattatcatatagaacatagttggagaggtgtgcccttttagatacacatggatctcatcccatcttctaaatgtacaaacataactttagcttaacaacaggcaaatagagaaatggagaaaagaacgaactagctgggtaaacaggccatgacatatggactggaaagatcaagatgcttaaggcttaacagatacttagtctgttaaactaagttaaaacttacatgggattttttaaagctctttctttaaaacattatcttataaattatgacagcagtcacttccagcctagcaatgtaggctgctggcttctcagcacactgacagcaaagctggcctaaccaagctaccagyactgtcttagcatttaaccctgaaggag

SEQ ID NO: 244636 - DNA, 575 bp, Homo sapiens
gcaagtttaacataaccagatacgctagtattatgggctgcatggtgtgccccccacccctaattcatgtattgaagccatgaccctccagaccttagaggtgaccttattggaaccagagtctttacagaggtgatcaagttaaaatgargtcactagaggccaggcacggtggctcacacctgtaatcccagcacttcgggaggccgaggcaggcagataatgagcccaagagaccaagaccatgatgtccaacatggtgaaaccctgtctctactaaaaatacaaaaattagccaggcgtggtggtgtgggcctgtagtcccagctactcaggaggctgaggcaagagaatcgcttgaacccggaaggcagagattgcagtcagccaagatcatgccactacactccagcctgggtgacagagtgagactctatctcaaaaaaataaaaattaaaaaactaaaaacctacagcaccgccttttacataatgcaatggtttggtaagcacatgcaccccagggaggtagtggcagattcagtcaaccttcccagcagcgtggagacgcagtca

SEQ ID NO: 244637 - DNA, 575 bp, Homo sapiens
gcaagtttaacataaccagatacgctagtattatgggctgcatggtgtgccccccacccctaattcatgtattgaagccatgaccctccagaccttagaggtgaccttattggaaccagagtctttacagaggtgatcaagttaaaatgaggtcactagaggccaggcackgtggctcacacctgtaatcccagcacttcgggaggccgaggcaggcagataatgagcccaagagaccaagaccatgatgtccaacatggtgaaaccctgtctctactaaaaatacaaaaattagccaggcgtggtggtgtgggcctgtagtcccagctactcaggaggctgaggcaagagaatcgcttgaacccggaaggcagagattgcagtcagccaagatcatgccactacactccagcctgggtgacagagtgagactctatctcaaaaaaataaaaattaaaaaactaaaaacctacagcaccgccttttacataatgcaatggtttggtaagcacatgcaccccagggaggtagtggcagattcagtcaaccttcccagcagcgtggagacgcagtca

SEQ ID NO: 244638 - DNA, 575 bp, Homo sapiens
gcaagtttaacataaccagatacgctagtattatgggctgcatggtgtgccccccacccctaattcatgtattgaagccatgaccctccagaccttagaggtgaccttattggaaccagagtctttacagaggtgatcaagttaaaatgaggtcactagaggccaggcacggtggctcacacctgtaatcccagcacttcgggaggccgaggcaggcagataatgagcccaagagaccragaccatgatgtccaacatggtgaaaccctgtctctactaaaaatacaaaaattagccaggcgtggtggtgtgggcctgtagtcccagctactcaggaggctgaggcaagagaatcgcttgaacccggaaggcagagattgcagtcagccaagatcatgccactacactccagcctgggtgacagagtgagactctatctcaaaaaaataaaaattaaaaaactaaaaacctacagcaccgccttttacataatgcaatggtttggtaagcacatgcaccccagggaggtagtggcagattcagtcaaccttcccagcagcgtggagacgcagtca

SEQ ID NO: 244639 - DNA, 575 bp, Homo sapiens
gcaagtttaacataaccagatacgctagtattatgggctgcatggtgtgccccccacccctaattcatgtattgaagccatgaccctccagaccttagaggtgaccttattggaaccagagtctttacagaggtgatcaagttaaaatgaggtcactagaggccaggcacggtggctcacacctgtaatcccagcacttcgggaggccgaggcaggcagataatgagcccaagagaccaagaccatgatgtccaacatggtgaaaccctgtctctactaaaaatacaaaaattagccaggcgtggtggtgtgggcctgtagtcccagctactcaggaggctgaggcaagagaatcgcttgaacccggaaggcagagattgcagtcagccaagatcatgccactacactccagcctgggtgacagagtgagactctatctcaaaaaaataaaaattaaaaaactaaaaacctacagyaccgccttttacataatgcaatggtttggtaagcacatgcaccccagggaggtagtggcagattcagtcaaccttcccagcagcgtggagacgcagtca

SEQ ID NO: 244640 - DNA, 610 bp, Homo sapiens
ttcaagcgattctcctgcctcagcatctgagcagctgggattacaggcatgtgccaccatgcctggctactttttgtatttttagtagagacggggtttcacsatgttggccaggctggtctcgaactcctgacctcaggtaatctgcccacctcagcctcccaaagtgctgggattacaggcgtgagccactgcaccccagccctgattgattgttgaaagtcaaatcccaaccccaaaagttacagtaaatatcttacttttctacaagcccccagcacaagctggtttctaagcacctactttatcgagcttaagatgagaggcaaacactgacccagcgactactaggcacctaatggttgtacatggagcaagagaccaccctgacaatgtgtatcacatccatcagcacattgtcttcccttcatcctccatcctcaatcctatactttcctgtttcctgagtaaccttcctcccacatatttgcttcttccacagcttcttcaactgctctttcctaactgcttcctttctgcttctcaacatgttgcaaaaaaagtctttttttttttttaaccaaaacaaccacaaaagccaaccaaccaa

SEQ ID NO: 244641 - DNA, 590 bp, Homo sapiens
tgcactaaatagagactttggcacctattcctgaaacgagtgttaggaagcacaattcattttggatcctttccagaagatcctggacaaagcctgttgctgtgatggcttggtggggacgttggtgctcctgtcacatcgtcccacgccccacttctggcttactaccaagagagcagacatcagggttgaaaggcaagtcagcaaggcagctgggctccccccaccccttgtatcctggtggcccctgatgactcccagcacagcctgtctactgctgcttctcctggactcctcatcctgtcccagggacaaattctggctctccagkggggccctcggcaaggacccctgagggtctgtagttggcaaagacaatagtgttaaatacctggggtcaaacagctgtaggagaaaataagtctttctctttgtctggcctggctacacatctttctttttctttcatactgttcttttttctttctttggtcttacagactgttttcaaagcccggctgaatggtagcttgtgaggaaaaaaaaaaaaaaaacaaccatattgaaaagacaagtaaacgtccagaaat

SEQ ID NO: 244642 - DNA, 583 bp, Homo sapiens
tgatttcatcccagtatttaataacagtgtgatacgaatacaataaatagactatgcaaataaatattactctgctaaaaaatgtttagtatatacagctttgctttatacagtaatacatttgcatctaactttttggcaatttttaaaaacttcccccccgcccccccaccagttttaagcaaaactggcccactcgctaagaagcaggctgaaattttaaggacatgtttttgaaacatttaaaagaaatcctgtgttggaccactgcggaagacccgatcgtccccattttaatgtttttgcccagtttctgaaaagcctggattggctgcgccatttaggaacattcagttccggatctgcggtgtctgtgctggctagaacagactcgcagggctgggatatgggtagcagtgaaagcccagctccagggataagaagtcatcactggtactctctctttcatgccacgatttctcctccactcagaggcaagtatatattcatgcagcatccyctccctgtggactaggcagtgtgagcactgaccttatccacatgcttctaaattcggtgtatg

SEQ ID NO: 244643 - DNA, 456 bp, Homo sapiens
tcacatttgcacatgtgtttcacttcagggtatgtgtcacctcctctccatgaagcctttctgagatgtccctcctggactcagaggctccaatctcaacatccccactgctcttcgtacagcacctattggctttgtgtcaytgtcattgctgttgaacttttctccttctttagaccaagtaccaccagagggctttggatgtgcagagcctactatgtcagacacattgacttacacatatgtgctgaatggaggtaggaattcttgtagattcaaaggttcaagtatcttaaattgtaactggaaatgagatactgacaaaagatgaacattttctaaaacattaacatcattttttttgttttttgagacggagtcttgctctgtcacccaggctggagtgcagtggtgtgatcttggctcactgcaacctctgcctcaccagttcaagca

SEQ ID NO: 244644 - DNA, 595 bp, Homo sapiens
aatccgatcctctgctattacatttttcatggaagcaactttgagatggtttcagtacctctgctgtagtacaatgactttcctaagggacacaggcatgctgttcattatgattatccacctratatagctgtgtctcccaaacttgtgcctgacatctcagtccatatttctccctcatcaaattggactgagaacacattcccacttgctaccttctctttcggttgtattaaaagtgcaaatattttctttacaagacttctttcctcttagagtcaagattccttctacctggattttgttttttgacataaacattattcaaatttatatcactccagggatagcagggagtcccaagactctaaaatgcaccacaaaatcagcagaatgtcaaaaagccaagggtacacagctaaaatcggatctgcaccagcacagggataactaaagcaaagcaggaaagcgcagggaagctgcagccccaggcgccccgccttgtcgtgttctgctcgaggcagtattcattttaattatgaaacacgccaagggaggcaaggcaaggtctccaaaccggatcacctaattttag

SEQ ID NO: 244645 - DNA, 590 bp, Homo sapiens
ccagttatttatttttttaagagagatgttactttatgtcctttatgaagttttaaagtattcttttaggtgggaaaatgctgtaaagttgggagacacgtaacaattatttaacagagaaaggatattaaataagcattatcattaggtcttttgtttttgaaggcagtctccctctgtcatctaaactggagagcagtagcacggyctcggctcactgcagcttcaacctcctggacttaagtaatcctcctccctcagcatctcatgtagctgggaccacaggcgcatgccatcatgcccagctagttttggtatgcctatatatatatacaccaaatatctatctatctatataccaaatatatatatgtatattatatatatattatatacatatatatatatcatatatatatatatcatatatatattttagagatggggtctcactatgttgcccagctgctcttgaactcctggacccaagcaatcctcccaccttggcctcccaaagtgctggaattacaggtgtgagccacgacacccagccatcattaggtcttaatagaactttagtatacacaaaa

SEQ ID NO: 244646 - DNA, 590 bp, Homo sapiens
ccagttatttatttttttaagagagatgttactttatgtcctttatgaagttttaaagtattcttttaggtgggaaaatgctgtaaagttgggagacacgtaacaattatttaacagagaaaggatattaaataagcattatcattaggtcttttgtttttgaaggcagtctccctctgtcatctaaactggagagcagtagcacggtctcggctcactgcagcttcaacctcctggacttaagtaatcytcctccctcagcatctcatgtagctgggaccacaggcgcatgccatcatgcccagctagttttggtatgcctatatatatatacaccaaatatctatctatctatataccaaatatatatatgtatattatatatatattatatacatatatatatatcatatatatatatatcatatatatattttagagatggggtctcactatgttgcccagctgctcttgaactcctggacccaagcaatcctcccaccttggcctcccaaagtgctggaattacaggtgtgagccacgacacccagccatcattaggtcttaatagaactttagtatacacaaaa

SEQ ID NO: 244647 - DNA, 620 bp, Homo sapiens
tttggtatctctgtgcattttctaatgctattcttcccactaggaatactcttcttcaatgtggattctttaaatccaacccaaaacctaatttaaggtccaggtcaaactacttctgccctatgaaagaatcctgctttctcaggtgtaaattcttcttcaaactcctatgtgtctctcttgggattctcttcactgcttccttgtatctcagttagttgtgttgatatctttcctccacaactagactatacttcttgagggcaggagccacatagttgggagccaccatagttagcctggctcctctrtgacatcggcttgaacaaaagttagcaaatgaatggatgacagagagtattctagaatagaagtatagtaacaccaactcagattacagagatcaggagagccaccctaaaatcccagttaattctgaggaaggcacacatattgcagcaaatgccaaagctctggccaaatatgtcggtttatttgggagctaccagagattctctctgtttaaggtattttcaaagggttctggaaagaaaagtttgtgtagtccccatagtgtttgccagaaccccacctaacaatctgtcagtgagataaatact

SEQ ID NO: 244648 - DNA, 620 bp, Homo sapiens
tttggtatctctgtgcattttctaatgctattcttcccactaggaatactcttcttcaatgtggattctttaaatccaacccaaaacctaatttaaggtccaggtcaaactacttctgccctatgaaagaatcctgctttctcaggtgtaaattcttcttcaaactcctatgtgtctctcttgggattctcttcactgcttccttgtatctcagttagttgtgttgatatctttcctccacaactagactatacttcttgagggcaggagccacatagttgggagccaccatagttagcctggctcctctatgacatcrgcttgaacaaaagttagcaaatgaatggatgacagagagtattctagaatagaagtatagtaacaccaactcagattacagagatcaggagagccaccctaaaatcccagttaattctgaggaaggcacacatattgcagcaaatgccaaagctctggccaaatatgtcggtttatttgggagctaccagagattctctctgtttaaggtattttcaaagggttctggaaagaaaagtttgtgtagtccccatagtgtttgccagaaccccacctaacaatctgtcagtgagataaatact

SEQ ID NO: 244649 - DNA, 620 bp, Homo sapiens
tttggtatctctgtgcattttctaatgctattcttcccactaggaatactcttcttcaatgtggattctttaaatccaacccaaaacctaatttaaggtccaggtcaaactacttctgccctatgaaagaatcctgctttctcaggtgtaaattcttcttcaaactcctatgtgtctctcttgggattctcttcactgcttccttgtatctcagttagttgtgttgatatctttcctccacaactagactatacttcttgagggcaggagccacatagttgggagccaccatagttagcctggctcctctatgacatcggcttraacaaaagttagcaaatgaatggatgacagagagtattctagaatagaagtatagtaacaccaactcagattacagagatcaggagagccaccctaaaatcccagttaattctgaggaaggcacacatattgcagcaaatgccaaagctctggccaaatatgtcggtttatttgggagctaccagagattctctctgtttaaggtattttcaaagggttctggaaagaaaagtttgtgtagtccccatagtgtttgccagaaccccacctaacaatctgtcagtgagataaatact

SEQ ID NO: 244650 - DNA, 597 bp, Homo sapiens
attctagaactggaaagtaatgaaggttagtcaaaagaatgactcaataggcaacttggattctaactcaaattttatcactgtcgacttaactagctttggcccaggaatggtggatgaagtcgatgaagcattttaaaatcataaaagaaaggaaatctgtatgtaacttcagggtttggtcattattgttataacaagaagaggaaactgcagacctaggtttacgttaagtaaactgcagtttcctctgtccatgctgtgtgtcagaactgagtttctatgaagagcagatgactgctactgtaaagaaagygaggacaggaaaaacgaaaacactgcaccaccttcatgaacactgtgaacttaaggggtaagcaaaggtataggcacatcaaatgcccaagacataaaagattgaagtgaattagcaggtggtttttattcctaataaattactgcaaaaactgtaaccatctagtaccaaataattcatttagtggaggactacatcaatatcagccttgagagttgaaagattccactggtgtcatcctgcagaagggagatgacagaatggctttgtttatatttatc

SEQ ID NO: 244651 - DNA, 579 bp, Homo sapiens
taccggcacatctataaagtggtagtaattaaactatctatcctggagggtttgctgtgatgtttaaatacattaataaaaacaaagaaccttagagtgtctaatatatatgaagtgctgcctaagtgttatatacaataatactgctcccagtattattacagaaaaggagggtaggagcacaagagagttaacttgcccaaaggttttttgttttgctttgttttcttttttgagatggagtctcgccctgtcacccaggctggagtgcaatggcaggattttggctcactgaaacctccgcctcccgggttcaaatgattctcctgcttcggcctcccaagtagctgggattacaggcacctgctaccacgccmagctaatttttttttttttttttttaagtagagacagggtttcaccatgttgtccaggctggtctcaaactcctgacttcacgatccacctgccttggcctcccaaagtgctgggattacgggtgcgagccaccacgactgttactcgcccaaggttactgtgccagtcaggaaaagaatccaggcagtgtggccccagagg

SEQ ID NO: 244652 - DNA, 556 bp, Homo sapiens
gttacagctacatgtttgtcgttgttttcttcatcttgttcaattgcttaaaaaaaagaacaccattaaacaaatgtatcatcatacaaaaaatgcttcagataattttctttcagatcgcaatttagcgggaaaaaatgttagatagattcacaaaatgtaaacattggcattattttttgttaatcaaatgtgaagttagctaatagcactgggtacttctcctgcatattatctcatgtattaaatcaatggcagtgagaaaattcaatcttaattctgttcttcacctaaacccatcctgacatcaccatatcagcattgtgctttaccaaaagggcagctgtgggtataagatgaagacttttattcatttcatataagaacagccatatattttttttaatgtggctttctggctggmagtttaaatgtcatataataaaggaagcacagtatttatatctgggttgctcagtgcattgttaccacaaaattccatattgtggagtcttgaatccgtatatcccttcccagcatctccctatccaagccc

SEQ ID NO: 244653 - DNA, 615 bp, Homo sapiens
ggccagggcatgggtgcacccccactcggggcttccagcaccacagcacagctggaagggacttggcaggaatgagccttttattcaccctctatccagttatctagggcatcccaacatggaagctgcaatacccttgggagttacccatccacaatggcttagggcagctggcccctgggaaggggagatgcctgactccacttctctgtcccaagctataacatgctgcgttggtccagtaactgacaagaaagcagaggaacccagcagccaggggacatatacaccaattctcctaggggcctgtgagagtcctcgmtcacttctccactatcccccaagcccgaggacctgcaacattaaaaacacaaaattttaaaacacaacacacgcagacacatatatgaaaatatatatttatagtatttattttaataatataattttaaattcattggaccctgaaaattatgtagccagttttgctggcatgaaagcagtcatttttgtaggtcacagttgaaactacttaaaaatttttaacagtgtttctctagctcctgcctggattttgttgatagtcagtataatgggccaaataattaccctaat

SEQ ID NO: 244654 - DNA, 565 bp, Homo sapiens
tattctgtgtgctttttttttttttttttgagatgaagtcttcactctttttgcccaggctggagtgcagtggcacaatcttggctcactgcaacctccacctcccgggttcaagcgattctcctgcctcacttagcctcccgagtggctgggattacaggcgtkcactaccatgcccagataatttttgtatttttaatagagacagggtttcaccatgttggccaggctggtctcaaactcctgacctcaagtgatttgcctgccttggcctcccaaagtgctgggattacaaggtgtgagccaccacgcttggcctgtgtacttttaaatattgtgctctctgctctgtattttttaaaatatcatttcatgtactttttgcttttgtatgccattcatgcctgctgtgtggtgcccaccatggagcctacctataatgctgtgcatacagtagggctctgcaaatgctaactggcatgaacaatgtatccccaagtgatcaaaactgcactgcttgactatgcctacttatataataagctacttcttttgtaactttatg

SEQ ID NO: 244655 - DNA, 615 bp, Homo sapiens
ggccagggcatgggtgcacccccactcggggcttccagcaccacagcacagctggaagggacttggcaggaatgagccttttattcaccctctatccagttatctagggcatcccaacatggaagctgcaatacccttgggagttacccatccacaatggcttagggcagctggcccctgggaaggggagatgcctgactccacttctctgtcccaagctataacatgctgcgttggtccagtaactgacaagaaagcagaggaacccagcagccaggggacatatacaccaattctcctaggggcctgtgagagtcctcgatcacttctccactatcccccaagcccgaggacctgcaacattaaaaacacaaaattttaaaacacaacacacrcagacacatatatgaaaatatatatttatagtatttattttaataatataattttaaattcattggaccctgaaaattatgtagccagttttgctggcatgaaagcagtcatttttgtaggtcacagttgaaactacttaaaaatttttaacagtgtttctctagctcctgcctggattttgttgatagtcagtataatgggccaaataattaccctaat

SEQ ID NO: 244656 - DNA, 615 bp, Homo sapiens
ggccagggcatgggtgcacccccactcggggcttccagcaccacagcacagctggaagggacttggcaggaatgagccttttattcaccctctatccagttatctagggcatcccaacatggaagctgcaatacccttgggagttacccatccacaatggcttagggcagctggcccctgggaaggggagatgcctgactccacttctctgtcccaagctataacatgctgcgttggtccagtaactgacaagaaagcagaggaacccagcagccaggggacatatacaccaattctcctaggggcctgtgagagtcctcgatcacttctccactatcccccaagcccgaggacctgcaacattaaaaacacaaaattttaaaacacaacacacgcagacacatatatgaaaatatatatttatagtatttattttaataatataattttaaattcaytggaccctgaaaattatgtagccagttttgctggcatgaaagcagtcatttttgtaggtcacagttgaaactacttaaaaatttttaacagtgtttctctagctcctgcctggattttgttgatagtcagtataatgggccaaataattaccctaat

SEQ ID NO: 244657 - DNA, 550 bp, Homo sapiens
caatttctctctttatgccttccagtggtgtggctcatgtggtgggaaaaggaggaaggagttatttagatttttgagttcaatttttcttttatctgatcagaataagagttggttggggaaaatttcctatgcaaatattgattctgggacagttccctccagcgaaacacgtacacaggaatgacagcttctgggaccgagggaggctaggagcttcactctctgccaacacaaaccatctccttatctctcaacacacagagtctaaaagcaagtaatggcctttgaaaataacttaccataacaaaagatacaagtgcaagatctaaagcatatrctttgagtggtgagcattagtgcccacaggagaactaagcatgtatgtggattaattaacagattcgttaagggtacctagtttaaatgtatctatttgtaaattagccaagagggattcaaggtgaatgagtgttgaaagcctcctaggattgtggggcttaacttgatagtgctttcttgttgccttggggacaaaacaggttttctc

SEQ ID NO: 244658 - DNA, 542 bp, Homo sapiens
caactcctccgctgcagcacctaattaaagccttcttccttggcaataatcctcgtctcagagattggctttctgtgtggtgagcagcaggacctagattaaacccctcatgtttcagtaataccagcacctggaataatttctagaacacagagrtactaagtaatggtctactgaactgaacaaaggtagtcaattcagacagtaataattataagacagatataaatagagcaaaatgtcaatgcagtttgtggggagggggttaacatcatgaaaggcatccaggaaaatgcggattctgataggtaaatgagaaaaggggagaaatgcagtcgagagctggcataaacaaacgtaaactgaagaaacccctgggatctgacatgggagcaggaagtagatcataattggaaaatgttagaaaacctctggtagaggtcctggcaagactgcactgagccgtgtggccattgagggcaggttaataatttgatacctctttgtgccaacatttgttaaatatctgttcagcatttact

SEQ ID NO: 244659 - DNA, 379 bp, Homo sapiens
gcggagaattcgagcatggtgcgggcgggccagcagtgctggggacccggcacaccctccttagctgctggcccaggtgctaatccccttcccctcactgcctggggccagtggcaccggctggctgctctgagtkcggggcccactgagcccgcaacggatcccggagaagccggcaggatccctggggagagttttctttgtgaagggcagggcgccctggaatgggtttgctgagcccgcacccacccagaactcgcgctagcctgcgagcagccctggttcctgcccacgcctctccctccacacctccccacaagcagagggagctggcttcggcctccgccagcccagagaggggttcccacagtgcagcagc

SEQ ID NO: 244660 - DNA, 379 bp, Homo sapiens
gcggagaattcgagcatggtgcgggcgggccagcagtgctggggacccggcacaccctccttagctgctggcccaggtgctaatccccttcccctcactgcctggggccagtggcaccggctggctgctctgagttcggggcccactgagccygcaacggatcccggagaagccggcaggatccctggggagagttttctttgtgaagggcagggcgccctggaatgggtttgctgagcccgcacccacccagaactcgcgctagcctgcgagcagccctggttcctgcccacgcctctccctccacacctccccacaagcagagggagctggcttcggcctccgccagcccagagaggggttcccacagtgcagcagc

SEQ ID NO: 244661 - DNA, 592 bp, Homo sapiens
cagccatctctggtttaaaatcatgccactcctttttaggaagcttgttaaagttcattgaactgctccttgacttttctcaggacacttctgacctatattaagagcatatcacaatacaggacatttcctagagtgagaccaattgaatggtatctgaattctgctttactattgcaaggccctttatagacagcagtgatgggaaatccataatcatttcaccagagcttastctaacacttttatagcttctgtttataattttataggaaggggtcctagaatgatccccataacttgtggggaaggacacataatatcaggtgttaaaagcacagtcattaaagccagacacacacagattcaaacactaaaactccacttaatccttgtgtgaccttggacgggttacccgatctctgtacctaatttcccctcttatttaatagagataataatagtacctgtcttataacattcttctgaaagtaaaataatgaatataaagcattcagcacagtgcctgacctaaaattcattctccacaatcaacctttctattagcacagtctcatcaatattctgaagc

SEQ ID NO: 244662 - DNA, 592 bp, Homo sapiens
cagccatctctggtttaaaatcatgccactcctttttaggaagcttgttaaagttcattgaactgctccttgacttttctcaggacacttctgacctatattaagagcatatcacaatacaggacatttcctagagtgagaccaattgaatggtatctgaattctgctttactattgcaaggccctttatagacagcagtgatgggaaatccataatcatttcaccagagcttagtctaacacttttatagcttctgtttataattttataggaaggggtcctagaatgatccccataacttgtggggaaggacacataatatcaggtgttaaaagcacagtcattaaagccagacacacacagattcaaacactaaaactccacttaatccttgtgtgaccttggacgggttacccgatctctgtacctaatttcccctcttatttaatagagataataatagtacctgtcttataacattcttctgaaagtaaaataatgaatataaagcattcagcacagtgcctgacctaaaattcattctcyacaatcaacctttctattagcacagtctcatcaatattctgaagc

SEQ ID NO: 244663 - DNA, 496 bp, Homo sapiens
attaacaccaacattttccctgtacaccattcaccctcatagacatacaaaatttaatagatattttcagtgtttccaaatcagaggcatcctggaagcagatttctagatcataaaattacaaaactggaattcaaagsgatctcaaagttccagaagaacttctcaagaatataaaatttcttctcctaagctcttttggtttgtcctacagtatttcagtctcataaagttcagagaataacctgggcagagctattttcagcagaaagaaaagattgagtgattcaatagcacaatacagtgctactgttgcctggaagatatttaagaatgttccccatgaagccttggctccaggcatagagatatggatgtcttcagctcaaattccaagcaagaggttattctttcagtcagtatgtttttggggctcttcttcctactttctaggtgaaaacatgcaaagagtacagtttctgaagggaggaaacac

SEQ ID NO: 244664 - DNA, 593 bp, Homo sapiens
gttttcctaaatttgatgtcaatctgaaaactttacatgacattaaggatactgagctgcttttatttggcagcacagaaattatcatataaaaagtgtgcrggcaaaatgtagacaaaaataatgttgggctggtcaattactatgtttgtatatacagtaatatatttattaatattttaataattatatacaaattatgtgatgccatgtttctggatgttgtgacatttgtgatattcgtcaacttttaaaaatttatgactaggtgcagtggctcacgcctgtaatcccagtactttgggaggctgaggtgggtggatcacttgaggtcaggagatcgagaccagcctgaccaacgtggtgaaaccccatctgtactaaaaatacaaaattagccagacgtggtggagcatgcctgtaatcccagctacttgggaggctgaggcaggagaatcgcttgaatctgggaggcggaggttgcagtgagtcaagattgcaccattgcattccaacctgggcaacaagagcgaaactctgtctcaaaaaacaacaaaaaaattgtccttggttatgatctcatttctcattct

SEQ ID NO: 244665 - DNA, 593 bp, Homo sapiens
gttttcctaaatttgatgtcaatctgaaaactttacatgacattaaggatactgagctgcttttatttggcagcacagaaattatcatataaaaagtgtgcggrcaaaatgtagacaaaaataatgttgggctggtcaattactatgtttgtatatacagtaatatatttattaatattttaataattatatacaaattatgtgatgccatgtttctggatgttgtgacatttgtgatattcgtcaacttttaaaaatttatgactaggtgcagtggctcacgcctgtaatcccagtactttgggaggctgaggtgggtggatcacttgaggtcaggagatcgagaccagcctgaccaacgtggtgaaaccccatctgtactaaaaatacaaaattagccagacgtggtggagcatgcctgtaatcccagctacttgggaggctgaggcaggagaatcgcttgaatctgggaggcggaggttgcagtgagtcaagattgcaccattgcattccaacctgggcaacaagagcgaaactctgtctcaaaaaacaacaaaaaaattgtccttggttatgatctcatttctcattct

SEQ ID NO: 244666 - DNA, 634 bp, Homo sapiens
tggagaataagtcaaagctcatacaagagaggccagcctggaaatttacagaaggacaggagtaaagggtttcctagaaaatgtgttaaaagacgggttagtggtaagtgctcatgactctaatggtctctgtgacctagaggaagaggcatcccaattccccactgtcagtccagtgtcacagcatgccgaggtgggtgggcagcagggagaaaaaccaaaagggatttgagaaggaaaagcttgcagttagctggtattcctcactatcagagccactaataactttgcagtgattagtcagtgattttgccagtgaggatggccaaaacccagccaggctgtctccactgcaatgtaatatccatgatggcaccagaggtcagatctgtcaccaaattgtaatttaacttcagacagtcaagctctattttatgctgactccaacctagaactagcaaataacaaaactagatggtttgcattctacctccttggccttcccttcctccctgcctggtagaggttgtgtaactgacaaaatgaccctcactgaggtggaggcaggtacaagcacatccttggcatgaatggctggacasagagtaagaggattgatggtaacatagtagcc

SEQ ID NO: 244667 - DNA, 478 bp, Homo sapiens
gtgagaaaactgaatcaaccccagcgccttgggcacaattagctgtattagagaagaaattaagaagcactcctaccctactgcttaagctaagcacagcctttccctgtaaagccagacatcaatctttgttgctgttgtttgttgtcttcttgctagcacgtgtgagagttggtgttctcacctgaatgtagactgcaaagcaatgaaatataatgtatagcagacatagtaaggcttgctgtaagcatatagataagtattctaataaataaacaaactagtcctgcagtattgattcattccaaagcytaatttccttttgttttgtttcattcaccaaagtctatatcctctaaatctaccttcatgatccatcagaaccaattctacatgtcctcaaagcagatttggaaaacaagcaaaagcagatcagaaactcctagatttctttttggcagttatcagtggttattac

SEQ ID NO: 244668 - DNA, 478 bp, Homo sapiens
gtgagaaaactgaatcaaccccagcgccttgggcacaattagctgtattagagaagaaattaagaagcactcctaccctactgcttaagctaagcacagcctttccctgtaaagccagacatcaatctttgttgctgttgtttgttgtcttcttgctagcacgtgtgagagttggtgttctcacctgaatgtagactgcaaagcaatgaaatataatgtatagcagacatagtaaggcttgctgtaagcatatagataagtattctaataaataaacaaactagtcctgcagtattgattcattccaaagcctaatttccttttgttttgtttcattcaccaaartctatatcctctaaatctaccttcatgatccatcagaaccaattctacatgtcctcaaagcagatttggaaaacaagcaaaagcagatcagaaactcctagatttctttttggcagttatcagtggttattac

SEQ ID NO: 244669 - DNA, 623 bp, Homo sapiens
aaattaaacaaaagctagtagaaggaaagacaaaataaatattagaacagagataaatgaaatagagaaaaggaaaataamagggaaaatcaattaaaccaaaagttggttattcaaaaagatcaacaaaattaaaaaatcattagctgaatggactaagaaaagactcaaatttctaaaatgagaaatggaaatgggacattactattgattttacagaaataaaaaggattgtaatgtagtactatgaaaaattctataccaacaaattgtataacctaatgaaatagacaaattcctagaaacataaaccataccaagataaatcatgaagaaatggaaaatctaaatagacttataactactaagaagatttggtgaatgtgaccaaacatttaaagaagaactaataccatccttctcaaacttttctgaaaagtaaggagagaacacttcctaaattattctgtgagattagcattaccccgatgctatagccagacaaagacactactagacagaaaagaaaactacattcaatatctgttccagatgttgttgcaaaaaccctcattgaaatactagcagccaatactaggcaaagtgacctagagattcaatgc

SEQ ID NO: 244670 - DNA, 623 bp, Homo sapiens
aaattaaacaaaagctagtagaaggaaagacaaaataaatattagaacagagataaatgaaatagagaaaaggaaaataacagggaaaatcaattaaaccaaaagttggttattcaaaaagatcaacaaaattaaaaaatcattagctgaatggactaagaaaagactcaaatttctaaaatgagaaatggaaatgggacattactattgattttacagaaataaaaaggattgtaatgtagtactatgaaaaattctataccaacaaattgtataacctaatgaaatagacaaattcctagaaacataaacmataccaagataaatcatgaagaaatggaaaatctaaatagacttataactactaagaagatttggtgaatgtgaccaaacatttaaagaagaactaataccatccttctcaaacttttctgaaaagtaaggagagaacacttcctaaattattctgtgagattagcattaccccgatgctatagccagacaaagacactactagacagaaaagaaaactacattcaatatctgttccagatgttgttgcaaaaaccctcattgaaatactagcagccaatactaggcaaagtgacctagagattcaatgc

SEQ ID NO: 244671 - DNA, 418 bp, Homo sapiens
aataagacagccctcaccacaaactgaatttgctggcaaaaactgaattgtagctgtaccttatcatggatttccagctccaaaactgtgagaaaataaatgtctgttgtttaagccacctagtagtctgtgatacattgttatagtaccctaacctgactaaaacaccatcataaagattttggttgttctccaattagcctataaattaaaatcatttcaattaaaatgtcaatgaattctgttttcatttaagtgtctcctacaaaccccattcatgattaattagagaaaatattttttcttatataaatctggaccgagaaaacatrctatcctaatatggactaacacatgttgatcacatagttacattagaagaaaggctggcacatagtaaggactcgtaaaatgtcag

SEQ ID NO: 244672 - DNA, 562 bp, Homo sapiens
gtattagggcatatccataaaatggaaaccatttcagcagcagggtcattgtcagtcacagtcctgtcagggaattggttatgcaagtgacagaagaaccaagaagccaaacaggggatgaggagacaatgcagagaktagaacagtgggaagctgccaatacccctgagctgggactgatgacaggaaggagtagtgttactgaacctagaagtgcaggcccttctgtgggagctggggtcccattaggtacctaagtaatgtctcactggaacctggggccaaagagaaaagaggtgtccttctctctggagtcaactaagaggctcagttgttgtcaaaagtaacactcaaagcaaagaggaaggcgaggaaatatgctgccttatcctttccaatcttccaccagcttctcccattggtgaacctgcctggaaattagaggcaagcgagtctggaaaacatagttccctgtgattcacaacagggcaggaaagtgtgggggatgaacttgagagaaaacaagcactaagttggcagagctagtgggtgatacttacag

SEQ ID NO: 244673 - DNA, 562 bp, Homo sapiens
gtattagggcatatccataaaatggaaaccatttcagcagcagggtcattgtcagtcacagtcctgtcagggaattggttatgcaagtgacagaagaaccaagaagccaaacaggggatgaggagacaatgcagagattagaacagtgggaagctgccaatacccctgagctgggactgatgacaggaaggagtagtgttactgaacctagaagtgcaggcccttctgtgggagctggggtcccattaggtacctaagtaatgtctcactggaacctggggccaaagagaaaagaggtgtccttctctctggagtcaactaagaggctcagttgttgtcaaaagtaacactcaaagcaaagaggaaggcgaggaaatatgctgccttatcctttccartcttccaccagcttctcccattggtgaacctgcctggaaattagaggcaagcgagtctggaaaacatagttccctgtgattcacaacagggcaggaaagtgtgggggatgaacttgagagaaaacaagcactaagttggcagagctagtgggtgatacttacag

SEQ ID NO: 244674 - DNA, 589 bp, Homo sapiens
tagtcttcttgcctacatcattctcctgtgctggatgctttcttccctcaaacgtcggactccaagttcttcagctttgggactcggactggcttccttgctcctcagcttgcagacagcctactgtgggactatatgattgtgtgagtcaatactccttaataaaatccctttatatayacatctatcctattagttctgtccctctacagaaccttaactaaaacaagcccacatcgtttatttggttgtcccgtgagacattataatgaatggttcttggtcagtctgaggtattccatgtcaagggccccttagccctgaagccagagaggctggtgattctattatcgcaatctttgtactaacagaatttaaagtatctgtggactggtcatctttctggtagtatatttaaaggtttgattaagcactttttctatttcgaaaagcctaacatagatgaagaaaatacaactaaaattgttcctattttttaaatcatgaatgatataaattgtttctttgttaatgttttcttggccataagcttcttcaaagaaaagtggataatctatctccaaaatgt

SEQ ID NO: 244675 - DNA, 589 bp, Homo sapiens
tagtcttcttgcctacatcattctcctgtgctggatgctttcttccctcaaacgtcggactccaagttcttcagctttgggactcggactggcttccttgctcctcagcttgcagacagcctactgtgggactatatgattgtgtgagtcaatactccttaataaaatccctttatatacacatctatcctattagttctgtccctctacagaaccttaactaaaacaagcccacatcgtttatttggttgtcccgtgagacattataatgaatggttcttggtcagtctgaggtattccatgtcaagggccccttagccctgaagccagagaggctggtgatyctattatcgcaatctttgtactaacagaatttaaagtatctgtggactggtcatctttctggtagtatatttaaaggtttgattaagcactttttctatttcgaaaagcctaacatagatgaagaaaatacaactaaaattgttcctattttttaaatcatgaatgatataaattgtttctttgttaatgttttcttggccataagcttcttcaaagaaaagtggataatctatctccaaaatgt

SEQ ID NO: 244676 - DNA, 569 bp, Homo sapiens
aagtgcatcattggaaggatggacagctggctgatgcaggacagaggggamccaatgtagtcaacttgccacaaatcaaccagtcgaatctcctgaagacctagtaacctattgagggctccttgttggtctctcttgttagcaagttggacattcaaaatcagcagtagctagatttaccaggataattggtagtccattttattggctaatgagtagtcttgctctctgccactgtggccactcgattcatgtgcccatcatgccagtacttaatccaaagacaaagcctggataatgtcaactggacaagttatcttgtctatttgttttttcagtgcttcttgtgtacttgatgctttccaattagtgttaaacgcatgacacaaaaatcttcacacattgtgcccactcccatagtcccaaccacatgtctctgtctcagactcttgtttccaatctccaagtccctttcattcaggtccctgtccacacagctagactattggctactgtgcagaaacctatacatatattcacaccttaggccaatttttcttccacacgaa

SEQ ID NO: 244677 - DNA, 569 bp, Homo sapiens
aagtgcatcattggaaggatggacagctggctgatgcaggacagaggggaaccaatgtagtcaacttgccacaaatcaaccagtcgaatctcctgaagacctagtaacctattgagggctccttgttggtctctcttgttagcaagttggacattcaaaatcagcagtagctagatttrccaggataattggtagtccattttattggctaatgagtagtcttgctctctgccactgtggccactcgattcatgtgcccatcatgccagtacttaatccaaagacaaagcctggataatgtcaactggacaagttatcttgtctatttgttttttcagtgcttcttgtgtacttgatgctttccaattagtgttaaacgcatgacacaaaaatcttcacacattgtgcccactcccatagtcccaaccacatgtctctgtctcagactcttgtttccaatctccaagtccctttcattcaggtccctgtccacacagctagactattggctactgtgcagaaacctatacatatattcacaccttaggccaatttttcttccacacgaa

SEQ ID NO: 244678 - DNA, 585 bp, Homo sapiens
gcatttcctcagtggccatctgataaagcaggaaggaaaaaaattaaaaatgaacctccccaggatttcatttctattgtggcttagctgcaaatttgaaaaataaaaataaaaataaaccctgaatgtaagcacttgtacgtttttgttagattctttcacaggactggtcaacatcttgacagatattawttggcgattcactggagacttcacggcacctgacctggtttgccgagtggtccgctatttgcaggtatgtcacaccttccaaatgtgatgagacaaactgataccagagttagcttttagatttatctaaggaaaatcatataaaaccttgcattcctatgcatcaaactgcccgctttctcctgggtagaagggcaatgaaaatttgatttttaatgtatttcctttgctaaaaatagtatctatataaagaaaacacaaacgagccacaaatgagcaatgctaaggacataaagcattcatatttcaaatgttaaataaaatgtctgggtcaatattaaggattttggcatattgtggataatctccaaaaagtttgttaattatatttac

SEQ ID NO: 244679 - DNA, 585 bp, Homo sapiens
gcatttcctcagtggccatctgataaagcaggaaggaaaaaaattaaaaatgaacctccccaggatttcatttctattgtggcttagctgcaaatttgaaaaataaaaataaaaataaaccctgaatgtaagcacttgtacgtttttgttagattctttcacaggactggtcaacatcttgacagatattaattggcgattcactggagacttcacggcacctgacctggtttgccgagtggtccgctatttgcaggtatgtcacaccttccaaatgtgatgagacaaactgataccagagttagcttttagatttatctaaggaaaatcatataaaaccttgcattcctatgcatcaaactgcccgctttctcctgggtagaagggcaatgaaaatttgatttttaatgtatttcctttgctaaaaatagtatctatataaagaaaacacaaacgagccacaaatgagcaatgctaaggacrtaaagcattcatatttcaaatgttaaataaaatgtctgggtcaatattaaggattttggcatattgtggataatctccaaaaagtttgttaattatatttac

SEQ ID NO: 244680 - DNA, 521 bp, Homo sapiens
tttcgacatgttggaggttggcaaccacactatcttcatatttttccaaagcatttgataacctatggtttctcccaattgttaactttaaaatgtcttcttgatttagaaatattcatgtcagtaaaattttttctaactgtatctacaataaatgttaagactatatataaaatatatcttttgacatagggaaaacgatagagaaagaaattctgataattctctcttctataaaggaagcaagaaaattggcaaaaaatatcagaatcaaatttgtaaaactctggaaattaaccaaacacttgcaattactcagggagcatttattcaggaaaatggctgaatctcagtgagaaaaatgagctttgcggtgctttggcttgcattattctcagcccccagtatccaactctgtaacagccttaaaaagtaatagctstcattcatagtgaaaacaaattgtctggcagccactgtagaaagcaaaacagggacagagccctttcaaattcccaaga

SEQ ID NO: 244681 - DNA, 529 bp, Homo sapiens
ggataatagtcagggaaaacaacagactaaccaaagcttaagaacatacgctgagtaatgagatatccataggggatttgaaaatctctgacatactcccaaaaatctagaagaccaggtatatgcccaggactatgctcatcctaaggaaaaaatagagaaggcactgagctgtaacctgtgaatgatcttgaggctttgtgcaagcaggaagtgagggcaaagacagaattgtaagttgcctggctaagtgtcaaaatcatgctccaacattcacacagacttcctctgcaatgaatgggggaattaatagtttctagaatgtaagaaaatctctgtttaggacctatcaccaagatcatggagtaggagatattcatccctccaaagcattcaagtatagacagctattcacaaactaaaatagcccagagaggactcaagggcccattaaagaatttgcagcaacaycgtgaaggaaaaaatggagaataaccacatagaaagaattgctggtgtgattggcaca

SEQ ID NO: 244682 - DNA, 582 bp, Homo sapiens
atttaagagaaaggccttgcattttaaagatcgtgtatgtattttttttttttttcaaaaaaggagacaggcaaatattctacaaggggaacagaattagaattctaggtcaccctacaagttaccctgcacagggaggaaaggaacaggcaagatgacttctcaggatctgtgcctgcgagctgatgctctgagaatgggggttattttcttgggtgtcctgtcttctgtcatctaggctaaaaaatcttcctcacttgactcatcacttgagaagacaacttttggtttcttttcggaagctcgctgctgggtgttcggatgccgatgggtagtacgacggggctctggtgtgacgaagtcattgtctgaggctgcagaagccagaggctggtgcctacaaacagtggatggtttcttggcygttggggctctctggctacctgcttggttaatctcaagctcctcaatcccatccaaacctctggcatgacaggcctgaagcttttgctcaaattcatctattatagccttgccctcaggcttggccccatgttgtagcttgcccataactgacaaaaa

SEQ ID NO: 244683 - DNA, 584 bp, Homo sapiens
cagtgccacagattgtaacagatagcttcatgcacactctgcattttattggtttgtttggaaaatgttggccattgaattattcatagatttatttcaaatagtttggaaattgttgtacctttgaaaacatgctgttcctgtagttttttgatgagagttatagttgttatatatacataaagataattttcttttcatttttaagagacaattctttttatcctaaatattttattatctttaaatttgttcctgtattattatatgtgctcctgaagcgagcactctttttatctatgatacttccataataatctcttctatttatagctattggtagttccctaccagaaaaaaacataattctggtgattgaaatttttatttgctatttaggtttgtgactgaattgtgagaattcagttgtgatttttaacatgtctcagatatatatactaacatgtctaatatatactatctattttattggtttattttgaaaaacatgggtatagaattatttaaatattatttyatttatttaaatatttattaaatatatttatttatttaaatattat

SEQ ID NO: 244684 - DNA, 532 bp, Homo sapiens
tgcaaaatagctgaatacttaaacatataacttaagtttcattcatcaagtttttaatctctaaatcaatctacaacaaatttttccattagtgagaaaaacaacaaagtttccctttattcagagttacccatggagaacactrcatttcttagggtgcctgatatgacataacaactgtggggaagtgtgtgttattattcaacataagccccacagggaggcaaaatacctcccctgacccttacctccacaaaaaagcaggcagtctccactatcaggaagcaatgagaatgctcccttttcaccccaagggctaagcaacacacagtacatttacagggtagaattttcaagagacaatctcagagacaattttaaaccagaaactgattgaaaatgtcatcgaactaagttagacaaaggagtctacaagacaagatcaaagtaaaaagtaagtacaaatagagcctattttaaaaaataatgataaaaccaactaaccttactgacacctactaagtaccaggta

SEQ ID NO: 244685 - DNA, 595 bp, Homo sapiens
tgctactattaggtgggtatataaactgaatttctaaaaatgcttaaaattcaaaactggacaaaaccaatttgttaaaacataccactaaccttatttataaatgattcctagcattaaggaatagtctcttttctggttttgtaacagtatcctcagcactgcagcctgcatcaacactgctcagcttcttcttgcctccaccaagccatcgccacccaccacctccctctaatgtcacaatatgtcaactataggtagaaaccaagamctaaaggaaatggctgctcttccaaaggagacaatgtcagtaataaggatgaaatatcagaagatgaagatggccaatagagagaaggttactatccttcagaaaaaagacaagatgtctgccaaaatttcaagaaaggaggtttagcaggttttccctcctaaaaagactgcagtgtccaagaaagcaaaatgaaagcccacacttccaagcaaccagtcatagatagccacagcaggcaagcagggagccatgacaactaaggggcataaccaggaaagccatcgcaatcagaagtcataagctgccaatgaagatggcgag

SEQ ID NO: 244686 - DNA, 547 bp, Homo sapiens
ggcctttgtgtttcatttcagtgctctatgttctggccaattgtctgtcatcttcctttgtgcgtgaatgagtcccctgtgggcaaaagcagaggccacccgtggagacatacctagatgggtggcaggcagacaaccactatctgtcatctacccaaccaccacttatgtccttttccctccacatccctcytctttcaaaatccctcccctcctactcaccttcttcaggtagcaggagtgggaggtaggaaaaagcaatagacttattaatgttaaagatccaagctgcaaacctttgcttctgattagctttttggtttcagactctttctctaggcaaaattttctcaaaattatctgctacaggaattcagagaaacatttaaaactctaaaagtagaccgataccaccaccttccccatcctccacccagccagcctgtgacagtaggtaaaatctgtatacccaacaccaattcccttgatggtatttggatccatttccaattgagaagcagtcatctatcctttttcattagcttcg

SEQ ID NO: 244687 - DNA, 573 bp, Homo sapiens
agaagttagtgggaagtaaagactctggaggcctggagttgttgggttttaaaattttatgcctggagggtaagtccactctagtaaatgygaagttatttttaaacttaaagccatggaataccactacattatagtaaccagctattttgcagtataacctacattcattcatgtattgtttgtatgaatgttctgtttccagcataatggcttttaaaaattaaagatataaattagctattattagagaaacagcacaatagtaaaactcccataaattggcataagaaaatattaataatagactctagaggggacagtctctaaagaataaacaaaccattgagtagagaacagaaatcccacccaaccagtaagtgctctatgctgatcttcaaacaatgggttcctgggtcttagcaataacaacaaaaacaactcaccactaacccagtgcttactgaatctcatatgctttacatgtattactttatttttttttccaaatgtcacttttgaagaagatacctttaatatttccactttacagatgatgaaattttaaagtgt

SEQ ID NO: 244688 - DNA, 583 bp, Homo sapiens
ggactgggtgggtaaagccttcagctgtgaggcccgttgacatctatgaaagaggaagaaagcgggagagcctccagctgcaaaggacggctgaccagggcttggcttgctcagtgagcagcttcagagcaaagattgcctgatgaagcagttcagcattgggctgaaacagccaggccctacagtacccttctcatctggtttggctctgtccccacccaaaatctcatcttgaattgtaatccccataatmcccacatgtcaagggagaggccaggtggatgtaattgaatcatgggggtgttttctcccatgctgttctcgtggtagtgagttctcacgagagctgatgattttgtaagtgtttggtagtttctcctgcgctcatttctccctcctgccaccttgtgaagaaggtggcttgcttccccttcaccttctgccatgattgtaagtttcctcaggcctccccagccatgctgaactgtgagtcaattaaacctcttacctttataaattacccagttttgggtatttccttatagcaatgtgagaacagactagtatatcttccttgctcagt

SEQ ID NO: 244689 - DNA, 553 bp, Homo sapiens
aagaggaagaaagcgggagagcctccagctgcaaaggacggctgaccagggcttggcttgctcagtgagcagcttcagagcaaagattgcctgatgaagcagttcagcattgggctgaaacagccaggccctacagtacccttctcatctggtttggctctgtccccacccaaaatctcatcttgaattgtaatccccataatacccacatgtcaagggagaggccaggtggatgtaattgaatcatgggggtgttttctcccatgctgttctcgtggtagtgagttctcacgagagctgatgattttgtaagtgtttggtagtttctcctgcgctcatttctccctcctgccaccttgtgaagaaggtggcttgcttccccttcaccttctgccatgattgtaagtttcctcaggcctccccrgccatgctgaactgtgagtcaattaaacctcttacctttataaattacccagttttgggtatttccttatagcaatgtgagaacagactagtatatcttccttgctcagtcattggctgggggttaccc

SEQ ID NO: 244690 - DNA, 535 bp, Homo sapiens
tgattcaatccagtatagtctgtgaactggctttgcagcttcatctgaataatctcaatatttacatatgagttatatgtatctcttggaagaaaattttaaaagtaaaagccattatctatatgggctcaaaggatatgaaagaattttaatctcagaaaagcacaataagraagtcaatatctattttaatctcaggcaagcatactaaagaagtcagtagctgcaaaagctcctcaaaaaattattctaagtcaaatataaataatcttatttgctcttttggattatgaatacatcatagcttttttattaacatccaattcaaagttggcctattgtctggtggtattaaagtggatcacatgtgtagcccttaataatgcacattgacatggaacacttggcttgatcctcgtaattctatgaggtaggtattatcacctatgtacagatgaagaaacacatcctgagagatgtgaattttaatgcaatttctatgaatgacatctttttttcaaaatcctatgaaaca

SEQ ID NO: 244691 - DNA, 574 bp, Homo sapiens
cacacatacctttgcaaaggtaatttgaggctaactgcattgaaggctttaagggtgtccacagtttttttaaggaaatttaactttatgaaatctwtcctatggaaataactttaaaatcataaagtatgcactaagatgttcattgcagtgtctgtatgtatatcttaaccacttttgagctattgccatttttgctgctatgtgtatgtatatatataattgtccccttctttaaaatgtcctgtttttttcaaaactaatttttctgtgagtttgtccttcgtgtataataggaacatgtaatgtataaaaatataaacataattttattattaaagtactcagatttttggtgtctatcagcagcaaagtggtagaacacagatactgttgaagctgtgcatttgcttctgacaaccggatgaagcagatgaaggaattgttgcagcttgtgtgcacctcacttctagccatagttgcagattagtgtgcaaacataggatcctagaaactatggaaaaagcttcattgaattaagtgaaaatctcctcatgtttcaaaagaataaaaa

SEQ ID NO: 244692 - DNA, 524 bp, Homo sapiens
aagccttacaatagcaaataaaaacagccctacaaaactagcctttaccaagttctagggactgtctcaggatatcacatatactaccttgtttaattctcacaggagcctacaagatgcatcctttcattatcctcaatttgtaggagaaagaactcagagaggctgaggaaacttgctcaaggttatatcactagttaggggtggagctggggtatgaactcaggccactgttcctaacccttgacactacactgtcttgtgagatggacaattcataaaagataacaacatgagtttttttccctgaaaagctaaaaattgcttccttgaaaataaagatgctaagagcccaygctaagaatcacagcccatcctaagaaagtatgttcggtgcaattgagtgtggcaaattatggggattaacttgaattctctttatatatcacaaaggaagtcattagcagactttggaactctgttgttagtaacaaatggcttacaccccagctcactgcaacacc

SEQ ID NO: 244693 - DNA, 524 bp, Homo sapiens
aagccttacaatagcaaataaaaacagccctacaaaactagcctttaccaagttctagggactgtctcaggatatcacatatactaccttgtttaattctcacaggagcctacaagatgcatcctttcattatcctcaatttgtaggagaaagaactcagagaggctgaggaaacttgctcaaggttatatcactagttaggggtggagctggggtatgaactcaggccactgttcctaacccttgacactacactgtcttgtgagatggacaattcataaaagataacaacatgagtttttttccctgaaaagctaaaaattgcttccttgaaaataaagatgctaagagcccatgctaagaatcacagcccatcctmagaaagtatgttcggtgcaattgagtgtggcaaattatggggattaacttgaattctctttatatatcacaaaggaagtcattagcagactttggaactctgttgttagtaacaaatggcttacaccccagctcactgcaacacc

SEQ ID NO: 244694 - DNA, 258 bp, Homo sapiens
ggttattgacttccaccagcctgtctccgggkacaggtgacttcatgtaagaagtccagctaccctgacagagagtccacatggagggagcacactgtaatagacagaggtgcctgaggagccccggctgttccagccgccagctatttaggtcttcccaagtcaggcaccagagagtatgaatggacaggccttcaagagaactctagccccagccattgtctgattgtcactgcatgaggaccaaaaactgcctag

SEQ ID NO: 244695 - DNA, 258 bp, Homo sapiens
ggttattgacttccaccagcctgtctccggggacaggtgacttcatgtaagaagtccagctaccctgacagagagtccacatggagggagcacaytgtaatagacagaggtgcctgaggagccccggctgttccagccgccagctatttaggtcttcccaagtcaggcaccagagagtatgaatggacaggccttcaagagaactctagccccagccattgtctgattgtcactgcatgaggaccaaaaactgcctag

SEQ ID NO: 244696 - DNA, 596 bp, Homo sapiens
caactccattctgtcatcagatctcaaatcagcatcacacactttcttttattacaacaactacaatgtgtcaagtgctctaaacacaaagtatcttcccatgtatcacccacaccttttagttatgatccttaacagatcctgtggatccctgtggagtaaattcgccatgtgataaccccccactagcagagaacgaaagactcacaaaggaacctgaaacttaaaccaaactgaaccgctgtgtactagatctgaaggctctgcctcatccactgtatcgtgctgcctccccaaggtgagcttttctaacctgcatactagccagcttttcaagcttgctactgagataaaaaaaaagggggcggggggaaatgtgctggaaacagacaaacaaacaaacaaagaaaaacaaacttggtttttctaggcttgaatcggcaatgggggraaaaaaagtaccctaggaacaaccttcttgagcccattaaaacatacagagatgactggctttttatgactgagtggcttttatttgtggctgtgatctcaggggaagccaatttgctgtgtcctattccttgacttatactgga

SEQ ID NO: 244697 - DNA, 533 bp, Homo sapiens
cttctgttgactccttttcagaggcctgaaccttcctctcacctgcccccagacacaggaagatttgggaccaattcagttggacaccgtttggtcaatctcctacctccattatctagggtgggaacctggatgtatcacacaatgtatcctctgactcctaagctgttccctctactcaaccttgccttatgcttcctggggtcagcgatctgttcctgatacactcagctcttctctgtagcttccaccccttcccagaagacccttctcctatgacaggttcattctcccacagctccactccctccctccccaagccctctttctccctcctggaaaactcctctgaactcctttttatctctgctctttgtcactagtgtcttgtgcagactgcccatyagctcccccttgacctcaccagcattggccccagtccttccagctcctaccagtgctaggaatgacttcaacactgagcctctcagccccttgacatcctcatctccagggacctgcactcccacttc

SEQ ID NO: 244698 - DNA, 529 bp, Homo sapiens
tgggcatgcttaagactgtagaaaggcagccagaagagtggagagatgaccaagcagctagttagtagagggagcaccatcccctggaagagaggttggctgtgtccagaagaggggctcctccttgtgatggggtgtcttttagtcacctgaaaccccaaagcccaagcctgcttttcctccagtctccttactccagcaagtggcattaccattccccctattcctttatccaggcagtcatcctgctgattctgtctcattaatggtcctcaaatcaattcattgctttccaccctcaatgccatgatccacagtcatttttcccatggtcttcagcagcagctctaactgacctcttcgcatcttctcttgttgcccatcaatcttccagagagctgtttccaatatacaaatcgaatcctgtcactccttgttttgaaaaccattcaccacttccaaatctgtygacatggctaactaggccttcaggatctatgacacacaccctcttcctgccccttcttct

SEQ ID NO: 244699 - DNA, 547 bp, Homo sapiens
ataccgcttgggttagttagggtcccctgaggagcagagcccaatacggtagtaaatgtgcaaggatttattcagggaaatacttgtgagagaaattcaggagagagacagaaaacactgggagagccatcagaccacactgcaactctgagccccagtgaaggagagagggcaggaagttcagctggaagcatcctagaccctgtgcaggctaagggaaatttagtaaaggaggcagggagccctggggctgcagtcagccttcagaggagaaataytcctgccttagtttctgccctgctttcctcaatcattggctggaaaagatcagggggcaggtgtgggatcagagcaaatgtggcaatagatttcaagcttcaagagctggggtcatcatcgattctgcttcctgtagctgaggggctgggatgtgcattctcatgactgccacaatgatccagtggggagagagggaaaaagttgatgataaagataaaaaaagatactagttgatgaactgacaactttaagtagatgagaagggatg

SEQ ID NO: 244700 - DNA, 590 bp, Homo sapiens
catttctaatttggtgtatttatgtcttttttcttgtataaacttgcaattatgccattttttgtcctttttctagtgaaacacccttagatctgtaaattgtaattttatattttcaasatattatttctcataataatttttcttcttccagtttaatttgattttaccattatttttaaattttgagttaaattgcaatggatttgcattgcttctttttaagtaataatggaaacatttaaaaccaggaattttatttttaactaccaattgaccacaatatgtaatttttttatatgacttgttttcacgatatgtcttttgattttacatttgccctcaaaatgtggaatatattttataaatatttcctcttgggttgattaattttatttacttaatttttaataaactttaagaatgctttttctattgtgttacagaaatgcgtttcatataatcattgaatagcaattgcattacatagtttgcaatttcacatagactcagaaatttgtttgaaacatacctcattaggaacacacatgctgttactattgtttgtattatgtaaacagagcattgga

SEQ ID NO: 244701 - DNA, 590 bp, Homo sapiens
catttctaatttggtgtatttatgtcttttttcttgtataaacttgcaattatgccattttttgtcctttttctagtgaaacacccttagatctgtaaattgtaattttatattttcaagatattatttctcataataatttttcttcttccagtttaatttgattttaccattatttttaaattttgagttaaattgcaatggatttgcattgcttctttttaagtaataatggaaacatttaaaaccaggaattttatttttaactaccaattgaccacaatatgtaatttttttatatgacttgttttcacgatatgtcttttgattttacatttgccctcaaaatgtggaawatattttataaatatttcctcttgggttgattaattttatttacttaatttttaataaactttaagaatgctttttctattgtgttacagaaatgcgtttcatataatcattgaatagcaattgcattacatagtttgcaatttcacatagactcagaaatttgtttgaaacatacctcattaggaacacacatgctgttactattgtttgtattatgtaaacagagcattgga

SEQ ID NO: 244702 - DNA, 456 bp, Homo sapiens
gagaagtacctaatgtggatgatgggctgatggatgcagcaaaccaccatggcatgtgtatacctatgtagtaaacctgcatgttctgcacatataccccagaacttaaagtataataaaaaatgttttatatgataaagttttccccacccgaaagtccttaatctattcataatttatttttggatgtgattgtccacatcatttacttaatatccacagaagtagcaatattgtttaccaatcttctccctttctcccatgaagtatggccattaaagaattctcatagttactttcctggaaagtagatcttatgaccctcatttagaccagtcctgtcttgtacctagagtccaagaagagtctgaacaaacagtccttcctaatgagtttattttacyacaggatcatatgcctttttcctccagtcacagttttgcatgattgttcata

SEQ ID NO: 244703 - DNA, 414 bp, Homo sapiens
ttgtttttgacagaaactctatgctgatctgtgactcaacactgcagtcttcactcacacactaccggttcaaagtatttttagccattgggctcttcctgctaattatatattatgaggaaggcaatatataaagaggataaattcaaagcagatgtggggcccagagactcacctgttggttgccatacaaatggccaataagtgcatgaaaagatgcttaacatcaataatctttagggaaatgmaaatcaaaactacaatgagatagtaccttgcaaccataaggatggctactattgaaaaaaacagagaatgacaattgttggcaagaatgtggagaaatttgggggatggagccaagacggccgaataggaacaactccagtctacagctcccagcatgagcgatgc

SEQ ID NO: 244704 - DNA, 517 bp, Homo sapiens
tggaagaaatctcaaatattctaaattctaatctcttgtcagtcttagttttgacaagtatcttcctccaatccattgtctgtctattaattttgtctatggtgttttcatttgatagaaatctccatttttgatgtaataaaatcttaatttttcacattgtgagttatatttctaaggtcctctttaagaatatctgtctgacctraagtcagaaagataacctcctctacttttttcctgttatctttattttgacttttaatatttataattcactggaattaattcttgtattttgaatgatatatagctctttacacatgagcttctattaataatatatcttctccctcattgacatggtaccatcttacattaagttcccccaaatacatggctcagtttctgactgtccatggaattatatttacctgcttgtacctgaaccagtagcccacctattttttttcctttatgacaatgtcctggtattagggcatattctctggtagat

SEQ ID NO: 244705 - DNA, 601 bp, Homo sapiens
ctcttgctctctgtctttcttgccctctctctgccctttcaccatggaatgatacagcaaggaaaccctcacaagatgctgataccttgatagtggacttccaaacctacagaactgtgagccaataaatttctcttcattataaattatcccaactatggtattctatggtatttacggcagcacaaaacaggataagacagaagggaaaaaagttccttccatagagaagttctcccttagagaataagacttgagaatactcaagaagccctgggcatggataggacttatgcaacatgaaaaaccaagcaggggaacaggagtaactgaaytggtaaacatccttcatgttttcttatatttatccttcatatctcaaattagggttatggttatataatgaggctctgatgtacttgagaaagctacgccgtatggttcttattgaattgccataatttcctatgaaatggttcttgaataggctaagatctccctgggtttagaaatgtacagcagtctacattgttctctttactgtgggtacttgaatagtctaggaagtcagctcttcatccacaatggaaaaataaatatt

SEQ ID NO: 244706 - DNA, 577 bp, Homo sapiens
caaaaaaaagtgagtgcctggacagaatggaaacctaataaacattcaccaaaggaagtaggagaggagaggggcaggagagaatatastaaaataggttaaagtttccaatatagccatgaaattatttttaggaaaagaatttcaataactcgcatagaaaaagattttttaagcatgataccaaggcagaaatccttacaaaagactaacagattttactgcaaaatataaaatttacaaaatttaaattgtaaagatttttttaatacaaatagaattataaacggatttaaatgtttagaatataaataatatttacatagctgatcaagagttaatatactcactaaaaaaggactttctacaaatcaataagtagaagataaatacttaatacaagaataaatacaaatataggaacaagtaagatacacacaaaatgcaattcaccagtaaacctgttttaaatgtttaattttgccaaaaactaaataaatgaaaataaaaataacaatgagttaccaaattttccaataagaaaagaaagtaggttttaagaaattggtagtgcatt

SEQ ID NO: 244707 - DNA, 603 bp, Homo sapiens
gagctgaaaatgtgagagctatctgctcagaatccagataaaacagaatggggcttatgaaaagtagtgcttgattagttagtttcaaaaatcctaaaacagtgttttcaaatgttcatttctttgaaacagtagttaaggttttgatactctcccctgaggaagtcatctaaaactgctgataaagcttttggcaaagagcttttcattacggggctatttataacaacagaaaaccgtaaacaacttaaatatccagcattgaaagaacagttaaataatagatggtaaatccacacaaataatattatgttccattaaaaactattgacaataaaattgtaatartataaaaaaatctcaacatgaataaaaagcagaatagaaaattatatatgcaccataaactccagctatataaaaaagtgaagcctcacattaaagacagggatgagaaggatcatttaataatgtaaataagagttgttttgatggtgataaaacatataagattgtcatctcccaactttctactttcctctagtttttatattttgagtaagaataatttacacaaataacttacccatgtttagttctcag

SEQ ID NO: 244708 - DNA, 603 bp, Homo sapiens
gagctgaaaatgtgagagctatctgctcagaatccagataaaacagaatggggcttatgaaaagtagtgcttgattagttagtttcaaaaatcctaaaacagtgttttcaaatgttcatttctttgaaacagtagttaaggttttgatactctcccctgaggaagtcatctaaaactgctgataaagcttttggcaaagagcttttcattacggggctatttataacaacagaaaaccgtaaacaacttaaatatccagcattgaaagaacagttaaataatagatggtaaatccacacaaataatattatgttccattaaaaactattgacaataaaattgtaatagtataaaaaaatctcaacatgaataaaaakcagaatagaaaattatatatgcaccataaactccagctatataaaaaagtgaagcctcacattaaagacagggatgagaaggatcatttaataatgtaaataagagttgttttgatggtgataaaacatataagattgtcatctcccaactttctactttcctctagtttttatattttgagtaagaataatttacacaaataacttacccatgtttagttctcag

SEQ ID NO: 244709 - DNA, 433 bp, Homo sapiens
gtagtatggggaggatcaggtggtgggcagggccctagaacacccataagtatacgccgtttgtcttcagctagcagggtgrgtaggaaagaaccattagttggggacagggctaagcatgtctgagctcagactctccttgggaagtcttagtgcagctgctgtgggtaattatggtgtggttcccaggtcaatggagttatgttcctgggaggattatgcctgcctctgctgtgtcatgcacattgtcagggaagttggggaaagctggcagtcacaggcctcacccagctcccaagcaacccaaaaggccggtctcactcccaccatgccccgccaacagcactgagtttgtttccaggcagtgggtgagcagggctgagaacctgtcccaggctacctgcctcccagctgtgaaagcaagtagagcttc

SEQ ID NO: 244710 - DNA, 603 bp, Homo sapiens
ctattttgttactccaaagatgtgctgggttcatctttgtagctagcccaggggcaccatgatgctcaggctaccatatgggagggcgatccatgaggagcagcacctgggtggtgaatagcacctgggaagctgaacctctgtgttcagcttggaggtagttagcagatggagttctaggatgtactaccatgagaagaaagtcragggaagataaaagtcagaatgagggagatggtattggttaaattcaaagaaggaaggataaaaaccttggggaaagagtggaaagagggtggcctccagagctgagtccaccaggatgtacaacaaattatgcttgagatgagctgtccaggactcagtatgcaaatgggtgatctatgcctcagtgcccacttattggaaaacacacctgagatgaaaagcatgctctaaactctgtcactggagagtcttgccgcttggaccgtgagatgactataacaaaacactgccattcatcttccaaaagaggaaatggacagacatataattactagcccataaaatgatggcaaataacacagccctccagacactatacttggtgccatggaaaaa

SEQ ID NO: 244711 - DNA, 603 bp, Homo sapiens
ctattttgttactccaaagatgtgctgggttcatctttgtagctagcccaggggcaccatgatgctcaggctaccatatgggagggcgatccatgaggagcagcacctgggtggtgaatagcacctgggaagctgaacctctgtgttcagcttggaggtagttagcagatggagttctaggatgtactaccatgagaagaaagtcgagggaagataaaagtcagaatgagggagatggtattggttaaattcaaagaaggaaggataaaaaccttggggaaagagtggaaagagggtggcctccagagctgagtccaccaggatgtacaacaaattatgcttgagatgagctgtccaggactcagtatgcaaatgggtgatctatgcctcagtgcccacttattggaaaacacacctgagatgaaaagcatgctctaaactctgtcactggagagtcttgccgcttggaccgtgagatgactataacaaaacactgccattcatcttccaaaagagraaatggacagacatataattactagcccataaaatgatggcaaataacacagccctccagacactatacttggtgccatggaaaaa

SEQ ID NO: 244712 - DNA, 584 bp, Homo sapiens
atggcaaggtgaggctttaagtcagaaagcaacctcagctgaaacaaatgcataattataatttgatttcagaagtggaaacatgacccgaattcatgcacctactgattastccaaattcctttattgttgaagctggagcagaagtgggggtccaccgtggaagtaaggaaaagcaaaacagaacaggggtctcatccagggagccatgtcgatggctatggggagctccaccttgctcttggggtggggccctggccctgggtgggactgtggggtgatgagggttgtgctatgctggctacctggtggtaattgccaaggagagagcagcacgtagatcctccctgtcatcaggcagagctcttcagtgaggtgggctcagggagggctctgtgcctccgttcagcagagctgcagctgctgcccagctctcaggaggcaagctggactccctcactcagctgcaggagcaaggacagtgaggctcaaccccgcctgagccatgccagccaacttcacagagggcagcttcgattccagtgggaccgggcagacgctggattcttccccagtggcttgca

SEQ ID NO: 244713 - DNA, 390 bp, Homo sapiens
tatactcacccaggtccctttctgcaagcatgttcagcttgtccctattccatttctaagccaatgagaccaaagtcggttctagattccagtgggtggggtatggaattagctgaggcaccatgagctggtaccaagtacctggtccagccctggggaatccatctctatygcatggcagccttacctagtctcagctgtcttgctccgtccacttacctaggctcctgacttcgtttcccatctcacattctagttcttatcctctgaactccaaagctctttcaggaggagacaaagcaccccgtctagatcttactggcacttccttcacaggcttagagtctgttccttcctcccacctccacccttgaattctggcttctgctt

SEQ ID NO: 244714 - DNA, 390 bp, Homo sapiens
tatactcacccaggtccctttctgcaagcatgttcagcttgtccctattccatttctaagccaatgagaccaaagtcggttctagattccagtgggtggggtatggaattagctgaggcaccatgagctggtaccaagtacctggtccagccctggggaatccatctctattgcatggcagccttacctagtctcagctgtcttgctccgtccacttacctargctcctgacttcgtttcccatctcacattctagttcttatcctctgaactccaaagctctttcaggaggagacaaagcaccccgtctagatcttactggcacttccttcacaggcttagagtctgttccttcctcccacctccacccttgaattctggcttctgctt

SEQ ID NO: 244715 - DNA, 390 bp, Homo sapiens
tatactcacccaggtccctttctgcaagcatgttcagcttgtccctattccatttctaagccaatgagaccaaagtcggttctagattccagtgggtggggtatggaattagctgaggcaccatgagctggtaccaagtacctggtccagccctggggaatccatctctattgcatggcagccttacctagtctcagctgtcttgctccgtccacttacctaggctcctgacttcgtttcccatctcacattctagttcttatcctctgaacyccaaagctctttcaggaggagacaaagcaccccgtctagatcttactggcacttccttcacaggcttagagtctgttccttcctcccacctccacccttgaattctggcttctgctt

SEQ ID NO: 244716 - DNA, 593 bp, Homo sapiens
gaaataatctgtaaaacaagtttactgctaatatctcaataagctcatgtgaatgaatttgggtagataaagtcttaatcyttattcaccaaccatttggcttgaatttataggtgtcataatttgggagggattcgtgacatcacagtaagccatgttctatattatttagtaatgatgaggaataatgatgatgctatcggattttgggaaaaatccgtaggattggtgagtagaggcactacacaagcctggaaaagggaaaggaaaagagaacaggtttctgtaacccaggatgacatttggttgaaacaatacttagtttcaacctcctcctcactttcccagctaagtactcactctcctagtctcccttgcagttaaaggtagcacagtttgggaagcttaattggaagtctctgagatttctaataaagatttttccttttctgatgaaagcggaaagatattgctggcattctgatgtccccctgacttgaattcagacataatgcatggagccgcagcagccattttgtgaccacaggaaaaaaaagccaagggaatcttagcaaattgagttcagcagcaac

SEQ ID NO: 244717 - DNA, 501 bp, Homo sapiens
ataaatttgaaaattaatgcacagcttcggggattctgttccaagatggctgaagaggaacagcgctagtctgcagctcccagtgtgaacgatgcagaagatgggtgatttctgcatttccaactgaggtacctggttcatctcactgggactggttggacagtgggtgcagcccacagaaggcaagccgaagcagggcggggcatcgcctcacctgggaagtgcaaggggttggrgtatttccctttcctagccaagggaagctgtgacagatggtacctggaaatatgggacactcccacccaaatactgtgcttttccaatggtcttagcaaatggcacaccaggagattatatcctgcacatggctcggcggatcccatgcccaaggagccttgctcactgctagtgcagcagtctgatattgacctgtgaggcagcagcctggcaggggaaggggtgtccaccattgctgaggcttcagtaggtaaacaaagtggc

SEQ ID NO: 244718 - DNA, 577 bp, Homo sapiens
agctcaggaaagaaatagaagaaaactataaatttatatcagacatgaaagcacatggagaactaatgcaaaaaaaatcaggaagcaaaattttacacatatcaagtaatgaaaatacaagcaaaataataatcataaaacagactgtaactctaagttgatgatcaaatagaatcaaatataatgagtcattagtgaaaataaaagatcaccttgaatcagaaattctaggctgggtgcagtggctcatgcctttaatcccaggacttcgggaggctgaggtaggtgaggtcmggagttcaagaccagcctgaccaacatggtgaaatcctatctctactgaaaaaaaaaaaaaagtacaaaaactggctgggcttggttgtgcacacctgtaatcccagctacttgggaggctgaggcaggagaattgcttgaacccgggaggcagaggttgcagtgagccgagatcgcatcactgtactccacctgggtgatagagcaagactccatctcaaaaaaaaaaaaaaaaaaagaaagaaagaaagattaaatctaaaagcagaaatggacaaagaag

SEQ ID NO: 244719 - DNA, 577 bp, Homo sapiens
agctcaggaaagaaatagaagaaaactataaatttatatcagacatgaaagcacatggagaactaatgcaaaaaaaatcaggaagcaaaattttacacatatcaagtaatgaaaatacaagcaaaataataatcataaaacagactgtaactctaagttgatgatcaaatagaatcaaatataatgagtcattagtgaaaataaaagatcaccttgaatcagaaattctaggctgggtgcagtggctcatgcctttaatcccaggacttcgggaggctgaggtaggtgaggtcaggagttcaagaccagcctgaccaacatggtgaaatcctatctctactgaaaaaaaaaaaaaagtacaaaaactggctgggcttggttgtgcacacctgtaatcccagctacttgggaggctgaggcaggagaattgcttgaacccgggaggcagaggttgcagtgagccgagatcgcatcactgtactccacctgggygatagagcaagactccatctcaaaaaaaaaaaaaaaaaaagaaagaaagaaagattaaatctaaaagcagaaatggacaaagaag

SEQ ID NO: 244720 - DNA, 569 bp, Homo sapiens
aataatgaatctggatccctatcttacaccatacgtaaaaaataactcacaatgaattaaagactgaaacagaagagttaaatctataaaacacttagaaaaaaagtagatcttcatgaatttagattagtcaatcattttttaaatatggcagcagaatgttaaatggattaacaatatgtgggtgrtctgtacagctggatattgttcatcaataaaaagaaataaaggaaatactgatacatgctatatgatatggataaactttcaaaagattatgtgcagtaaacaaactagacacaaaagaccacatattatatgattccatttatgtgaaatatccagaatagacatatccatggacatggaaagtaaattagtcattaccaagaaatagggtgagggattgattgggaggtttaggattttctttgagcaaagttgaaaaggttctggaattagtggtggtgattgaacaacattgtgaatatactaaaatccactgacttgtacactttcaaattgtttttaaaaagtcctatttcccctattagaatcacaaatcccct

SEQ ID NO: 244721 - DNA, 543 bp, Homo sapiens
ttgaaaacttatacatggatatgagttttcttacccaggtggcattagaattatagccactatttctaggctattaaaagttaattttaaaaacagcaaaaattaagaccttgattaaacattaactttcctttatattctcacactaaaaaatagacacaagacaaaatgtaagaggtttcaactgaagtgcatacactctttaaagccttgattatatccaaagtttccatttctcatctcctacaaataatggaacaagggcataaatgaaaattaaatgagaaaaatcaaagcaaatgtcagaaagcgtctcttcawgaaagatcagaaacacttaaaaaaaaaaagaaaaacaaaactaacaggcaaggttgttaaaatcactagagctattcgaaaaacaattataggaaatggcatcctgaggggttaaggagatctaaacactaacagaggataaacccctacaggttgagccatcctcacgtatcaagcttttccttattcttccaaaagttcatttggattgtgtcagtccac

SEQ ID NO: 244722 - DNA, 497 bp, Homo sapiens
tcctagagaagaaacaaaagctttcttctgttgctttatgcaactttgttgtctttatttctctaaaagtaaaccatctcaaaattcaaattcatctgaaagaaaataaacttttcattattattcaccagtatttttcttctcatgcctctaattattccctttcagactggggatattggcctttacattagaaaaattttaaaaaatctatgaatgccattctcctcttcctcaaagataaggtacaacttcctctcaaaattaagctaaaaatgttgtattctagagaacacgaaacaacaattggcaactctaaagctgctgtttttcctctacaccaacaaaactacttgaatcctctcccgctaaagtactgttaacacgttggtatgatttactagctagttattatttagttattactaaaattaatggttatgtgaataaaatcagcagagaatttytaaaccaattgacatgtgaagtttattact

SEQ ID NO: 244723 - DNA, 548 bp, Homo sapiens
agtttctactgctgtgagttggggtgaacccaccaacagactgctaattctctgctgagggctctgtcccaagtaggagccctccattaccttgtgggctcaaagcaacttagcctctaaagcagctcccctctgtcttccaagacctggaggaccctcttccctggactcatgaaagggatacgtgcagctcttctgggcrgggatttatgagaatctcgggtctttgcaagagcctcttggaagattcgacctcagcaggccagaaagtctttcccttgggaaaccagggagcactcagggagatgagtgtcaccagctcctccaccctgatgggtagtcaggcctggagcacatggaaatgccctgggaacctcgacttcaagtgaatatgcgtacccccctcccccctccccccccacacacagagcaggtagttgtaacgcctccacctcatcctgctcttggctcttcatgtatcacaacctaatctctgtgtaccacaggcctcacgcaggagcccatagcatgctggcacccgccctccc

SEQ ID NO: 244724 - DNA, 418 bp, Homo sapiens
taatgctcactatggtgctataacatagatgctattattatcaccagctgagatgaagaaattgaggcttcaaaatgttgatactgggctgggcacggtggctcacgcctgtaatcccagcactttgggaggccaaggtgggcggatcacctgaggttcggagttcgagaccagcctgaccaacatggagaaaccccatctctactaaaaatacaaaattagccgggcattaattccagctactcgggaggctgaggcaggagaatcacttgaacccgggaggcagaggttgcggtgagtcgagatcgagccattgcactccagcctgggtkccaagagcaaaactccgtctcaaaaataaaaaataaaaaaaagttgacactggcccaagtttacacagctagtgagtggtggaaca

SEQ ID NO: 244725 - DNA, 429 bp, Homo sapiens
ctcagtttgtagagtttgaagttacaaatccaaataaagaaagttgtgtaattacaaattctcaggggaaattttttacccmctccattattataaactgtgataatcttattcttcctcctactggtcaggttccatcctgaggaaacgatagaaagccaaagcctaaagagttctgacttgtgtgttgagagatcaaagagaaattgttctgagcttgatcatcgtgacccctcctccccacaagagttggaaccatggttatgctcaggggatattttcacttgagctcacacccaaagctggtgaggctgcaggtctcctccagaaccactccctatttttctgactgtcccgttggccaaaccctctgtgctcttttctctggttcttttcttgattttgatcatgaccatctctatggccaat

SEQ ID NO: 244726 - DNA, 540 bp, Homo sapiens
ggactgcaaggcttacagcaaaagaaaaaaaaagctgctgtgatcttaataaagtttacattaaatctgtaaataaatttggggagtcttgccatcctaataatatcaagcttttcaaaccgtgaagatgtactgtctttccacttacttaattcttttctatattattgtaaatgaatttttcttaatggaatttttagcctgttcattgctagtgagtataaatacaattgattttcatgtactgatcttgtaatcttgtatctttctcccttgctgaccacatttattagctctgacagtttgtgtttgtgtatgtgtgtgtgaattccttgggattttctatatacaagatcatgttatccgtgacaagagatagttttacttgcycctttccaatctagatgactgtatgtatttattttttatccctgaattgttctagctagaacttccagtatttttttttttttttttttttttttttttagacaggctcttgctgtcacgcaggctggagagcagttggtgtgaacacca

SEQ ID NO: 244727 - DNA, 594 bp, Homo sapiens
agttttacttgctcctttccaatctagatgactgtatgtatttattttttatccctgaattgttctagctagaacttccagtatttttttttttttttttttttttttttttagacaggctcttgctgtcacgcaggctggagagcagttggtgtgaacaccactgactacagccttggtctcctgggctaagtgagcctcttaccccaacctgctgagtagctgagcccacaggcatgtgccaccatgcttggctatttttttttaattttttgtaaagacaaggtcttgccatgttgcctaagatggtctcaaactcctagactcacatgattctcctgtttcggcctcccaaagtgttaagattacaggctcaagccactgtgactggcccactaataatcttgaatagaagtggtgagagcagacattctagtaaagtttrtaactaggatttaggaagaaagctttcagttactcaccattatgtatgttgctatctttgggtttttaatagatgcccttaaacagagaaagtctcttctatttcaaatttgttgggtgttttcatcatgaaaggatgttggattttgt

SEQ ID NO: 244728 - DNA, 594 bp, Homo sapiens
agttttacttgctcctttccaatctagatgactgtatgtatttattttttatccctgaattgttctagctagaacttccagtatttttttttttttttttttttttttttttagacaggctcttgctgtcacgcaggctggagagcagttggtgtgaacaccactgactacagccttggtctcctgggctaagtgagcctcttaccccaacctgctgagtagctgagcccacaggcatgtgccaccatgcttggctatttttttttaattttttgtaaagacaaggtcttgccatgttgcctaagatggtctcaaactcctagactcacatgattctcctgtttcggcctcccaaagtgttaagattacaggctcaagccactgtgactggcccactaataatcttgaatagaagtggtgagagcagacattctagtaaagtttataactagratttaggaagaaagctttcagttactcaccattatgtatgttgctatctttgggtttttaatagatgcccttaaacagagaaagtctcttctatttcaaatttgttgggtgttttcatcatgaaaggatgttggattttgt

SEQ ID NO: 244729 - DNA, 609 bp, Homo sapiens
gggatccacttctcagaacagggagcaaggtcctgttgactttctctatcacttgttgattattccaagcaaggtcccagtggggaaggcagatgggagaaaaataakaagaagaagctttgtgcattgtgggcccctgcagttggtaaagtggactgcgtcttccataaagtcctcaggaggacctcttgaaggcttcttgctggaaccctccctcttgcagtttccttgacccaaagggaaacatatttaatttgagtggccaaggagactcctttctcagcctttggtcacctgatgttgtgcacttcctaaaatcttttccctgtaggggtctccttacccctttacctggccagattgggaggaattctagacagccccaccacagcttcccaccacagcctcctcaccatgggaaagctcatctgttgccccatgcaaactctaggagaccagccaaatctcaatacataattttttaagcctatttttttctcaacatttctggagcaggctgagtctacagcccatagttggttttccttttccttcttgtgagtcaggccccagtctcccgtgtctcccaatgccagagaacagcatgtc

SEQ ID NO: 244730 - DNA, 547 bp, Homo sapiens
tggtataatgcccatgtgtagtcatttccatattgartgtgactaacctgtgacttcctaacaaagcagaagatttgttagcaaagtactgtggtggcaatcccaaggttataccttaaaaagacctaacaccacacacttttctgtgcttagaagccttatgccacataagatattaagacttctgactactcttctgaaaagagagtccacgggcagagactctgcaggatgagatgccatggggagacagaagcacacggaatagcacctataagccagacatatgagtgatgaagccaaaacattaagcaaaacctgctattttatatttcagtgcctgggctgtagcctgattagccagagtaattaaatcatcatggcataggtacaagattaggtaaataaattaagtaacataacagagaatcctgacacaaactcaagtacgtaagggaatctaatatatatctatacatatatatgtatatatttacatatgtaaatatacacatatttaaatgagaatcaaattggtggagacaac

SEQ ID NO: 244731 - DNA, 547 bp, Homo sapiens
tggtataatgcccatgtgtagtcatttccatattgaatgtgactaacctgtgacttcctaacaaagcagaagatttgttagcaaagtactgtggtggcaatcccaaggttataccttaaaaagacctaacaccacmcacttttctgtgcttagaagccttatgccacataagatattaagacttctgactactcttctgaaaagagagtccacgggcagagactctgcaggatgagatgccatggggagacagaagcacacggaatagcacctataagccagacatatgagtgatgaagccaaaacattaagcaaaacctgctattttatatttcagtgcctgggctgtagcctgattagccagagtaattaaatcatcatggcataggtacaagattaggtaaataaattaagtaacataacagagaatcctgacacaaactcaagtacgtaagggaatctaatatatatctatacatatatatgtatatatttacatatgtaaatatacacatatttaaatgagaatcaaattggtggagacaac

SEQ ID NO: 244732 - DNA, 547 bp, Homo sapiens
tggtataatgcccatgtgtagtcatttccatattgaatgtgactaacctgtgacttcctaacaaagcagaagatttgttagcaaagtactgtggtggcaatcccaaggttataccttaaaaagacctaacaccacacacttttctgtgcttagaagccttatgccacataagatattaagacttctgactactcttctgaaaagagagtccacgggcagagactctgcaggatgagatgccatggggagacagaagcacacggaatagcacctataagccagacatatgagtgatgaagccaaaacattaagcaaaacctgctattttatatttcagtgcctgggctgtagcctgattagccagagtaattaaatcatcatggcataggtacaagattaggtaaataaattaagtaacrtaacagagaatcctgacacaaactcaagtacgtaagggaatctaatatatatctatacatatatatgtatatatttacatatgtaaatatacacatatttaaatgagaatcaaattggtggagacaac

SEQ ID NO: 244733 - DNA, 577 bp, Homo sapiens
ggggatgctattataagcaattaaaacctcagaaaccataaactaaatgatataatgaaagtgactgcagaaaaaataaaaacaaacactttggcatgggaaaatcacactacaaacaaaattcaatgccagactgggggaaatatttgcaacctgtttgacagataaatgggcacaatccttactatacaacagttttacaatagaacaaaatatacaattttattcttataaatcattgtgcaaatgacgaatattccatagaaatatgagaaaaggctacgaataagcatttcacagatgcagaatacaaatatctagtaaaattattaataacataaaatgcaaactataatgagactgtatttgtttatttgtttataccaatattaaatgttttgaaaagtaataacakttgctttaggaaatggtcactctcaaattgttctctggggttcaaattttaatatctctttctaaaaatactttttattgaagaataacgcacataatgaatagtatttaaaactgaaatgtccttcttcataaagtatcatcaagcaagcatttgtgtaac

SEQ ID NO: 244734 - DNA, 577 bp, Homo sapiens
ggggatgctattataagcaattaaaacctcagaaaccataaactaaatgatataatgaaagtgactgcagaaaaaataaaaacaaacactttggcatgggaaaatcacactacaaacaaaattcaatgccagactgggggaaatatttgcaacctgtttgacagataaatgggcacaatccttactatacaacagttttacaatagaacaaaatatacaattttattcttataaatcattgtgcaaatgacgaatattccatagaaatatgagaaaaggctacgaataagcatttcacagatgcagaatacaaatatctagtaaaattattaataacataaaatgcaaactataatgagactgtatttgtttatttgtttataccaatattaaatgttttgaaaagtaataacagttgctttaggaaatggtcactctcaaattgttctctggggttcaaattttaatatctctttctaaaaatactttttattgaagaataacrcacataatgaatagtatttaaaactgaaatgtccttcttcataaagtatcatcaagcaagcatttgtgtaac

SEQ ID NO: 244735 - DNA, 503 bp, Homo sapiens
taaattatatatggaaagtagcaaaggaatatttttaaagctgtcaccaatgctccactcctgacttatagttgtgtgtttttttgacgtctgtcaaaccagtaggacagatcctgggtaggggcatgaggaatgggggaagtttgtccacagactcatcagtcttcacaaggtggttgaacattattccaagggcaatgggaactgcctgaagatttaagtaagatggtaacccactacatcttatctggaatatgatcctgcatacaagtaggcaacctggttattatctggacagtcattcaaacacagtgtgtgccagaaatttatttgtggcttaaatcaagatatcaggcacattcctatttataaaagtttgacttaatccccccaaaaattttttttcataaccctcktacttgagctacttccagaattaaatttgatcaagtgaaaccacctcctttcaagagagaacttccaaagtatctgctagtcaccca

SEQ ID NO: 244736 - DNA, 591 bp, Homo sapiens
tgccaaataccattagaaaaggcatcttccagaattaatgtgtaataatgaaaattcttgctcattatccaaagttcaaaaaagaaccatgaaatattatctagtttcattccctggctctatgcagcttgaatgtaccacagtcttaccaatgattaccccaaatcttcagacaagtctattgaggcacaaaaaccatccttttgcctcccgagccattcctacctactcctacagcctgtttgagtctaggttgaaacagctcaaaatttatcagtgtaggagataacatcaaatggctaatgagataaagttctaacaagccagcatgtagatttggggaatktatttctattttgctgtgagattactcaacctgcaaagaaagaaacagtgtacatcacatatccttcaaaataatttaacactcttatttttctacctattttttaaagtatggggttgtatataactaaaccattaaatatatggccaatagtgcattatttcacgaacccattgacaacatgttattgaggtaagtgaggtaagaaaactgaagtccaaagtggtaaagaaaatggccaaagg

SEQ ID NO: 244737 - DNA, 601 bp, Homo sapiens
cccttctaccttattcttagttttgatccatcagattttgaatgttacaaaaatattcctcaatatttgatgaaatagagtcaatctcttggtttccttattgtttctgaactggtagctggagtcctcaaggctgaattaactaggacatgaaggctgaacaggtttataacttcagccttcatttgacaactttgttgtctaatttctccagtttaattatttaargctcaaaacacttcagtgagatctgtgtgttaaccccaactctgagaataaattattaaaagaaatggatgctaaagaaatgattgacacgtgtgctaagtcagcacaaactgactttaagtcatcttctaccccttaccttgctgaaatgtggtgtctgggtggggaaaaggacagcatagttggatcctgcttcctagaaacagtagagactcaggtttatctgtgactcctcagccctgtgtgaccaccattttgcttggtccaccagcacttctttctgtaggtgaagcccggtccagtctagaccccataagcattctcatcattgtcttaactaccatcctaaaatcccttgtcctccagtctccag

SEQ ID NO: 244738 - DNA, 617 bp, Homo sapiens
tgccagcaaattacttctaaatgttgttagccaaaaaaaaaaataaagtgtatgtttaaagtttaagagcaacttagaaaaaaatgaaaatagkatctaaaactcctgaactatcaaatgaaaaaaaatgagagaaaacttgatcagttaaaataatttcagagaagacaaaaaaagaaacatgagaacatagtaaaaagaaaacagaaaacattagcaaacataaatcattaattttcattataaacactaaattccctatttaaatacagatattatcaggtttgattttaaattgtattctcaaaagagaaaagcatatataaagattataataagccaagttgaaaatacattttctatgccaggaaaatgtaaacaaagaaatctggaaagtaatattaatataggacaaaatagaatgcaagatataatcattaaattatgcaaagaatatatatacacacatacaattaatccattatcacaatgtatgtaagcaacgcattatagaaatgcaaggatagacaaatccataaccatcatgagagattttaattcatcttttcaaagatagaaatttgattatacaatatataattaagaatagtttgaat

SEQ ID NO: 244739 - DNA, 617 bp, Homo sapiens
tgccagcaaattacttctaaatgttgttagccaaaaaaaaaaataaagtgtatgtttaaagtttaagagcaacttagaaaaaaatgaaaatagtatctaaaactcctgaactatcaaatgaaaaaaaatgagagaaaacttgatcagttaaaataatttcagagaagacaaaaaaagaaacatgagaacatagtaaaaagaaaacagaaaacattagcaaacataaatcattaattttcattataaayactaaattccctatttaaatacagatattatcaggtttgattttaaattgtattctcaaaagagaaaagcatatataaagattataataagccaagttgaaaatacattttctatgccaggaaaatgtaaacaaagaaatctggaaagtaatattaatataggacaaaatagaatgcaagatataatcattaaattatgcaaagaatatatatacacacatacaattaatccattatcacaatgtatgtaagcaacgcattatagaaatgcaaggatagacaaatccataaccatcatgagagattttaattcatcttttcaaagatagaaatttgattatacaatatataattaagaatagtttgaat

SEQ ID NO: 244740 - DNA, 579 bp, Homo sapiens
actttgggtatatatctaaaatgaatgaaatcagtatctcaaggagatatctgcacttccatattcattgcagcattattcacaatagcagagatatggaaataacctaagtatctgtcagcaggaaatgaattttaaaagtgagatatattcaattctttaatagattattattcagccttaaaaagaaaagaaattctaacatatggtacaacatggatgaacttggagaacattaygctaagtgaagtaaggcagacatagaaaaacaaatattgcattatcccacttatatgtggaatctaaaaaagttgaacttatagaagcagagactgaaatcttgcttgccaggagctggtgggtgggggaaatggggtaatgttggtcaaagcatacaaagtttcagttatataataaataagttctggagatttaatgtggcagcatggtgactgttttgtatactaaaaatttgttaagagagtagatcttaagtgttctcacctgacacacagacacaaagataactatgtgaggtgatgaatatgttaattatctttattgtggtaattatttcca

SEQ ID NO: 244741 - DNA, 604 bp, Homo sapiens
gggccaacatagagctgtgccttcagagggtgcaagcctcaagccctggcaacttccacrtggttttgagcttgctagtgcaagaagtcaagaataggggtttgggaacctccatctagatttcagaggatgtatggaaatgcctggttgcctaggcagtaatttgctgcaggggtgaagctcttatgtagaaattctgctagaatgcagaagagaaatgtggggtcagagccccgacacagagtccatactgggtcactgcctagtgtagctgtgagaagagggcctctgtcttccagaccccaaaatgctagatccactgatagcttacactgtgtgcttgaaaaagccacagacactcacttgcccatgaaagcagccaacagaggagctatatcctgcaaagctacagaggcagagctgcccaggctgtgggaacctacctcttgcatcagcatgaccttaatgtgagacatggagtcataggagatcattttggaggtttaagatttgattgcccctctggattttggatttgcagggggcctgtagcccctttgttttggccaatttctcccatttggaatgcctgtatttacccaat

SEQ ID NO: 244742 - DNA, 566 bp, Homo sapiens
tctgaactcgcactatgaaacgtgataaagaattatgcatgactgtatatgtaccacctacacacattcacataacaaaactagtgcagctcgtttctagaaactagcatatgttgttacagtgcatctgttgaattcctcattcatttagaattattaagatctgaaaccaaaatgactaaaggacgatgttttcattttgttttctcactgaggcatgctccatagtgttcatataacatttaatctacaataagatagctccaataagttaaaactttccaaaattcacacaagtatcaatttatacctaccattgtgtgaaaagcataattaaattattaactttatcagttgtagatttgtcactctatctctgttttaaatatattaccaattaactgatgctatattatactaaaaaacaatcatgactcttcaaaaaggaaaaggatatttartacagccacctgttaggagaagaatgtctttgtaggctacagttctcatcagtgaatgccatctttggacaacttgcttctactgtgagctgcaacaatgggatg

SEQ ID NO: 244743 - DNA, 552 bp, Homo sapiens
ttttttccaaaaaaaaaagatattagtttttttcttggataaagttctgcgagatcagaaaatgctagcatagggcaggcaaaactgtatgtctattaccttagggtagttttctgggcctgagaattaaatttatataagatagattaacaggagaacaccatacaaatttatacaagttttatgtgatgtgggagcccttgaaagaaaatgaagacccaaagatgtagcaaaacctaaatgtttacatagaaggtagaggcaattgtgggaaaataggctatgtgaaaaggayaaagacagatgagaattcttctaacagggtctgcaattgtgaatgggagttcactcatgatttgactctctgtttgtgtgttattggtgtataagaatgcttgtgatttttgtacattgattttgtatcctgagactttgctgaagttgcttatcagcttaaggagattttgggctgagacaatggggttttctagatatacaatcatgtcatctgcaaacagggacaatttgacttcctcttttcctaattgaata

SEQ ID NO: 244744 - DNA, 552 bp, Homo sapiens
ttttttccaaaaaaaaaagatattagtttttttcttggataaagttctgcgagatcagaaaatgctagcatagggcaggcaaaactgtatgtctattaccttagggtagttttctgggcctgagaattaaatttatataagatagattaacaggagaacaccatacaaatttatacaagttttatgtgatgtgggagcccttgaaagaaaatgaagacccaaagatgtagcaaaacctaaatgtttacatagaaggtagaggcaattgtgggaaaataggctatgtgaaaaggacaaagacagatgagaattcttctaacagggtctgcaattgtgaatgggagttcactcatgatttgrctctctgtttgtgtgttattggtgtataagaatgcttgtgatttttgtacattgattttgtatcctgagactttgctgaagttgcttatcagcttaaggagattttgggctgagacaatggggttttctagatatacaatcatgtcatctgcaaacagggacaatttgacttcctcttttcctaattgaata

SEQ ID NO: 244745 - DNA, 487 bp, Homo sapiens
ccttctcctaaaaatgcacatcctatgcctgaaaagacaggtaaaagagatgcttttaattacaaaacyttccctgtcgtggttgcttctctctatccttctaaactccctttcaatttcttctcttctgtaacatatttgtgcccaaaatcttctgctttctgaaatattttatctttttcttccacactatctcttattttcaaattttaatcattaaattatattatgtcttataaaactaatcccacatataaacccctatgataatttcagtttgtccctagtatgaagttctttaaagatgtgtagttttctaactttcatgctctccaattcattataaacttcattttccactctgaaaaggagatgtctgatctcatctatttccatcctatttgaaaaccagatttagttttaaaccagaggaagggaatctcaagtctttacctcccacagtctggtgtgattctctctcttttgg

SEQ ID NO: 244746 - DNA, 577 bp, Homo sapiens
taggactttcttcacttatttaaatactcccttttttatgcaactgagttttcatcaacaagtacaagcttgtgaaggagtactttaaaatgcaatttctctctatttttgtgggggctaatattttatttctcatattgacaatttattatgctgtttttagaaagttcattcatcaagtatttcttgagctttttctatgagacaggcactgttttaggcaagtaattatgcactgaacaatgcaaaaagtttccctgcactcatggactttaattttacatttatgaaaagctacaaatattagaataagtaaaatactgcctggaggctaaagcatattttgatcacttattccctaattcttttcgaagagaactcacctgtyggttagctgaaccactgccagtgatatccaactatacattcaatcccaccatacctcattatcacacctattcactcacaagcttaaactcttaacttttctccacatatcagtgactatttcctacagcttttcttttactttccatgtttgcagtgacaatatacataaacagtgtatgaaaactca

SEQ ID NO: 244747 - DNA, 577 bp, Homo sapiens
taggactttcttcacttatttaaatactcccttttttatgcaactgagttttcatcaacaagtacaagcttgtgaaggagtactttaaaatgcaatttctctctatttttgtgggggctaatattttatttctcatattgacaatttattatgctgtttttagaaagttcattcatcaagtatttcttgagctttttctatgagacaggcactgttttaggcaagtaattatgcactgaacaatgcaaaaagtttccctgcactcatggactttaattttacatttatgaaaagctacaaatattagaataagtaaaatactgcctggaggctaaagcatattttgatcacttattccctaattcttttcgaagagaactcacctgtcggttagctgaaccactgccagtgatatccaactatacattcaatcccaccatacctcattatcacacytattcactcacaagcttaaactcttaacttttctccacatatcagtgactatttcctacagcttttcttttactttccatgtttgcagtgacaatatacataaacagtgtatgaaaactca

SEQ ID NO: 244748 - DNA, 548 bp, Homo sapiens
cagtgaagttgcagaatacaaaatcaacatacaaaaatcagtagtgtctctatacactaataaggacttaacagagaaagaagttaagaaaacaataccactaacaatagaatccaaaaaataaaatacttaggaataaattttaccaaacatctgtacactaaaaactataaaacattgaaaaaagaagttgaataagacacatataaatagaaagctatctcatgttaatagattagaaaaagtaatattgttaagatgtcctcactacttaaagcaatttatagatctaatgcatttattgcaatctcttcaaaatcccaaaggtatttttgacagaaataaaaaaaaaawtctaaaatatgcatgaaaccacaaaagactgtgaatagctaaagcaatcttgagcaagatgaacaacactggaagcatcacactaccttatttcaaaatctactacaaagctatagtgatcaaagcaacatgatactgtcataaaaacacatagataaacctatggaatggaataaagagcacagaaataagtc

SEQ ID NO: 244749 - DNA, 535 bp, Homo sapiens
ctaataggttcatgtagtttgggattttcctctttaagaaaattaattatcactcacactccaagacaaacaccatttcagtagcaatatgaatttcagtagtaataggaatctccaaatatgacaaagtaattcagacattaattgcttttgttttggaattgctcttataagatgaaatatcactttcatgatgagagtcctagagtgcttggtttatatattgtatcttagttttaacaggataaaacacttgatcctaagcagtaaacatgattcttcagcttcaacttcatttctttataaataactatttatgaattggtgttgagcttagyaagtcaccaaacaccttctgctcagcagcataaaggacatttccatgaaacctcccagggataatcttatttactctataatgtttcccgggttcaattcctctcccaaaatcctttgttcttaagcccctatgatctgggtgatctaaatatgggtaagaagtccagggatagcactatgaatgaagtgaaaatag

SEQ ID NO: 244750 - DNA, 621 bp, Homo sapiens
tgacaaagtaattcagacattaattgcttttgttttggaattgctcttataagatgaaatatcactttcatgatgagagtcctagagtgcttggtttatatattgtatcttagttttaacaggataaaacacttgatcctaagcagtaaacatgattcttcagcttcaacttcatttctttataaataactatttatgaattggtgttgagcttagtaagtcaccaaacaccttctgctcagcagcataaaggacatttccatgaaacctcccagggataatcttatttactctataatgtttcccgggttcaattcctctcccaaaatyctttgttcttaagcccctatgatctgggtgatctaaatatgggtaagaagtccagggatagcactatgaatgaagtgaaaatagtaaaacatagttaaaaatgtacagatgctctctgacttataatagggttatgtcctgataaatccatcataagtcaaaaatgcatttaatattcctaatgtacctcacatcatagtttggcctagcctaccttaaatgtgctcagaacactttcattagcttatataagatcacctaatacaaagcctattttataataaaatattg

SEQ ID NO: 244751 - DNA, 621 bp, Homo sapiens
tgacaaagtaattcagacattaattgcttttgttttggaattgctcttataagatgaaatatcactttcatgatgagagtcctagagtgcttggtttatatattgtatcttagttttaacaggataaaacacttgatcctaagcagtaaacatgattcttcagcttcaacttcatttctttataaataactatttatgaattggtgttgagcttagtaagtcaccaaacaccttctgctcagcagcataaaggacatttccatgaaacctcccagggataatcttatttactctataatgtttcccgggttcaattcctctcccaaaatcctttgttcttaagcccctatgatctgggtgatctaaatatgggtaagaagtccagggatagcactatgaatgaagtgaaaatagtaaaacatagttaaaaatgtacagatgctctctgacttataatagggttaygtcctgataaatccatcataagtcaaaaatgcatttaatattcctaatgtacctcacatcatagtttggcctagcctaccttaaatgtgctcagaacactttcattagcttatataagatcacctaatacaaagcctattttataataaaatattg

SEQ ID NO: 244752 - DNA, 566 bp, Homo sapiens
actgttaattaacatgttgtactatgcaatttctttaccattattactcttagtatttttaagaaaagtctttccattgttattataaatgcttctattgatatttattttaataactgttattacagtccgtcatgtacatacactatacttaaacctaatgtttggtatttaaatcgtttcaagattttatcactgtcaacaaagtatgatgaatatttttatgctgaaaacttctgtaaaaatagaattccaagastattattgcaccaaaaggcatggacttaaaattcttgatacatgatttcaaaatattttctttaaggtttgaatcagtctatattccctccagcagcgtataaaagtgccaatttctctgatccttagccagtttgggtaataaaaattgtaaaacttttttttctttttttttgagacagagtctccctctgtcgccaggctgaagtgcagtggcgcaatctcggctcactgcaacctccgcctcccggggtcaagctattctcctgcctcagcctcccgagtagctgggactacaggcacccgcc

SEQ ID NO: 244753 - DNA, 566 bp, Homo sapiens
actgttaattaacatgttgtactatgcaatttctttaccattattactcttagtatttttaagaaaagtctttccattgttattataaatgcttctattgatatttattttaataactgttattacagtccgtcatgtacatacactatacttaaacctaatgtttggtatttaaatcgtttcaagattttatcactgtcaacaaagtatgatgaatatttttatgctgaaaacttctgtaaaaatagaattccaagactattattgcaccaaaaggcatggacttaamattcttgatacatgatttcaaaatattttctttaaggtttgaatcagtctatattccctccagcagcgtataaaagtgccaatttctctgatccttagccagtttgggtaataaaaattgtaaaacttttttttctttttttttgagacagagtctccctctgtcgccaggctgaagtgcagtggcgcaatctcggctcactgcaacctccgcctcccggggtcaagctattctcctgcctcagcctcccgagtagctgggactacaggcacccgcc

SEQ ID NO: 244754 - DNA, 543 bp, Homo sapiens
ttctgtaaaaatagaattccaagactattattgcaccaaaaggcatggacttaaaattcttgatacatgatttcaaaatattttctttaaggtttgaatcagtctatattccctccagcagcgtataaaagtgccaatttctctgatccttagccagtttgggtaataaaaattgtaaaacttttttttctttttttttgagacagagtctccctctgtcgccaggctgaagtgcagtggcgcaatctcggctcactgcaacctccgcctcccggggtcaagctattctcctgcctcagcctcccragtagctgggactacaggcacccgccaccaccatgcccagctaatttttgttatttttagtagagatggagtttccccatgttggacaggatggtctcgatctcttgacctcgtgatccaccctcctcggcctcccaaagtgctgggataacaggcgtgaacaaccatgcccggcctgtaaaactttttcctaatgtaacagaaacataatagtattacattttatcatatttcttt

SEQ ID NO: 244755 - DNA, 543 bp, Homo sapiens
ttctgtaaaaatagaattccaagactattattgcaccaaaaggcatggacttaaaattcttgatacatgatttcaaaatattttctttaaggtttgaatcagtctatattccctccagcagcgtataaaagtgccaatttctctgatccttagccagtttgggtaataaaaattgtaaaacttttttttctttttttttgagacagagtctccctctgtcgccaggctgaagtgcagtggcgcaatctcggctcactgcaacctccgcctcccggggtcaagctattctcctgcctcagcctcccgagtagctgggactacaggcacccgccaccaccatgcccagctaatttttgttatttttagtagagatggagtttccccatgttggacaggatggtctcgatctcttgacctcgtgatccaccctcctcggcctcccaaagtgctgggataacaggygtgaacaaccatgcccggcctgtaaaactttttcctaatgtaacagaaacataatagtattacattttatcatatttcttt

SEQ ID NO: 244756 - DNA, 641 bp, Homo sapiens
gctgctgatagtcatggcatatgataggtacactgcgatctgcaaacctctccactatccaactattatgaaycccaaaatgtgcatgtttttggtagcagcagcttgggtcattggggtgattcatgctatgtctcagtttgtttttgtcataaatttacccttctgtggccctaataatgtggggagcttttattgtgattttcctcgggttattaaacttgcatgcatggacacttatgggctagaatttgtggtcactgccaacagtggattcatatcgatgggcaccttctttttcttaattgtatcatacatttttattctggtcactgtccaacgacattcctcaaatgatttatccaaagcattcttcacttcgtaggctcacatcaccgtagtggttttgttttttgctccatgcatgtttctctacgtgtggcctttccctactaagtcattggataaattttttgccatcatgaactttgttgtcacccctgtcttaaatcctgccatctatactttaaggaacaaagatatgaagtttgcaatgagaaggctgaatcaacatattttaaattctatggagatgacataacacatttggttgatgagagcacaggataaatgccatggac

SEQ ID NO: 244757 - DNA, 641 bp, Homo sapiens
gctgctgatagtcatggcatatgataggtacactgcgatctgcaaacctctccactatccaactattatgaaccccaaaatgtgcatgtttttggtagcagcagcttgggtcattggggtgattcatgctatgtctcagtttgtttttgtcataaatttacccttctgtggccctaataatgtggggagcttttattgtgattttcctcgggttattaaacttgcatgcatggacacttatgggctagaatttgtggtcactgccaacagtggattcatatcgatgggcaccttctttttcttaattgtatcatacatttttattctggtcactgtccaacgacattcctcaaatgatttatccaaagcattcttcacttcgtaggctcacatcaccgtagtggttttgttttttgctccatgcatgtttctctacgtgtggcctttccctactaagtcattggataaattttttgccatcatgaactttgttgtcacccctgtcktaaatcctgccatctatactttaaggaacaaagatatgaagtttgcaatgagaaggctgaatcaacatattttaaattctatggagatgacataacacatttggttgatgagagcacaggataaatgccatggac

SEQ ID NO: 244758 - DNA, 626 bp, Homo sapiens
attctaaattgcacactttgattcaaaagaaacagtccaaccaaccagtcaggacagaaattatctcacaataaaaatcctatcatttgtactgtcaatgattagtatgattatatttattaccgtgctaagcagaagagaactgaagtgaatgttcatgatttattccactattagacttctctttattcttaaaaatatttaagatcactaaatttttataggactttaaaaacagtaatgtgctgcttgagtgtgtaggactaagaaatgggattcagagtagtaaagagaaaagtagaatttccaagcactatgaattactgttctttaaaaaacagcaaaaatcaaataacagtattcctccaaaaaagatggcaagtgtaaactctataccttcatgtctcccgtggaatgttagtgatcaatttccacttctcycttttacatcttacttgcccattaactcttatacctaatccaaagattgttaatatggctatgcctcactttcaggacaccttttatttgttacttctcttcactgcaaaacttcttgaaacagtacttattttctctcctccatacacaattgaaatggctctcaactcatgcccagaagtcag

SEQ ID NO: 244759 - DNA, 526 bp, Homo sapiens
ttggtgggagtgagatggtgatcctcatagccatgggctttgacagatatatagcaatatgcaaacccctacactacactacaattatgtgtggcaacgcatgtgtcggcattatggctgtcgcatggggaattggctttctccattcggtgagccagttggcctttgccgtgcacttacccttctgtggtcccaatgaggtcgatagtttttattgtgaccttcctagggtaatcaaacttgcctgtacagatacctacaggctagatattatggtcattgctaacagtggtgtgctcactgtgtgttcttttgttcttctaatcatctcatacactatcatcctaatgaccatccagcatygccctttagataagtcgtccaaagctctgtccactttgactgctcacattacagtagttcttttgttctttggaccatgtgtctttatttatgcctggccattccccatcaagtcattagataaattccttgctgtattttattctgtgatcacccctctctt

SEQ ID NO: 244760 - DNA, 485 bp, Homo sapiens
cttgaacccaattatatacacactgaggaacaaagacatgaagacggcaataagacggctgagaaaatgggatgcacattctagtgtaaagttttagatcttatataactgtgagattaatctcagataatgacacaaaatatagtgaagttggtaagttatttagtaaagctcatgaaaattgtgccctccattcccatataatttagtaattgtctaggaacttccacatacattgcctcaatttatctttcaacaacttgtgtgttatattttggaatacagatacaaagttattatgctttcaaaatattcttttgctaattcttagaaygaagaaaggcataaatatattagtatttgtgtacacctgttccttcctgtgtgatcctaagtttagtagaagaaaggagagaaaatatagcctagcttataaatttaaaaaaaaatttatttggtccattttgtgaaaaacataaaaaaag

SEQ ID NO: 244761 - DNA, 550 bp, Homo sapiens
actaatcaatgattccttaaaktattcacaataaaaaaaaagattagaatagttttttttaaaaaaagcccagaaactaatctaagttttgtctggtaataaaggtatattttcaaaagagaggtaaatagatccacatactgtggagggaataaaatactttttgaaaaacaaacaacaagttggatttttagacacatagaaattgaatatgtacatttataaatatttttggattgaactatttcaaaattataccataaaataacttgtaaaaatgtaggcaaaatgtatataattatggcatgaggtatgcaactttaagcaaggaagcaaaagcagaaaccatgaaaaaagtctaaattttaccatattgaatttaaattttcaaaaacaaaaataaagacaaagtgggaaaaatatgtatgcttcatgtgtgacaagccactgatacctattaaatatgaagaatattataaatcatattaataaccacaacattcaagctgtcagtttgaatagacaatgtaaatgacaaaactacatactc

SEQ ID NO: 244762 - DNA, 538 bp, Homo sapiens
aatggaggaaatcaatgacatatcagatctagaaactaatcaattagcaatcaggaaggagttgcggtaggaagtctgtgctgttgaatgtacactaatcaatgattccttaaagtattcacaataaaaaaaaagattagaatagttttttttaaaaaaagcccagaaactaatctaagttttgtctggtaataaaggyatattttcaaaagagaggtaaatagatccacatactgtggagggaataaaatactttttgaaaaacaaacaacaagttggatttttagacacatagaaattgaatatgtacatttataaatatttttggattgaactatttcaaaattataccataaaataacttgtaaaaatgtaggcaaaatgtatataattatggcatgaggtatgcaactttaagcaaggaagcaaaagcagaaaccatgaaaaaagtctaaattttaccatattgaatttaaattttcaaaaacaaaaataaagacaaagtgggaaaaatatgtatgcttcatgtgtgacaagc

SEQ ID NO: 244763 - DNA, 563 bp, Homo sapiens
gttaattaacatgttgtactatgcaatttctttaccattattactcttagtatttttaagaaaagtctttccattgttattataaatgcttctattgatatttattttaataactgttattacagtccgtcatgtacatacactatacttaaacctaatgtttggtatttaaatcgtttcaagattttatcactgtcaacaaagtatgatgaatatttttatgctgaaaacttctgtaaaaatagaattccaagactattattgcaccaaaaggcatggacttaaaattcttgatacatgatttcaaaatattttctttaaggtttgaatcagtctatattccctccagcagcgtataaaagtgccartttctctgatccttagccagtttgggtaataaaaattgtaaaacttttttttctttttttttgagacagagtctccctctgtcgccaggctgaagtgcagtggcgcaatctcggctcactgcaacctccgcctcccggggtcaagctattctcctgcctcagcctcccgagtagctgggactacaggcacccgcc

SEQ ID NO: 244764 - DNA, 570 bp, Homo sapiens
taaacattagatactattaaaatcctatatattaacaaagccaaaagtttcaaactttactttttcccaacattcttgtgaaatatgacacatcccaatcttaacagatgctcatttgggatactgtacttgtgagtggaagtgtgtatatttgtgtgcaagtgtgtactcatatacttccaccttaccaccctagaaaggcatgatgaaaatttaagatagaaggaaaatataaattgaaaaaaaaaaaaaaccttagcaaatgattctgacaaatatcttctctttccagggagaatcactgagccagaataaaattgaacactaaatattctaagaaaaaaggaatctagtttgtcaaaatgtgacttgaattaatagataaggagagtcagatgataaragggtcaaaattatgtttatcttaggaaaagtagaatagaaaatttataagcagattaaaaacacataataaaagtagtaaataataatgacagtatctcaaatcagtgcaggggggaaaggcctactaatgtgatggtgggataattggatagcaatatgggaaaa

SEQ ID NO: 244765 - DNA, 563 bp, Homo sapiens
atgggcaaaacagttaaacttacagttcatacataaggagaatcagtcttttttttttttacagttgtaggcaraaaacttttatttttcatttatttgtaaaatttacccctaatttattcataattcatttaactgctaagggcattaatgtgtacaacgccatgggagaaaccagtatattcagaatttctcctgaaatttgaccagaagttatgggcatccctcccctgggaaggaggcaggcagaaaagtttggaatctatgtagtaaaatatgttactcttttatatatatacatatatgtgtgtatatgtgtatatatatatacacacatatatacatacatacatacatacatacatacatacatacatattatctgaattaggcctggtcttttttaatagtttaagttctgggatacatgtgcagaatgtacaggtttgttacacaggtatacacgtgccatggttgtttgctgcacccatcaattcatcatctacattaggtatttctcctaacgttatccctctccttgcctcccaccccccgacaggccc

SEQ ID NO: 244766 - DNA, 563 bp, Homo sapiens
atgggcaaaacagttaaacttacagttcatacataaggagaatcagtcttttttttttttacagttgtaggcaaaaaacttttatttttcatttatttgtaaaatttacccctaatttattcataattcatttaactgctaagggcattaatgtgtacaacgccatgggagaaaccagtatattcagaatttctcctgaaatttgaccagaagttatgggcatccctcccctgggaaggaggcaggcagaaaagtttggaatctatgtagtaaaatatgttactcttttatatatatacatataygtgtgtatatgtgtatatatatatacacacatatatacatacatacatacatacatacatacatacatacatattatctgaattaggcctggtcttttttaatagtttaagttctgggatacatgtgcagaatgtacaggtttgttacacaggtatacacgtgccatggttgtttgctgcacccatcaattcatcatctacattaggtatttctcctaacgttatccctctccttgcctcccaccccccgacaggccc

SEQ ID NO: 244767 - DNA, 563 bp, Homo sapiens
atgggcaaaacagttaaacttacagttcatacataaggagaatcagtcttttttttttttacagttgtaggcaaaaaacttttatttttcatttatttgtaaaatttacccctaatttattcataattcatttaactgctaagggcattaatgtgtacaacgccatgggagaaaccagtatattcagaatttctcctgaaatttgaccagaagttatgggcatccctcccctgggaaggaggcaggcagaaaagtttggaatctatgtagtaaaatatgttactcttttatatatatacatatatgtgtgtatatgtgtatatatatatacacacatatatacatacatacatacatacatacatacatacatacatattatctgaattaggcctggtcttttttaatagtttaagttctgggatacatgtgcagaatgtacaggtttgttacacaggtatacacgtgccatggttgtttgctgcacccatcaaytcatcatctacattaggtatttctcctaacgttatccctctccttgcctcccaccccccgacaggccc

SEQ ID NO: 244768 - DNA, 563 bp, Homo sapiens
atgggcaaaacagttaaacttacagttcatacataaggagaatcagtcttttttttttttacagttgtaggcaaaaaacttttatttttcatttatttgtaaaatttacccctaatttattcataattcatttaactgctaagggcattaatgtgtacaacgccatgggagaaaccagtatattcagaatttctcctgaaatttgaccagaagttatgggcatccctcccctgggaaggaggcaggcagaaaagtttggaatctatgtagtaaaatatgttactcttttatatatatacatatatgtgtgtatatgtgtatatatatatacacacatatatacatacatacatacatacatacatacatacatacatattatctgaattaggcctggtcttttttaatagtttaagttctgggatacatgtgcagaatgtacaggtttgttacacaggtatacacgtgccatggttgtttgctgcacccatcaattcaycatctacattaggtatttctcctaacgttatccctctccttgcctcccaccccccgacaggccc

SEQ ID NO: 244769 - DNA, 507 bp, Homo sapiens
tttatttagacattttgttagattattttgaccaactgaagcctaatctaaatgttctgagcatgttcaaagtaagctaggccaacctataattttcggtgtgctaaatgcatttttaacttatgatattttcagtttacgggggtttgttgagacawaacttcatcatacatcaaggagcatctgtatatgggatatagttaaagcagtgatcagaggaaaatctatagccttaacacatttattaataaaagtgtaggaattaaattatcagctgaaaaatgtaaaaagtatctaaaagagtaagcagaaagtacaagaaagaacccaaagtagaaaaaagtgaaaattaataaaataagaagccaaaaaacagatcaaatcagtaaaccaaaaatcttgttctttaaacaaatcaacaaagttgacaaaaaaattagatctcttaatcatgaataaaaaaaaagagaaagcacaaaaatgaataaggaatggtgagagaaataa

SEQ ID NO: 244770 - DNA, 563 bp, Homo sapiens
ggatatagttaaagcagtgatcagaggaaaatctatagccttaacacatttattaataaaagtgtaggaattaaattatcagctgaaaaatgtaaaaagtatctaaaagagtaagcagaaagtacaagaaagaacccawagtagaaaaaagtgaaaattaataaaataagaagccaaaaaacagatcaaatcagtaaaccaaaaatcttgttctttaaacaaatcaacaaagttgacaaaaaaattagatctcttaatcatgaataaaaaaaaagagaaagcacaaaaatgaataaggaatggtgagagaaataactattgataatcagcaaataaaaaatcattaaaaacaatgttgttcacatctatgaaaaacattgaaagctagagggaatgggtaattttctagaaaaatacaattcaccacaactgacttcaaaaaaaaaaaaagaagtacagcacttatgtgagcaatttccatagagaaatacagttgtcatggaattataacacacacacaaacactaggtttagatgttttcacggagaattccaccaaacct

SEQ ID NO: 244771 - DNA, 409 bp, Homo sapiens
gaaaattaataaaataagaagccaaaaaacagatcaaatcagtaaaccaaaaatcttgttctttaaacaaatcaacaaagttgacaaaaaaattagatctcttaatcatgaataaaaaaaaagagaaagcacaaaaatgaataaggaatggtgagagaaataactattgataatcagcaaataaaaaatcattaaaaacaatgttgttcacatctatgaaaaacattgaaagctagagggaatgggtaattttcyagaaaaatacaattcaccacaactgacttcaaaaaaaaaaaaagaagtacagcacttatgtgagcaatttccatagagaaatacagttgtcatggaattataacacacacacaaacactaggtttagatgttttcacggagaattccaccaaac

SEQ ID NO: 244772 - DNA, 409 bp, Homo sapiens
gaaaattaataaaataagaagccaaaaaacagatcaaatcagtaaaccaaaaatcttgttctttaaacaaatcaacaaagttgacaaaaaaattagatctcttaatcatgaataaaaaaaaagagaaagcacaaaaatgaataaggaatggtgagagaaataactattgataatcagcaaataaaaaatcattaaaaacaatgttgttcacatctatgaaaaacattgaaagctagagggaatgggtaattttctagaaaaatacaattcaccacaaytgacttcaaaaaaaaaaaaagaagtacagcacttatgtgagcaatttccatagagaaatacagttgtcatggaattataacacacacacaaacactaggtttagatgttttcacggagaattccaccaaac

SEQ ID NO: 244773 - DNA, 493 bp, Homo sapiens
agttactaaacaaataaaaactacattccacagtgggtaacaaaaataaccttgaagaagggaaaaatttggtttccagaataaacacattataatatccaaaatgtccagttttcaacaaaaattaagaagcatgcaaataaacacaaaactatggcccatttacagaagaaataaatgagactctccctgagtaagcagatattrgaaatattagacaaaaactttatataactgtcgtaaataaacttaaagagctaaagaaacccaagagaatgacatataaataaataagaaatatgaattttttaaaaggtacaaaaaaattctgaggctgaaaagtacaataactaagtaaaaagttactttttacttagggttccaatagaagatttgagcagctggaaaaaagaatcagtgaacttgatagatcaaatgaaatgattcagtctgaagagcaggaaaatgaaagaatgacaacaaaaaagaatag

SEQ ID NO: 244774 - DNA, 493 bp, Homo sapiens
agttactaaacaaataaaaactacattccacagtgggtaacaaaaataaccttgaagaagggaaaaatttggtttccagaataaacacattataatatccaaaatgtccagttttcaacaaaaattaagaagcatgcaaataaacacaaaactatggcccatttacagaagaaataaatgagactctccctgagtaagcagatattagaaatattagacaaaaactttatataactgtcktaaataaacttaaagagctaaagaaacccaagagaatgacatataaataaataagaaatatgaattttttaaaaggtacaaaaaaattctgaggctgaaaagtacaataactaagtaaaaagttactttttacttagggttccaatagaagatttgagcagctggaaaaaagaatcagtgaacttgatagatcaaatgaaatgattcagtctgaagagcaggaaaatgaaagaatgacaacaaaaaagaatag

SEQ ID NO: 244775 - DNA, 493 bp, Homo sapiens
agttactaaacaaataaaaactacattccacagtgggtaacaaaaataaccttgaagaagggaaaaatttggtttccagaataaacacattataatatccaaaatgtccagttttcaacaaaaattaagaagcatgcaaataaacacaaaactatggcccatttacagaagaaataaatgagactctccctgagtaagcagatattagaaatattagacaaaaactttatataactgtcgtaaataaacttaaagagctaaagaaacccaagagaatgacatataaataaataagaaatatgaattttttaaaaggtacaaaaaaattctgaggctgaaaagtacaataactaagtaaaaagttactttttacttagggttccaatagaagatttgagcagctggaaaaaagaatcagtgaacttgatagatcaartgaaatgattcagtctgaagagcaggaaaatgaaagaatgacaacaaaaaagaatag

SEQ ID NO: 244776 - DNA, 548 bp, Homo sapiens
gaaagagaaagaaagaaagaaagaaaagcaagcaagctttaaaagttcatgtttggtaggctgtacttcaagatacactttwaaaaaaaagactccttcacatacaaactaaaaaacactagaaagtaactcaaaaccacataaagaaataactccagtaaagataactacataggtaaatataaaagcaattatcacatttttgtaagtcttttttaatattctatatgttttaaaacaaatgtgtaaaataatgactataaatctatgttaatgaagcatgatgtataaagatgtggtttgtgaaattaccaacataaagaaattcataggaaactaaataataatagagattttgtatactattgaagttgtttcaatttactctaaattgttccaaattaagaatgttaattgtaaatccccatggtaaccactaagttaatatcttttgaaaatacagaaaaggaaagcagagggtaaacacagtgatatgctacaaaatagcaactaaacacaaaagaaggcgataattgaggaaattagga

SEQ ID NO: 244777 - DNA, 548 bp, Homo sapiens
gaaagagaaagaaagaaagaaagaaaagcaagcaagctttaaaagttcatgtttggtaggctgtacttcaagatacactttaaaaaaaaagactccttcasatacaaactaaaaaacactagaaagtaactcaaaaccacataaagaaataactccagtaaagataactacataggtaaatataaaagcaattatcacatttttgtaagtcttttttaatattctatatgttttaaaacaaatgtgtaaaataatgactataaatctatgttaatgaagcatgatgtataaagatgtggtttgtgaaattaccaacataaagaaattcataggaaactaaataataatagagattttgtatactattgaagttgtttcaatttactctaaattgttccaaattaagaatgttaattgtaaatccccatggtaaccactaagttaatatcttttgaaaatacagaaaaggaaagcagagggtaaacacagtgatatgctacaaaatagcaactaaacacaaaagaaggcgataattgaggaaattagga

SEQ ID NO: 244778 - DNA, 607 bp, Homo sapiens
ttgtgaaattaccaacataaagaaattcataggaaactaaataataatagagattttgtatactattgaagttgtttcaatttactctaaattgttccaaattaagaatgttaattgtaaatccccatggtaaccactaagttaatatcttttgaaaatacagaaaaggaaagcagagggtaaacacagtgatatgctacaaaatagcaactaaacacaaaagaaggcgataattgaggaaattaggaacaaaggaggtataagacatacagaaaacaaaagcaaaatggtaggagtaagcccctctttatcagtaattacattaaatacaaatgaattaaactctccaatccaaagaaagagattgacagaatggatttttwaaaaatgatccaactatattgtccacaagatactcactttagatcaaaatacacaatgagttgaaatgaaaagatgggagaaaatattccatgtaagtaataaccaaaggagatctgaggcaaatatacttatatcagacaaaatagactttaagtcaaaaactgttacaaaatacaaagaacagtatatattgatttcaaaattaattaagaagatataacaa

SEQ ID NO: 244779 - DNA, 607 bp, Homo sapiens
ttgtgaaattaccaacataaagaaattcataggaaactaaataataatagagattttgtatactattgaagttgtttcaatttactctaaattgttccaaattaagaatgttaattgtaaatccccatggtaaccactaagttaatatcttttgaaaatacagaaaaggaaagcagagggtaaacacagtgatatgctacaaaatagcaactaaacacaaaagaaggcgataattgaggaaattaggaacaaaggaggtataagacatacagaaaacaaaagcaaaatggtaggagtaagcccctctttatcagtaattacattaaatacaaatgaattaaactctccaatccaaagaaagagattgacagaatggattttttaaaaatgatccaactatattgtccacaagatactcactttagatcaaaatacacaatgagttgaaatgaaargatgggagaaaatattccatgtaagtaataaccaaaggagatctgaggcaaatatacttatatcagacaaaatagactttaagtcaaaaactgttacaaaatacaaagaacagtatatattgatttcaaaattaattaagaagatataacaa

SEQ ID NO: 244780 - DNA, 547 bp, Homo sapiens
aataaccaaaggagatctgaggcaaatatacttatatcagacaaaatagactttaagtcaaaaactgttacaaaatacaaagaacagtatatattgatttcaaaattaattaagaagatataacaattataaatatatgtacaccaactaacagggctccaaaatatataatgtaaccattgagagaattaaagggagagacagacaattccacgaaaattgttgggcatttgaaaacccaactttaaataaaagataaaacatcyagagcaaatatcaagggaggaattagaggatttgaataaaactataagcaataactatagataacacttctctcaaaaactgcagaatacacattcttctcaagtgaacatggaacattctccagcacagatgatacgttaggccataagataagctcaataaacttaaaaagattgaaatcatgcaaagtatcttcactggccacaatggaatgaaataagatatcaataacaaaagaaaaactagaaaatttacaaatatttggaaattaaacaacaca

SEQ ID NO: 244781 - DNA, 547 bp, Homo sapiens
aataaccaaaggagatctgaggcaaatatacttatatcagacaaaatagactttaagtcaaaaactgttacaaaatacaaagaacagtatatattgatttcaaaattaattaagaagatataacaattataaatatatgtacaccaactaacagggctccaaaatatataatgtaaccattgagagaattaaagggagagacagacaattccacgaaaattgttgggcatttgaaaacccaactttaaataaaagataaaacatccagagcaaatatcaagggaggaattagaggatttgaataaaactataagcaataactatagataacacttctctcaaaaactgcagartacacattcttctcaagtgaacatggaacattctccagcacagatgatacgttaggccataagataagctcaataaacttaaaaagattgaaatcatgcaaagtatcttcactggccacaatggaatgaaataagatatcaataacaaaagaaaaactagaaaatttacaaatatttggaaattaaacaacaca

SEQ ID NO: 244782 - DNA, 547 bp, Homo sapiens
aataaccaaaggagatctgaggcaaatatacttatatcagacaaaatagactttaagtcaaaaactgttacaaaatacaaagaacagtatatattgatttcaaaattaattaagaagatataacaattataaatatatgtacaccaactaacagggctccaaaatatataatgtaaccattgagagaattaaagggagagacagacaattccacgaaaattgttgggcatttgaaaacccaactttaaataaaagataaaacatccagagcaaatatcaagggaggaattagaggatttgaataaaactataagcaataactatagataacacttctctcaaaaactgcagaatacacattcttctcaagtgaacatggaacattctccagcacagatgataygttaggccataagataagctcaataaacttaaaaagattgaaatcatgcaaagtatcttcactggccacaatggaatgaaataagatatcaataacaaaagaaaaactagaaaatttacaaatatttggaaattaaacaacaca

SEQ ID NO: 244783 - DNA, 543 bp, Homo sapiens
cttcacctcccaccactataacaacccagaatccatgagggcattatcaggagtgagtggaagagtaagtttgccaatgtgaaatgtgccttctaggtcctagacatctgtggtataactgctcataagcagtagaaagaatttagagggatccaggctctcatcaygttggcacaaagtatattacttggatccatctatgtcattttccatggttaatgtttaaaaccacaggctttaaagtaaaaaacaaagagctggattcaactctactgactcttattaatcatgattttgggcacattacgtagctttcatgagctttagtttctacatttataaacaggagattatacctattatgcacggttattatgaaggaaaatgacaaaatagatataaatcaaatagcccacttcgagacatattaagcatgaataaacattagatactattaaaatcctatatattaacaaagccaaaagtttcaaactttactttttcccaacattcttgtgaaatatgacacatcccaatcttaac

SEQ ID NO: 244784 - DNA, 611 bp, Homo sapiens
tagttaaaaatgtacagatgctctctgacttataatagggttatgtcctgataaatccatcataagtcaaaaatgcatttaatattcctaatgtacctcacatcatagtttggcctagcctaccttaaatgtgctcagaacactttcattagcttatataagatcacctaatacaaagcctattttataataaaatattgaatagctcacgtaatatactgactactatactcaagtacagtttcttctgaatgcatgtcactttctcaccattgtaaagtcaaacaattataagtcaaactatcacaagccagggaccatccatatgtatttcattcagaaaatgctggaaaragcatttaggagaatatctagatgagagaaggtagaaagccatgcacaaattcactgagagtttaaaaaaatgcatgcatattgtggagatagaaatcaaatctatttgtttccatctgctgtattcttcccaaaatattatctcttcttatcccattgtactatattgcatttctttgaccatttattgtgtatctcttaatatttcccacttcatcattactaacctcactcactctgaacttgatgagagcacc

SEQ ID NO: 244785 - DNA, 559 bp, Homo sapiens
gggcaaaacagttaaacttacagttcatacataaggagaatcagtcttttttttttttttacagttgtaggcagaaaacttttatttttcatttatttgtaaaatttacccctaatttattcataattcatttaactgctaagggcattaatgtgtacaacgccatgggagaaaccagtatattcagaatttctcctgaaatttgaccagaagttatggrcatccctcccctgggaaggaggcaggcagaaaagtttggaatctatgtagtaaaatatgttactcttttatatatatacatatatgtgtgtatatgtgtatatatatatacacacatatatacatacatacatacatacatacatacatattatctgaattaggcctggtcttttttaatactttaagttctgggatacatgtgcagaatgtacaggtttgttacacaggtatacacgtgccatggttgtttgctgcacccatcaactcaccatctacattaggtatttctcctaacgttatccctctccttgcctcccacctcccgacaggccctggt

SEQ ID NO: 244786 - DNA, 509 bp, Homo sapiens
actttatttagacattttgttagattattttgaccaactgaagtctaatctaaatgttctgagcatgttcaaagtaagctaggccaacctataattttcggtgtgctaaatgcatttttaacttatgatattttcagtttacgggggtttgttgagacataacttcatcatacatcaaggagcatctgtatatgggatayagttaaagcagtgatcagaggaaaatctatagccttaacacatttattaataaaagtgtaggaattaaattatcagctgaaaaatgtaaaaagtatctaaaagagtaagcagaaagtacaagaaagaacccaaagtagaaaaaagtgaaaattaataaaataagaagccaaaaaacagatcaaatcagtaaaccaaaaatcttgttctttaaacaaatcaacaaagttgacaaaaaaattagatcttttaatcatgaataaaaaaaaagagaaagcacaaaaatgaataaggaatggtgagagaaataa

SEQ ID NO: 244787 - DNA, 512 bp, Homo sapiens
tacaaaaccagtttacaaaagttactaaacaaataaaaactacatcccacagtgggtaacaaaaataaccttgaagaagggaaaaatttggtttmcagaataaacacattataatatccaaaatgtccagttttcaacaaaaattaagaagcatgcaaataaacacaaaactatggcccatttacagaagaaataaatgagactctccctgagtaagcagatattggaaatattagacaaaaactttatataactgtcttaaataaacttaaagagctaaagaaacccaagagaatgacatataaataaataagaaatatgaattttttaaaaggtacaaaaaaattctgaggctgaaaagtacaataactaattaaaaagttactttttacttagggttccaatagaagatttgagcagctggaaaaaagaatcagtgaacttgatagatcaagtgaaatgattcagtctgaagagcaggaaaatgaaagaatgacaacaaaaaagaatag

SEQ ID NO: 244788 - DNA, 556 bp, Homo sapiens
agaaagaaagaaaagaaagaaagaaaagcaagcaagctttaaaagttcatgtttggtaggctgtacttcaagatacactttaaaaaaaaaaagactccttcagatacaaactaaaaaacactagaaagtaactcaaaaccacataaagaaataactccagtaaggataactacataggtaaatataaaagsaattatcatattttttgtaagtctttttaaatattctatatgttttaaaacaaatgtgtaaaataatgactataaatctatgttaatgaagcatgatgtataaagatgtggtttgtgaaattaccaacataaagaaattcataggaaactaaataataatagagattttgtatactattgaagttgtttcaatttactctaaattgttccaaattaagaatgttaattgtaaatccccatggtaaccactaagttaatatcttttgaaaatacagaaaaggaaagcagagggtaaacacagtgatatgctacaaaatagcaactaaacacaaaagaaggcgataattgaggaaattaggaacaaa

SEQ ID NO: 244789 - DNA, 599 bp, Homo sapiens
ttaccaacataaagaaattcataggaaactaaataataatagagattttgtatactattgaagttgtttcaatttactctaaattgttccaaattaagaatgttaattgtaaatccccatggtaaccactaagttaatatcttttgaaaatacagaaaaggaaagcagagggtaaacacagtgatatgctacaaaatagcaactaaacacaaaagaaggcgataattgaggaaattaggaacaaaggaggtataagacatacagaaaacraaagcaaaatggtaggagtaagcccctctttatcagtaattacattaaatacaaatgaattaaactctccaatccaaagaaagagattgacagaatggatttttaaaaaatgatccaactatattgtccacaagatactcactttagatcaaaatacacaatgagttgaaatgaaaggatgggagaaaatattccatgtaagtaataaccaaaggagatctgaggcaaatatacttatatcagacaaaatagactttaagtcaaaaactgttacaaaatacaaagaacagtatatattgatttcaaaattaaacaagaagatataacaa

SEQ ID NO: 244790 - DNA, 526 bp, Homo sapiens
cacatttttcaacaaatatattgtatgggaaagaaaactttgaaaagaaacctgtatgttagaagggattttaaaaacacgacaaatgaaaacaaatgsgcaagactaaatcatagtgtcttggaatgcatgcatgaaggacacagccgtgaaaatgcaaggacgcctctactggaacagtcacgtttatcgtcacttttcaggagaaaggtggctgcaactgaggagagtcacatgcaggacttcagggctggcaaagtcctatatcttgacttatgtgatgattacagggatgtttacaaaaatcaaactataagtttgttttgtgccatgttttgtattgtgtgtgtgtgttttgtttttcaacttaaaaatacataaaatcaaaaccaaggcttcattatcaagtagcacaaagtctccaatctataacctcctttgtctggatatctgcatttaactaccattgccagagctaatcctgacaatgcattcatatttttaacactgaaacacagtaaacagg

SEQ ID NO: 244791 - DNA, 583 bp, Homo sapiens
gttttgcctacgtacttatcaacttcctcatagcaaactgggagaaaaaagcaatggaatgaataaaatgatagccacaaaaatcaaggtgggagaaatacttattatatgtccataaaaaattttaattaatgcaaagtattaacaccaatgattgcagtaatrcagatcttacaaatgatagttttagtctgaacaggactatccaaaagttaattttctatagtaacagtttttaaataaaatatcaattcctgaaacacataaaatggtccatgagtatacaacgagtgaaaaaaaacaaattcagagcaaagataaattaagaagtatctaatattcaaacatagtcaaagagagggagatttctggataatcacttaagcccatggttaaacataaatgcaaatatgttaatgtttactgaataacttatctgtgccaagtggtgtattaatgattcatttttatttttcactaaatcttttctctaaagttggtgtagcctgcaactaaatgcaagaaatctgacctaggacctgcacttcttaccattttgctcatatttattccctgtgcattt

SEQ ID NO: 244792 - DNA, 562 bp, Homo sapiens
ccaagactttactgaagtcgtgtatcaagtctaggagtcttctgaagactttagggttttctaggcctacagtcatgtcatcagtgagcagagatcatttgacttcttttctaatttgtataccttttatttctttctcctttctgatagttctggctagcacttccagtactgtattgaataggaatgaagaaggtgaacatccttgcttttttccagtttctagaagcaacacttctaacttttgcccatccaggatgatgttggctgtggctttgtcatagatgactcattttttgaggtatactccatctatacctatattgttgagggtttttatcataaacagatgttggattttatcaaatgcttattctgcatctaatgagatgatcatagggtttttgttctcagttccatttatgtggtgaatcatgtttattgatttgtctattttgaaccattcaagcacccctggaataaagcccrcttgatcatgatgaattatctttttgatgtgttgttagcttcagtttgctagaattttgttgagtatttttac

SEQ ID NO: 244793 - DNA, 571 bp, Homo sapiens
agttgttgcattttgtttctcccaaggcctggagtcaacatggggagaggcttggagatgctgtgaagcaaagacactgggaacagctgcagacattttcccagaccaggaagtaagagcaagatgccattttcaatctggatgcatgcaaagtcagcttttttttttctttttgtgacccagcagaatgcctgcacaggcattttagtctcaggccaaagattggaacaactgctttggggcttggtagggaccttcacagccatattgtggaaaacacctcagcagtatgtgctggaattgtgctttcccccatcgcagcctcggggcaacagaaaagctgctacagctgtaatttctcccaggtgatgaaacttgcagccagggccagcttggagacctacaaccagtctgcaggtgtcattgctgggtgccccagcctgttsccctgagaatgtgatacagcagggctttctctgcttcacccccaggcagaaattcaggcattggagcacctgtctacctggaccagcatcctgagctaccccaccgtttataaacataggttgtg

SEQ ID NO: 244794 - DNA, 636 bp, Homo sapiens
ctgatagtcatggaatatgataggtacactgcgatctgcaagcctctccactatccaactattatgaatcccaaaatgtgcatgtttttggtagcagcagcttgggtcattggggtgattcatgctatgtctcagtttgtttttgtcataaattaaccttctgtggccctaataatgtggggagcttttattgtgattttcctcgggttattaaacttgcatgcatggacacttaygggctagaatttgtggtcactgccaacagtggattcatatcgatgggcaccttctttttcttaattgtatcatacatttttattctggtcactgtccaacgacattcctcaaatgatttatccaaagcattcttcacttcgtaggctcacatcaccgtagtggttttgttttttgctccatgcatgtttctctacgtgtggcctttccctactaagtcattggataaattttttgccatcatgaactttgttgtcacccctgtcttaaatcctgccatctatactttaaggaacaaagatatgaagtttgcaatgagaaggctgaatcaacatattttaaattctatggagacgacataacacatttggttgatgagagcacaggataaatgccatggac

SEQ ID NO: 244795 - DNA, 624 bp, Homo sapiens
tctaaattgcacactttgattcaaaagaaacagtccaaccaaccagtcaggacagaaattatctcacaataaaaatcctatcatttgtactgtcaatgattagtatgattatatttattacmgtgctaagcagaagagaactgaagtgaatgttcatgatttattccactattagacttctctttattcttaaaaatatttaagatcactaaatttttataggactttaaaaacagtaatgtgctgctttgagtgtgtaggactaagaaatgggattcagagtagtaaagagaaaagtggaatttccaagcactatgaattactgttctttaaaaaacagcaaaaatcaaataacagtattcctccaaaaaagatggcaagtgtaaactctataccttcatgtctcccgtggaatgttagtgatcaatttccacttctctcttttacatcttacttgcccattaactcttatacctaatccaaagattgttaatatggctatgcctcactttcaggacaccttttatttgttacttctcttcactgcaaaacttcttgaaacagtacttattttctctcctccatacacaattgaaatggctctcaactcatgcccagaagtca

SEQ ID NO: 244796 - DNA, 624 bp, Homo sapiens
tctaaattgcacactttgattcaaaagaaacagtccaaccaaccagtcaggacagaaattatctcacaataaaaatcctatcatttgtactgtcaatgattagtatgattatatttattacagtgctaagcagaagagaactgaagtgaatgttcatgatttattccactattagacttctctttattcttaaaaatatttaagatcactaaatttttataggactttaaaaacagtaatgtgctgctttgagtgtgtaggactaagaaatgggattcagagtagtaaagagaaaagtrgaatttccaagcactatgaattactgttctttaaaaaacagcaaaaatcaaataacagtattcctccaaaaaagatggcaagtgtaaactctataccttcatgtctcccgtggaatgttagtgatcaatttccacttctctcttttacatcttacttgcccattaactcttatacctaatccaaagattgttaatatggctatgcctcactttcaggacaccttttatttgttacttctcttcactgcaaaacttcttgaaacagtacttattttctctcctccatacacaattgaaatggctctcaactcatgcccagaagtca

SEQ ID NO: 244797 - DNA, 628 bp, Homo sapiens
tggtcccgtcctggagccaaattttcttttctgattggtcagctgcgaattgtggctagacctgatccaatggccgcttgatacaatggtgtcgttcgggaaacgcagccctaacgttggtcctaagctgacaaattggtctgtggacgccaaacttccgtgctaggactttctgcgtgtggaccgggggcctagtcctgcgtgggtccaacacagacaggagaaagctgcctgcttttgtgcctcccggaggtcctggtagaagcgaaacggggacaggagctgcagcgtcccaagcccagtgaggcgaatatctggagacagctctgccgggtccaaagttgggctcaccggctggaacttgaaaccggagcacgccggactcctgctgaagccatcatctctctctcctggccccgggcgccttggccggcgggcacaactggtttcggggccaaggtggtctggaagcctgackgtggcgtctggcctgggctcccgcgagcggaaaaggttcccctcctgtgagagggaaactatggaagttcctacgcccggagccagaactcctgctgctcccgcccgacccaaggtctagcttggcggcctcccacctgtgcttctgagg

SEQ ID NO: 244798 - DNA, 581 bp, Homo sapiens
actgtgacggattttaatcagtgcctcgggttgcctgccctcctctccccagaaagcctcggtatgtgagtaataaacctcttaaaaaccttctttgggtgtgcgtgtgtgtgtgtgtgtgtgtgtgtgtgtgtgtgtgctgcaacaagtattggtacagtgagcatgctttctaaacaatgtccactatcacagagtatctttgatctcttggtttggcttcctcactggctcagctgctgactgaaaggatgcactttgagctgccttctgctaraaagcttgctctttgagctatgtttctttgctctgcatttattgaatcctaccaagcttcagtttaactaacctaatatggaaatttcaacagttaactttggggatagaattatgggattggggtcatccttaaaatgaccctgggtaatgtgtctggttccaaatgtatctgtgtgtctcagattacattgaattccagaataagccatgactgtcactgggctcaggggaatgaatcttaccctgtgactactgtctgtaagtctcaaccaggcattggccccattctgtagaactcaatg

SEQ ID NO: 244799 - DNA, 583 bp, Homo sapiens
agcagagaagataatggtggctgccagggcctggaacagtgaggggagatgttggtcaaagaatacaaaatttcagttagaaaggagaaacaagttcaacagatctgttgttaaacatgttaactacagctagtaactaactgtattgtattcttgaaaactgataaaagagtagattttaagtgttctcaccatacacaaaaaaatgataagcatataatgtaatgataagcwtataattagcttaatttagccatttcacaatgtatacacatttcaaagcatgatgttggacatgacacaatttttatttatcaatgaaaaatgaattaatttaaaagatcaggccatttcccactgtgggttagagtctacacccagctctccttcctgactgccttacagctgtcagctgctgattgcaccctcagagtctcagccttcttcaccatgctttgctggctcacttctcagttcattcactcttctcagcgattttgtctactgccatgtgttacaaggcctgaaattccatgtgctgccttggcataattgagcctcacagggcatcaaaggcctagcc

SEQ ID NO: 244800 - DNA, 528 bp, Homo sapiens
ttcctcttttactaatcctcctcagcacagacccttcacgggtgtcgggctgggggacggtcaggtctttcccttcccacgaggccgtatttcagactatcacatggggagaaaccttggacaatacctggctttcctaggcagaggtccctgcggccttccgcagtgttttgtgtccctgggtacttgagattagggagtggtgatgactcttaasgagcatgctgccttcaagcatttgtttaacaaagcacatcttgcacagcccttaatccatttaaccctgagttgacacagcacatgtttcagagagcacggggttgggagtaaggttacagattaacagcatctcaaggcagaagaatttttcgtagtacagaacaaaatggagtctcctatgtctacttctttctacacagacacagtaacaatctgatctctctttcttttccccacgtttttgagacggagtttcactctgctgcccagagtggagtgtgcagtggcacgatctcggatcactgcaac

SEQ ID NO: 244801 - DNA, 593 bp, Homo sapiens
taagccatgcacccttacactgaaagaataaagtatattcccactgccacaagcttttctttttctctagcagttaaacaagcactgacctagagataagcaatattgaaacaattgcaactcacttgttgccagatgctgactaactgaccctcactctcctataccatagccataactacagctttcactgggcaatcgattgattgattgcagtaactatctcctaataagaaaccaccgaccatggactggctctggctggattatagagattgtgcacttgtgttcctatgtgccctgaaagatctgttgtcatatagggcctaaatgtgatacagttaaatgttatgcctgcaccccaaggtgaacatgagtggtatgttacarggatgtttcttgaaaacgaatgtgtgagatcctccttatgaatattcatagctcctcctgtaacttgtagaatctgtatgttcagccaacccattcagcataaagctcctgccccaagccttcctccttccaagtgccggtctgtggtcttggccagaggcacacttcccagcctgtggcatggctgctgtgtaggctgcaac

SEQ ID NO: 244802 - DNA, 197 bp, Homo sapiens
ttttgaaatgagctcatttgtattagtgcagctcctgagtgcactggacgattagggtattgccactttattattttaattctgaatctcatgaagaaataggyagcctttggagaagataaaaaatttctgctgaataacagtataatctaactatgaaaaatcaaaacttttggaaatatttagaacaaatgtaa

SEQ ID NO: 244803 - DNA, 197 bp, Homo sapiens
ttttgaaatgagctcatttgtattagtgcagctcctgagtgcactggacgattagggtattgccactttattattttaattctgaatctcatgaagaaataggcagcctttggagaagataaaaaatttctgctgaataacagtataatctaactatgaaamatcaaaacttttggaaatatttagaacaaatgtaa

SEQ ID NO: 244804 - DNA, 537 bp, Homo sapiens
gtgtagagtttgttcttagtctgtccatctgtatacaagcatgaactgtacagtcaactgccttgtagaggggctggtttttggttatgtcttaaatcttaactccttttaattattctgaattttagtgggattcctrtatcattgtagatttggaaagtattgagtaggagatgataatctataatcaggattctgagttggtaagattttatagatctgaaaaaagtaatttcttgaccttggcctcaataagaaagtcagaacttgacccttatttaccagcaccatcccccccaccacaatatttaaagtgtttaaatcatttattttgaaattcttatgtgatccaagaccactgtgcatttaagctagtttatttgtttattaaaacaaaagaagtagactgcagttacgttgtttctttttctgttgtttggtgtcaggagtagaatacatttggccagcttcatgagaggattagaaagttggagaaggaaaaatagaattgtttacggagccaggagaataattgtc

SEQ ID NO: 244805 - DNA, 537 bp, Homo sapiens
gtgtagagtttgttcttagtctgtccatctgtatacaagcatgaactgtacagtcaactgccttgtagaggggctggtttttggttatgtcttaaatcttaactccttttaattattctgaattttagtgggattcctatatcattgtagatttggaaagtattgagtaggagatgataatctataatcaggattctgagttggtaagattttatagatctgaaaaaagtaatttcttgaccttggcctcaataagaaagtcagaacttgacccttatttaccagcaccatcccccccaccacaatatttaaagtgtttaaatcatttattttgaaattcttatgtgatccaagaccactgtgcayttaagctagtttatttgtttattaaaacaaaagaagtagactgcagttacgttgtttctttttctgttgtttggtgtcaggagtagaatacatttggccagcttcatgagaggattagaaagttggagaaggaaaaatagaattgtttacggagccaggagaataattgtc

SEQ ID NO: 244806 - DNA, 537 bp, Homo sapiens
gtgtagagtttgttcttagtctgtccatctgtatacaagcatgaactgtacagtcaactgccttgtagaggggctggtttttggttatgtcttaaatcttaactccttttaattattctgaattttagtgggattcctatatcattgtagatttggaaagtattgagtaggagatgataatctataatcaggattctgagttggtaagattttatagatctgaaaaaagtaatttcttgaccttggcctcaataagaaagtcagaacttgacccttatttaccagcaccatcccccccaccacaatatttaaagtgtttaaatcatttattttgaaattcttatgtgatccaagaccactgtgcatttaagctagtttatttgtttattaaaacaaaagaagtagactgcagttacgttgtttctttttytgttgtttggtgtcaggagtagaatacatttggccagcttcatgagaggattagaaagttggagaaggaaaaatagaattgtttacggagccaggagaataattgtc

SEQ ID NO: 244807 - DNA, 329 bp, Homo sapiens
ctcggcctcccagagtgctgggattacaggcgtgagccaccccacccggccaccttggccactattacaaaagtaaagctaaataatactgaagtatatgttccatattttgtaaggactgttgatttggaaacagtgtattctaacaagataaattttaaatgtaactaatagtatatgtttctgaataaatagttgctgcttctaatataaagtgtcatatttgttttaaaatcattgctcaagttgtatagttgttttgggcacrtattttcaacttctagaccaatacaaaatgtaaaataagtaaaagacgtgatatagttgta

SEQ ID NO: 244808 - DNA, 540 bp, Homo sapiens
tgtcttaaaattttttataacttataaattatttcacaaatttctctccttgaagtggcacaaaattatggtgaatatggtatttaagagtaatgctgtaattcagtaaacttgctaccatgcagcattctcagagaatgggatatcttggctaatcaaatattatcatatgtacctcatagagacgtctgattttcaaaattaacctaatttttaaaaagtcaaactcagtatagtctactctttcactgttggccagaactgtgccccasaggacatctttatgaacatgaattagcattataacacaaacacaacaaaagagactgtcatagggagttctccttaatagaacactgaataacagacttttctgatcaaagaatctgttagataatcaccacatgctttttcaatggctttaatacactattctgtaggtaggccaccactgttagccagtgatatacctctcttcagtgctaatcccactcacttaaaactaaagcaaactaattaagccattctgggttaagtcta

SEQ ID NO: 244809 - DNA, 540 bp, Homo sapiens
tgtcttaaaattttttataacttataaattatttcacaaatttctctccttgaagtggcacaaaattatggtgaatatggtatttaagagtaatgctgtaattcagtaaacttgctaccatgcagcattctcagagaatgggatatcttggctaatcaaatattatcatatgtacctcatagagacgtctgattttcaaaattaacctaatttttaaaaagtcaaactcagtatagtctactctttcactgttggccagaactgtgccccacaggacatctttatgaacatgaattagcattataacacaaacacaacaaaagagactgtcatagggagttctccttaatagaacactgaataacagacttttctgatcaaagaatctrttagataatcaccacatgctttttcaatggctttaatacactattctgtaggtaggccaccactgttagccagtgatatacctctcttcagtgctaatcccactcacttaaaactaaagcaaactaattaagccattctgggttaagtcta

SEQ ID NO: 244810 - DNA, 455 bp, Homo sapiens
tacaataaggtagagtcaatgcagaacccacaagctcattgatttccatccctgtgtcgtcagcttgttcactttctcctaagattatgacaatagtagtaataataataaccaggacacaaataactcttgagaggtcacttgtaactacctcttcttggaggtgagaaacacacacatgcatacacacatacacccctgtggacttatggtttatttttgtcagaggaacttagaattgcctgaggtggtgtgtgtgtgtgtgtgtgtgtgtgtktttttttttaatgatttatttacagacttgctaatgcctccgcagaaatcctgtttatcagcccaatagttgtgacagggttagaaaaccagtttaaactgttaatcggccagaaaaagggccctagattgatgcctttcacttacctttgaaaggctataaaagcaacgccatacat

SEQ ID NO: 244811 - DNA, 543 bp, Homo sapiens
tgatggtttcaaattacataacggtggtttatatgttcttcctctgcgctcacagaaagcaattttaaagtgtgaattcttcaaagaacgggcaaagcattcacacacagacatgcgtttttattttatgtattgcaaagcgctatgagagagagagagagaaaccaaaaacaaaaatcccagcaaaaggaggccgagtccaaagagaatatgtccggtttctatttcaccaagctcctggactcacatttggccccggagccgagtgctcggtctctttccccgggacgggacagggagtggagttcctagccccttgggtgggaaaagccccgcgcacgtcaccgggtcccgtctgctcactgcttctgcatattttaagcctggacacagcctcctttaggatagaaaggcatttcccaaacaacaccgattctgggggtgtagtgggcctggcgctggrtcctggagagaaggttcagccccccttctcatccctgtactttggggatggctcgtacttggacaggggtgggcctccgc

SEQ ID NO: 244812 - DNA, 490 bp, Homo sapiens
gttttatgtatacatagataagactatttttaaatttatattgaaaagccttaaaactgctaaaacaatcttgaaaacagaataaggcaggagaaatcactctatctgacattaagtcctactacacagctacaggaattagaaagtgtgctattggtgaagggctatgtgctattgatgcatgggtyaaaggaacagaatagaaaacccagaaatagacccacacaaatatgttcaacagatttttcagaaaggtgagagaccaattcaatggagtgaagataaccttctcaacaaatgaagctcgagcaatcgggcatccataggtaaaaaagtgaagcttgacctcacaccttaccagaaattaactcagaatggatcactgactgaaatgtaaaacacaaaactataaaacttttgagaagatgatagcagaaaaccttgggcattcagggctaggcaaagaatttttacacttgactcatctggg

SEQ ID NO: 244813 - DNA, 536 bp, Homo sapiens
atctggggtgctagggagggcgccatctgagtagttcggaagaactgaacatgatgagttgccggctgcttcctgagtccttggggaagcacacgcaccatccacttagcactggagcctggctgttctccgggcactcctaccccatcttcctggcggggcttagatgctcctgcctcttccaccagctcctcttgccctgcatgcttcagggacgatggaggtctcggggcacccccaggccaggagatgctgcccagaggccctgggaaagctcttccctggcctctgcttcctctgctttctggtgacctacgccctggtgggtgctgtggtcttctctgccattgaggacggccaggtcctggtggcagcagatgatggagagtwtgagaagttcttggaggagctctgcagaatcttgaactgcagtgaaacaggtaggtgcctcacctggacagggtgggccttttctccgtggtggcagcagtcccccaagagcagagggctgccttctaggaggctgggtctgggag

SEQ ID NO: 244814 - DNA, 539 bp, Homo sapiens
acaccctaatatgactgcttttaacattttactgtatttcagcctttttgctatgtatataattttacagagttgtaatcatacccagtatatgattttatcatgttttcccacttaccattataggtatttttaatattgctacatagtcttcatggttgtcattgttaatagctatgctgtaatagttcactgaattgaagtgctttatttacttagctaccctattatctttaaacaatttctaatttctttttataataaacatggacatatttctgacaggggtgttctttttcacatcttgacctacttttcacatagtgttacaattacytgaccaaagaatacaaactttttgtctcttgacgtatatttccaaaagatttttaaaaggtgcattaatttactctgcagctggtgtaaatgaagaccattttgtcattgttttcttgagagtagagcttccaaaagtagggatatgtggctaggaggaagaaatccagcctggggcaggcattctgtaaagaactccagtt

SEQ ID NO: 244815 - DNA, 539 bp, Homo sapiens
acaccctaatatgactgcttttaacattttactgtatttcagcctttttgctatgtatataattttacagagttgtaatcatacccagtatatgattttatcatgttttcccacttaccattataggtatttttaatattgctacatagtcttcatggttgtcattgttaatagctatgctgtaatagttcactgaattgaagtgctttatttacttagctaccctattatctttaaacaatttctaatttctttttataataaacatggacatatttctgacaggggtgttctttttcacatcttgacctacttttcacatagtgttacaattacctgaccaaagaatacaaactttttgtctcttgacgtatmtttccaaaagatttttaaaaggtgcattaatttactctgcagctggtgtaaatgaagaccattttgtcattgttttcttgagagtagagcttccaaaagtagggatatgtggctaggaggaagaaatccagcctggggcaggcattctgtaaagaactccagtt

SEQ ID NO: 244816 - DNA, 539 bp, Homo sapiens
acaccctaatatgactgcttttaacattttactgtatttcagcctttttgctatgtatataattttacagagttgtaatcatacccagtatatgattttatcatgttttcccacttaccattataggtatttttaatattgctacatagtcttcatggttgtcattgttaatagctatgctgtaatagttcactgaattgaagtgctttatttacttagctaccctattatctttaaacaatttctaatttctttttataataaacatggacatatttctgacaggggtgttctttttcacatcttgacctacttttcacatagtgttacaattacctgaccaaagaatacaaactttttgtctcttgacgtatatttccaaaagwtttttaaaaggtgcattaatttactctgcagctggtgtaaatgaagaccattttgtcattgttttcttgagagtagagcttccaaaagtagggatatgtggctaggaggaagaaatccagcctggggcaggcattctgtaaagaactccagtt

SEQ ID NO: 244817 - DNA, 577 bp, Homo sapiens
tgcagtggccagggtaaacatccaaggcaccagtgaaaaatacagagaaggtaaaaggagcaagagttctgaagatggaacctgggatgggggaaagtttcttcaatctttcctaccaacaagaactccaatttttcactcctataaycgtagaagtagaggtaattaggatcatccagcaaatgcttagaggcaaatatccctggatgaggatgccacagcttattttcattatatttcttcgattacagtgtggtaatgcatgttgtatggaactacatattctttcagaatgaaaggatttagaggtggcaagaatatcagcttgaaatttaaagttttttcataaacaataaacaaatgataattgaaaattcactacatattatcaaagacaaaagttgtatgttctaattcatcatcgttgtattaatctgggcttaatttcatgtacatctcctggacagtgtttttatttgttaattgtttctagaaaaactctaggggtcaggtcagaagcattttaaatgaagaattcctgaaatgaaaaacattgccaaaggtctaagactgaagc

SEQ ID NO: 244818 - DNA, 550 bp, Homo sapiens
aattgaaaattcactacatattatcaaagacaaaagttgtatgttctaattcatcatcgttgtattaatctgggcttaatttcatgtacatctcctggacagtgtttttatttgttaattgtttctagaaaaactctaggggtcaggtcagaagcattttaaatgaagaattcctgaaatgaaaaacattgccaaaggtctaagactgaagctcaatggtctgagattgaatttatatrttattgaaatttccttcatacacattttagcatgatcacagatcctttggtaaaggaggtgagaatacatacctgagtcttgagtatgcatatagaagttacccaggcatcaactgaggggccctgtgctttgagacatatataaaaatgtggtttgagtcccccatcatatgtcaatgtcctccttaagatttcttcaaattctgtggaatttatatttttacttctcttttgcttcttgcttcctccttccactaaattcttgctctctctcaccagtatctcatctttctgagctcctctttttttgc

SEQ ID NO: 244819 - DNA, 621 bp, Homo sapiens
tggaaaatgtaataagcctcctgagacctctgccacccagccttataggaggcagtgagcctcctcacatacccagtacacggctactacaaccagcatttgggaaagccaccatacaaagactacccattaccaagaaacgcttatacagactcgttgccactgaaagcacccagaaccaaatccaaaggaccttacacaacataaactatagacatctcctcagatgaggaaaaaagtcacatccaaataaaagcaaatttaaaaaaaaataagaagagatagcttatctggatgagaaggaaccagagaaataactcggaatgtatgaataaaatagagtgctacaacacccccaaaggatcacactaactctccagtaatggattctaaccaagatgaaatatttgaaatatcaggtaaagagctcaaaatattgatttttaaaaagctcaatgagatccaagaaaaaattgaaaaccaacayaaagaaaacaattcaggacatgcaagaagagatagataccactaaaataaaagaaacggacatttaaaaattattgaaggaaaaacaaaataaaagtgaaagcttcaacaataggctagaccaagtggaagaaa

SEQ ID NO: 244820 - DNA, 577 bp, Homo sapiens
ctcaatttttagaaaaacttaaaaataattccctctaattttagccagcttgatcacaaataaaattcctttcctaagactgatctcttacaaacttctacaaccttttctctttttcattttggaagaaccaatcattctattttaagatgaagattatgtatttttctttttccataactaaaacacaccttttatgtaagtgtcacttaaccaaaaacacatcatactttatttgcataagaagttgttttaattaccayattagatttttttaaaactcaagcaacattaatttctagtgaaaacctaggatgtaagctattttaaactgcagcattcaattttgaactatcagcattttgtagataaaaagtattttatatattttagagacatatttcctcctaacacaatttttatagtttttactagacccagatatatttagcttctctatactatataaaaacaagaagtcaaagtacataaacttgaacatgtttaataattaatgtctcaatattttaacttaaaaatgactcagacatttaatgagtatttattaaattaacat

SEQ ID NO: 244821 - DNA, 499 bp, Homo sapiens
taaatgctttaggacaagatggccgggaaaatcactgtaaacagaggcaagactggctatgtgaatttaaagcaaggctttcttcattgtaagagtttctagtgacacaatcctttctctattccagaggaagtacagagaggtggagagagtcaaacagccttacaaatggagatttcatttacggatggaagtgtgtctctttatcctttataccttgcctactgtatagatataagtgtaaacacttacagaagtgtttcgaaatagccagctaaataccaaaaaggtgtattttgaaggtgtgttagttcawtaggtggtctttttaacttagcttctgtttcttggctaaaattactaagttaagagtggagctaataaacggagcaaagaaagcattctctatgcctggacaaacataaatgctctgaaaaagaagccagcctactttacctgagggcatacattttataaacactttctccagctttttttt

SEQ ID NO: 244822 - DNA, 558 bp, Homo sapiens
ctattcaaaattttaattgtcaatggccagaagatggatccttttaattagactcctaaattataaaaaacagaaaacccacaatgattttagagatctcttattttaaacaactgaaagaaagaccaaatttttagaaaagacataataatgacatggctagccttaaaaattaccttggccaaattraagagcactaatctgatctaaaactaagttaaaattatttgtaagctcagaccacctgctttagattctctgtgggattaataatgaaggcagttcccaccttgtagtctggtaattgccagattacatgacatgagtttgattccctgtcagggaaccagttcttttggtttgatatttgtgtgacttttgactttttggcatacccattcatctctctggagatgcctcctgtgtctttggttaagtcataactttggttaaggcttattagtttcactcgggaggtacttttggttaaaaaattcaaaagccagaaatacaagctgttggtcttgactaaaatatgatattaagaaattaaaaaaa

SEQ ID NO: 244823 - DNA, 639 bp, Homo sapiens
cagcagggccacttgagccctggagtctagaggctgtagtgcattaygatcatgcctgtggtagccacaacctgggcaacttagtgagatcccatctcttaaaaagaatattaagccaccaccattattctatgggaaatctggaaatgtctgtctttctgttgatttgtaaatctcctttatacataaagaggattagccagatatcacaaatagtactctttctgcttatctttttctttctttttcttttttttgaaacaaggtctggctctgtcgcccaggatggaatacagtggtataatcttggctgattgcaacctccacttctcaggctcaagccatcctcccacttcagcctccgaagtagctagaactgcaggtgcaccaccatcacgcccgctcatgtttgtatttttttgtagagatagaggtctcgccatgttgcccaggctggtctctaactcctaggttcaagtgatccattcatctcggcctccctaagtgctgggattacagatgtaggccaccacaaccagttactctgcttattgtttccttgtaaaattatgctaataatttaacacatcagacttttaaacttatttgtcaaattactgtcagatgtcaaattaatgg

SEQ ID NO: 244824 - DNA, 639 bp, Homo sapiens
cagcagggccacttgagccctggagtctagaggctgtagtgcattatgatcatgcctgtggtagccacaacctgggcaacttagtgagatcccatctcttaaaaagaatattaagccaccaccattattctatgggaaatctggaaatgtctrtctttctgttgatttgtaaatctcctttatacataaagaggattagccagatatcacaaatagtactctttctgcttatctttttctttctttttcttttttttgaaacaaggtctggctctgtcgcccaggatggaatacagtggtataatcttggctgattgcaacctccacttctcaggctcaagccatcctcccacttcagcctccgaagtagctagaactgcaggtgcaccaccatcacgcccgctcatgtttgtatttttttgtagagatagaggtctcgccatgttgcccaggctggtctctaactcctaggttcaagtgatccattcatctcggcctccctaagtgctgggattacagatgtaggccaccacaaccagttactctgcttattgtttccttgtaaaattatgctaataatttaacacatcagacttttaaacttatttgtcaaattactgtcagatgtcaaattaatgg

SEQ ID NO: 244825 - DNA, 522 bp, Homo sapiens
ttttagcaaaaaattgcaaacaactaaatgccaaaattagagagtggataaatgaattatgttgtggtmaaataggactttatgtagctgttaaaagtcagactattgaaagtcatttaatgacatgaatagtgtttattgtataagtttaagaatatagcatatagacactaagtgaaaaatctgaaaagaaaatcaagaaaataattttatttccaacagaataacaaagagtaaaatacttggtaataaacttaacaagaaggaaaagctacaaagcattgctgaaagaaattaaggaagacatgagtaaatgaaaagatactctatgtatgaactggaagacaatatttgtaagtcgacggtaatacccaaagtgatctgttcagtcaatgagatccttattaaaatcccaatgaaattttttgcagaaataggaaagcctatcttaaaatttacatggaatctgaaagaaccctgaaaagcctaataatttgaaaaagaagaaagatattggagaat

SEQ ID NO: 244826 - DNA, 607 bp, Homo sapiens
atactacattttctttatccattcatctgytgatggacacttaggttgcttccagatctaagtggtgcaataaacttgggagtgcagatatttcttcgatattctgatttcctttcattggggcatatacctagcagtgggattactggattgtatggtagctctatttttagttttctgaggaacctccagactgttctccatagtggttgtattaatttacattaccaccaacagtgttggagtgttcctttttctccacatcctcaccagcatttgttattgcctgcgttttggatataagccattttaactggggtgagatgttatctcattatagttttgatttctatttatcggttgatcaatgattttgagcaccttttcatatgtctgtttgccatttgtatgtcttcttttgagaaatgtctattcaaatattttgcacattttaaaattggttttatgagattctttttcctatttagtgacctgagcttctgcaagttgtctcttcactttgtttcctttgctatgcagtttttaaaacactgtagcattattctcaatagtcaaaaggtagaaacatcccaactacccatcaaca

SEQ ID NO: 244827 - DNA, 607 bp, Homo sapiens
atactacattttctttatccattcatctgctgatggacacttaggttgcttccagatctaagtggtgcaataaacttgggagtgcagatatttcttcgatattctgatttcctttcattggggcatatacctagcagtgggattactggattgtatggtagctctatttttagttttctgaggaacctccagactgttctccatagtggttgtattaatttacattaccaccaacagtgttggagtgttcctttttctccacatcctcaccagcatttgttattgcctgcgttttggatataagccattttaactggggtgagatgttatctcattatagttttgatttctrtttatcggttgatcaatgattttgagcaccttttcatatgtctgtttgccatttgtatgtcttcttttgagaaatgtctattcaaatattttgcacattttaaaattggttttatgagattctttttcctatttagtgacctgagcttctgcaagttgtctcttcactttgtttcctttgctatgcagtttttaaaacactgtagcattattctcaatagtcaaaaggtagaaacatcccaactacccatcaaca

SEQ ID NO: 244828 - DNA, 543 bp, Homo sapiens
aatttttattgttctattttgcagtttactgattcttcttctgccctctttattctgctgttgaatctacccattgaggttttgtaatttggttgctgtattatttaattctaaattgttcatttggttcttttttatgtcttccctttattgctgagatcttattcttttgcatttgtttcaagtgtgtttgtaattactcattaagcattttttatgatggctgctttaaaatccttgtgagataatgttaacttccatataatcttagwgttgtcatctgttaattgtcttttgtcattcaagttgggatttttcttgttcttagtgtgaaagtgatttcctattgtattctggacatcctggctattatgttacaagattgttgatcttatttaaatattctgttttagaagtcttcctctgacactagagaggtggagaaagaggtctgtctccctttgttcctgccaggtgtggtgaaagttcaggttctcctttgggcctccattaccaccccaggagtgggggaagttcctggtt

SEQ ID NO: 244829 - DNA, 589 bp, Homo sapiens
agctggggagagatgagaacctgggagacaggaccagagaaccacaaacttttttttttttttttttttttacttttatcttggcagataaaataggggaaacacagcagagaggccactagctagaaatacatgaagaaagaatttgctgaattcctgtcctctgagtaaatggaaaaggaagaactccatcattggaagcaccaatttactcaacacttatgacatgccagccttagtactaagtacttaacatatatgacctcatttaacctttaaaaagcatggatcatcattaatcccattttaaagatgaaataactgagtttcagaaaagttaagtaactgtcagtctcttagcttagaaaaaagcagcaagttgggacttaaatgtaactttatgagcttctaagcccctactcttagccattttcttacaytgacttccagcggagatggtaagggcagaggtttggaaatgtttcctgggaagagtgggtaagggaggtaacccaatccagtgaccagcctggagcgggacaccccaccttgctgcaacattgcagtgtgtgtgtgtgtgtgtgtgtgt

SEQ ID NO: 244830 - DNA, 470 bp, Homo sapiens
gcatgaatcattcatcttttgccccattgaaatcttagagtcctggccccaagataaaaatgggtccaatttttttttatttctttttctctagccttatttgtgctgttggctttgctcacagtctgtccagttcatattgtttccaggagagragaagaagtcagcaatgggaaatggacttttcttaggtcctctggagtttttcaggctggagttcatcaatgagataaacggctttctaatccctttgtattataccttttatctttttctttgtgaaatattttgtcagattctattagatacgaggtcatgtttcctgttttcaagatgtttgaaatctaagggaacaaagagaaaaatggagtatgatgtgcatcttcagactgagataaatggtaataagatggtgatatacagagttctcagaggaagaaaactcgctttgagccatagggaacaggaag

SEQ ID NO: 244831 - DNA, 519 bp, Homo sapiens
cacactgacaaaaaccaactgaggtcctgctgcatggaggcctcctcctttagctgtggaacaacctgttaatcagctcagactacagacacataccttgtttttatcactccactttcaggattaaagatttttttttaacccaaacacctttctcatatcccttgcagaaatacagatacctacaaaggcacacactgcatatattcacatgtacgctgtctcaaacacatgttcctctgcacgctcaggcataaacacacatacgctgtttctgtttacawccccaaacagaatcctgattagtttttttaaaatcaagttgattgtggtataagttccatttaggaaaatttgccgttttatggggcatatggtatatttctatgtattttaataagcacattggattagctagggttctccagagaaatagaaccagcagggtatatgtgtgtgtgtgtgcatatatatatatgtgtgtgtgtgtgtgtgtgtatatatatatacacacatata

SEQ ID NO: 244832 - DNA, 512 bp, Homo sapiens
ctttatagctctgtcactgtaactatctgagcctcagtttccatttttgtaaaatgaataccaaatgcttattccacggggttgttttattggatgaatagccagtgctgagcaccaaacctgatgtataggctgtggtcagtgaacgtttccttcttctctcagctgttcaagcccgttcaggcctgggatcaagtgcacacagtgctctcgtagattgagaatgaccaagccagctgaggatttaagaaacagagggaagrtggtgatgtacatgtgctctgtgtgcactcagcacttgtgaaatgcctattgagcaatcaaatgacagaatagtgaactagattaatgaaaaggcaataaaaagagaaactcagcactgttcatacatcaaaatatcattgtgtccctcagtcccacaacaccgggttgatatgaaagcccttatcacaagaatctcttgtactgaaaagacctgggtttgaatcctgcctccactacttacaactgtg

SEQ ID NO: 244833 - DNA, 580 bp, Homo sapiens
agatgtctatctcataaaagtggctatgctatcatttttcttaccatagcatcctatttcttgtctgcatagcacttatcatgagctgatggcttccttccttccgttccttcctcccaccctttcttccttcctcacctccacaatataacctctataaaagcaggcactttgtcttgttcgttattgtgtcttggtgacaataatagatcctggcatgcagaaggcactaaagcaaaatttgttgaatgaataaatatgattttgagtcatggatgctgtcaagacaaaatagccagagaggtatttattgagcacatcttatgtgtcagacattgtaagacaaactatatatatcctatctcatagacatacactagctatagatctcatagatatatgttttgtctcacttggggtctgcaaactgtgtyctatgaatctaaactgttctgctatgcggtgttgtaaataaatattttttggaacatggccaagctcagttgtttaaatattgtccacggctgcttttgtaacacaacacatagtagagcagttgctagagggactgtatggcctg

SEQ ID NO: 244834 - DNA, 580 bp, Homo sapiens
agatgtctatctcataaaagtggctatgctatcatttttcttaccatagcatcctatttcttgtctgcatagcacttatcatgagctgatggcttccttccttccgttccttcctcccaccctttcttccttcctcacctccacaatataacctctataaaagcaggcactttgtcttgttcgttattgtgtcttggtgacaataatagatcctggcatgcagaaggcactaaagcaaaatttgttgaatgaataaatatgattttgagtcatggatgctgtcaagacaaaatagccagagaggtatttattgagcacatcttatgtgtcagacattgtaagacaaactatatatatcctatctcatagacatacactagctatagatctcatagatatatgttttgtctcacttggggtctgcaaactgtgttctatgaatctaawctgttctgctatgcggtgttgtaaataaatattttttggaacatggccaagctcagttgtttaaatattgtccacggctgcttttgtaacacaacacatagtagagcagttgctagagggactgtatggcctg

SEQ ID NO: 244835 - DNA, 580 bp, Homo sapiens
agatgtctatctcataaaagtggctatgctatcatttttcttaccatagcatcctatttcttgtctgcatagcacttatcatgagctgatggcttccttccttccgttccttcctcccaccctttcttccttcctcacctccacaatataacctctataaaagcaggcactttgtcttgttcgttattgtgtcttggtgacaataatagatcctggcatgcagaaggcactaaagcaaaatttgttgaatgaataaatatgattttgagtcatggatgctgtcaagacaaaatagccagagaggtatttattgagcacatcttatgtgtcagacattgtaagacaaactatatatatcctatctcatagacatacactagctatagatctcatagatatatgttttgtctcacttggggtctgcaaactgtgttctatgaatctaaactgttctgctatgcggtgttgtaaataaatattttttggaacatggccaagctcagttgtttaaatattgtccacggctgcttttgtaacacaacacatagtagarcagttgctagagggactgtatggcctg

SEQ ID NO: 244836 - DNA, 613 bp, Homo sapiens
tattatttaaacactgcaggcagacaacttaggtataaagaattatgcaagaaagtacttgagggaactgaaggactgtctgcgaaaagcatgccaaggacacttcttgtgtgactagargtaaataaagagagatatgcaaggaaagccttgggaggatggattacaaaagggtggagtgcatctttccagtggattccacaaaaattcaatggtgtgaaactggaggctgagagaggaggtcagttaggcaacagtgatagtttgcccatgactctctggaaggtgactgagagatggcagttacactaagaatgaatcagaaagaatcttctgtctttcaccaagtctcagcactggcagaatcagggcaaaatctgtgggagtggtgagctttggagagagtctgccaacatgttcagagccatttcaggagagcagggaaatgggaggttgccactatggttcagcacacactgacagtgtctcttttgtgcccagagaggcactaatcctaaaatcaagccactgaattggaatccccaccatgccactcaccatctatgtactttgggcaggttacctaacctctctgtgcctctttttattttca

SEQ ID NO: 244837 - DNA, 613 bp, Homo sapiens
tattatttaaacactgcaggcagacaacttaggtataaagaattatgcaagaaagtacttgagggaactgaaggactgtctgcgaaaagcatgccaaggacacttcttgtgtgactagaggtaaataaagagagatatgcaaggaaagccttgggaggatggattacaaaagggtggagtgcatctttccagtggattccacaaaaattcaatggtgtgaaactggaggctgagagaggaggtcagttaggcaacagygatagtttgcccatgactctctggaaggtgactgagagatggcagttacactaagaatgaatcagaaagaatcttctgtctttcaccaagtctcagcactggcagaatcagggcaaaatctgtgggagtggtgagctttggagagagtctgccaacatgttcagagccatttcaggagagcagggaaatgggaggttgccactatggttcagcacacactgacagtgtctcttttgtgcccagagaggcactaatcctaaaatcaagccactgaattggaatccccaccatgccactcaccatctatgtactttgggcaggttacctaacctctctgtgcctctttttattttca

SEQ ID NO: 244838 - DNA, 486 bp, Homo sapiens
cccctaatctgcctttatgctcagtgaccagtaaatgcaggtccccccgtaagtatttattgtaagtgagtgtttagrgaggataatagttttacagtaaaatttaaatttaatataattctaggtgcaccttgctgatttctaaattgtttcatatatcacatcctcaagctggcctgggattagttgatttactgatgacacttttcaaaccaataaatggagtgataataaaacaccaccagtaaaattggaacatttctcattctgttccaatctttagtccccaaaacaaaccctggtccaattatgagtatagataaactccaggacagatatagctaagattacattgaggggaagatccccgccttccaccagtccaggatatcaatcctcagaaggactactgctgatacgtatccacatttcccacatgggccagaagtgttaccattcagcagagccaatttatgcatggcagtc

SEQ ID NO: 244839 - DNA, 317 bp, Homo sapiens
tgctgcttaacagcagaagctagatgcctatccatcataccaaagtgctttgaacataagtgttgtcaaaatccatctctcccaatggatcctaaaagatacgttttcatttgtttagatgwtgaagaggaaattcattcttttaaaaactctttgtcatttctatttcccccttttatcttaagatgctccagctgcttcccatattatgttccaccactatgttttccttttattttaacatgcaccacttcaatttccgaaaacacagtgtaatttatcaatcaataaataaatctggacagaaacacaaagca

SEQ ID NO: 244840 - DNA, 540 bp, Homo sapiens
ggagctcacaactctttgatcctttctgacattttgtgctattatagtcatgtcttttaattctacatttatttaagccctcacaagatattattattattatcactgaaaatatatttattcaatctgcccacgttcctcctgtgcttgtgacacccattccattctgccttagcttgcttgataagctccttttaatatttcttttggtacacttctactgcaatgaatggctttagtttttgctgaacaaaaaaaatttatttctattctgtaaccatgtcattatcttgtctggtggcttctgttktttctattaaaaattcaaatgttagtcttattgctgctctcagaagtcatgcgtctttcttacctggctgcttttaagatttttttctttttcttttgaatttagcaatgttattatgaggtgcctcggtgtatttatcctggttgggtttaaagagattctggaatctgtagctttatatttttcatttatttcagacaactctttgtctttttttttttttttgctta

SEQ ID NO: 244841 - DNA, 621 bp, Homo sapiens
gctgtggttttctattaacttttactattgtgtttagtaacatgagagcatcaactgaatttcatccatatttctccctagccatagtgtgcaaaagcatctctatattttctagataactatgatcaataattgcaggtaatactgtaagctttttttatgtccgtttacttaatggcatgaagtataccaaattcaatggaatcactgaatcttccaactcaatgaatcattactgagtcttttaatagaagcattactggctggktgtggtggctcacgactgtaatcctgacactttgggaagctgaggtgggtggatcacttgaggccaggaattcgagaccagcctggccaacatggtgaaaccctgtctctacaaaaaatacaaaaattagctgagcatggtgtcaggcatctgtaatcccggctagttgggagcctgagaaaggagaattgcttgaacctaggaggcagaggttgcagttagttgagattgcaccactgtactccaacctgagtgacagagagagactccatcttaaaaaaaaaaagcagtaaaacatggaagcattactcttttaatgattttgttgatgtaacagaccagagtaaccattg

SEQ ID NO: 244842 - DNA, 537 bp, Homo sapiens
taatattaagtgcaaaagcaagctactaaatgtcataaactataaaatcatgattatggtaacatgtatttaagaracaggcaggaaatctattaaaatattaacctatcaactaaaagagtaatcttggggagggagacttacagtttttatatttattttgcttcctatattttctagtttttctacaatgaacatgtattgcctttatagttcagcaaatttacttttcttttttcttttggttaagcagtctcagaaggaatcattttctttccacctacaatgttagatccacctgaatgaaatacgcctttcattgcgtcctgagaagacggaagaatcataaaaagccttcagaagcccttgaggaattttgagggcagtaaaagcaaagactgtaaaccgaagaaaaatacacaaagatgtaagagcagtaagagcaaagtggggacaagggatattgagtatctgaagggaaaaataagaagcatagcctatcctggaaaagaaaagaaacgtcatggtaaaaaaaca

SEQ ID NO: 244843 - DNA, 668 bp, Homo sapiens
ttggcaattacacgcacttgtgtaacctcaatgaacattcagatacagaatctaagtcctccatatgtaagatttcccttctttaattttgtaatgacctccggggcaggttaagctacaactttaagtatagtctggagatggtgagaggtgggtatgggttgcagtatgaggagatttgactttctctcatttggtaacaactcaggcaagggaagccmcatcagtcaagcagaggggctgcttcagccggcaaagggttcagaattgtcgattagagttctccagtttcccgaagttctccattaagtccaattctttcacagagagattttgagaagctgctgatgttataattcagcaatatacaagatctaacttgaatggtattcagctacctgagctctatagctgcaaccattgaaacgattttagcaagactaaggtacttttggattagagtccatgccttgaactcagaatttaagagtgtgagcttcaagctgttcagaactattagatacagacatcatacttactgagcttgaattctttattctctttatgagattacatgatagtacaacttgacattttaaaattttgctaaaataacttttaaaataatgtggtgcatctcacatattctaatttgacatcctacgttt

SEQ ID NO: 244844 - DNA, 591 bp, Homo sapiens
aaattaacagaaattgaaacttgacaattcaagacaatactaatcatatgatgaaaataaatcactatttttaggtattaagggaattccaattttctgtgtttgtttaaattgtgatttcactgaatatcttaccaaaattcaaatagttctcaattatgtctttttaattttaataacctttactatctcacttaacrtataacatgtaaggcatttttttcttactgttaaagtgaaaatttgtgaaattgtgactcccttaccctaaatatacccagccacatcttgagaattattaatctatttgattgtactaagttgtgctgattctgtacaggtatctgtgtagtgttcatgtgattaagacaaccaagacagctgccagtgctcacaggaaggtgagacaaaagaaggagtgagacaaaagagagactaagggctgggagttgtcacaggtgattagaggcagtaatgggcactcttctgccagagagggacagggaggaaaaggcgctttgtagaagcagtgttggttgaggcagcaatctatcctagagcatgatatagatgtgctagcttacctgcccc

SEQ ID NO: 244845 - DNA, 546 bp, Homo sapiens
ttgtttgacaattgtgttattcatgtttatccattacttkccccaaacaagcctcatcctctgcaaaggcagccacttcctgaagaggtcctaagcttgcctcaacccagcgaaaagactgaaagaccccatcctcttgtccctgacagatgcaggatgccactgccctggcttcaggccgcaaaatgaatgatgctacttacattgagctttccactctaattggaggagaaagacaataacaaataattgggtaattttagataaagttctatgaagaatgtaacagaatacaaagggggactttggcaggagaaggaagcttgttgagaaagcagttagaaaaaaattatgtaaaacgacatttgagtagaaacttgaatgacaaaaataattcagggaaaaggctttcagtaagaaatgttgaattgaaaaatcttaaagcagaaatgagcctgagaagttccaggatgagaaaggtgatcatgatggctgggagcacagggagttatgtggaagtggtgtcacataaggtcatatagggtt

SEQ ID NO: 244846 - DNA, 494 bp, Homo sapiens
ctctacttatttttcatttccaatgcttttgatttttttttaatgtagatctcagttttcatgtcgtggcatttcctttcagcctcaggatttcctttagaatttattttagcacaggtctaatggtgatgaatgattttagattttgtttatctaaaatgtatttatttctcctctactttttgaaatatatttttctggattcagaattgtaagtacacaatttttttcttctcctgtactttttgaaagatattttcctggatacagaagtctacgtagaaattttttttcttctctttcagtactttgaagatgtcattccattatttactggyttacattgtttttattaaaaagtcagcagtaattcttagcattgtgcccctgtatgtagcatattttttcctcaagttatttttaagatattattttctctttattttaagaatctgttatttatcttttattttaaacaagttgactatcatgtg

SEQ ID NO: 244847 - DNA, 617 bp, Homo sapiens
ttaattgcagcattacactgggacacatgtacttctatttctgtaacatatcactcatcatttcactcagataaaggaaatattaaacattttatcagatggrgaattcctggggtcacactgtagcagatgagttgggattggtataccttctccaagcttcctattagttacacacgcacacacacacacacatgcacgcacacacacacacactccagtttggaatctgtctagccaagaccacagtgcaagatgttaaaagcactccacttgctttgggcatatgccaggcctgaatgagtctcttaccattgggaaaacgatctatatttaaatttttctagatactatctattaaaattattctatattaccaaagaatggaaatattttccggaaagttcagagtagcaacatattccttaagcatgtttccacttcaaaagataaaaagtttagaagacatctccatgtcctcaaaaagaagtaagaaaacattataattattgattaaaagctgggagccctagaaagaaaccttggagatgaatgacaaggatacaaaaggatttgtcaaaatgagaaaagaagacaaggaaactcaagtacagcta

SEQ ID NO: 244848 - DNA, 547 bp, Homo sapiens
cagctgctggacataaccccaagaatttctaattcagtggttttggggtgggggccaaaaatttgcttttcattttttaaagttagataaaattcacacaccataaagtttactatttaaagtgttcaattatttatagagttgtgcaagcatcatccattattatctaattccagaacatttgtatcgccacacaaggaaaccctgtacctatttgtggtcacttcctattctcccctccccacctccagcccctggcaaccactgattgactttttatgtctatagatttgactaccctgaacacttcatagaaaaggtatcgtacatgtggttttttgtgtctagcttccttcacttagcataaggttttcaagattattctcattttagtatgcatcagtacctcattcctttttatggatgactaatgttccattgtrtggatatactacattttgtttattcattcattaattgatgaatatttgtgttatttcagtggtttggtttttgtgaataatgtctccatgaacatgttttcaat

SEQ ID NO: 244849 - DNA, 433 bp, Homo sapiens
tcaaaatcgagttcctgatcttttcctgcggacctgcaccacccacagccttctctgtctcagggacggtaactccagttgtcagttgctgaggccagaatcttagaaataatccttgactttttattctctcactctttacatccaatctgtcaggaaattttcatgcctctcacttgaaatttatccagcatctaaccacttatcacttctccaactcttatcaacctggtataaggcacttaccacagtttgttgctccaaagctctctgttttacattgtcarcaacagtccttacaatgatctacaaggcccaatctgggtgaattcttcatccccccgtcttagcatgtctcctcctctctgactttcttatgccacaacagccccactggccttcttgctgttcttctgacatgccaagcacactt

SEQ ID NO: 244850 - DNA, 649 bp, Homo sapiens
tgcaacatcacaccttcccaggggtgaggtcatcaagggcatctgggtgttaaatgtttgatgttaacaagagggacaccccctcttctggctggtgtccaccgattgttctagacaccatgaacttttgtttcatgcaggtagaaaacagccatcaagagctaaaatttgagcccttacaagaatctttttactacccagcacaatgtggtaataatattcccayttctcaggcccttttccttcaagtgaataagatttcctctctattctagaggagccatgctactgcctctcttcatttgattactgtgggaaatcccccagcagcttattccaagttcactgcgcagccctctgattcctgaaaggcataatttggcctaacttgatatatatactatatatcatcacttacagtaatgtttgtcccataatagtaatactactactaataataataataattgctaacagtgagtgagcactcaccatgggtactataaatttatattaacttaattaactccaagttatttgttgttacttaaattctcttataatctattgatcaaacaattgagttgctttgttcctaaaagctacaaaaatatatagtaatgtagtataaaatctattttcataaaga

SEQ ID NO: 244851 - DNA, 538 bp, Homo sapiens
cttgccgtagaaatctgcaattgatttccaatcaatggaattgacatttattcattttgtaatgtaaatattctctaaaggagagggaattttatactaaaatatttctgtacaaagattaataataaagaaacctccttggagcctcagtttgcctcttaaaagtttgtagatattttctggacttgccttatctggtcatcagtgatgactatcacataaaaaatccggctggacgtggtggctcaygcctgtaatcctagcactttgggaggccaaggcgggcagatcacgaggtcagtagttcaagaccggcctggccaacatggtgaaaccccgtctctactaaaaacacaaaaataaattagtcgggcgtggtggcacgtgcctgtaatcccagctactccagaggctgagcaggagaattgcttaaacccgggaggcagaggctgcagtgagccaagatcgcatccctgcatcttagcctgggcgacagaggaagactctgtctctgggtttaggggcgggggaggaatcc

SEQ ID NO: 244852 - DNA, 544 bp, Homo sapiens
ggtttatgactgccctgctccttactcttcactcctgccagaagcttctattcaatcctctttgccagactctggcctggcaagcttgagcattagatcctggcttcaaaaataataatcaaagtaaagcgctgacaaattagatattgggttayttcttgttcttgttattgctcatacttgattgaattccacatctgagtctttgaatcttttacccagatacacttgctactgcctgtccaacacacactgaacactgaccttcagttctcctccaaagctctgatctgtcctattctctccattttttacattttccatttctctgacacaaacaatagtccaggtagatacctagaagtattgtgctctgacctcaggcctagacactcttgtacccatcaagctgtctcagattccttcttcactctctgtgccttctgtctatactctcattttgaatgacctcacagtgtagacatgtttattatcttaatggttaagagcatggacttaggagtagggctggctgtgttcaaaa

SEQ ID NO: 244853 - DNA, 404 bp, Homo sapiens
tttagcctggaagcccactgtgagaatttctaaaatactgtaccctgaaaaatgagaatggctcaccgaacaggtcaagtgatttaggtatcacaagctawgacactatcttgtaatgctaattctgtcacatcccaatgcaacagactgtagttttagtagacttaactttggatttaataaggtagataaagtgggtactcttattgaaggtcagtctttctaacatctaatgctaaatattttttctaggcaaaaaaaagggcatcattaccttctttgatctttaaaacatctcctctgactactttgtaaccatcaatttcagaaatggtacacacgtcagagacacaatcacggccagaaaatgggcaaaacagaggatcactacaatgattatcctg

SEQ ID NO: 244854 - DNA, 404 bp, Homo sapiens
tttagcctggaagcccactgtgagaatttctaaaatactgtaccctgaaaaatgagaatggctcaccgaacaggtcaagtgatttaggtatcacaagctaagacactatcttgtaatgctaattctgtcacatcccaatgcaacagactgtagttttagtagacttaactttggatttaataaggtagataaagtgggtactsttattgaaggtcagtctttctaacatctaatgctaaatattttttctaggcaaaaaaaagggcatcattaccttctttgatctttaaaacatctcctctgactactttgtaaccatcaatttcagaaatggtacacacgtcagagacacaatcacggccagaaaatgggcaaaacagaggatcactacaatgattatcctg

SEQ ID NO: 244855 - DNA, 540 bp, Homo sapiens
caagaaaaagatatttttaaaagtataactactagaaaggaagagataaaatcatcatttttgcaaatgatatagcaatttaactagaaaacacaagagactaaaatgaaaatttattaaaactgattttttaagttcagtaaaatggcacaatgccagagacacaggaatcaacagctttttgcagactaaattaggcagatttctaatttaaaattctctttacaaaagtaagcatctccaaaaatctctctagtgttttccaataaaaatgtaatgtgagtcacatatgtaattttagatamgcccagttgccacattaaaaaaaatacaaaaatatactttatgtaacataataacccaaattattatttcaatatatctaattgatattttttaaatgatttttttcatactgagtcttcaaattctagtggtttttggtagttagttaacctgtttgtgtgtttgcacactaaacagtattatttcacatcttcactaaccacctgtggccagcagctattgtatcagacagag

SEQ ID NO: 244856 - DNA, 468 bp, Homo sapiens
aagtacctcaatgggagctagtaaaattagagcaagaaaactaaaacacctttaagagtatctcaaaagctygtgtagctgtagaaggattaaaactgtgaatttagaggtacaggcaaacagatccaatcccaaaggcatttttgtttgggtgtcccacacattaagctgtaaatctgaaacaggaaacttgaaatcattaaggtcacatatttataacatcatattcaattaggttagaaaagtgcaatatctgtcatcatgtcataaaaatatgtgtttttctctcagatctcttataaagaaaagctccctatattgttaaggatagggctgttttcaatcagttacaaggagcaattcaattactagatggtttagtgcagtaactgactccagactaatttaatttctttaggtctctaaagatcaattgatctgatttgtcccatccccaaaggctgttta

SEQ ID NO: 244857 - DNA, 468 bp, Homo sapiens
aagtacctcaatgggagctagtaaaattagagcaagaaaactaaaacacctttaagagtatctcaaaagctcgtgtagctgtagaaggattaaaaytgtgaatttagaggtacaggcaaacagatccaatcccaaaggcatttttgtttgggtgtcccacacattaagctgtaaatctgaaacaggaaacttgaaatcattaaggtcacatatttataacatcatattcaattaggttagaaaagtgcaatatctgtcatcatgtcataaaaatatgtgtttttctctcagatctcttataaagaaaagctccctatattgttaaggatagggctgttttcaatcagttacaaggagcaattcaattactagatggtttagtgcagtaactgactccagactaatttaatttctttaggtctctaaagatcaattgatctgatttgtcccatccccaaaggctgttta

SEQ ID NO: 244858 - DNA, 468 bp, Homo sapiens
aagtacctcaatgggagctagtaaaattagagcaagaaaactaaaacacctttaagagtatctcaaaagctcgtgtagctgtagaaggattaaaactgtgaatttagaggtacaggcaaacagatccaatccyaaaggcatttttgtttgggtgtcccacacattaagctgtaaatctgaaacaggaaacttgaaatcattaaggtcacatatttataacatcatattcaattaggttagaaaagtgcaatatctgtcatcatgtcataaaaatatgtgtttttctctcagatctcttataaagaaaagctccctatattgttaaggatagggctgttttcaatcagttacaaggagcaattcaattactagatggtttagtgcagtaactgactccagactaatttaatttctttaggtctctaaagatcaattgatctgatttgtcccatccccaaaggctgttta

SEQ ID NO: 244859 - DNA, 568 bp, Homo sapiens
cctggcctcccgaagtgctgggattacaggcrtgtgccaccgcacctggccaaaaatgcattaattttaaatgtgatgtacaacagagagtaaaaagcataggttgagtatcccttatctgaaatgcttggaaccaaaagtattttggatctcggattttctcagatttgggaattttgcattatgcttacaggttaagcatccttaatccacaaatctaaaatctgaaatgctccagtgagcatttcctttgagtgtcatgtcaatgttcaaaaacgtttcagattttggagcattcagattttgggtttttggattagggatactcaccctgcatataactcaataatataaattagatatcttgatgttacatactatggtttactatctaaaaagacatttaaaatcattttaccagaattatctcaccctaaattatagctgaataaaccttacaaaatatctaaagtatcagcagtttgggcagttggatagaataggtgtgtttaattgagcagagaaactgaacttttaaattttatgaagcaacaagaacatggttata

SEQ ID NO: 244860 - DNA, 568 bp, Homo sapiens
cctggcctcccgaagtgctgggattacaggcatgtgccaccrcacctggccaaaaatgcattaattttaaatgtgatgtacaacagagagtaaaaagcataggttgagtatcccttatctgaaatgcttggaaccaaaagtattttggatctcggattttctcagatttgggaattttgcattatgcttacaggttaagcatccttaatccacaaatctaaaatctgaaatgctccagtgagcatttcctttgagtgtcatgtcaatgttcaaaaacgtttcagattttggagcattcagattttgggtttttggattagggatactcaccctgcatataactcaataatataaattagatatcttgatgttacatactatggtttactatctaaaaagacatttaaaatcattttaccagaattatctcaccctaaattatagctgaataaaccttacaaaatatctaaagtatcagcagtttgggcagttggatagaataggtgtgtttaattgagcagagaaactgaacttttaaattttatgaagcaacaagaacatggttata

SEQ ID NO: 244861 - DNA, 568 bp, Homo sapiens
cctggcctcccgaagtgctgggattacaggcatgtgccaccgcacctggccaaaaatgcattaattttaaatgtgatgtacaacagagagtaaaaagcataggttgagtatcccttatctgaaatgcttggaaccaaaagtattttggatctcggattttctcagatttgggaattttgcattatrcttacaggttaagcatccttaatccacaaatctaaaatctgaaatgctccagtgagcatttcctttgagtgtcatgtcaatgttcaaaaacgtttcagattttggagcattcagattttgggtttttggattagggatactcaccctgcatataactcaataatataaattagatatcttgatgttacatactatggtttactatctaaaaagacatttaaaatcattttaccagaattatctcaccctaaattatagctgaataaaccttacaaaatatctaaagtatcagcagtttgggcagttggatagaataggtgtgtttaattgagcagagaaactgaacttttaaattttatgaagcaacaagaacatggttata

SEQ ID NO: 244862 - DNA, 625 bp, Homo sapiens
taataattatacaaaattcaaacatcagtgtccaaaaataaaattttatgggagggattggcaaaccttttctttaaagggccggatagtaaatatttaggttttgcaagccatatgatttctgtcactattgtcygcctctgtctttgtaacataaaagcagccatagacaatatgtaaacaaatgaatatagctgtgttctgataaaatttaatttgtcacatagaaatgtaaatttcatataacattcaaatattacaaggtattagtcttcttttgatgttttttcagccatttaaaaatgcaacaacatttcttggctagtaacctgcacaaaaacaggtgagtggccagacttggcctgcatgggccatgctttgcagactcctgttgtattgcctgccttggcaacacagtggcaaagctgagtagctgtgacagagaccacatggcctacaaagcctgaaatatttaaatatttactagttggccttttacagaaaatgtttgctgactctgactctagaagggttcttttaaactgtaatttacatgcaaagcacctggggatcttgttaaaatgtagactaagtctgggtcagtccagagattctgcatttcaac

SEQ ID NO: 244863 - DNA, 625 bp, Homo sapiens
taataattatacaaaattcaaacatcagtgtccaaaaataaaattttatgggagggattggcaaaccttttctttaaagggccggatagtaaatatttaggttttgcaagccatatgatttctgtcactattgtctgcctctgtctttgtaacrtaaaagcagccatagacaatatgtaaacaaatgaatatagctgtgttctgataaaatttaatttgtcacatagaaatgtaaatttcatataacattcaaatattacaaggtattagtcttcttttgatgttttttcagccatttaaaaatgcaacaacatttcttggctagtaacctgcacaaaaacaggtgagtggccagacttggcctgcatgggccatgctttgcagactcctgttgtattgcctgccttggcaacacagtggcaaagctgagtagctgtgacagagaccacatggcctacaaagcctgaaatatttaaatatttactagttggccttttacagaaaatgtttgctgactctgactctagaagggttcttttaaactgtaatttacatgcaaagcacctggggatcttgttaaaatgtagactaagtctgggtcagtccagagattctgcatttcaac

SEQ ID NO: 244864 - DNA, 604 bp, Homo sapiens
gcatttttactaccaaacaaggtgaatgaacttgtctttcatttacaccaaaatgttctactgtttttcaccagcatgttcctgaacatctgaaactggcaggaattatgaattttcatgggatttatcttccacctgctagaatgtctatgtcttactaaggcagctaagatacttacacttattgcccgccaggtccagtcaacttggtattatcaatatcatggggcagcatgatgttctctggagtgtcaaaatgatcagggacctagtggacaatattatgatggagagcaggagagttctcatggccctgaggaaagacagtgaagttatactcttgctcctaccaagtgaaagctaattgtgtcttgctmtgataccaaaaccagacaaggaaactacaaaaaaagaaaactgcagactaatactcctgatgaacatagatgtaataatcttcaacaaaatactagcaaaccaaaatccaacagcatatcaaaaagataatacaccatgatcaaatgggattcataccagggatgtaaggatggttcaatatataaatcataaacatgattcaacagaatgaaggggaaaaaataca

SEQ ID NO: 244865 - DNA, 604 bp, Homo sapiens
gcatttttactaccaaacaaggtgaatgaacttgtctttcatttacaccaaaatgttctactgtttttcaccagcatgttcctgaacatctgaaactggcaggaattatgaattttcatgggatttatcttccacctgctagaatgtctatgtcttactaaggcagctaagatacttacacttattgcccgccaggtccagtcaacttggtattatcaatatcatggggcagcatgatgttctctggagtgtcaaaatgatcagggacctagtggacaatattatgatggagagcaggagagttctcatggccctgaggaaagacagtgaagttatactcttgctcctaccaagtgaaagctaattgtgtcttgctctgataccaaaaccagacaaggaaactacaaaaaaagaaaactgcagactaatactcctgatgaacatagatgtaataatcttcaacaaaatactagcaaaccaaaatccaacagcatatcaaaaagataatacaccatgatcaaatgggattcataccagggatgyaaggatggttcaatatataaatcataaacatgattcaacagaatgaaggggaaaaaataca

SEQ ID NO: 244866 - DNA, 597 bp, Homo sapiens
atcatgcacaaaaaaagaaaaaagttattcattgaaaaaaatcacactatgctacattttcagaagaggtttgcacttggactagaaaacacaaaataattaatagatgaaaaaatgcctwtataaatatccaaagcttctttaaaaagataacaaacatgaaagtcaaatatttcagctaatgaaatccacaccactgaacgataaaatctcacaaaacagaagaaaattatgcagaattaaaagttgaactaaatatcctcaaacgagcattcagaaatattaaaaaagcaatttaaacaagaaattcaaaaaccaagaacagaaatggggaaaaaagcagaaagaaagaaatagtttattagacatagaaagggaatggaagaaaaggagaatactatcaaaaaaaaaaaataaaaactgaatcacaagatgataaaaagaaaaattcaaataatgaaggaattgaagtaaaggcactaaaacaatgatgaagaatgaaaatgataccagagaaagaagtgagaagtaccagagaaagaagtgagaagtatcagagaaagtggtagaaatagaagaaaggcacataattataac

SEQ ID NO: 244867 - DNA, 597 bp, Homo sapiens
atcatgcacaaaaaaagaaaaaagttattcattgaaaaaaatcacactatgctacattttcagaagaggtttgcacttggactagaaaacacaaaataattaatagatgaaaaaatgcctatataaatatccaaagcttctttaaaaagataacaaacatgaaartcaaatatttcagctaatgaaatccacaccactgaacgataaaatctcacaaaacagaagaaaattatgcagaattaaaagttgaactaaatatcctcaaacgagcattcagaaatattaaaaaagcaatttaaacaagaaattcaaaaaccaagaacagaaatggggaaaaaagcagaaagaaagaaatagtttattagacatagaaagggaatggaagaaaaggagaatactatcaaaaaaaaaaaataaaaactgaatcacaagatgataaaaagaaaaattcaaataatgaaggaattgaagtaaaggcactaaaacaatgatgaagaatgaaaatgataccagagaaagaagtgagaagtaccagagaaagaagtgagaagtatcagagaaagtggtagaaatagaagaaaggcacataattataac

SEQ ID NO: 244868 - DNA, 597 bp, Homo sapiens
atcatgcacaaaaaaagaaaaaagttattcattgaaaaaaatcacactatgctacattttcagaagaggtttgcacttggactagaaaacacaaaataattaatagatgaaaaaatgcctatataaatatccaaagcttctttaaaaagataacaaacatgaaagtcaaatatttcagctaatgaaatccacaccactgaaygataaaatctcacaaaacagaagaaaattatgcagaattaaaagttgaactaaatatcctcaaacgagcattcagaaatattaaaaaagcaatttaaacaagaaattcaaaaaccaagaacagaaatggggaaaaaagcagaaagaaagaaatagtttattagacatagaaagggaatggaagaaaaggagaatactatcaaaaaaaaaaaataaaaactgaatcacaagatgataaaaagaaaaattcaaataatgaaggaattgaagtaaaggcactaaaacaatgatgaagaatgaaaatgataccagagaaagaagtgagaagtaccagagaaagaagtgagaagtatcagagaaagtggtagaaatagaagaaaggcacataattataac

SEQ ID NO: 244869 - DNA, 597 bp, Homo sapiens
atcatgcacaaaaaaagaaaaaagttattcattgaaaaaaatcacactatgctacattttcagaagaggtttgcacttggactagaaaacacaaaataattaatagatgaaaaaatgcctatataaatatccaaagcttctttaaaaagataacaaacatgaaagtcaaatatttcagctaatgaaatccacaccactgaacgataaaatctcacaaaacagaagaaaattatgcagaattaaaagttgaactaaatatcctcaaacgagcattcagaaatattaaaaaagcaatttaaacaagaaattcaaaaaccaagaacagaaatggggaaaaaagcagaaagaaagaaatagtttattagacatagaaagggaatggaagaaaaggagaatactatcaaaaaaaaaaaataaaaactgaatcacaagatgataaaaagaaaaattcaaataatgaaggaattgaagtaaaggcactaaaacaatgatgaagaatgaaaatgataccagagaaagaagtgrgaagtaccagagaaagaagtgagaagtatcagagaaagtggtagaaatagaagaaaggcacataattataac

SEQ ID NO: 244870 - DNA, 573 bp, Homo sapiens
gctctttcctgggctgcctagtcctagcagggcatctgttagatccctgctgctgctacctgcatgggcagccttcttggagggaatagtagataccagacccacagcatggagagcatttccctggaccctctttctgagtgtcttctgccactggatggagtttcaggagatggcagcctgtagtgtttttctgtgagttctgaggtacctaactagtctgcctttctatagcattaggctgggattggagctataattatgaaatmattatttcatacacacacacacgtggcacatacgtgcagtgaaagggcctagaaacaaggacacactggtagtaatgagtgcacataccactcaggtcttggtttccaaataccattctcctctaaaaggaaccagggctccttggaaaaatggctgattccaaggctagcacgaggaaaatcaagaaaagcctggagcattataaatttataaagacatgtcaaaaagacatccagcttaggaacattcaaaatggctaggcctggaactgatatttgtgtataacatctggtttttttcata

SEQ ID NO: 244871 - DNA, 631 bp, Homo sapiens
taaaaatgggctgtcactgaaaagaaagactaattgcaaaatgataaaatctacattattccattacctttactataatacaacaaaatatagttaactttttaaagtatactaaaaagaacttgaaatacttcattccttgcatgaarcaatcaaaattagagttttaaaattaacattgtaacttaccattaaatattttaaatacaaaagctctttttcctctacatatgcatgacattagaaatttattactccagcaaggaggtcagaaaataggatgcggcgctacccctgcacacctcaacatgcttctcctgtatgtgtagcaacaacttttgtataccaccacttttgtgcttcaaaaaacattgaagagaaatataagtgctgacaaagtaataagttaaaaactatgggaaaaatttaaggaaaaggaatcttaaaaaattaaaaaatcattctagaattcagctgaagcatgtggaagtttaaattgtccattctgcattactgagatgtattgggaaccaataccttttaccacagagaattacagtaacttttagatatgaaaaaagaaacacaaacattttacataaataataaaactgtaactcttccttttata

SEQ ID NO: 244872 - DNA, 631 bp, Homo sapiens
taaaaatgggctgtcactgaaaagaaagactaattgcaaaatgataaaatctacattattccattacctttactataatacaacaaaatatagttaactttttaaagtatactaaaaagaacttgaaatacttcattccttgcatgaaacaatcaaaattagagttttaawattaacattgtaacttaccattaaatattttaaatacaaaagctctttttcctctacatatgcatgacattagaaatttattactccagcaaggaggtcagaaaataggatgcggcgctacccctgcacacctcaacatgcttctcctgtatgtgtagcaacaacttttgtataccaccacttttgtgcttcaaaaaacattgaagagaaatataagtgctgacaaagtaataagttaaaaactatgggaaaaatttaaggaaaaggaatcttaaaaaattaaaaaatcattctagaattcagctgaagcatgtggaagtttaaattgtccattctgcattactgagatgtattgggaaccaataccttttaccacagagaattacagtaacttttagatatgaaaaaagaaacacaaacattttacataaataataaaactgtaactcttccttttata

SEQ ID NO: 244873 - DNA, 631 bp, Homo sapiens
taaaaatgggctgtcactgaaaagaaagactaattgcaaaatgataaaatctacattattccattacctttactataatacaacaaaatatagttaactttttaaagtatactaaaaagaacttgaaatacttcattccttgcatgaaacaatcaaaattagagttttaaaattaacattgtaacttaccattaaatattttaaatacaaaagctctttttcctctacatatgcatgacattagaaatttattactccagcaaggaggtcagaaaataggatgcrgcgctacccctgcacacctcaacatgcttctcctgtatgtgtagcaacaacttttgtataccaccacttttgtgcttcaaaaaacattgaagagaaatataagtgctgacaaagtaataagttaaaaactatgggaaaaatttaaggaaaaggaatcttaaaaaattaaaaaatcattctagaattcagctgaagcatgtggaagtttaaattgtccattctgcattactgagatgtattgggaaccaataccttttaccacagagaattacagtaacttttagatatgaaaaaagaaacacaaacattttacataaataataaaactgtaactcttccttttata

SEQ ID NO: 244874 - DNA, 631 bp, Homo sapiens
taaaaatgggctgtcactgaaaagaaagactaattgcaaaatgataaaatctacattattccattacctttactataatacaacaaaatatagttaactttttaaagtatactaaaaagaacttgaaatacttcattccttgcatgaaacaatcaaaattagagttttaaaattaacattgtaacttaccattaaatattttaaatacaaaagctctttttcctctacatatgcatgacattagaaatttattactccagcaaggaggtcagaaaataggatgcggcgctrcccctgcacacctcaacatgcttctcctgtatgtgtagcaacaacttttgtataccaccacttttgtgcttcaaaaaacattgaagagaaatataagtgctgacaaagtaataagttaaaaactatgggaaaaatttaaggaaaaggaatcttaaaaaattaaaaaatcattctagaattcagctgaagcatgtggaagtttaaattgtccattctgcattactgagatgtattgggaaccaataccttttaccacagagaattacagtaacttttagatatgaaaaaagaaacacaaacattttacataaataataaaactgtaactcttccttttata

SEQ ID NO: 244875 - DNA, 566 bp, Homo sapiens
taagttaatgtctattttgaattcagcattttgcattactgaacagacagcatgatgtaacagaaagmagtgagggagcaggtggcagtgtcttaactgtatccctgctgtcaggcctgaggcctctttcattgttgttaaggggagtgcaatgtatacaaagtttcagttaggcaagatgaataagttctggagatctgctatacaactttgtgttaatactatattgtacacttaaaaatctgttaagagggcagatcatatgttacttattctgaccacaataaaaaagttgaatatatatgttatatatataatatataagtttttataaaatataactataattttataatttataaaatataaattaatatatatgtgaggttttagaggcagacagacatagaatgggaaatccagtttcatcatgtagtaaatgtggaatgtggataagtaacttaactttctctaaattcaaatttcataacttgtatggtgaggctaccaccacccacaaaaaaagtttagtgggaataaatcagataatgtgcataatatgattc

SEQ ID NO: 244876 - DNA, 566 bp, Homo sapiens
taagttaatgtctattttgaattcagcattttgcattactgaacagacagcatgatgtaacagaaagcagtgagggagcaggtggcagtgtcttaactgtrtccctgctgtcaggcctgaggcctctttcattgttgttaaggggagtgcaatgtatacaaagtttcagttaggcaagatgaataagttctggagatctgctatacaactttgtgttaatactatattgtacacttaaaaatctgttaagagggcagatcatatgttacttattctgaccacaataaaaaagttgaatatatatgttatatatataatatataagtttttataaaatataactataattttataatttataaaatataaattaatatatatgtgaggttttagaggcagacagacatagaatgggaaatccagtttcatcatgtagtaaatgtggaatgtggataagtaacttaactttctctaaattcaaatttcataacttgtatggtgaggctaccaccacccacaaaaaaagtttagtgggaataaatcagataatgtgcataatatgattc

SEQ ID NO: 244877 - DNA, 566 bp, Homo sapiens
taagttaatgtctattttgaattcagcattttgcattactgaacagacagcatgatgtaacagaaagcagtgagggagcaggtggcagtgtcttaactgtatccctgctgtcaggcctgaggcctctttcattgttgttaaggggagtgcaatgtatacaaagtttcagttaggcaagatgaataagttctggagatctgctatacaactttgtgttaatactatattgtacacttaaaaatctgttaagagggcagatcatatgttacttattctgaccacaataaaaaagttgaatatatatgttatatatataatatataagtttttataaaatataactataattttataatttataaaatataaattaatatatatgtgaggttttagaggcagacagayatagaatgggaaatccagtttcatcatgtagtaaatgtggaatgtggataagtaacttaactttctctaaattcaaatttcataacttgtatggtgaggctaccaccacccacaaaaaaagtttagtgggaataaatcagataatgtgcataatatgattc

SEQ ID NO: 244878 - DNA, 617 bp, Homo sapiens
tgggggcaaaacacatgaccattgagattaatttcaacttatcacctgagactggtctcrctgctgcttcatcgtggtactcttatcaagacagacatgctagcagatgtaagtgcctgccacatgtgattcacagtttttcctactgctttcttaatttcatccttagagaatacaattagaaataagctgctactactgctaaccaaagatctcctccaatgttttattaattttacacatgaactaggagatattccattaaagactttgttaggaaatctgtttaaacaacagaataaaagggacgactttgagatagaattttagtgacatctccagtttctggttacatgatattggttaagcttctgaaaaatcaagtaaatccacaaactttcctgatatgaatcaatctcattaattttccttttcatttaatcaacgaatatcagccagtctgtaaaagcccactgaaaggtcccttaattcagtagtagtcttacctcaggtatgctccatacatgaagaacaatcccatcattagtccatttaaaataaagattacaccaacataaaagcaagcaggatctcccaatcctttgaaaagatacaga

SEQ ID NO: 244879 - DNA, 571 bp, Homo sapiens
acacaaatttctcaaaattagatatttatgtggccatcaatcatatgaaaaagtgttcaacatcactgatcattacagaaatgcaaatcaaaaccacactaacccaatckgaatggctattattaaaaagtcaaaaaataacagatgctggtgaggttgtggagaaaaggggatgcttatacactgctggtgggaacgtaaactagttcaaacactgtggaaagcagtttggaaatttctcagagaacttaaaactgaactaccatttgacccagcaaccccattactaggtatatacccaaaggaatataaattagcctaccataaagacacatgcacatgtatgttcactgcagcactattcacaatagcaaatagcaaagacatggaatcaacctaaatgccatcaatagtggaacggataaagaaaatgtgttggtacatataccccatgaatattatgcagccattataaagaacaagataatgtcctttgcagcaacatggaaggagttagaggccagtatgctaagtgaattaatgcaggaacggaaaactaaatactgtgtgt

SEQ ID NO: 244880 - DNA, 478 bp, Homo sapiens
aaaggaaatagatctattctctctctctctaatatatgtgcacttccttatctctccagaaaggactttctgtatgactttcagcaagatatgtaatttctctgaacctcttttcttaacaataaaatagggatttgtgagtgcacgagtatacagacacaaatatggagatatatgtctccatatgtgaacatatatatatctctatctgcctattatctatctgcatatatatgtatgtgtatgtgtgtatacacacacacacacaaatccctatcttattgttgagaaaacaagttcagaaaaattatacgatttgmtgaaagtcatttttaaaacctgtagccaggcgatgaccatagaccagtctttctgacttgtcacaggcagctcagtacggggaaaaaggggttgaattaaagagctctggaaaatcactcatctcctctgagccttggtttctttagctttgcttcac

SEQ ID NO: 244881 - DNA, 431 bp, Homo sapiens
caagattagagtttaaaaacatcttagagaatgtagaacaatctgagcatcaaaataaaaaaatactaaaggaatataacccattaataactccacattaatataaatagataaatactttagggagaaggaataacacttttttttgccatggaaagtcaactaataaatgtakaagaaatgatgaaattagaaaattaccatttggcaaccatcataataataattggattaggcaggaaacatcaatagatcataaaactttgaggcatgcttttatatcatctgaaagtgtcttcccataagtcacttgcttacaatgggggaaaatgtcactttacaatggggaaacctggcagacaacttctcaactgagcaatcaaagttaccatcaccaataatgagatattccttgactgttgatatgaagc

SEQ ID NO: 244882 - DNA, 431 bp, Homo sapiens
caagattagagtttaaaaacatcttagagaatgtagaacaatctgagcatcaaaataaaaaaatactaaaggaatataacccattaataactccacattaatataaatagataaatactttagggagaaggaataacacttttttttgccatggaaagtcaactaataaatgtataagaaatgatgaaattagaaaattaccatttggcaaccatcataataataattggattaggcaggaaacatcaatagatcataaaactttgaggcatgcttttatatcatctgaaagtgtcttcccataagtcacttgcttacaatgggggaaaatgtcackttacaatggggaaacctggcagacaacttctcaactgagcaatcaaagttaccatcaccaataatgagatattccttgactgttgatatgaagc

SEQ ID NO: 244883 - DNA, 602 bp, Homo sapiens
cagcaaatagctgcccatgatcctgtctgcctgtctgatactccactccctttaaacttttctctggatggaccttttgaaggctctggggagatgggatacgcgacaagtaaattttgatgggtaaggaacagagaaggttctgagtcaggacaatattgagaatggtgggcaggggaactgtgggcattgggtgtccagtataataataaagctaacagccgtgtcccagaaagaaagctggcagaaccaaggaaccacggatgtgatggcttgtctgtgaatcctcagagcctgtggggcagagtccttgctgagctgccactaagtcataattccatggctcagttgacaccgatcaaagccaccttctttgtcattcttaagcacttcttgtccttttgtgggcatttctttacaacagaatctaaaataaatccttttccagtttgcaaccaaccattttggtttctatccttttatcgctgcatttctatacaagaaacattccttgtgtgactgctagatgtcagaacccatggttatgaagataagtagtgcactgctragctggagggacttccagcactgtgcggcaaggc

SEQ ID NO: 244884 - DNA, 533 bp, Homo sapiens
taaatttttcttcttagaaaatttacaaaattggccatattgtgaagactttagcaattttcaaagaatttrtattatgcatatttgtatcaatatgcaattaaattagacatctgcaagcaaagaggagaggtgtttttttgtttctgtttttgttttgagacagtctcactctgtcacccaggcaggattacagttcactgcaatctctgcctcctgggttcaagtgattcttgtgcctcagcctcccaagtagctgggattacaggcatgtgccacagtgcctggctgagagtttttttttaaagaagttaaaaaaaaataaaaaaactgcatgtttggaaatttaaaaatatctttctagttaacttttagattcaacaggaaataataatgaaaagttgaaaatattctaaacgaagtgaaaataaaataatcacaaaaaatgtgtgatgcagtaaggtagtattaaaagatgtgattagaacctaaaatttatctgtaaaataaaagaaagataaaaaggaaatgag

SEQ ID NO: 244885 - DNA, 533 bp, Homo sapiens
taaatttttcttcttagaaaatttacaaaattggccatattgtgaagactttagcaattttcaaagaatttgtattatgcatatttgtatcaatatgcaattaaattagacatctgcaagcaaagaggagaggtgtttttttgtttctgtttttgttttgagacagtctcactctgtcrcccaggcaggattacagttcactgcaatctctgcctcctgggttcaagtgattcttgtgcctcagcctcccaagtagctgggattacaggcatgtgccacagtgcctggctgagagtttttttttaaagaagttaaaaaaaaataaaaaaactgcatgtttggaaatttaaaaatatctttctagttaacttttagattcaacaggaaataataatgaaaagttgaaaatattctaaacgaagtgaaaataaaataatcacaaaaaatgtgtgatgcagtaaggtagtattaaaagatgtgattagaacctaaaatttatctgtaaaataaaagaaagataaaaaggaaatgag

SEQ ID NO: 244886 - DNA, 574 bp, Homo sapiens
tgtccacttgtcttagttcagccctctggaacaacacaaaactaattcactccctttctcatttgacagcttttcaagggtttgaagacagctatcagagttgtctatgtgtgcccttctctggaataaacgttcccggttttctgaactgcccctckcaggtcgtggtttctaagatgcttcactagtccagttatcctccctggactgatcactgctttgtcagtatccccttttaaaatctagtgccaccttcctgccaccacatctaagtggaaacagcctaaatgtccaagagcaagtcaattcaaacaaattatggcatatctacacaatagtatgttgtataactattaaaactgggtttcaaagaatatgtaagttgaggaaataattcaggacataatgttagttttttaatgtagaatataaacactacctaacccacatttttagtacttccatgtgcctcatggaacacaagtctccagaagagacttgaaggacatataccaaaatgataacagtagtgatctccaaatgatgagagctaattttcgttttcttcttcata

SEQ ID NO: 244887 - DNA, 574 bp, Homo sapiens
tgtccacttgtcttagttcagccctctggaacaacacaaaactaattcactccctttctcatttgacagcttttcaagggtttgaagacagctatcagagttgtctatgtgtgcccttctctggaataaacgttcccggttttctgaactgcccctcgcaggtcgtggtttctragatgcttcactagtccagttatcctccctggactgatcactgctttgtcagtatccccttttaaaatctagtgccaccttcctgccaccacatctaagtggaaacagcctaaatgtccaagagcaagtcaattcaaacaaattatggcatatctacacaatagtatgttgtataactattaaaactgggtttcaaagaatatgtaagttgaggaaataattcaggacataatgttagttttttaatgtagaatataaacactacctaacccacatttttagtacttccatgtgcctcatggaacacaagtctccagaagagacttgaaggacatataccaaaatgataacagtagtgatctccaaatgatgagagctaattttcgttttcttcttcata

SEQ ID NO: 244888 - DNA, 537 bp, Homo sapiens
ccttctgccatatggaaaagaagggagcaaaggttatgaaaatcaaagatatgtctcttgcactcaattcggccttattattcccctggaaagggcctcccagaatcttaagaggttccgaaaaagagtgtgcttgtttcactcagcttgtcccaggatcctccattcccaataatggactcccttttgcactgtgtttcttaaaccacagagtctaacaagaacatcattcaactttttaaagcctgtatgtatgggcaagagagcctgttcatatgaccttctaaataggactcttgggcacgatcagaatgtctggctaagcctgccttcgtggttagrcaccactaacagaccattgaaaatatgcacgtcgtagatcatagagtggacagaacctaggctgaggatcaggaaatctgttttttcatcttggttctggtgttagagggatacccagtgcatagaacatcacagaaacacagacctcaaggggtaagtccagaatgggggctggtagttagaatgaagactata

SEQ ID NO: 244889 - DNA, 524 bp, Homo sapiens
caacctctgcctcctgggctcaagtgattctcctgcctcagcctcaccagtagctgggattacaggcgcccaccactacacccggytagtttttgtatttttagtagagacagggtttcgccatgttgggcaggctggtcttgaattcctgacctcaggtgatctgcccacctcggcctcccaaagtgctgggattataggcgtgagccactgtgcccggccagcttctttgttttcttctgtatgccccaaatttttaataatggacatgatgacattttaaatcagtaagtaaatgtcattgaaactaatggatttcctgaaaaactgttccttagttattgctgtgagtctggggtcatatctgggagctgaaagcaacagctttagtctcatttaggatggaaaatacctccccacagcccagtttctatcagaggcagtctaatttctacgaggccagagaggtttgagctgatggtcccagttgtgccctgagatcaccagcccaacctgtggcctct

SEQ ID NO: 244890 - DNA, 542 bp, Homo sapiens
ccactgcccccacaccaccccactgacaagggctttgtcccctgctgggaagttcaggaacgaggctgagtcagggagcttgagaattgaaggaacaaaggcagggacagttgtagctccacagcagaaggggaagctgagagggagctgcccatcggagtgcccagccaggactgagtcactagcccttgccctctaggttaaggggaacagagggcctccctttgcccttccccatttagggtggctgtggcaagtgagagtgtgtgtgtgcakgtgtgtgtaaactcagtgcttgaatgagcctctcatatcatgaggcggcctgtaagtcttggacggtaggtcagtctttgcaaaagtggaaaactggcaagatctgagtattgtgccatctcccatcagagcctcctctagccccacttcccccagaggttgcccctgcctcaagtgatagttctccattttatgctcattctttcaaacataggtgtgtttctaagcactcaagatgatgacaagatttctaatccttacattct

SEQ ID NO: 244891 - DNA, 634 bp, Homo sapiens
gaaaactggcaagatctgagtattgtgccatctcccatcagagcctcctctagccccacttcccccagaggttgcccctgcctcaagtgatagttctccattttatgctcattctttcaaacataggtgtgtttctaagcactcaagatgatgacaagatttctaatccttacattctatctggagatgatggagaggagggtcttctcttgcccactctcccratccttgtggggacatgaggaatactagagataacacaccctccaccctttgacattgcaatgccttagagtctcatgttagcctctgggcctctgactctgaagccattcttaggaggtagaacctcgataaccaacaaaactcattggatctcctgaagcagctctggatggaaaaccaatgactcactcacagaaaacgccagtgccctgtgatctaccaggtgctccctgtgctgtggtgctggcattttcacaagatgcctgtgggacacagtgccaaaacacaaacgagcagctcacatcccctgtcaccatcattaggggctatttgagagagttcaagaactcacactctgaagtgccctctctgatggtgctctcatccccctctccctccaccacgccac

SEQ ID NO: 244892 - DNA, 634 bp, Homo sapiens
gaaaactggcaagatctgagtattgtgccatctcccatcagagcctcctctagccccacttcccccagaggttgcccctgcctcaagtgatagttctccattttatgctcattctttcaaacataggtgtgtttctaagcactcaagatgatgacaagatttctaatccttacattctatctggagatgatggagaggagggtcttctcttgcccactctcccgatccttgtggggacatgaggaatactagagataacacaccctccaccctttgacattgcaatgccttagagtctcatgttagcctctgggcctctgactctgargccattcttaggaggtagaacctcgataaccaacaaaactcattggatctcctgaagcagctctggatggaaaaccaatgactcactcacagaaaacgccagtgccctgtgatctaccaggtgctccctgtgctgtggtgctggcattttcacaagatgcctgtgggacacagtgccaaaacacaaacgagcagctcacatcccctgtcaccatcattaggggctatttgagagagttcaagaactcacactctgaagtgccctctctgatggtgctctcatccccctctccctccaccacgccac

SEQ ID NO: 244893 - DNA, 507 bp, Homo sapiens
agtttgttggggaaaggtttagaaaacatgatccagaagaggcagacaaccaaaaccatagggaagtgtttacagaaagctccatgttcaactaaatagaggatcagatgttaccacaaactgctccacgtttgaaaacttcttccaagggctctggccaagaaaaataattgacatcttcttgcaaacatgggtagttcatagtgttggcaattaggtacctaatttttttttcatttatcatgcagagttatcacttctctcaagccaagtagtaacagatttggccacatttcaatacaaatttggaaatgttcaaagaacattgggattataatccccaatgrtcctctcagcttctgctcttgcttctatgacctaaattatgagcagaaaagaaaaaataaagtttttatccttaactgtatgtaaatccagagacgatccagagtgggctagtgaaaactttttctagaaatataaggtttccatgcaattagttactaa

SEQ ID NO: 244894 - DNA, 566 bp, Homo sapiens
cctgctggcattcaagggaaagtaaatgaataggttggccatttggaggaggagggattgcctggcctttgtccatagcgcagagcagaagctgtttgcgttaaataaaatggtgaaggcacagatacttcagcagcaagaggctcttcttccaaccaatacagagtctatgactgtgcacaaatccctgttgacgtggaagaggcaggaatgtgaaggccatggcctgaacatgggcagtcaggtgcaagttctctaaggggtgccttgaagggaytgagtagggagggaagagttctaaaaattactgcaaaaatgaagttctggtactctcataatactaaaggctgacattgattgataagtcaatgtctatgtggctgcaccttgtggccaaggaagtcaatggcacaaacagagactggaaaagcagacaagggccagaacatgtagaggtcttgcaggcaaaggtaggagagacaaattttatttgaaatgctatgaggagctgaatgactcttaactaatttatgcttttaaaagatcactctcactgttgtttgaag

SEQ ID NO: 244895 - DNA, 557 bp, Homo sapiens
agacgtgaatttttttcttggttctgatgccaattagcactgtggattgggcaaaatatttagctggttccttttctaatcaaggaaaggatattgggtcctattactcactttaaaaaaatgaagtaaacactaactttttaaacytctatgtggcctttaaaaatgcctttccctgctcgcatagttgcaatttacctatgtactatttaaagttctaggaaataatacatcaggtgttcagaatcatgtacacactcacacgggtgaggctgtcacttcacacttgtccttgtggaggttcaagcatactaaagaggagggaagatcgaccactgtaaggcatttatgaagaaggctagaggatggatatttacatttattgagaaactgtatttatcggcacttgtatacattgtctcctttaatccttccattctcatagggattacagagatgaagacagagaaagtttcatctatttgctcaatgtcccaccactagcaagtggtggagctggagctttaattcatgtcttcttgactccagagtctaga

SEQ ID NO: 244896 - DNA, 557 bp, Homo sapiens
agacgtgaatttttttcttggttctgatgccaattagcactgtggattgggcaaaatatttagctggttccttttctaatcaaggaaaggatattgggtcctattactcactttaaaaaaatgaagtaaacactaactttttaaacctctatgtggcctttaaaaatgcctttccctgctcgcatagttgcaatttacctatgtactatttaaagttctaggaaataatacatcaggtgttcagaatcatgtacacactcacacgggtgaggctstcacttcacacttgtccttgtggaggttcaagcatactaaagaggagggaagatcgaccactgtaaggcatttatgaagaaggctagaggatggatatttacatttattgagaaactgtatttatcggcacttgtatacattgtctcctttaatccttccattctcatagggattacagagatgaagacagagaaagtttcatctatttgctcaatgtcccaccactagcaagtggtggagctggagctttaattcatgtcttcttgactccagagtctaga

SEQ ID NO: 244897 - DNA, 574 bp, Homo sapiens
aaacactccacacacagtaaatgctcaataaggaagagctatttgcattattgttactactaatgctgacaagaggaggctctgcaacaaaaacaccaaacgttcctatgatgrtatagtaaatcaacataatccaatttactctttggtttcatgggtatctggtcaaaataaatctattacgggaagtgaccatcactggaagagctgatacgtatccagtctgaggctaaaatataaaaaccaaatcctagatttggggactcaactgacgtgctgcccataggtgagcaagagttggagatcccataagcaaacttcatccaggtgtcatggaaaattatgttggaaagataggataggccaggcttgatttttgagtaaagggaatttggtctgcttttttttttttttttttttttttttttaaccaggcacatgctgtaactcagtgggattaatttagtttaatgaagaagcaaaagtggcctgacacatgatccaataaaatgttggtgataaatctttgttccgttccctctgagaacctggaggccaacagtgacacaattaa

SEQ ID NO: 244898 - DNA, 547 bp, Homo sapiens
tgtactgaatgttaatgaaagtattatgtattaaatgtataggatacaaataaaacaatacttaaagaaaaaagagaaggattaaaaatcaataaacaaattatctatcttatgaagttagaaacatttaccaaattaaactcaagggaagtagaaagaataaaataataagaataggagtaaaattaatgaaataagaaacaaacataataaaaagcctcaacaaagatcaaattctgttcttgaaaawaattaaattaataaacctctggtgagactgatcaaaggaagaaaaagagagaaggcacaaataaacagtattctttaaatgatatcactatagatcctagagtcaatcaaaagataataaaaggatattatgatcaagcttatgtcaaaacaaattgaaaatatagatgaatgggaaaacatataattgacccaagaagaaacaaaatcagaatagtagcataactgctaaagaaagagaatgtcttcattggtgagctgtactaaaatttaaggacaaagcaacaccaattttata

SEQ ID NO: 244899 - DNA, 601 bp, Homo sapiens
gcaagtcaattttgccgcagaaatacatgcaaaaattccaaaaaaaaattaccaatcaagtccagcaaaatataacaaggctaacatatgtgacaaaactggtttcattccaggaatgcaatgttggcttactattagaaaatcactcaactcgttacattaatagattacaggataaaacaatatatwaactcaacagatgcagaaaaaaatgtttgataaaaatttttgagctccaattataagatattcacaaacttgggatagaagacaatttcttaaaccttaaagtttatctgcaagaaagctacaggaaacctatacttaatggtgaagctttgaagatgttccttttgaaataaagaatgagtgaagaatgccagcatcaacacttctgttcaacattgtaagaaatcctagtcaatgtagtaaaacaagaaaaaaaaataagataaaaggtatatggattcataataaataataaaaactgacaatatagatataaatatatagctgaatatccaaaataatatacagataaattattagaattaatcacaaggtttaataaggttgcaggatacaaaaatcaatattattt

SEQ ID NO: 244900 - DNA, 557 bp, Homo sapiens
cccatcataaccagctgaggtggccagagcaggtattttttataccaatttaaagaaaagatgaggctgagactgcatggtttagccaaggtcagaatattgcaactaaagtccagtgtgcagacatagctaccaggtttctgggctggttttgaatgcaccctactctccagaacgaagttcagtgttctttctctgccttgtaagtccacccatgttcctaccaaaaaaaaaaaaaaagaaagaagtttccttcccatttggcaaataactctcaaaaactgtcccagtgctttgcagtgctgggtacagtgaaaagatgccacgtggaccaaaggctstagccctgcctggtaacaagagactgcatatgggtagacacaactcagcatttgcaccgcaacttaccaaatgtacatggtacaaactgagctccctaatactgcaggaatggatgcgtcagcatctcaagtcagatgggtaaatcaggaaagaaaaagcaccaaccttaggccaggcaatgtgctggcttctgttcaagcttccctttgtaatct

SEQ ID NO: 244901 - DNA, 542 bp, Homo sapiens
catttttcctagtgcccttgagggaactgaccaggccacaagattttatgtgtagctaccataggctaagcccaatttcttcaaagtagagtaaggagaagggaattaacaattactgggtatatagggcaggcattgtgctaaatagctaacaattatcacattagccacagtataaccctgtgaaataatttccattgccccaatttaatgaatgatgaaactcaagctcagagtgattaagtaacttaytcaacatcaaacaggattgatatccaggtttttctgaaatcataccatattatttcttttatatctcgcagccttccaaatataaggcaaattaccagtttcagggattttgtaaatgaaaagatagacatacttgaaacaaactgaacacaaaactcagtatgcactaatatgctaaactgtctatgcagtggagtcagataatggcagggaatatattttggaagccaccattgaaggaggaaatgattcaggtaggataagggagaagtggggaggaagcagagtct

SEQ ID NO: 244902 - DNA, 607 bp, Homo sapiens
aagtgaagtaaatgctctccattagacttcaatctacaagttactcttctactccctctggatttgawcctaatgttacaaagtggagatacagccagactcttgatagaaatgaggctccaagttacctgaaaaatgtccaccttgatcatcccttcaaatatatttcatttaatcacattctaaatatgctcttcacataagagaaattaacttcttaaatcccaatttccctttctgctaattatgcaaaaaaagattgtacacagataattaaaaggtgtgggtaaagttaataaaagagacagtgggaaggaagaggagacccagatcctgagcctaatgaagtggatgaaaaaggggagctctctgatggtgtcagtgctgatgatgataaatgattcaacaccgcacataggctccctaaaaccggaacccttctatcatctcttgactcccactgataaaaagcaaatgaacttttgtttctaattattctggaatgtcaattgtggcagaaaaaattagtttagctttaaaagtcaattccaaacaaatgtaccatgcaaatgtcaaggactgatcctgaaatatggagtttccaaga

SEQ ID NO: 244903 - DNA, 544 bp, Homo sapiens
gaaaaaaaatatatgatagccagaatataattattaaaatggcaatttagggcacatataactgaaagtaaaaatggaaaaaagatattccatgcaagtggaaaccaaaatagatgaggggttgctacatttacatcacatagaatagactttaagtcaataacagtaaaacagggcaaataaggtcattgyataataataaacggattatttcatcaggaagaaataacagttataaatatatatggaccctacactggatcacctaaatatataaagcaaatattaatagacctgaagagagaaatagactgcaataaaatcataggtcttcaaaatcccacttttaataaacagattatctagacagataatcagtaaagaacgattggatttaaactacactttagaccaaatggacctaatagacacatatagaacatttcacctagtggcagcagaatatataatcttttgaagcacccaaggaacattctccaggataatcatagagtaagccacaaaacaagtcacaacaaaatta

SEQ ID NO: 244904 - DNA, 535 bp, Homo sapiens
attttatatacactatcttgtattattttttaagtactttatagttacaattttataatctcttcccctaataagactataggctcctcaagggcagagaatgtgctttctttttcctctcaatacctagaagaattcttagctaggtactaacgctttttgaatacacacattgaaatctgctttaagactgtttgtttttagataataagtttctattttcacagtttataaggaatatatgaatgaataaatcatgtacataatataactaataaaataataagataaaatctrcaaagcagaggcaaaaacccagtcccatgattatagttatatcaaataaaaaacgagtctgctaaagaccttaaatgggttttgagaactcattttttattttaatacttcatttggttctaagtagcaaaaggtataataaacattaatgttagacatgcaactgttatttcatttggaacttaaaaaataacatctcctgagatgaatattgaaatgaagttaggaagctttaata

SEQ ID NO: 244905 - DNA, 634 bp, Homo sapiens
atcaaaacattaagtaaaactagcggtttttgttttcttactgagagtgcatggcagtgaagaatacgagatgactactagtacagtttggtgccaccacctcgatttgtgttaaggtgctaagagttttactcactgctgcttttgcactgtcaatgtgtgcattaacatagagaagatggcaaatggtacctttgtatagtattatcataaaaatagcttgaccttacaaactccctgaaagtgtcttggggacccctttgaactcagagatcacactttaagaataatgctctaaggtgacaactgagcagagacttaggctaaccaaccatcaagatttgcatggggctgtcctagtgttagcactaaaagtcccacatgattctactgggagagatctaaatgaagtgagcgtgcatgacagaataacagctaatggaatcagcatttcaagcagaggaaacagcaagtgcaaaggccctggggtcaaagaatgattggcatatccaagaaaaaacagcccaktacaaaggttcacacccccataaacctgactgtcctcaggaaggtgagctactggacaatgtctaatacaatactcaaaggacactcagtgaccttttttgcctat

SEQ ID NO: 244906 - DNA, 480 bp, Homo sapiens
tatgcaggtcagaagtctgaaataggtcttcgtaagctaaaatcaagctgctgctagtctttctggaggctctgagaggcaattcctttccttaccttttccagattgtaaaagytgcccaatcccttagctcctggcctcttcattcttctttaagtcagtaatgtagcatcctcaaatctctctgctgctctgacactcccacttccctcttagaaagaccctaatgatcccactgggcccacccagataatccaggataatctcgccatctcaaaatccttaatttaatcacatcttcaaagttcctcttgccaagtaaggtgacatattcacaggttccagggattaagatgcagatatctttggggaccattattctgtctaccacagtggttacatactttaaatattgtatctgagtatatacaataaaccacatagaattctcataaaagtgtgtcacagtcaaaaggtgaa

SEQ ID NO: 244907 - DNA, 603 bp, Homo sapiens
taaatattcagaaaagtgttctcctgaatgctttcttcaaagcactcattaggtgtcaatctgagtcactgggcttgtcaacgcacaaactacaaaaaatgtctactagtcttcttggattccatagcccacactaagcagtctctttttctcaagaagcacagggtattcaacttctctctgcctgatatttaatctggtttgcccttccagatcggagtactcacacttccgagaagggctttttctgaagaatgaatgacaagcttctcaaagatttttgaaactcctttcctttgaaaataaagtaaatgttttatttgcagtattttgtttttatattaaatcatcattttgccacctacttgctctgacacagaagtgtgtttattttaagcaaatggtaactcaagtttgcttctttccaaattgctcttccatgaatcatgttcatttatttgtccaatcattgaatgtttattgggtatctattttactatgtagtgttcagtacatgatatactgtgagttattcaatgctggaggttactcagygctaatgctgagaggtattcaaagataaagattaagaaatggttccta

SEQ ID NO: 244908 - DNA, 603 bp, Homo sapiens
ctgcagcccccccagccacatggactttcctcgcttcatctgatggaggatgtctggttctatgctgtgaaacattggttgcatgagatattaatggtagttaggccaaccccccatagtcaaatgtgttgggaaaatataataaagttgaattgtgtcacccctaatgtatatgttgaaatcttaacccccagtagctcagaatgtgaccttattcagaaatgagtctttacagaggtcatcaagttaaaatgaggtaattagggtgggcccaggtccaatgccactggtgttcttataaaaaggaaaagtgggacaccgacacacacacacacacacacacacacacacacacacacacacacacacasagaaaagcccaggtaaacatgaaggcacagatcagagcaatcatctacaaaccaagaacaccaaagattgccagcaatccgccaggagagaggcctggaacagattctccctcacagccctcaggagaaaccaaccctgccaacactggcctccagaactggaacagtaaatttctgttgtttaaaccacctagtttatggcactttgctatggcagccctgggaaacgaat

SEQ ID NO: 244909 - DNA, 603 bp, Homo sapiens
ctgcagcccccccagccacatggactttcctcgcttcatctgatggaggatgtctggttctatgctgtgaaacattggttgcatgagatattaatggtagttaggccaaccccccatagtcaaatgtgttgggaaaatataataaagttgaattgtgtcacccctaatgtatatgttgaaatcttaacccccagtagctcagaatgtgaccttattcagaaatgagtctttacagaggtcatcaagttaaaatgaggtaattagggtgggcccaggtccaatgccactggtgttcttataaaaaggaaaagtgggacaccgacacacacacacacacacacacacacacacacacacacacacacacacacagaaaagcccaggtaaacatgaaggcacagatcagagcaatcatctacaaaccaagaacaccaaagattgccagcaatccgccaggagagaggcmtggaacagattctccctcacagccctcaggagaaaccaaccctgccaacactggcctccagaactggaacagtaaatttctgttgtttaaaccacctagtttatggcactttgctatggcagccctgggaaacgaat

SEQ ID NO: 244910 - DNA, 507 bp, Homo sapiens
tgttttggcataagatataaggatacgagtttagtgtaagaggaattcaaatgtttctctgagtaatgccaataatttccactccatgtcacttctagtgctttctgtccctttgatccagccaggacaatggtttaagcagtggagaggagaggtacagacaaacgtatgtgaccacctaagctctcctgggagcggatctgyagaaactgggatggggtgttgccagtggagtgctaggtgccagaggcaaacctgaccttcatcctgcttttgagggacaatgcctgttacctactgtctgccctgtggactcctcctttgtactgatgcctggaagggtatgaacctctccatggtcattgatagtgagaaagcaggcaaggaagaagggccactgggttttaatttcagaatttctatgagcaatggtttttttgtttgtttgtttgtttgagacgaagtcttgttctgccacccagggcccaggctggagtgcagtggcat

SEQ ID NO: 244911 - DNA, 297 bp, Homo sapiens
atcccagagggcagagctgtgtgggcgctcagaggctcagaggcagaagccaccgtgcgcaaygcactgtttagcatctgcatctctcccggccgagatctctgctcttgcacctctattctgcccctgcttttcttcctcagaaaagttcgagacacagaagtaaacagggatttgaaaggatgatgaacctgttggcaattttttttggactcttggagtgggagagcaaagcagtgagaaattttgaaaatacagtgagtgctaagaaaagcctgaggatggggaacagaggga

SEQ ID NO: 244912 - DNA, 549 bp, Homo sapiens
taaatcttggccattgccttttttcctgtcatactcttacttcgtccatgaacttttttagtgcctgctgcttacatgcaaagcagttagtcacctctcctacctttgacttctaatagaaaagacttccaaatccacatctacttaacaccttttcttctgwattcctagttctgtattaatcggaccattttcacttggatatctaaaaccttatagtcatcatctgtctcagttcacctttcctcttaccatttagttgtttctattgattgaaataatattcctaactcatttctgcttttatccaccctggttctaactgataattcctggaccactggagcatttaaattgctctttgcacttctagtttttgttcataatagtgtagcctccatgccactcctagatcacttactaaaaaaaataccagttggattatgttactttgttgctgaaaaatctagaattaaggaatgatattgaaatactaacattagacttctgtggtgaacctttttgtgtcattcatcaaagtgtttttgc

SEQ ID NO: 244913 - DNA, 573 bp, Homo sapiens
cgctgggtgtggtggcatgcacctgtaattccagctgagrcaggagaatcacttgaacccggaggcagagattgcagtgagccaagatcacgccactgcactccggcctgggtgacagagaacgactgtatctcaggaaagaaaagatacaacacaattcctctcccgaggaagctcatgttcctagtacaaaggagggataataaatgttatgtaatagaagatactgagtaatacactagatttgtgtaagggcactccaaaccaaaggggaggggcacccaatcaacactttaaatataaaacttctaccttttatactatttcagtgataaaactaaaactacctctcagaatagcattttatgtttgtattattaaactcagcttttagtattatacatgtagattgaggcatgtaacataagaaatatgtaaataacttacaacatgctttggaaggacgtttgtatgtgtgtctttggttgagagagtggagcaataaaaaaagtgtaaatatagcatgctgaagacctgcatggataaaagatttcgcttctgtccctgatcgta

SEQ ID NO: 244914 - DNA, 573 bp, Homo sapiens
cgctgggtgtggtggcatgcacctgtaattccagctgagacaggagaatcacttgaacccggaggcagagattgcagtgagccaagatcacgccactgcrctccggcctgggtgacagagaacgactgtatctcaggaaagaaaagatacaacacaattcctctcccgaggaagctcatgttcctagtacaaaggagggataataaatgttatgtaatagaagatactgagtaatacactagatttgtgtaagggcactccaaaccaaaggggaggggcacccaatcaacactttaaatataaaacttctaccttttatactatttcagtgataaaactaaaactacctctcagaatagcattttatgtttgtattattaaactcagcttttagtattatacatgtagattgaggcatgtaacataagaaatatgtaaataacttacaacatgctttggaaggacgtttgtatgtgtgtctttggttgagagagtggagcaataaaaaaagtgtaaatatagcatgctgaagacctgcatggataaaagatttcgcttctgtccctgatcgta

SEQ ID NO: 244915 - DNA, 515 bp, Homo sapiens
tggtccttcattgcctagagctgagttgagtgcttccacgygccagtcagcctccagcactcccccgcctctttcagtggccccaaccccctatccctgccagaccggtgtttttctcggccactgagacaagggctctctttgccctccctgcaacaagccctgcaagctgtcattcccctccccaaagccctgttctcctctgaatcctggggcaccaggtcccagccccactggcacagggatcccacacattggaccatggcattgctcaccttcttgataccgtacattaggctgacaattgctgccaccaaagtgagagtgatcaacacaatggcccagtctgagacagagtccttctggggcttcggacctggggcacaaagacagggccagtgactgaggtaagtggtgcctccagccccccagacccccactgccctctgactttccatctttctttctgtgactgatgtctctgactctgagacctcatctctctggtgttttct

SEQ ID NO: 244916 - DNA, 397 bp, Homo sapiens
tttccccctttatatgggttgtcttttcgctctctggatggtgcgctttgacgcacaaacgttttsagtgtcatcaaacccaatttatctatttttttcttttgtgcctgtgtttttggtgttatatccaggaaatcgtggccaaatccaatgtcataaaggtcttgccctgtatgttttaggtctcacatttagctctgagttcatgtatgttctggccaagtgtgcgtccagccactctgctattcgctgtgagtcagcgcacgctcgggtgggaggtgacggtctggctcactcctctgcgtgtggatatccagttttcctgggaggcgagggtctggccacactcctctgcgtgtggatatccagttctcctgggaggcgagggtatggccac

SEQ ID NO: 244917 - DNA, 456 bp, Homo sapiens
aaggtgctcaacatcattcgtcatcagatgaaggcaaatcaaaactcctacgagatatcatcccaccccagataaactggcttttatccagaagacaggcaataaggaatcctggygaggatgtagcaaaagagaacccttgtacactgttggtgggaacgtaaactagtataaccactgtgggaaataatgtggaggttcttccaaaaactaaaaatataatagagctgtcatatgctccagcactcccactgttaggcatatacccaaaagaaaggaaatcggtatattaaagagctatctacttttccatgtttattgcagcactattcaaaatagccaagatctgcaagcgacctaagtgtccatcaacagacgaatggagaaagaaaatgtggtgcacacgtgtatgtggagtactattcagccatcatgtcatttgcaaagaactggagg

SEQ ID NO: 244918 - DNA, 489 bp, Homo sapiens
caccttctctgtctttaaaagtgtcaccctcctccataatctccttccctcctttaccctactcctatagactgctttattttttttttaatttttgagatggagtctcactctgtccctcaggctggagtgcagtggtgcgatcttggctcactgcaaactccacctcctaggttcaagcaattctcctgccycagcctcctgagtagctgggattataggggagcgccatgatgcccagctaatttttgtatttttagtagagacagagtctcactatgttgaccaggctagtcttgaactcctgacctcaagtgatctacccaccttggcctcccaaagtgaagggattacaggcatgaccactgcgcccggactgctttgcttttttccataatatatatatattttttaaatagaggcagcaggggtgggagaaggggcggcacgggtctcactatgttacccaggctgctttctaactcttgg

SEQ ID NO: 244919 - DNA, 489 bp, Homo sapiens
caccttctctgtctttaaaagtgtcaccctcctccataatctccttccctcctttaccctactcctatagactgctttattttttttttaatttttgagatggagtctcactctgtccctcaggctggagtgcagtggtgcgatcttggctcactgcaaactccacctcctaggttcaagcaattctcctgccccagcctcctgagtagctgggattataggggagcgccatgatgcccagctaatttttgtatttttagtagagacagagtctcactatgttgaccaggctagtcttgaactcctgacctcaagtgatctacccaccttggcctcccaaagtgaagggattacaggcatgaccactgcgcccggactgctttrcttttttccataatatatatatattttttaaatagaggcagcaggggtgggagaaggggcggcacgggtctcactatgttacccaggctgctttctaactcttgg

SEQ ID NO: 244920 - DNA, 613 bp, Homo sapiens
cttgtccttgacttggaaataaaagcaaagctgtgaaaagccaggtcgctacgattttgttggcagcaggactagccacagagtagggaagttttggggccaggccctaggttttcccagaatgccttgggtgatgccaccaagaaccttaagaactccctcttacattttccatcggttgcaggcatggcttttgcaactgataggtgctctgactacagatattctggtgtccatggcaacatggccttatggcttgtaatagtgggaacttccagctcactggcaatttcctggaggtggcaatatctttggcaggaaaccatctcttctgtcttggccaccagggtctgctccaggccctgaatgagtccacatcaatccatccttcttccctgtagtcattccctcytggggagggaagggaaggggggtatttatcagacctatttgctcgctgctgtgtctactcatgggcaggtgtgtccgatggtgccttggcggtggaccttaggtctgaatgccagcccggcaccctgggcatcggaagtcggcctccctggcagcctggatgctgcagccaacacaggccacatggaaccagacgtcacag

SEQ ID NO: 244921 - DNA, 613 bp, Homo sapiens
cttgtccttgacttggaaataaaagcaaagctgtgaaaagccaggtcgctacgattttgttggcagcaggactagccacagagtagggaagttttggggccaggccctaggttttcccagaatgccttgggtgatgccaccaagaaccttaagaactccctcttacattttccatcggttgcaggcatggcttttgcaactgataggtgctctgactacagatattctggtgtccatggcaacatggccttatggcttgtaatagtgggaacttccagctcactggcaatttcctggaggtggcaatatctttggcaggaaaccatctcttctgtcttggccaccagggtctgctccaggccctgaatgagtccacatcaatccatccttcttccctgtagtcattccctcttggggagggaagggaaggggggtatttatcagacctatttgctcgctgctgtgtctactcatgggcaggtgtgtccgatggtgccttggcrgtggaccttaggtctgaatgccagcccggcaccctgggcatcggaagtcggcctccctggcagcctggatgctgcagccaacacaggccacatggaaccagacgtcacag

SEQ ID NO: 244922 - DNA, 606 bp, Homo sapiens
aataaatgattctaaatcaataccaaaacgtgcaatcacaaatgtgtgaatgcacagaagtgtgaatgaagggcagtgcacacaagaaaaaaagatgtgcacatgaagaacttcttcattccaggtttttactgatccctctrgtcaagatgggataagagtccaaaaatatgctttcctcacatggtcaaatgattcagcataaaatacaactgattgaacacaattatctatgctttaaatatattagaaaaaatccataaggaaaaatgatcctacaatcactaagattttaatttataataaaataaagcctagaaatgtatcttttgttcccaattccaatgattataggatttcagtgtttggctttgataagaccatttaaaacaactcagggaagttttcttaacaaactctatagcaggaccacagctaaacctatgagcattagtagaagtaaacaatgacactgcctttaaaatttcactttgaaaaacatgtctgaaagtggctgactggctcctaatttaactatcattcgaggtcatatgttagattggcaaagttgttgtaatttgtatgtattttatttttgtaatgcaa

SEQ ID NO: 244923 - DNA, 606 bp, Homo sapiens
aataaatgattctaaatcaataccaaaacgtgcaatcacaaatgtgtgaatgcacagaagtgtgaatgaagggcagtgcacacaagaaaaaaagatgtgcacatgaagaacttcttcattccaggtttttactgatccctctggtcaagatgggataagagtccaaaaatatgctttcctcacatggtcaaatgattcagcataaaatacaactgattgaacacaattatctatgctttaaatatattagaaaaaatccataaggaaaaatgatcctacmatcactaagattttaatttataataaaataaagcctagaaatgtatcttttgttcccaattccaatgattataggatttcagtgtttggctttgataagaccatttaaaacaactcagggaagttttcttaacaaactctatagcaggaccacagctaaacctatgagcattagtagaagtaaacaatgacactgcctttaaaatttcactttgaaaaacatgtctgaaagtggctgactggctcctaatttaactatcattcgaggtcatatgttagattggcaaagttgttgtaatttgtatgtattttatttttgtaatgcaa

SEQ ID NO: 244924 - DNA, 606 bp, Homo sapiens
aataaatgattctaaatcaataccaaaacgtgcaatcacaaatgtgtgaatgcacagaagtgtgaatgaagggcagtgcacacaagaaaaaaagatgtgcacatgaagaacttcttcattccaggtttttactgatccctctggtcaagatgggataagagtccaaaaatatgctttcctcacatggtcaaatgattcagcataaaatacaactgattgaacacaattatctatgctttaaatatattagaaaaaatccataaggaaaaatgatcctacaatcactaagattttaatttataataaaataaagcctagaaatgtatcttttgttcccaattccaatgattataggatttcagtgtttggctttgataagaccatttaaaacaactcagggaagttttcttaacaaactctatagcaggaccacagctaaacctatgagcattagtagaagtaaacaatgacactgcctttaaaatttcactttgaaaaacatgtytgaaagtggctgactggctcctaatttaactatcattcgaggtcatatgttagattggcaaagttgttgtaatttgtatgtattttatttttgtaatgcaa

SEQ ID NO: 244925 - DNA, 554 bp, Homo sapiens
ggaccggctgcagggaaggccagtcggagaaacccagcaggagaaagcgctcctctgcgctgtagttggcctaaaggaggaaaactcccagaatgtttggaaggtcgaaataaaaaagggtgactaccccttataagcaaagggaaaaccttggagtgtggggctgggctgggagaaggaatggaatcatatacaaggtcagtttgtggattgtaatcccatttacagatgagattacttaaaaataaactccctaagaataagagcaacactccaagcttggcstggccaacactcggtaggcagaatgatcacctccgttgtttcaggtactctgtgtttatttatgcaacagttcatgtaaaatggagacgaggccagaagaatccttgagcagacagagccagttgggcctcctaagtgaccttaaccttgcttgatttgcaagcatgtctgaaactttatttgtggtatttcttgtaaatgcctatgttaaagaaacacagaacttaagctcaaccaatcagaagcagccaacaaaaacgtaattagta

SEQ ID NO: 244926 - DNA, 499 bp, Homo sapiens
tcctctgtaggttgggggcttccttcctttaccttttaaaaaaatcttcctgctcccgattcttagacctcacgttttctcttttcctttatgaatctcacctctctcaccttcttcaggtttaaatactccaattttccctttctctaaacttagaaatttccatgcatcaccctcttctagaattcatccctcaccattccttatataattgatttattgtaaagactcagaaataaatcaaacattctactaagaaaaattgagaaggggagctctgggggtggaaacatattagggtaaaagacttaaaattggaggcagcattatcagaagatgaagaacaactcagrgatggggtgggaagaagacaggtccttttctgtacttcctagacaacctccattattccctaagggaatcagtgttgtgtctgtctacttttttttttttttttttgccacgtaattttacaaactctcccttttctaggcacccg

SEQ ID NO: 244927 - DNA, 491 bp, Homo sapiens
atatagtagtaaaaacataccatgttgagtttgggacatgtaagtagaattttgcttttgaaaatrctcggttaattttattcacatgcaattaaaaacctttgattttgaaataagttgaaacttacagaaaagttgcaagtgtagttccaagaacttctatataacctttatcaaattcatcaatttttagtatttttactcattttcactatcattatactcaatatgtttatgtattttcatttttactctgagtcacttgggaataacttgtggacatcatgcctctttctccttattgtcttagtattcatattctacaacaagatgatcttaattaacactgtacagcaattaaattcaataaacttaaaattgatacagtattgttatgtaacacacagtccatattcttattttctctatgtcccaataatgttctttgtaggatttttttttttccacgtaggatccagttgagagtcaca

SEQ ID NO: 244928 - DNA, 581 bp, Homo sapiens
cttctgcgtgcccttccctaatcatacctactacctactcctgaagacgcaatgactatttcaattattacttttacaaaatcattcctatattgtcttataacattacaccctttgtgttggtaaaaaatagccaactcctccttatttatctgtcaaccatcattctaatacactttctgcatccctctyttacactcttatactcttggtaattcattgcttcactctatgtcatttttcagtctcttcaatttacatagttctttgactctctttctgttctctcttgttctgtgtttcacaacgtgtatttgttctcactctctttcttctggtctttttaatttttcttggacacccacaaaagtccagtacaactttactctcttcctattaatttcatattcacggatgtatttatttctttattaatcaccaaagacctagttgtgtactaggtgctacaagggaatgaaatatcaattcttttctccaattcattagtgaaaaccacgttaatactttggcagctaccatctgttgtgtgcttcctatacaccaggcaccatgctaaacat

SEQ ID NO: 244929 - DNA, 587 bp, Homo sapiens
agcttatatcaaaatttagattgggcttcatttttgttaaaaagcagacatatcctgaatttcaagtagttcctctttttctctgtctcactatgtagttttgcttgcttttgagatttatggagagtatcatactttatgtagtcttactcatcttgcttttgttagatatagtgaactccaagattctcttcaaagaatcagtatgtcagcatattcatctctcttattctttgattctccatttgaaagttgagcttccgggttctcttcaccctcttgcctctagtttcagtaaacaactttcctgtcagttctaatcagtggttcatatctgttcccctggtcacctgctccatcyggagtcaccctcggccacctgctttgatttgaatcatcctgagtcacctgttctgtaaccacccttcccaccaaactacccaccctgccgctctggctcatacccctgctctctttaaaatagccaatcggaattagcttagattgtgtggtccaaacctagccaataggggaacgacacagcagtaggggctacctgcctcaggaataagaactccttcccctcc

SEQ ID NO: 244930 - DNA, 601 bp, Homo sapiens
tatgctcttgccattactccatccgcgagtcacacccttctatagaagtaaaaattccttgctgagaaaattraatttatgtctgagtgctatttctttgcggcaccgtggaataagcatttgtttctaacacttttttcactcaataggttctagcacattcatccgtattgttgtttgcaggtatgatccttctatttatgctgcttatgatattctacaatttggttacctatttccctaatactgataggcatttggttgtcttggtttggtatgtccatgttaaattttggtaggtattttcaaactgttcttctttgagtgtagacttttttcccaatcaccaataaatgagaattcacactagctttctgactgagtttggctggcatttttgaagcaatattctagatctcaaagcagtttagaaactctttcatggacgttattaaagagactagaaagagacatctgttccaagtaggcttcaagtaggcttcaatgggggcagtgacaggcccaagagcatcccgtcagccagggccacattgggacactcgtagataaccgccacaattgttttataacttggcaagat

SEQ ID NO: 244931 - DNA, 601 bp, Homo sapiens
tatgctcttgccattactccatccgcgagtcacacccttctatagaagtaaaaattccttgctgagaaaattaaatttatgtctgagtgctatttctttgcggcaccgtggaataagcatttgtttctaacacttttttcactcaataggttctagcacattcatcygtattgttgtttgcaggtatgatccttctatttatgctgcttatgatattctacaatttggttacctatttccctaatactgataggcatttggttgtcttggtttggtatgtccatgttaaattttggtaggtattttcaaactgttcttctttgagtgtagacttttttcccaatcaccaataaatgagaattcacactagctttctgactgagtttggctggcatttttgaagcaatattctagatctcaaagcagtttagaaactctttcatggacgttattaaagagactagaaagagacatctgttccaagtaggcttcaagtaggcttcaatgggggcagtgacaggcccaagagcatcccgtcagccagggccacattgggacactcgtagataaccgccacaattgttttataacttggcaagat

SEQ ID NO: 244932 - DNA, 601 bp, Homo sapiens
tatgctcttgccattactccatccgcgagtcacacccttctatagaagtaaaaattccttgctgagaaaattaaatttatgtctgagtgctatttctttgcggcaccgtggaataagcatttgtttctaacacttttttcactcaataggttctagcacattcatccgtatygttgtttgcaggtatgatccttctatttatgctgcttatgatattctacaatttggttacctatttccctaatactgataggcatttggttgtcttggtttggtatgtccatgttaaattttggtaggtattttcaaactgttcttctttgagtgtagacttttttcccaatcaccaataaatgagaattcacactagctttctgactgagtttggctggcatttttgaagcaatattctagatctcaaagcagtttagaaactctttcatggacgttattaaagagactagaaagagacatctgttccaagtaggcttcaagtaggcttcaatgggggcagtgacaggcccaagagcatcccgtcagccagggccacattgggacactcgtagataaccgccacaattgttttataacttggcaagat

SEQ ID NO: 244933 - DNA, 601 bp, Homo sapiens
tatgctcttgccattactccatccgcgagtcacacccttctatagaagtaaaaattccttgctgagaaaattaaatttatgtctgagtgctatttctttgcggcaccgtggaataagcatttgtttctaacacttttttcactcaataggttctagcacattcatccgtattgttgtttgcaggtatgatccttctatttatgctgcttatgatattctacaatttggttacctatttccctaatactgataggcatttggttgtcttggtttggtatgtccatgttaaattttggtaggtattttcaaactgttcttctttgagtgtagacttttttcccaatcaccaataaatgagaattcacactagctttctgactgagtttggytggcatttttgaagcaatattctagatctcaaagcagtttagaaactctttcatggacgttattaaagagactagaaagagacatctgttccaagtaggcttcaagtaggcttcaatgggggcagtgacaggcccaagagcatcccgtcagccagggccacattgggacactcgtagataaccgccacaattgttttataacttggcaagat

SEQ ID NO: 244934 - DNA, 561 bp, Homo sapiens
tgcttgaggagagaagtatgtgatcagaaagcattctttgtctattaactcctgcccagcaaaagtgaaagaaaattcatgggagcatgcaagaacaaagagcacagcaaagctggacmaacacagcaatccaggcaggggatttccaactcaactctggtatataagctgcatgcaaagtcctttttctgtctctggtttctggccccttgtctgcagagatggctcccaatgcttcctgcctctgtgtaagttgggatttgataaaggggatggggaaaggaaaagcactttcaagagttggggagagatcttagaaacgggggctgggcagtactcagggctctggggggctgggcaggcatccttcaggagaagaggctggcattgacatttgcagaatgggaagagggattgtctgaagagaagctggttatctggcttctgtgttcttttttaaataaaacattggactagctactcttagggataaatggtagaagaaaaagtgggggtgagctttgtgttccacagggctggtgagatttgaaattatggtaa

SEQ ID NO: 244935 - DNA, 528 bp, Homo sapiens
aactacattgtacagtgccatttactattttactgacattttaaataatcaacaattaaagggaatacatcaacattatttaataccaataacgttatttttcttgagtaatcctgttgaaattaaggattttaaataaaacattaaaaacaaattatattgactgatttcagctttggatgaaatcatacttgtgtatttgtagtaatgcgaagcataactttctcctcacaattaatcttttataacatcggtgttatagttttctctgacaccaacattgtgatatcgcacaggtttactgcatgcatgcattacatgcctccagagagtaggcttcaaatatatggaaaaattatatttatgaaaaaattctaggaaagggaatggtgaaatggaagagaatttctcacttgctaactgttggacatggatttgtatatatttggatatagacacatactggcacactgtgagtttgcccatgtatatatacacttawatgagaaacccataatatatgggttg

SEQ ID NO: 244936 - DNA, 617 bp, Homo sapiens
cttctcattccactccaattgagtggtatccggattatgaagtggaggcctatcgccgcagacaccacaacagcagccttaacttcttcaactggttctctgaccacaacttcgcaggatctaacaagattgctgaggtgagtcctcactgggaaacatgaggaatgaccccrtgtgttcccagctgcttgggtcacctttctgagccctgatgaggcctttcccgattgagtcccctgacagatcctatgtaaggacctgtggcgcaatcccctgcaatactacaagaggatgaagccacctgaagagggaacagagacgtcaggtgagccgttagttggcactggagctgtttgatgcccagtataagggggttgacacacctgcctattcagggagcctgggtgctcatttcagaaatgtagaaattgaggctcctttcgtacatgtagaaattccttgagaggaagacagagagtgacagaatccaggacgttcatggcattgggctgaaaaggcacgttagagactgcactgcaaagcgggtgatagctgtggagtcttaagcccagtgaagaatcgtccatttccagaatcaatgagaagtaaagctgaaa

SEQ ID NO: 244937 - DNA, 626 bp, Homo sapiens
atttacctaatgtgactgtttttttgtttgttttccgagaatgggtcttactctgtcttctaggttggacagcagccccacgatctcagcccactgcagcccaggcaccacacacccatgtgatcctgtcaactcagactctcacacacctggcagtacaggtgcatgccacccctccaagctatgtattaattaactaaatacttactttttgaatgtgggtccatgttgccccaggctcatctggaactcctgagtgcaggcaatcctcccacctcagcttatcaaagtgctgggatgacaggtgtgacccatggccctgccatggctttgtgttttttgcttttttcttcctcctcctcacgtcttgttttgaaacatgcactgaaggtttcaattcatggactatagyctctgtgcctggaatttctatctttcaactcatcatcagcattcattgggattttcatatatatatatatatatatatatatatatatatacatacctatataagaatacctatgtacacacatatatacgtatatacatgtatatacgtatatatgcacatttatatacgtatatacatgtatatacgtatatatatacatgtacacatatgt

SEQ ID NO: 244938 - DNA, 548 bp, Homo sapiens
gaggaataggttaaaaatattttcttcagcatgctcactataactagtggtaacatattctttctctaaaaatattcgaatacagtgcargtcaagttttttcacaacaaaaatgacaactatgtgaggtcacacatatgttgattggctggatgtatccaatgcataatgtatatgacctgttgaacatcacgccttaagttgtaaatatgtatcatttcatatgacattttttaaacaaacatacaatttttaaaatgccttaacaaaataaatgcaaataaaatattttattataaagcagtgcttttcttttctagcaaagtctttttcatgacacaggaaagaatgcaagccgtttcgtaacttgagaaataaatacatatgtgtacatgtatatatatacgtatatacatgtatatacgtatataaatgtgcatatatacgtatatacatgtatatacatatatatgtgtgtacataggtattcttatatacatatatatatatatatatatatatatatatatatatatatatatgaaaat

SEQ ID NO: 244939 - DNA, 613 bp, Homo sapiens
tcagctttacttctcattgattctggaaatggacgattcttcactgggcttaagactccacagctatcacccgctttgcagtgcagtctctaacgtgccttttcagcccaatgccatgaacgtcctggattctgtcactctgtcttcctctcaaggaatttctacatgtacgaaaggagcctcartttctacatttctgaaatgagcacccaggctccctgaataggcaggtgtgtcaacccccttatactgcgcatcaaacagctccagtgccaactaacggctcacctgacgtctctgttccctcttcaggtggcttcatcctcttgtagtattgcaggggattgcgccacaggtccttacataggatctgtcaggggactcaatcgggaaaggcctcatcagggctcagaaaggtgacccaagcagctgggaacacacggggtcattcctcatgtttcccagtgaggactcacctcagcaatcttgttagatcctgcgaagttgtggtcagagaaccagttgaagaagttaaggctgctgttgtggtgtctgcggcgataggcctccacttcataatccggataccactcaattggagtggaatgagaag

SEQ ID NO: 244940 - DNA, 613 bp, Homo sapiens
tcagctttacttctcattgattctggaaatggacgattcttcactgggcttaagactccacagctatcacccgctttgcagtgcagtctctaacgtgccttttcagcccaatgccatgaacgtcctggattctgtcactctgtcttcctctcaaggaatttctacatgtacgaaaggagcctcagtttctacatttctgaaatgagcacccaggctccctgaataggcaggtgtgtcaacccccttatactgsgcatcaaacagctccagtgccaactaacggctcacctgacgtctctgttccctcttcaggtggcttcatcctcttgtagtattgcaggggattgcgccacaggtccttacataggatctgtcaggggactcaatcgggaaaggcctcatcagggctcagaaaggtgacccaagcagctgggaacacacggggtcattcctcatgtttcccagtgaggactcacctcagcaatcttgttagatcctgcgaagttgtggtcagagaaccagttgaagaagttaaggctgctgttgtggtgtctgcggcgataggcctccacttcataatccggataccactcaattggagtggaatgagaag

SEQ ID NO: 244941 - DNA, 632 bp, Homo sapiens
gttttaatttacctaatgtgactstttttttgtttgttttccgagaatgggtcttactctgtcttctaggttggacagcagccccacgatctcagcccactgcagcccaggcaccacacacccatgtgatcctgtcaactcagactctcacacacctggcagtacaggtgcatgccacccctccaagctatgtattaattaactaaatacttactttttgaatgtgggtccatgttgccccaggctcatctggaactcctgagtgcaggcaatcctcccacctcagcttatcaaagtgctgggatgacaggtgtgacccatggccctgccatggctttgtgttttttgcttttttcttcctcctcctcacgtcttgttttgaaacatgcactgaaggtttcaattcatggactatagtctctgtgcctggaatttctatctttcaactcatcatcagcattcattgggattttcatatatatatacacctatataagaatacctatgtacacacatatatacgtatatacatgtatatacgtatatatgcacatttatatacgtatatacatgtatatacgtatatatatacatgtacacatatgtatttatttctcaagttacgaaacggc

SEQ ID NO: 244942 - DNA, 620 bp, Homo sapiens
  misc_feature (1)...(620): n = A,T,C or G
tctcagaatatattntatcttatttataatgccttctttttattcaatatcctttaaacttttagagaaaactcttagataaaatattttatttaaaattttatagagctgtattatggacagaatgtttttcaatgtcattaaaccaattgaaaagacatttttacactggtttgtcaggcatccttttctaaatgatggagactagatttaaaactaacttaactccatggaaatcctgtttanaaagcggaaggaatcanaggcttattctaaaaattatgtttctatataataagaacactaacatcaccaaaataagtgagattaaaaattctcctctttatattggytcactggttaatttggtttgcattaggtattgttagagattcggaacatattttaaacttactaatgctatatgtggatatatatctacagatttatcaaaatgctgatagtatggatacaagagaatagatttagtgttgaagtcaatgtctgtacatctagttaaaatctctgttaaaatccttaacaaaaatatcaaactttttgtcaccaaaatattgctattaatagcaacaatgacagacaaaagaattagtactaatgac

SEQ ID NO: 244943 - DNA, 639 bp, Homo sapiens
ggctacctccagggctgggaatgtgaagagattgccaaatggctggggaccttcagtgtgtgtccagggagggaacctggctgggaattaaggcccacctgagtaatggtatggacatccagtgtcagttatcttgataaaggcctgctttcttacatcacctactattaatataaaagttaattccttagaatattgaaaaaacaaatctatgtatgaagaaatataatttgttcataattgtatggaaaaaactgccgactgatccattttccattacaattcttatgggagacttgaagtgttcrgcaagttttaagatgcatttctattcgtctactcctgccagtttttatgatcatttttgtaatacaaggacatggcctctggaaagtttttgagggactttcagcttcttttagggtagatacttgtaaattttgaattgttttcccctgcggttcttttgaggttactctttgtactttctttggggggtgttaaatttgttttcttgttttgcccttgtggaactttcgttttcaaggaattgtgtgtgtgtgtgtgtgtgtgtgtgtgtgtgtgtgttagatatgggagttagcctgtgagcatgttttcgaatatggattttttttt

SEQ ID NO: 244944 - DNA, 639 bp, Homo sapiens
ggctacctccagggctgggaatgtgaagagattgccaaatggctggggaccttcagtgtgtgtccagggagggaacctggctgggaattaaggcccacctgagtaatggtatggacatccagtgtcagttatcttgataaaggcctgctttcttacatcacctactattaatataaaagttaattccttagaatattgaaaaaacaaatctatgtatgaagaaatataatttgttcataattgtatggaaaaaactgccgactgatccattttccattacaattcttatgggagacttgaagtgttcggcaagttttaagatgcatttctattcgtctactcctgccagtttttatgatcatttttgtaatacaaggacatggcctctggaaagtttttgagggactttcagcttcttttagggtagatacttgtaaattttgaattgttttcccctgcggttcttttgaggttactcttygtactttctttggggggtgttaaatttgttttcttgttttgcccttgtggaactttcgttttcaaggaattgtgtgtgtgtgtgtgtgtgtgtgtgtgtgtgtgtgttagatatgggagttagcctgtgagcatgttttcgaatatggattttttttt

SEQ ID NO: 244945 - DNA, 639 bp, Homo sapiens
ggctacctccagggctgggaatgtgaagagattgccaaatggctggggaccttcagtgtgtgtccagggagggaacctggctgggaattaaggcccacctgagtaatggtatggacatccagtgtcagttatcttgataaaggcctgctttcttacatcacctactattaatataaaagttaattccttagaatattgaaaaaacaaatctatgtatgaagaaatataatttgttcataattgtatggaaaaaactgccgactgatccattttccattacaattcttatgggagacttgaagtgttcggcaagttttaagatgcatttctattcgtctactcctgccagtttttatgatcatttttgtaatacaaggacatggcctctggaaagtttttgagggactttcagcttcttttagggtagatacttgtaaattttgaattgttttcccctgcggttcttttgaggttactctttgtactttctttggggggtgttaaatttgttttcttgtttygcccttgtggaactttcgttttcaaggaattgtgtgtgtgtgtgtgtgtgtgtgtgtgtgtgtgtgttagatatgggagttagcctgtgagcatgttttcgaatatggattttttttt

SEQ ID NO: 244946 - DNA, 513 bp, Homo sapiens
aactacattgtacagtgccatttactattttactgacattttaaataatcaacaattaaagggaatacrtcaacattatttaataccaataacgttatttttcttgagtaatcctgttgaaattaaggattttaaataaaacattaaaaacaaattatattgactgatttcagctttggatgaaatcatacttgtgtatttgtagtaatgcgaagcataactttctcctcacaattaatcttttataacatcggtgttatagttttctctgacaccaacattgtgatatcgcacaggtttactgcatgcatgcattacatgcctccagagagtaggcttcaaatatatggaaaaattatatttatgaaaaaattctaggaaagggaatggtgaaatggaagagaatttctcacttgctaactgttggacatggatttgtatatatttggatatagacacatactggcacactgtgagtttgcccatgtatatatacacttatatgagaaaccc

SEQ ID NO: 244947 - DNA, 620 bp, Homo sapiens
gattttcagctttacttctcattgattctggaaatggacgattcttcactgggcttaagactccacagctatcacccgctttgcagtgcagtctctaacgtgccttttcagcccaatgccatgaacgtcctggattctgtcactctctgtcttcctctcaaggaatttctacatgtacgaaaggagcctcaatttctacatttctgaaatgagcacccaggctccctgaataggcaggtgtgtcaacccccttatactgggcatcaaacagctccagtgccaactaacggctcacctgacgtctctgttccctcttcaggtggcttcatcctcttgtagtattgcaggggattgcgccacaggtccttacataggatctgtcaggggactcaatcgggaaaggcctcatcagggctcagaaaggtgacccaagcagctgggaacacacggggtcattcctcatgtttcccagtgaggactcacctcagcaatcttgttagatcctgcgaagttgtggtcagagaaccagttgaagaagttaaggctgctgttgtggtgtctgcggcgatasgcctccacttcataatccggataccactcaattggagtggaatgagaag

SEQ ID NO: 244948 - DNA, 637 bp, Homo sapiens
cctgttctggctatataactaaatcccactattcatcacagctgcagcatataaatccataaatttcagattcctttataataatcaaagtagacaaactaggtatacgtttgtaaaagcttttctgtaagtccttcctttttatcttttagcctgtgtattccatcagtcaatgtttgcaaagattcagatgtatgtcccctcaggtattccggaggtgaaaggaaactcattacagacccactattaaatctttccttcccatttcctatattaggatccctggaataaacaaactctaagaatcggcagtagagaaattttctctctctkaaaaagctgatgggcttattttaactgacaatgagaattacataactcaatgcatttccctctttagattctacaatatcatgcataaaatgagtatatagtctttagactgtttatattcaatgttttatttgtacctgtatgtattctcctctggaaattgaccttttatttcaagcaatctcaaatcatttgggggataaatataaagagctaaaatttgtatgttgatctagaaaaaaattacaataagctttctttttccttcataaaagatattgtatctataggcatcattgacaaa

SEQ ID NO: 244949 - DNA, 637 bp, Homo sapiens
cctgttctggctatataactaaatcccactattcatcacagctgcagcatataaatccataaatttcagattcctttataataatcaaagtagacaaactaggtatacgtttgtaaaagcttttctgtaagtccttcctttttatcttttagcctgtgtattccatcagtcaatgtttgcaaagattcagatgtatgtcccctcaggtattccggaggtgaaaggaaactcattacagacccactattaaatctttccttcccatttcctatattaggatccctggaataaacaaactctaagaatcggcagtagagaaattttctctctctgaaaaakctgatgggcttattttaactgacaatgagaattacataactcaatgcatttccctctttagattctacaatatcatgcataaaatgagtatatagtctttagactgtttatattcaatgttttatttgtacctgtatgtattctcctctggaaattgaccttttatttcaagcaatctcaaatcatttgggggataaatataaagagctaaaatttgtatgttgatctagaaaaaaattacaataagctttctttttccttcataaaagatattgtatctataggcatcattgacaaa

SEQ ID NO: 244950 - DNA, 555 bp, Homo sapiens
ctgcccgggttttggcaggattgctgaggtggggttcgccgtggggcatcatgggaaaggacctagctggtcattccttggtctctggggaattggctttgaactgtcacctgaactgtcctggacccacttctgcagtcccctagatcatcagccagggcctatggctcaatccattgcagttctatcccatggagagagggtcagccctagaggcggaacagagaggaggccaggcgagcagcctagggctgggaagggctgggaactgagaggccttttgacctggatctgggccccacatggagaacccaaggatccgggaggagactgcagtgagcaatcccaggcaatccgtgggytgggggagagaggcccatcagggacatgtaacacccacatttcaggatcggggcaccttaagccactatgatgcatatgtggctaaagtcagtgggtgacaagcagggcttaagggatagctgtctcatcattactcgccagctccctgccctgcggtaagacctgctaccacctggggctcattttgagatc

SEQ ID NO: 244951 - DNA, 465 bp, Homo sapiens
tatggacatgttaacagtgttgattcttccaattcatgaacatggaatatcttaccaattttgtgtcctcttcagtttcttgcatcaatgttttatgatattcattatacagctctttcacttctttggtgaaatttattcctagatattttatttgtaactattgtaaatgaggttaccttcctgagttctttcttatatttctattggcctataaaagtgctactgatttctgtatattgattttgtatcctgcaactttatttgatttgttatcagttctaatagwtttttttggtggagtctttgagttttttcaaatataagataatcatcgtaaacaaggataatttgacttcttcctttctaatctggatgctttttatttctttctcttgtctgattgctctagtgaggaagacttctagtactatgtagaataacagtgttgaaagtgggcgacct

SEQ ID NO: 244952 - DNA, 519 bp, Homo sapiens
tggaggaccacacagggctcacaggggaggaaatgtgaagagatggcaaaacagaacaggacattccgtgtgtttccagaaggcaatctggctggatattaaggcccacctcagtattggtgaggacacccagtgtctcttggccctgagcwtgtgcacacaaacacgcacattgtctaaacggcattgacatcactactacctgagtcatcctcagattctatacaacccctgtaaaaatatcaatgacacattcttcttagaaaaacaatctgggaatcccaaatttgctatgaaatggcagaagatcctgaaaacccagagcaatccagtaaaaagcacaaagctggagccaccacactacctaacttcatgatatactactacaaaactttttgtaccaaaatacaatagcactggcagaaaagcagagactagagcttaggaaaaacaacaggagcccagaactaagtcactgcatttgcagctcacagccttttcccaaagaagcaagaacgc

SEQ ID NO: 244953 - DNA, 519 bp, Homo sapiens
tggaggaccacacagggctcacaggggaggaaatgtgaagagatggcaaaacagaacaggacattccgtgtgtttccagaaggcaatctggctggatattaaggcccacctcagtattggtgaggacacccagtgtctcttggccctgagcttgtgcacacaaacacgcacattgtctaaacggcattgacatcactactacctgagtcatcctcagattctatacaacccctgtaaaaatatcaatgacacattcttcttagaaaaacaatctgggaatcccaaatttgctatgaaatggcagaagatcctgaaaacccagagcaatccagtaaaaagcacaaagctggagccaccmcactacctaacttcatgatatactactacaaaactttttgtaccaaaatacaatagcactggcagaaaagcagagactagagcttaggaaaaacaacaggagcccagaactaagtcactgcatttgcagctcacagccttttcccaaagaagcaagaacgc

SEQ ID NO: 244954 - DNA, 519 bp, Homo sapiens
tggaggaccacacagggctcacaggggaggaaatgtgaagagatggcaaaacagaacaggacattccgtgtgtttccagaaggcaatctggctggatattaaggcccacctcagtattggtgaggacacccagtgtctcttggccctgagcttgtgcacacaaacacgcacattgtctaaacggcattgacatcactactacctgagtcatcctcagattctatacaacccctgtaaaaatatcaatgacacattcttcttagaaaaacaatctgggaatcccaaatttgctatgaaatggcagaagatcctgaaaacccagagcaatccagtaaaaagcacaaagctggagccaccacactacctaacttcatgatatactactacaaaactttttgtaccaaaatacaatagcrctggcagaaaagcagagactagagcttaggaaaaacaacaggagcccagaactaagtcactgcatttgcagctcacagccttttcccaaagaagcaagaacgc

SEQ ID NO: 244955 - DNA, 580 bp, Homo sapiens
gtcactcactttggcacgtaattttctatttttctggttggtgtttgcccacccttcccaaacaaagaaatgcctttattcggccacctcaatatcctttagagacaatagccagttcttcctcctttctccatccctaaactctccctgcgctctgcttgggagaaacccgagaggccgattactgagataaggcagaaaggtgagggaggaagccaagcctccttggcccttactaaccactgctttcctccacagggaccttggctaagagcattggcaccttctcagacccytgtaaggaccccacgcgtatcacctcccctaacgacccctgcctcactgggaagggtgactccagcggcttcagtagctacagtggctccagcagttctggcagctccatttccagtgccagaagctctggtggtggctccagtggtagctccagcggatccagcattgcccagggtggttctgcaggatcttttaagccaggaacggggtattcccaggtcagctactcctccggatctggctctagtctacaaggtgcatccggttcctcccagctggggag

SEQ ID NO: 244956 - DNA, 580 bp, Homo sapiens
gtcactcactttggcacgtaattttctatttttctggttggtgtttgcccacccttcccaaacaaagaaatgcctttattcggccacctcaatatcctttagagacaatagccagttcttcctcctttctccatccctaaactctccctgcgctctgcttgggagaaacccgagaggccgattactgagataaggcagaaaggtgagggaggaagccaagcctccttggcccttactaaccactgctttcctccacagggaccttggctaagagcattggcaccttctcagacccctgtaaggaccccacgcgtatcacctcccctaacgacccctgcctcactgggaagggtgactccagcggyttcagtagctacagtggctccagcagttctggcagctccatttccagtgccagaagctctggtggtggctccagtggtagctccagcggatccagcattgcccagggtggttctgcaggatcttttaagccaggaacggggtattcccaggtcagctactcctccggatctggctctagtctacaaggtgcatccggttcctcccagctggggag

SEQ ID NO: 244957 - DNA, 578 bp, Homo sapiens
atccctggaacgtaggaattaggttacatggcaaagggaaattaaggttccagatgggattaaggttgctattcggctgacttyacagagattatcatggattattcaggtgggtccagtgtagtcaccaggtcccttaatgtggacatgggaggcagaagaggaagtctgagtgatacagtgtaagaaatggctgattttggctttggagatggaggaaggggaccatgagccaaagaacacaggatgcctctggaaggtgaaaaagcagggaaagggattttcccctgaggcccccagaaagaatcacagccctgctgacacctttattttaatccactgagacctgttttagacttctgatctccaaaactgtaaagtaataaatccatgttgttgtaagccattcggttcatggtaatttgtcactgcagcagcaggaattagtcagtatctcataaggatggcatccaggtccatttccctagctagatccagggtctcatgtaggagcagctcctcagatggggccacttctgcaccccagaacctcctgcaggttggggccaaggtgaagg

SEQ ID NO: 244958 - DNA, 578 bp, Homo sapiens
atccctggaacgtaggaattaggttacatggcaaagggaaattaaggttccagatgggattaaggttgctattcggctgacttcacagagattatcatggattattcaggtgggtccagtgtagtcaccaggtcccttaatgtggacatgggaggcagaagaggaagtctgagtgatacagtgtaagaaatggctgattttggctttggagatggaggaaggggaccatgagccaaagaacacaggatgcctctrgaaggtgaaaaagcagggaaagggattttcccctgaggcccccagaaagaatcacagccctgctgacacctttattttaatccactgagacctgttttagacttctgatctccaaaactgtaaagtaataaatccatgttgttgtaagccattcggttcatggtaatttgtcactgcagcagcaggaattagtcagtatctcataaggatggcatccaggtccatttccctagctagatccagggtctcatgtaggagcagctcctcagatggggccacttctgcaccccagaacctcctgcaggttggggccaaggtgaagg

SEQ ID NO: 244959 - DNA, 578 bp, Homo sapiens
atccctggaacgtaggaattaggttacatggcaaagggaaattaaggttccagatgggattaaggttgctattcggctgacttcacagagattatcatggattattcaggtgggtccagtgtagtcaccaggtcccttaatgtggacatgggaggcagaagaggaagtctgagtgatacagtgtaagaaatggctgattttggctttggagatggaggaaggggaccatgagccaaagaacacaggatgcctctggaaggtgaaaaagcagggaaagggattytcccctgaggcccccagaaagaatcacagccctgctgacacctttattttaatccactgagacctgttttagacttctgatctccaaaactgtaaagtaataaatccatgttgttgtaagccattcggttcatggtaatttgtcactgcagcagcaggaattagtcagtatctcataaggatggcatccaggtccatttccctagctagatccagggtctcatgtaggagcagctcctcagatggggccacttctgcaccccagaacctcctgcaggttggggccaaggtgaagg

SEQ ID NO: 244960 - DNA, 578 bp, Homo sapiens
atccctggaacgtaggaattaggttacatggcaaagggaaattaaggttccagatgggattaaggttgctattcggctgacttcacagagattatcatggattattcaggtgggtccagtgtagtcaccaggtcccttaatgtggacatgggaggcagaagaggaagtctgagtgatacagtgtaagaaatggctgattttggctttggagatggaggaaggggaccatgagccaaagaacacaggatgcctctggaaggtgaaaaagcagggaaagggattttcccctgaggcccccagaaagaatcacagccctgctgacacctttattttaatccactgagacctgttttagacttctgatctccaaaactgtaaagtaataaatccatgttgttgtaagccattcggttcatggtaatttgtcactgcagcagcaggaattagtcagtatctcataaggatggcatccaggyccatttccctagctagatccagggtctcatgtaggagcagctcctcagatggggccacttctgcaccccagaacctcctgcaggttggggccaaggtgaagg

SEQ ID NO: 244961 - DNA, 609 bp, Homo sapiens
cctcccactttgagctcgctgagtcaaaacacagccygaatagtttaggagctccaaagccccgcttatctccactttccaaattctctctcattaagaccaacaaaaattttacctttattattagttatgtgacctgctaagacaatttataacactttttattatggaaattttcaaacttacacaaaaataaagaaaatacctctatttacctaccatgggacttcaacaattattagcatttacaaatcttggaacaatgttattttctcacattatgttctatctcatccctcttaaagagttatcagatgggaaatccatggtctaggctcaataaaatcactctacattaggaaagtcttggaaacagattgcgttttagcaggaaaaggaggggggttgatgatttcattcaataaaacagccttaactcaccgccgtgaccaataaccgggtaatgtggaagctccccgtaagattcctcgtggaaggcaaaaatagagcacaactgggcttttgaatacctcttacatctgcctgcctttgtcttgtctattttccaacctgatttcacctgctccctatcaggatcttagcctctca

SEQ ID NO: 244962 - DNA, 621 bp, Homo sapiens
gtgactgcctaaaaaagagacagggcagcctgccctgtcccatgagtccttcccgttgggcttccataaaaggggtgaagtgtccttccccagcaggaggcggcattgagtaattcttatgacaccagccttaaagaaggacttacttggcctgcagtctgccacacacatctccctcagggccccagcagggcctctgcagctrgtaggtgcttaatggaggattttaggattttgcatcttggttatctcatctttgaggactcgacctacatctggcaagtctaggagatggaattgaggagggcatatgcacagagtactgggaattagagagctgagtcactggagagtctcgaacctcagagcagctgcctttctcttggactcaggccaagattgagggagactgacgacatattgcatctcacaggttcccaggggcacaaggctatttgcgaccacagcagctccgtttggctaaggaggccttgggtttctgagggataggaagaatcagagcagagaagagcagatggaatggtgaccgacgtagggccctgaagtttacttagggttgtcttctagaaatgtgaggtgctgtgtttacaaaaaaagcat

SEQ ID NO: 244963 - DNA, 580 bp, Homo sapiens
gtcactcactttggcacgtaattttctatttttctggttggtgtttgcccacccttcccaaacaaagaaatgcctttattcggccacctcaatatcctttagagacaatagccagttcttcctcctttctccatccctaaactctccctgcgctctgcttgggagaaacccgagaggccgatkactgagataaggcagaaaggtgagggaggaagccaagcctccttggcccttactaaccactgctttcctccacagggaccttggctaagagcattggcaccttctcagacccctgtaaggaccccacgcgtatcacctcccctaacgacccctgcctcactgggaagggtgactccagcggcttcagtagctacagtggctccagcagttctggcagctccatttccagtgccagaagctctggtggtggctccagtggtagctccagcggatccagcattgcccagggtggttctgcaggatcttttaagccaggaacggggtattcccaggtcagctactcctccggatctggctctagtctacaaggtgcatccggttcctcccagctggggag

SEQ ID NO: 244964 - DNA, 418 bp, Homo sapiens
acacattcttgtagatgttcagagtatccctggaaggatacacaagaagctggtcttggtggtttctctgggaaagggacccaggtggtttggagaatgaggaagaagcctcgtggttcacttttttttctgttaaatctgcaccatgtgcaaaagacaaaaaagatcacctgtccccacccccacaaaaaataagtcagctattgcagtagcctaggctagcactaaggttatcgcagcaacagtggggggatttgagcaagactggagatagcagaaagccaacatgtgctcagtgccctcaaggtatttatactctagaagggggcacasgtgggaaaaatagattaaacgggggctcatcagagaaacactggactccactggactggccaagcagacaggagggaacccacct

SEQ ID NO: 244965 - DNA, 576 bp, Homo sapiens
aacacgtatcaaacagcatcacatgctacagagaaatctctcacaaaaggaagagtgaatcgatgtggcaaacttcgttgttgtcttaatttaagaaattgycatagccacttaagcttcagcagcccccactctgatcagacagcaacacaccttccacccacaaaaggattataactctccgaaggctcagataatcattatcattttttagcaataaagtattttaaaattaaggtatgtacttctttaagacataatgctattgcacacgtaatagaccataatatagtgtaagcataacttttatgtgcactaggaaaacaaaaacttagtgacttactttaccgagatattccctttattgtgatgaactgggcccgcaacccgcaatatctccaaggtatgcctatatctgagaaagcagcactgaaatggcaaataaataatattcatgaaagctttgccagtaaggaagtagagggtggctgttttgtggaaactaaaagcgtgtcctgcaaaaacctttcgtgaaatcagacaggctttctttcttttttatttttttttccaaga

SEQ ID NO: 244966 - DNA, 569 bp, Homo sapiens
tcaattcctgcaataactagattccataataagaaaagactgtacttggctgatttctttcataatgtacctattaatatttaagtgtgaattccttaaagctcttgtgataggcttctcaaggcatggcaacattcytcacctctcttctgctgtatcatattatattactgtgtctctgtgataacaataaagaatttgactgccctttgtccctggttcctaggagggaaactaaatccttggaatctcctgagtaatatgagtatctttgttattcatgagccccttggatcacacctgggcttatgctaagagagaactcacgatgggaggttggtcatcagaaagatcacataataaaaggattgggccttagagccagcccaacctcgacggagggtgggaggactagagattgcgttcaattcggtggcaaatgagtcaaccaattgtgcctatgtaatgaaaactctggacgccaaaatttggtggagcttcctggttggtgaacacatccatgtgccaggagggtgacacaacctgattcacagagagaagacacagaa

SEQ ID NO: 244967 - DNA, 569 bp, Homo sapiens
tcaattcctgcaataactagattccataataagaaaagactgtacttggctgatttctttcataatgtacctattaatatttaagtgtgaattccttaaagctcttgtgataggcttctcaaggcatggcaacattcctcacctctcttctgctgtatcatattatattactgtgtctctgtgataacaataaagaatttgactgccctttgtccctggttcctaggagggaaactaaatccttggaatctcctgagtaatatgagtatctttgttattcatgagccccttggatcacacctgggcttatgctaagagagaactcacgatgggaggttggtcatcagaaagatcacataataaaaggattgggccttagagccagcccaacctcgacggagggtgggaggactagagattgcgttcaattcggtggcaaatgagtcaaccaattgtrcctatgtaatgaaaactctggacgccaaaatttggtggagcttcctggttggtgaacacatccatgtgccaggagggtgacacaacctgattcacagagagaagacacagaa

SEQ ID NO: 244968 - DNA, 569 bp, Homo sapiens
tcaattcctgcaataactagattccataataagaaaagactgtacttggctgatttctttcataatgtacctattaatatttaagtgtgaattccttaaagctcttgtgataggcttctcaaggcatggcaacattcctcacctctcttctgctgtatcatattatattactgtgtctctgtgataacaataaagaatttgactgccctttgtccctggttcctaggagggaaactaaatccttggaatctcctgagtaatatgagtatctttgttattcatgagccccttggatcacacctgggcttatgctaagagagaactcacgatgggaggttggtcatcagaaagatcacataataaaaggattgggccttagagccagcccaacctcgacggagggtgggaggactagagattgcgttcaattcggtggcaaatgagtcaaccaattgtgcctatrtaatgaaaactctggacgccaaaatttggtggagcttcctggttggtgaacacatccatgtgccaggagggtgacacaacctgattcacagagagaagacacagaa

SEQ ID NO: 244969 - DNA, 593 bp, Homo sapiens
caactgaaaaatatttattcactagaggccaaatccttcccctgtaagaatcatgctctgcttttcccagattgataatcccaggtcccctctccttgcttcaaccttaggttggcctccataagggtgcttgttgtatgttcctagtggagtatgatgcagtagtagacactatgtaggcaaggcatgctagcaaaaataagatggggatgtggctttgagggttcctatacaggatacaggaaataacctgcatttgaaaatagggagggaagtrgttggcttttgcaccaaaactcaaaactattaatgatgcaccttgaagccagtgacccacctgttagaaatataataagaggctgccacccacaataggccaagagagggctaactgcaggatgatggtcctaaatgagataacccttcgtggatggttgcctcattgccgattaaccaatatgtttgtcccaaaaagatgcacttgagctatccagaagagctaccactgatgtccattgcatcctgttttcttcatctttggaaaggcctacatgtgatttgggggtaggggtaataaggctgttctctatttg

SEQ ID NO: 244970 - DNA, 593 bp, Homo sapiens
caactgaaaaatatttattcactagaggccaaatccttcccctgtaagaatcatgctctgcttttcccagattgataatcccaggtcccctctccttgcttcaaccttaggttggcctccataagggtgcttgttgtatgttcctagtggagtatgatgcagtagtagacactatgtaggcaaggcatgctagcaaaaataagatggggatgtggctttgagggttcctatacaggatacaggaaataacctgcatttgaaaatagggagggaagtggttggcttttgcaccaaaactcaaaactattaatgatgcaccttgaagccagtgacccacctgttagaaatataataagaggctgccacccacaataggccaagagagggctaactgcaggatgatggtcctaaatgagataacccttcgtggatggttgcctcattgccgattaaccaatatgtttgtcccaaaaagawgcacttgagctatccagaagagctaccactgatgtccattgcatcctgttttcttcatctttggaaaggcctacatgtgatttgggggtaggggtaataaggctgttctctatttg

SEQ ID NO: 244971 - DNA, 590 bp, Homo sapiens
ctccttatacctatctctctccatcaccataggcatctcctaggtaggattctgtgtgtcactgtagccaaaaaccatcatagaattgtaatgactattattcaggtttcaatttacacagtttatttggctccttgtttaaaaggtcctgtcctattccattatttgattttgtgtacctacactatgctaagtcagggaattgccatacattcagacaaagagaataaatcagatatataattgatttttggtaaaatttagatagcagtaaggtaatcgtgggcaacatcagggttctacttgttactttatattaaaagttataaataaaatacattaggatataaatatattcatttgcaaaaatttttgccttttttaatggtctcatttgcagattcattatatggcaccatcaactgcagtcaaacaaatgtgtacaatttcccaaagaaatgttggcataacttytttagtttaaccaaggataactgttaaactaagagaaatgcaccaaaatggttctaccatccaactggagattaaagctaatcaaagcaaaatggtgctatgtacttacagttagc

SEQ ID NO: 244972 - DNA, 615 bp, Homo sapiens
tgagattttgttcctatagcacagaggatttgaaacatgccacttattacctacaaggcatgagcttgcaaaggggaagtgaatctagtccaagtgtgcaagtagatggacagcacagaagaaaatggaaacacagatgtagcataaaaaaattaatatgaggaagcatgaatacagttggctggagagaagaggagagcttgaagctggagtgacagccctctccataaaatgggatcagagtttggctttgtcttgattttctattttttcagaaacttagtaatttccttcactgtcacagttttataatttacaaagctgatttcatgtacaatttatagcctatcacacctckgatattgataattattttccctgtgattaagaggctatgatagtgggctatcaagttgagacagtctttttatgttaaaagagacaagaagggcatgtggaaagagagctatgagcctcaaccttacatttctcagtttgggcataaggtgttccctgatggctgagaacaacacagttcagaaagggcagtcacccagacacatcccctgaccattctcatcagaattactgggatgagaggccccaaaatgtgag

SEQ ID NO: 244973 - DNA, 511 bp, Homo sapiens
ctcatgagctgactctattgattaacatgtataacttctgmtgaatttgatttaagtggcttatgccaggaagagaagaataaaaatgatctcaattcagatcaatcaatattaacaagtatttaggtctcagctcaataagtcacatttcagaactttttctccacattgccttaatactaataccaaagaattatttagcatttactatattcccaatactgtgtctcaaaaagaaaattctttgaaagcttgaagataaaactcagtaaaggtctgttgaggtcagcgcagtggctcacatctgtaaatcccaacattttgggagtcaaaggtaggagaatcacttgaggcaaggagtttgagaccagcctgggtaacaaagcaagaccctatctctacagaaaataaataaataaataaaaattagctgggcatggcgtgtagatgtagtctcaactactcaggaggctgaggtgggaggattgcttgagtccaggaattcaaagct

SEQ ID NO: 244974 - DNA, 578 bp, Homo sapiens
caatcaatattaacaagtatttaggtctcagctcaataagtcacatttcagaactttttctccacattgccttaatactaataccaaagaattatttagcatttactatattcccaatactgtgtctcaaaaagaaaattctttgaaagcttgaagataaaactcagtaaaggtctgttgaggtcagcgcagtggctcacatctgtaaatcccaacattttgggagtcaaaggtaggagaatcacttgaggcaaggagtttgagaccagcctgggtaacaaagcaagaccctatctctacagaaaataaataaataaataaaaattagctgggcatggcrtgtagatgtagtctcaactactcaggaggctgaggtgggaggattgcttgagtccaggaattcaaagctgcagtgaggcatgatcacgccactgcactgaagcaggcaatagagtgagattctggctcaaaaaaaaaaaatctgttgagatcaaactcgaatctattaaaccaaagcaaatataaaatatcacgtgatactgaattcagtggtaaacatcaaaatgtttcctagatat

SEQ ID NO: 244975 - DNA, 346 bp, Homo sapiens
gttccttgtttttccatcttgggccaggtcaatatacagggtcactattttctttacagagtacaaggattttctgctcaaggtctaggaccaaattatagcaagacaggatacacttatgaaacatttcagtctgttttaaagctattccycccgccccccaaagaaaaggtgtttattcttcatttagaattcatgagttattcaagctatgagattaaaatgtaaaattgccccttttaaaaatttctatccagaatctagtttactaatccactcttaaaatagacataactaacatacttatattcataggacagttcccatttcccattcatagtaaatg

SEQ ID NO: 244976 - DNA, 566 bp, Homo sapiens
atggattgcttaggaaggcaaagactattaggatcaataggatggaagacaaatgttgctggacatgaagatgggacattagggaaagcattcctttttgtttgtttgtttgagacggagtctcactgtcaccaggctggagtgcaatggcgcaatctcagctcactgcaacctccacctcccaggttcaagcaattctctgcctcagcctcccaagtaactgggattatagatgcctgccaccacacccagctaatttttgtatttttagtagaaatgggatttcaccatcttgaccaggctggtcttcaacttctgacctcgtgaaccacctgcctcagcctcccaaagtgctgcgattacaggagtgagccatcacgcccagccagcattccttatttctaaggtatttctaaggagcatagacagaaagagatgtactcctttttcctctggatattacatcatctggatgtgatactagaactgcagcagccatctygcaattacaaggaaagccaggttaaagcaaaaacaatattccaaagataagaaaagtgagacat

SEQ ID NO: 244977 - DNA, 462 bp, Homo sapiens
caccatgaagaagagttcttgggatgaatcattttattacatatttgaccaagtggaaaagcaatttgttctgtgattatggtcactgacactgttgacaatgtttatcatgtggcaagttccacaaacaataaagtatacgtgttcactacaggaaaaaagtaagggtggttgagagagtggggstaatgctaccgtatgttaggatccaagaactacaagataaaaagaagccatttggcccaaatagcttacacaattaaatatgccattaatttcaactataaactctgcttgtcgatgtattctacaattacctctttgctaaagaatctctcaagcagttaactaatgccaggcctgctagggacagcctgtctataaacactacctaacctccatgttatctaccatcatgccctcatctaattagatctgagcagtcacccggcttcaagctta

SEQ ID NO: 244978 - DNA, 462 bp, Homo sapiens
caccatgaagaagagttcttgggatgaatcattttattacatatttgaccaagtggaaaagcaatttgttctgtgattatggtcactgacactgttgacaatgtttatcatgtggcaagttccacaaacaataaagtatacgtgttcactacaggaaaaaagtaagggtggttgagagagtgggggtaatgctaccgtatgttaggatccaagaactacaagataaaaagaagccatttggcccaaatagcttacacaattaaatatgccattaatttcaactataaactctgcttgtcgatgtattctacaattacctctttgctaaagaatctctcaagcagttaactaatgccaggcctgctagggacagcctgtctataaacactacctaacctccatgttatctaccatcatgccctcakctaattagatctgagcagtcacccggcttcaagctta

SEQ ID NO: 244979 - DNA, 462 bp, Homo sapiens
caccatgaagaagagttcttgggatgaatcattttattacatatttgaccaagtggaaaagcaatttgttctgtgattatggtcactgacactgttgacaatgtttatcatgtggcaagttccacaaacaataaagtatacgtgttcactacaggaaaaaagtaagggtggttgagagagtgggggtaatgctaccgtatgttaggatccaagaactacaagataaaaagaagccatttggcccaaatagcttacacaattaaatatgccattaatttcaactataaactctgcttgtcgatgtattctacaattacctctttgctaaagaatctctcaagcagttaactaatgccaggcctgctagggacagcctgtctataaacactacctaacctccatgttatctaccatcatgccctcatctaattagatctgarcagtcacccggcttcaagctta

SEQ ID NO: 244980 - DNA, 501 bp, Homo sapiens
cagcctgtctataaacactacctaacctccatgttatctaccatcatgccctcatctaattagatctgagcagtcacccggcttcaagcttacttattacatttggcccatttactagaattagatacagaatcttctctgagagatattttctcaagtattgcataagaaatcagtgctacatatttttctggaaaatgatcctccttatgaattttgctttgctattatccactataatatcaaaaaayaaataaaatcctccatgatcaaggtctaggcctttatccaagattctcatttgctcctcatctacttcttttccctcagaacttaataaacttacctggacatcttcacagtgctttagatatgcctattgcctctgaagaaataaaaatatcatttctctgcaagagtcactatttatccttgagcaatcactcctacaccctctggcttacttcgctagttctcagtcagagcctacagaaagattag

SEQ ID NO: 244981 - DNA, 501 bp, Homo sapiens
cagcctgtctataaacactacctaacctccatgttatctaccatcatgccctcatctaattagatctgagcagtcacccggcttcaagcttacttattacatttggcccatttactagaattagatacagaatcttctctgagagatattttctcaagtattgcataagaaatcagtgctacatatttttctggaaaatgatcctccttatgaattttgctttgctattatccactataatatcaaaaaacaaataaaatcctccatgatcaaggtctaggcctttatccaagattctcatytgctcctcatctacttcttttccctcagaacttaataaacttacctggacatcttcacagtgctttagatatgcctattgcctctgaagaaataaaaatatcatttctctgcaagagtcactatttatccttgagcaatcactcctacaccctctggcttacttcgctagttctcagtcagagcctacagaaagattag

SEQ ID NO: 244982 - DNA, 201 bp, Homo sapiens
gtggcagttcatggttttgaaaattccactttaaatggaaattttcaaaaatggttctgttgctctggtttgctgacaaccaacctttacaaatttggcaagaaccctctgttgcccagctgcctctgatktactgtccctgggcacagtctccagcgtggctgttgggctctatacagctaacactgccattgcctctgg

SEQ ID NO: 244983 - DNA, 597 bp, Homo sapiens
gcacagtcaatctactctactgtaaaagtggttattaataaaacctccaaaagagcagatgacttctcaaaaaagtagtctctcacaaaaaaaaaaaaaaggaatcagtagattgaagagaaatctgtatgcctgtttaaagcagcactattcacaagagccaaaatatggaaccaacctaagtgtccaccaatggatgaatggataaagaaaatatgatatatatacacaatgaaatactattcagtcacaaaaaagaatgaaattctgtcatttgcagcagcatagctgagsctggggggacattaaattgaaataagccaggcacagaaagacaaacattgcatgttctcattcatatgtgggaactaaaaaagttgatctgatggaggtagagagtagaatgatggttatcagaggctggaaagcatagtggggagcagggcaggcagagaggttggttaacgggaacaaaaataagttagaaggaatacattctagtgcttgatagcacagtaggatgattatagtttgttatatatttcaagatagctagaagatttcaaatgttttcaacacaaagaaatgataaatatt

SEQ ID NO: 244984 - DNA, 597 bp, Homo sapiens
gcacagtcaatctactctactgtaaaagtggttattaataaaacctccaaaagagcagatgacttctcaaaaaagtagtctctcacaaaaaaaaaaaaaaggaatcagtagattgaagagaaatctgtatgcctgtttaaagcagcactattcacaagagccaaaatatggaaccaacctaagtgtccaccaatggatgaatggataaagaaaatatgatatatatacacaatgaaatactattcagtcacaaaaaagaatgaaattctgtcatttgcagcagcatagctgaggctggggggacattaaattgaaataagccaggcmcagaaagacaaacattgcatgttctcattcatatgtgggaactaaaaaagttgatctgatggaggtagagagtagaatgatggttatcagaggctggaaagcatagtggggagcagggcaggcagagaggttggttaacgggaacaaaaataagttagaaggaatacattctagtgcttgatagcacagtaggatgattatagtttgttatatatttcaagatagctagaagatttcaaatgttttcaacacaaagaaatgataaatatt

SEQ ID NO: 244985 - DNA, 597 bp, Homo sapiens
gcacagtcaatctactctactgtaaaagtggttattaataaaacctccaaaagagcagatgacttctcaaaaaagtagtctctcacaaaaaaaaaaaaaaggaatcagtagattgaagagaaatctgtatgcctgtttaaagcagcactattcacaagagccaaaatatggaaccaacctaagtgtccaccaatggatgaatggataaagaaaatatgatatatatacacaatgaaatactattcagtcacaaaaaagaatgaaattctgtcatttgcagcagcatagctgaggctggggggacattaaattgaaataagccaggcacagaaagacaaayattgcatgttctcattcatatgtgggaactaaaaaagttgatctgatggaggtagagagtagaatgatggttatcagaggctggaaagcatagtggggagcagggcaggcagagaggttggttaacgggaacaaaaataagttagaaggaatacattctagtgcttgatagcacagtaggatgattatagtttgttatatatttcaagatagctagaagatttcaaatgttttcaacacaaagaaatgataaatatt

SEQ ID NO: 244986 - DNA, 597 bp, Homo sapiens
gcacagtcaatctactctactgtaaaagtggttattaataaaacctccaaaagagcagatgacttctcaaaaaagtagtctctcacaaaaaaaaaaaaaaggaatcagtagattgaagagaaatctgtatgcctgtttaaagcagcactattcacaagagccaaaatatggaaccaacctaagtgtccaccaatggatgaatggataaagaaaatatgatatatatacacaatgaaatactattcagtcacaaaaaagaatgaaattctgtcatttgcagcagcatagctgaggctggggggacattaaattgaaataagccaggcacagaaagacaaacattgcatgttctcattcatatgtgggaactaaaaaagttgatctgatggaggtagagagtagaatgatggttatcagaggctggaaagcatagtggggagcagggcaggcagagagrttggttaacgggaacaaaaataagttagaaggaatacattctagtgcttgatagcacagtaggatgattatagtttgttatatatttcaagatagctagaagatttcaaatgttttcaacacaaagaaatgataaatatt

SEQ ID NO: 244987 - DNA, 535 bp, Homo sapiens
gctgaggctggggggacattaaattgaaataagccaggcacagaaagacaaacattgcatgttctcattcatatgtgggaactaaaaaagttgatctgatggaggtagagagtagaatgatggttatcagaggctggaaagcatagtggggagcagggcaggcagagaggttggttaacgggaacaaaaataagttagaaggaatacattctagtgcttgatagcacagtaggatgattatagtttgttatatatttcaagatagctagaagatttcaaatgttttcaacacaaagaaatgataaatatttgagatgatggataccccarttaccctggtttgatcattaatacattgtatacatgtatcaaaatatcacatgtatcccataaatatgtacaattattctatattaataaaaacagagtggtctctgaatgcagatcagaaatgaaggactcaagcacttatcactgtgtaatagggtcagccttcattgcagaatataaaatgaagccattagaacagttttct

SEQ ID NO: 244988 - DNA, 535 bp, Homo sapiens
gctgaggctggggggacattaaattgaaataagccaggcacagaaagacaaacattgcatgttctcattcatatgtgggaactaaaaaagttgatctgatggaggtagagagtagaatgatggttatcagaggctggaaagcatagtggggagcagggcaggcagagaggttggttaacgggaacaaaaataagttagaaggaatacattctagtgcttgatagcacagtaggatgattatagtttgttatatatttcaagatagctagaagatttcaaatgttttcaacacaaagaaatgataaatatttgagatgatggataccccaattaccctggtttgatcattaatacattgtatacatgtatcaaaatatcacatgtatcccataaatatgtacaattattctatattaataaaaacagagtggtctctgaatgcagatcagaaatgaaggactcaagcacttatcactgtgtaatagggtcagccttcattgyagaatataaaatgaagccattagaacagttttct

SEQ ID NO: 244989 - DNA, 647 bp, Homo sapiens
caggctggatcaattatcagcaaagtgatgaacaaaattatyttaaaggtgaccatgtgatcttctgccagggtccaggccaactcagtgaattaactccatatttagatttcagcttcagcactgtgttgatttctcttatcacttgcttcctcccccacatgaacaaaaagtgtcacattttctcctcaccagtgtttcacctaggcaccccaactactcagaatctgttagaatttctacacactaaaagatccatatcatttattatctttcagtacaagaaatatctatttttttcactgctaattctgattctcaatttaatttctaccacctaaggatgatctaatgttatgtgcaatttgtgtccttaggtaaggacagaagattaacacattatataaagagtagttataaaacaactacaatagtggaggtggcggagttggggggttcccacagcactggtgaattagtgaaaaaggagagggcattagcgaaaaacaggccaattaggtcaaagtgcaaaaaatatacaaatgaactaacagacttatttgtgtaaactaggaataggaaatcacaaatgaattaaagttaaatcttgtctagcctcatagaaaatcgatggagataacacaggg

SEQ ID NO: 244990 - DNA, 647 bp, Homo sapiens
caggctggatcaattatcagcaaagtgatgaacaaaattatcttaaaggtgaccatgtgatcttctgccagggtccaggccaactcagtgaattaactccatatttagatttcagcttcagcactgtgttgatttctcttatcacttgcttcctcccccacatgaacaaaaagtgtcacattttctcctcaccagtgtttcacctaggcaccccaactactcagaatctgttagaatttctacacactaaaagatccatatcatttrttatctttcagtacaagaaatatctatttttttcactgctaattctgattctcaatttaatttctaccacctaaggatgatctaatgttatgtgcaatttgtgtccttaggtaaggacagaagattaacacattatataaagagtagttataaaacaactacaatagtggaggtggcggagttggggggttcccacagcactggtgaattagtgaaaaaggagagggcattagcgaaaaacaggccaattaggtcaaagtgcaaaaaatatacaaatgaactaacagacttatttgtgtaaactaggaataggaaatcacaaatgaattaaagttaaatcttgtctagcctcatagaaaatcgatggagataacacaggg

SEQ ID NO: 244991 - DNA, 598 bp, Homo sapiens
atggcaggctggatcaattatcagcaaagtgatgaacaaaattatcttaaaggtgaccatgtgatcttctgccagggtccaggccaactcagtgaattaactccatatttagatttcagcttcagcactgtgttgatttctcttatcacttgcttcctcccccacatgaacaaaaagtgtcacattttctcctcaccagtgtttcacctaggcaccccaactactcagaatctgttagaatttctacacactaaaagatccatatcatttattatctttcagyacaagaaatatctatttttttcactgctaattctgattctcaatttaatttctaccacctaaggatgatctaatgttatgtgcaatttgtgtccttaggtaaggacagaagattaacacattatataaagagtagttataaaacaactacaatagtggaggtggcggagttggggggttcccacagcactggtgaattagtgaaaaaggagagggcattagcgaaaaacaggccaattaggtcaaagtgcaaaaaatatacaaatgaactaacagacttatttgtgtaaactaggaataggaaatcacaaatgaa

SEQ ID NO: 244992 - DNA, 598 bp, Homo sapiens
atggcaggctggatcaattatcagcaaagtgatgaacaaaattatcttaaaggtgaccatgtgatcttctgccagggtccaggccaactcagtgaattaactccatatttagatttcagcttcagcactgtgttgatttctcttatcacttgcttcctcccccacatgaacaaaaagtgtcacattttctcctcaccagtgtttcacctaggcaccccaactactcagaatctgttagaatttctacacactaaaagatccatatcatttattatctttcagtacaagaaatatctatttttttcactgctaattctgattctcaatttaatttctaccacctaaggatgatctaatgttatgtgcaatttgtgtccttaggtaaggacagaagattaacacattatataaagagtagttataaaacaactacwatagtggaggtggcggagttggggggttcccacagcactggtgaattagtgaaaaaggagagggcattagcgaaaaacaggccaattaggtcaaagtgcaaaaaatatacaaatgaactaacagacttatttgtgtaaactaggaataggaaatcacaaatgaa

SEQ ID NO: 244993 - DNA, 598 bp, Homo sapiens
atggcaggctggatcaattatcagcaaagtgatgaacaaaattatcttaaaggtgaccatgtgatcttctgccagggtccaggccaactcagtgaattaactccatatttagatttcagcttcagcactgtgttgatttctcttatcacttgcttcctcccccacatgaacaaaaagtgtcacattttctcctcaccagtgtttcacctaggcaccccaactactcagaatctgttagaatttctacacactaaaagatccatatcatttattatctttcagtacaagaaatatctatttttttcactgctaattctgattctcaatttaatttctaccacctaaggatgatctaatgttatgtgcaatttgtgtccttaggtaaggacagaagattaacacattatataaagagtagttataaaacaactacaatagtggaggtggcggagttggggggttcccacagcactggtgaattagtgaaaaaggagagggcattagygaaaaacaggccaattaggtcaaagtgcaaaaaatatacaaatgaactaacagacttatttgtgtaaactaggaataggaaatcacaaatgaa

SEQ ID NO: 244994 - DNA, 602 bp, Homo sapiens
aagtgttattgaacactcagcctaattttttaatttttgtttcattttcatgaagtcatatggaaaatagatactgtgcccgaacatttaaattgacttctgcyatcttagggaagagctagttgtcttagagcggaagactagaaattaaaagcctggaatctttttctgagagtcttacaaactctcctgagatgaatatggaaattatccaaagttttttttttttaagtaactttggaaaaagtggtggatatgttaaagaataatctatttttaataacaaaaatcaaagcattgaggaaagtatgtttccaaattgagcattttgattttgataatgaacataaagttaggaatagcttttaaaaatcattccactgctgtggaagaccacttggctgttcctcaaaaagttaaacatagaattaccatatgatcccacaaccctacttctaggtatatacccaaaagaactgaatacaggtactcaaacacatacacacatgttcatagcagctctattcacaataaccaaaaggtggaaatagcccaaatatccatcaataaatgagtggaaaaacaaagcatggtacagccac

SEQ ID NO: 244995 - DNA, 572 bp, Homo sapiens
tgattgcttccgtgactcattaatcagcatgtcccatgcatcttccagaaagatgaccctcggtgtaaacaatgtctaaagagacccacagaagccagagaagagggcaaaagggtaaaccctaatctctctcccaaaggactagctttaaaatagtctgacgtacacgtatggccccctcttaggggccaagtagacattttccaccttgcaccatggtgaccaaatctcacccccacttactccttgtcccacttaattaatcctcatcccacttaattaacagtgctactcatttgttctacagatgttttctatttaggaaaaccaactaatgatcagaatcagttataagaagttaatcaataatccttctatttatgactgatttgttctattttaaaacttgaactgtttggagatgttacatcttgtcactttttaatcaaagttccatctgacactctgtargagatgtagggatattatttagtagcatcctacaacattcatggctttgttatccatgacagcaagcctgaactttccattctatctgaaagagacactta

SEQ ID NO: 244996 - DNA, 536 bp, Homo sapiens
ccgccatgcagtcagaaatccatatacaacttttgactcccccaaatttaactactaattgcttactcttgacctgaagacttcccaataacataaacagtcaattaacacatatttaatatatgtattatatactgtattcttacaataaagctaaagaaaagaaaatgttaagaaagacataaggtggctcatgcctgtaatcccagcactttgggaggccgaggcaggcagatcacctgaggtcgggagttggagatcagcctggccaacatggtgaaaccctgtctctactaacatacaaaattagccgggcatggtggtgcatgcctgtaatcctagctactcgggaggctgaggtagcagaattgcttgaacctgggaggcagaggttgcaatgagccaagatcgtgccattgaattgcagcctgggcaacaagagcaaaactcyatctcagaaaaaaaaaaaaaaaagtcacaaggaagagaaaatactgttcatttagtggaagtagatcatcataaaggtctttatc

SEQ ID NO: 244997 - DNA, 599 bp, Homo sapiens
ctgggtatatatccaaaagaatcaaaaacaagatctcaaagagatattggcacattcatgttcattgcggcattattcgcaattgccaaggggaagaagcaacataaatgtccatccaaagatgaataaagaaactagggtatggcatatatatgaatatcattcagcctttaaaaagaaagaaatcctgtcatgtgttatacagcatagacgaatactgaggaccttatgctaagagaaataaaccagtcacaaaaagacatgattccactgcaygattctacttatgaggtatctaaagtggtcaaaatgaaagaaatagaaagtagaatggtggttgtcaggggccgacctgacagggagtgggaggtagagagttgttgtttaatgtatgtagggtttcagtcatgtggggaatgggtgggtctgagatctgttgcacaacaatgtatatgtggtggacaatattgtactatacacttggaaacaggaaggtgaattttatgtcgtgtgtgtcttttttaatatctttatgcgtttgtttgccacaataaaaagggagggcgggatggaagagtatctctgttattggccaagaa

SEQ ID NO: 244998 - DNA, 599 bp, Homo sapiens
ctctgggaggaaatgagtcaatatatgtaaagcacttagaaaaaattgatacaaattaagtgctcactaaatgttaactatttttcttattatgtgccagggccttcatgccagggcctatgtcaaatactagggagacagcagtgaatgagaccaacatggttactgctcagggaacatttagatttgcagatttggcaccagttctgatactttatgaataaactgtctcagattcctattctttagaaaggaaaaaacaatcctattcaatgcttgttgttgktttagcataatcatcattaacatatcatttcaatggtactgaatgcttacattacaggtattgggccaattgcttcacaagctttacctcatttaattctcacatcaaagtcctgagctatactatcatcctcttttacagttcaagaaactgaggaacagggagattaagtataataagattcaaatccaggtctgtctgactttgttctggagtcctaccccatgccgccttcagaatagtaaatgagagcccttgaagtggaaaactgccaaggcaaagggaatgcactcagactacatcacagacagga

SEQ ID NO: 244999 - DNA, 482 bp, Homo sapiens
tccattaacttttcatacatgacatataagatgccaaatatgctttatgtttccaatagacttcctcagttttcaaagctatttctaaggagtgtttttttctttctgtctatatttacacagtgtgaaaattggacaaggaccaatgcaggtaatggctgcttataactataagcagacctgggttaactaaagaaatctgataaacaccaagctaatgagaccaaaaaaaaggtgatcacattatgcttaatgcatacaccttctttgaggaacaataatccttatacttggcacatttatagtggagcttcccatcatcactgttgatttgtgaggtgctaattagcttttctttctcaatcagaagaaagtaataatttgtcagatcagaatgcacttgcttccattttaatcaattgtaaaactttagcttactattttaaaaaacactttytaacattattaatgttcacccctca

SEQ ID NO: 245000 - DNA, 610 bp, Homo sapiens
gtattctacaaacaacttacacaccacaaaccacactgctcattctctatgatttattttacagcctgaattatgcaaaatattgttatctaaatctctttcctggtctttggcaaacataatatgataattagtatcaagggcgtttagaccaagtgttcatggattcaactgtcaaactgactgaaagtggaaatttcttagaagcatacgccagcagtcaggcacggtggctcacacctataatcccagcactttgggaggccaacgtgagcggatcacctaaggtcaggagtttgagaccagcctgcccaacatggtgaaaccctgtctctactaaaaatacaaaaattagccaggcatggtggcgggtgcctgtagtcccagctactggggaggctgaggcaaaagaacggcttgaacccaggaggtggaggctgcagtgagccaggatcatgccattgcactctggcctgggtgacaaagtaagactctgtctcggraaaaaaaaaaaaaaaagtatatgccagggatggttgaaaacattgctgtaattgatgggcaatctttgagataacctataaaaggaattcctttaacacatcctaaa

SEQ ID NO: 245001 - DNA, 579 bp, Homo sapiens
gcgtggcctttcacaaagggtgagccatgctctgactccaaagaggttaaatgccaaggcaagtttcagttatcttaactcaatttacctcaatagaaataacctaaattagatggtttctaattacccttctagacaaggattaaatgtctgagatggggctaaagcagagacaagcttgtgatggacagatagattccaaaagactggtccaattgacacttaaaagctgtagatggtttctttttcctttattcaatccctgatattttaaatcatatattaaatttcctcactcatgtacaaatctcaccaccaaagttcatgttaaataaactatgtcacagttacaagtcaagttacacagaaattatctcagatggctaatgctttataacttatgtgttttatacagtattccatgcttaagtaaattcaagataatctggaaaacatttatctggcatctattaacaatgagaacacttactaacatttagggatatcagtgaagaagacacgtccccttcygttaatcagctcacagctttgttaacaaaacagatgtgtagtcaagta

SEQ ID NO: 245002 - DNA, 579 bp, Homo sapiens
cccctttaacatgcatttagcttaaatttgtaaaccaaaaccaggatcagaatacttttttttttttttgagatggagtcttgctctgtcacccaggctggaatgcaatgtcacaatttcagctcactgcaacccccgccttccaggttcaagtgattctcctgcctcagcctcctgaggagctgggattacaggtgcccaccaccacgcctagctaattttttgtagttttaatagagacagagtttcaccatgttgatcaggctggtttcgaactyctgacctcatgatctgcccacctcggcctctcaaagtgctgggattacaggcgagagccaccacgcctggcccagaatacatttttaatcatagtatcattttgggtagccattaaggcaactgcaaaagtgtacccagtcagtaaaaaacttcagttgtaaaaatgatttgtcttcataaaaagagacctcctaatgagctaaaccacctgatccttcgaaacactaaggtatgatcatgtgactcttggaagtcacaatggtttttctggtctatgattacaattatcccggacaccaa

SEQ ID NO: 245003 - DNA, 548 bp, Homo sapiens
tccattaacacacatttgtaatcaaaaacctaattacacaaccagagaaaccaatacaatgctgcttgagagcactgagagctcattttaaatttcctcccaagatgccaagggctgtagtaattcattctataaacttagagacacctaccctatactaggcatgctgtacgcaaggcactgtgcttggtagagtgaacaagatggatatggtccctgtcctcaaagaacctaggacctagtggctgcacactgcaccagaatatagtctcaatcaccaggcttaacccttggtaaaaaagaagagtgcccaaactcaaaaagtgaaygtagcaagtcagtagaaacctttgttgtttctatctctcctcattacctgatttattttctgttctttaatcttttggtgaggttcccaatgaacttggctgaatggaagactggccatttgatagagaaaatggtactaagacttctgttaaccaaaagctgacatgaaaactcactctgattagctagaaaatctcctttcttatagttaggcatat

SEQ ID NO: 245004 - DNA, 622 bp, Homo sapiens
tagaagcatggctatgaatttttttctaacaaaatgggttctattacaaaaatacattagaataatctattgttgagctatacagttcctattagtcactagtgatttcaaccaaaatgattttcacataatacattttagtttaaaaaaaaagtatgatgcatctgctcatatttcacttaagcaccattttattttttcagatatttaaataatcatcctcaatggtaaatgactacmataaggagtaacatttgtccatgcttataattattatctgtataaaacatcgtgctccttgaggctatacaccatattataaacatctttatatacctcctctaatcataaagacccctacacagagtagctgcttgataaatatttgatagcacaatcctttaaattgaatctcttaatccctaaattttaatgatcaaataatattcattctaagaggttttttccctagtatccccaaatattcttacatattacattgaacatttgtagactgaataacacttttaagactcaaaactaccataaaatgtatttcctaggatgaatcaatagaagtttaattaagtacatatataagtttatataaaaagcaataaaa

SEQ ID NO: 245005 - DNA, 509 bp, Homo sapiens
ctgcagtgagctatgatcacgccacggcagtctggctggggcgaaagggcaagaccttgtctctaacgaaaaagaaaaagaagtagatgacagatagacagatggatataggtagatacctacggagaaatagatagacagctagatcaatatatgagacagagagaaaragagccagcgagcaaaacagagagagagtgtatgtgtgcgtttgaagctaagacagggtttctcagcctcagcactgtggacattcgggtctggatcactttctgaggtgaggccatcctatgcactgtatgggaagcccctgaggccatgggaataggctcggggctgcggtaaggaacggatccaccactagagcctccagaaggaacccaccctgcccacaccttgatttcagacttctgcttccaaaactgcgacagaatgaatcccagttgtaagccacctggtgtgtgatggcttgctacagcagccctgggaaatggatacaagggggatga

SEQ ID NO: 245006 - DNA, 509 bp, Homo sapiens
ctgcagtgagctatgatcacgccacggcagtctggctggggcgaaagggcaagaccttgtctctaacgaaaaagaaaaagaagtagatgacagatagacagatggatataggtagatacctacggagaaatagatagacagctagatcaatatatgagacagagagaaagagagccagcgagcaaaacagagagagagtgtatgtgtgcgtttgaagctaagacagggtttctcagcctcagcactgtggacattcgggtctggatcactttctgaggtgaggccatcctatgcactgtatgggaagcccctgaggccatgggaataggctcggggctgcggtaaggaacrgatccaccactagagcctccagaaggaacccaccctgcccacaccttgatttcagacttctgcttccaaaactgcgacagaatgaatcccagttgtaagccacctggtgtgtgatggcttgctacagcagccctgggaaatggatacaagggggatga

SEQ ID NO: 245007 - DNA, 580 bp, Homo sapiens
cacacctgtgaagatgagctgttggtgtacattgccagggtgaaattccacagaactgttttagggtaaacaaaacagtttactttcctcagattgtgaggacagtatgtagcttttaaaaaacttaaaaaaatttttttgtagctatcttatttagaaagaaaatgggaggcagatctgactaactttttttttccagcttgacttttcccttggcttaatgattttggggtcccaagatttattttcctttcacaattgaacrtcagaacatggagtatttaacacaggaaatgagcaaatttaacgtacacacccaaggaaaaggaaaaatgaagctggttggaagttaattatggatagtgtggtatatgagcagaaattccccttaaccagtgttcttgcccaggctagcccaaatgagcccaggctagcctagattcccaagtgtgtatcttgagaacgaggaagagccctagaaaacaatgtgtaacgtccctccaagatggggtgttctggaacaatccctcagacaacgaaggcaattgttgatgggcaacattgggaagaccccagagat

SEQ ID NO: 245008 - DNA, 593 bp, Homo sapiens
ctcagcaacctctcacgacacagggaaagcagaagcttcccggaggtgtaggcagggttccgacatggctcacactcaagaaggaaagcctgagaaactgcacccacaggagcgaagctgagagtcaatccactgagactgagaattgggcttcttaagaaaggaacaccagcatgttggtggacactgacaaagacccttcgcttggcccgactttatttatattttaaagaatcttytaacttttattttaggatcagaggtatatgtactggtttgttatataggtaaactcttgactcgggggtttggtatacagatgatttcgtcccctgggtactaagcatagtaccctacagtttctttttgttttttgttttgccctgggcctctcctcccaccctgcaccctcaagtaggccccagtgtctgatgctccgctctttctgtccacgtgttctcattatttagctcccacttataagtgagaacatgtggtatttggttttttgttcctgtattagtttgctaaagataatggcctccagttctatccatattcctgcaaaggacatgacttcattcttttgtatg

SEQ ID NO: 245009 - DNA, 626 bp, Homo sapiens
aacctcccctttacatagtctcattgttcaccttgttcagatctttataggttcaggctcaggtctctgcggtcgcgcagtgtgtctttttaccaaaaggaacacctcatgcactttacaaggagctccttcaggaaaggatggcacctcgtgttgaggagagatctctgatcctctgatcttttccaaaaggagaaaagtaaaggtttgaatggatttttagttctcggcatttttgaacagaaatagtcaggtattaagttgctcaaagatgcccacaagctttcataggagaaacatctaattcataaccaagagtttatgttattaagtaagctttcctttaacaggatgaatgaatgaagagtttaaatactctaatccccatttagtcatctggtatactctctgtatactctcagtcatctggtatactctgtcatctggtatactctctgtgaggtatactcttaagtcatctggtatcctctctttgagtatgccagattmttaaatggaaattactgcaccactaaacaccagtactgcaaacccttatttaaaaaatcgacacctaggacataaaaaaaaatgatcctaggctgggcgtggcggctcacgcctgt

SEQ ID NO: 245010 - DNA, 585 bp, Homo sapiens
gggtattagttgtatggctctgcactgacagacttgagctttgaggggtactgataaggtctgatttcctgsggcaatgataatgttgggacttagactaaggtgcaggtgcctgtcaagttagtggggaggcagatacaggtcgttgttccacataagaagaatctgccttgtctgggtagacagaacttaaccctggcttttaaaggaatagtgtacactgtttttttttctttactatttctttctctctctttctctcttcaactccttctttgtctcttcctctctttttaactctctctttgactttctgtgtctgtccctctttctctctgactccttctctttgtccctctgttccttcctctctctctctctttctctgactttctttttctctccttcttgctggtctttccctacctctgccagtcactcatgctgctgttctcccctcttcttcccattttgatggctttggcagtgtaagagtgccacctacttgtgtttttgcattgcatgcaataattctataatttccttgtggcatttaacaggggttcccccagaggttaggaactc

SEQ ID NO: 245011 - DNA, 472 bp, Homo sapiens
cactcattattcactaaaacacttctattcaaaaggcccaatttttgtagattcctgaagtaggacttgacaccaggtatcacaaatttacaaacttaccacttcagcgttttaaaactttcttaccaggatccctggtcttctgggtgccatggaaactccaactagaaaagaaaatgaaattcccttcggctggaaactgttcgtgtcattcctgagcccccctaggtgtctrttgtagattatataagctgcagttcgcaaatgcactttgcatttgttccacaaaccctgttgaatgcttgttttgtaggaggttccacatgctgggcaaagaagaatgaataaaacacagtctctgccctggaagaatttacaaagaaatagtggtactacaggtgctgtggaacagcacagagtgtgtaaatgttagcttaatggtatctttctaacatcaaacttttttatttct

SEQ ID NO: 245012 - DNA, 609 bp, Homo sapiens
acaggccatacttttctaaaaaccatgggtaatactatttgtaaagtgtgtcaagtgagtcaaaggcatagttcttcactccaggaggcaaacacagtgtctctgtccccaggatatccactctgccctttcccactcgagcctagtccctcacccttggcttgcctgctcttggccttggaatccagctttgcctctgtagtcactccctcctgtcactgatttctggccacaagtcttggttttcaaactttctattcaatctatttcagcccattcatgagtcactcttgcctgtggacagctggcattcccaggcacgggcttggcagggaaagatgaattcggtgaattaagccaacggaatcctttatgaaagtcatagttgacctgacagggctgtttctatcctaaatccaggggtagcttgagatgatctaatgagagctccccarctgaggccatatttctcaaagtatgttacagtggtcagaatcacctggggcacatgttaaaaatgcagattactgggcccatccagagcattagaataagagcatctgagaatggggcccaggatttggcttctgaaaaacaccccttatgata

SEQ ID NO: 245013 - DNA, 516 bp, Homo sapiens
ggggtagcttgagatgatctaatgagagctccccaactgaggccatatttctcaaagtatgttacrgtggtcagaatcacctggggcacatgttaaaaatgcagattactgggcccatccagagcattagaataagagcatctgagaatggggcccaggatttggcttctgaaaaacaccccttatgatagctctgatgctctttgacttccctgtaaaattggtatcttgaggaaacgtgccctatcgaatactgcgctgatctaaacatggacacaactttggatggtgagcatatcggtttgtcaaagacccatcaccaaccaaaatgatgagcaacaaccaagtcatgttcaggaaaaaaaaaaaaaaaaaagtgcaggtcacgctttcctcaatatagtgggtttactgcttaaacactgttcagattttactcacagtgaagctgctccaacaccaggtaggggatcagcataggtaaaaacaaggagaaaaatgtcctctgccttttaa

SEQ ID NO: 245014 - DNA, 577 bp, Homo sapiens
aacaggaaatctatgtttggctaattcacttaacgtcaaggacaacataatcctttgctccccaacaggaccttatggtggcatcttaaaaaaaaaaaagaaagaaaaagaaagaaaaaaaaaggacaccgaaastattatatgtattcctacacattttcaaaaacacatgagaaatacaacattgaagtacttatccggctgtctcctttttcattataataaaagtaacagaaaggaaaacttaagtactttatgtttctagtccatgacattcttgttacttttatattggaaacttcacctttctccaaattttcgggagttggcaaggtggaaacctcaaagatactacctctttcagtttcttaccatagatgtaattatgggtcatagatatacttgtatctatgaaaagagatccagagcattactatcttcaaacagccagctaaaatgaaaatgtaattgggattctgtgctctgaaaagtgcagcataaatttatttcactctatctccctaagaaaattcatgaaagtcagtttggatgtttcattcagctatttcacagtaaa

SEQ ID NO: 245015 - DNA, 632 bp, Homo sapiens
ttattcccaagtatattcctgtcaaaattcgacttcattacttctcaataagacagaggtcttcattctacactaattctaagtgtttccttaaattttaggtacacttcactagtttaaaatgaccaactattccggaaatttgtataaacaagttaaaggcctcaataatacctgaaagcaaataattttactccttcttacattacctgataattatatacaggcaactgatatccagtggtgacctgaaatggtgaacttggataagcaggaaatgcctgaaaagaaaggttggcagaaaaaaatgaatatggtaaaccactttttaaaattacaaagaaatataattcccaatataacaacaatattacagaagggaaaatatcgtttttctacatacaacaatgcagaattccaaatgaatgactgatttatgaagaaagaaagattccatgtcaagtgctacactttggctgtgaagggggaagaaatgacaaaagaattgacgacttcaccaaagtttaccttatactgtgtacgtattcacacccagacgttatttcttacactggtgataaggctccattaasagagattgcaaggtaagttaaattaatacatttgctatt

SEQ ID NO: 245016 - DNA, 616 bp, Homo sapiens
tcagtaatgcctcacagtaaatgacagaaagaagtagggttttttttctagccattgttcagagaaggaaaaagaagaggtgtaccatacatgtttcaagtacatggaaaatatcaacaaattagagacacggcagaactattcgactattattttgttacttcactttccgtcaaagaaaatgtctttaaagctaacacataaataaaacgaactaagaagaatataaacrtcctttatcaacattaagtgatggagtatgtcaaaacctactttaaatatcagtgtaagcaggatcagagaaattagatgcaagaagctcacgggatttatatacctactaaaccacatcagaaatctacccattcccgaaccagaatatatccagaagtcagcaatttatatgaggaggcatctggaaatcatttcaaataaagggtagctagatgaactgttaaacttaccgaagaatgaagtaggcagacacataaggagagctgctttcattcactttaggaactggttataaggaggaaagcagctctggtgctttggaggtaatactctcgtttactcctattcttatttaagcgcaattaacagcaaagcatttctg

SEQ ID NO: 245017 - DNA, 386 bp, Homo sapiens
tacaggtagcagcatacatgaatacacccagaatcagtgatgcctcacagtaaatgacagaaaaaagtaggactttttttctagccattgttcagagaaggaaaaagaagaggtataccatacaagtttcaagtacatggaaaatatcaacaaattagagacactgcakaactatttcactattattttgttacttcattttccgtcaaagaaaatgtctttaaagctaacacgtcaataaaatgaactaagaagaatataaacgttatttatcaacagtaggtgacagagtatgtcaaaccctactttaaatatcaatgtaaccaggatcagagaaattagatgccagaagctcacggggtttacatatatatactaaaccacat

SEQ ID NO: 245018 - DNA, 624 bp, Homo sapiens
ttattcccaagtatattcctgtcaaaattcgacttcattacttctcaataagacagaggtcttcattctacactaattctaagtgtttccttaaattttaggtacacttcactagtttaaaatgaccaactattccggaaatttgtataaacaagttaaaggcctcaataatacctgaaagcaaataattttactccttcttacattacctgataattatatacaggcaactgatatccagtggtgacctgaaatggtgaacttggataagcaggaaatgcctgaaaagaaaggttggcagaaaaaaatgaatatggtaaaccactttttaaaattacaaagaaatataattcccaatataacaacaatattacagaagggaaaatatcgtttttctacatacaacaatgcagaattccaaatgaatgactgatttatgaagaaagaaagattccatgtcaagtgctacactttgggtgtgaagggggaagmaatgacaaaagaattgacgacttcaccaaagtttaccttatactgtgtacgtattcacacccagacgttatttcttacactggtgataaggctccattaagagagattgcaaggtaagttaaattaatacat

SEQ ID NO: 245019 - DNA, 492 bp, Homo sapiens
ccactacagtatctagtcacctcagattttccggtacctgaagttatcaccagtgaatgtgcaaaaaaagcaacaatggcacatgcctttttctctgggagctccatcccagggaggtatagacctgttttcagcccaaaagcacttgtaggaagtagccagaaatgcctgtggaaaggtcttccccagtgaaaagaaaatgactggggatccacttaagaaagcagcctactgggtgcagcagctcttgcctgtagtctcagcactttgggaggctgaggtgggyggatcaacctgaggtccggagttggagaccagcctgaaccaacatggtgaaaccccatctctactaaaaatacaaaattagccaggtgtgtttgtgtatgcctgtaatcccagctagtctggaggctgaggcaggagaatcatttggactcaagaggcaaaggttgtggtgatctgagattgctttattgcattccagcctgggca

SEQ ID NO: 245020 - DNA, 547 bp, Homo sapiens
ggatcagaacattatctagcaacaacaaagaaatcagcagtggtaggaaaagccagccagaggaagaacagaattaaaacacgaaaatctccttctgtacataaataatgagccttcaatgagcgcttattgtgggccagctctttcctatgcctattacatgaactaactcgttgaccttaacgactggacacaggaagactcggaggcacaagttcatctaagtgacacagaccgtgcgcgktacagcatgttttgtactcaggcagcatctccacccaccccatgccgccttcagcacagaagccccagtgacaagaaggctacttcattttggcaaatccgtgcatcttttttttttttttgagactgagtctcgctctgtcacccaggctggagtgcagtgacgcgatctcggctcactgcaaactccgcctgctgggttcacgccattctcctgcctcagtctccggagtagctgggacttcaggcgcccgccaccatgcctggctaatttttttttgtatttttagtagagacggggttt

SEQ ID NO: 245021 - DNA, 547 bp, Homo sapiens
ggatcagaacattatctagcaacaacaaagaaatcagcagtggtaggaaaagccagccagaggaagaacagaattaaaacacgaaaatctccttctgtacataaataatgagccttcaatgagcgcttattgtgggccagctctttcctatgcctattacatgaactaactcgttgaccttaacgactggacacaggaagactcggaggcacaagttcatctaagtgacacagaccgtgcgcgttacagcatgttttgtactcaggcagcatctccacccaccccatgccgccttcagcacagaagccccagtgacaagaaggctacttcattttggcaaawccgtgcatcttttttttttttttgagactgagtctcgctctgtcacccaggctggagtgcagtgacgcgatctcggctcactgcaaactccgcctgctgggttcacgccattctcctgcctcagtctccggagtagctgggacttcaggcgcccgccaccatgcctggctaatttttttttgtatttttagtagagacggggttt

SEQ ID NO: 245022 - DNA, 569 bp, Homo sapiens
gcttctccttcctcagttccttacggctttttctccctcccgggcgaaagctcaccggggcgccgcgcccctcgcaacccccgggagcctcgccttccgaagtcgcgtgcacgaactcctccaccgctagcttcagcctcttcagggccttctccccaccgccagcaggaccgcggcgcggcccgcgcccgcctctgcgcttcatgcggaccacgcgtccctgggagccgcccgggccggcctctcccgcgctcctggacgccgccatctttcgaaacgcgtggacgcacgacttccggccgaggcgggacttccggggaagaggcggctgcgcggggcgggcgggcggcgccccctgctggccggagggcgacagcgtgcagagctgcgcggagccgggtgcgggggcagccgggcaggtggcgsccggggcaggcgcgcccgcgggtgggcgccgcgtggacgtcaggctcgcgatgagcatggaggtgccttcacatttaaaagggaaatccggccgggcgcggtggctcacgcctgtaatcccagcactttgggaggccgagacg

SEQ ID NO: 245023 - DNA, 521 bp, Homo sapiens
agtatatgcaaggtcccttgaggcctaggctcagaacaggcacacggtagttcctcctatccaaggtagaatctgtttcctcctccccagatctgggttggccttatgatttgctttggccaacaaaatgaagcagaagtggcagtcacattacagagggagtggatacaggaagaagtggaggattaggcacacctctatctctaccaagacaatctaccttatcacttggtttcaacagctaggtctgcagttgaacacatgatgtactagatagaatctggaggttcatttggctatttttagatggttgacagctctgagaataatcttcctgtaaagtagattgttgcggtttgcatcccctcagatacaaactctaagaagagattggtgtgcaggatgtttatcaygaagtgctctgaggattgacacctgtgggagaagggaaggcaggaagattgggcagagggtgaagttgtgatgcaatgcagtctcaacaaaggcctcagctaacccac

SEQ ID NO: 245024 - DNA, 617 bp, Homo sapiens
gtgaatttagcaaggtcacaggatacaaggttaatgtatgaaaatccactgtatttttatatgctaacagcaaacaattgggaaatgaaattttataagcaatttcatttatgagagcatcaaaaaataaatacttaggaataaatttaacaaaagatatgtaagacctccatggtgaaaactacaaaagattgctgagagaaatcaaagggctaaacaaatggaaagatatgccatgatcatggattggaacacttaatactgttgtcatttcttcccaaattgatctgtagatcaaatgccgtcccagccaagattccagtaggttttatttttaattctggaatgtatatagaaacataaggaacttaaaggactcacagccattttttaaatgaagaacaaagttggagaatgtccactacctgattttaaggcctattatagagctacagtaatcaaaacagtgtggtcatgatgaaagtatagatataaatcaatgaacaaaatagagaatccagaaatagatccccatatatggtcaattgattttaaataaaggtaccaagggaatccagtgaggcagyaaaatcttttcaacaagcaatgtggaacaa

SEQ ID NO: 245025 - DNA, 598 bp, Homo sapiens
caggagtccaggtgaggtcaaattggttgccagaaatgcagaagtctggaaagacatctcaaaaggccaatcttaggttctctaatagtgatgttatctacaggagtaattggggaagttacaaatcttgtgacctcgggacaatggctggttgtcatttaactacacctacatcttagcagaattcaggcctctctcaatcctaaccttgcggcctctcattagttttgcaatggtgttttagtttggggaagggctagtatcatccttgctttaaactgtatgtagtttaaactataaactaaatttctcccaaaattagcttggcctgtgtgtgcccaggaatgaccaaggacacttggaggtcagaagcaatatggaatcagctatgtcagatttctcctaacagtgatacttttgcaaaggcagtttcgctaagctgacctgctttgcaactgcctacctactaactgttcgttattgtaggtgataagcatccttgtggcttagcctcctttcrgttatttttttctgttcatgccacgaagccatcctaactttatcctgacacatctccttgccccaggggagctatgga

SEQ ID NO: 245026 - DNA, 261 bp, Homo sapiens
cccatagtgagtacttcataaatgttagttactattatcgcttaagtgccattaagcattgtactgaattcatgagctttttaagatttttattaatgaaacccaacacagagattcttctcaacacagatttggtgtcctgtcccttttcttcttcttacttgagatttattaatttaattatgcatttctctaagcagatatacactcttttttttcttttcattgtgtctgycaatgtaatgaatgtaaagtattaaa

SEQ ID NO: 245027 - DNA, 457 bp, Homo sapiens
caaccacccgcgtcacctggggaacgtcacrcagctcacatccccaggctcctcctggccccatcggtcaggatcttccggtcctatgggcacatgtgttctcaatgctcccaggtgacttttggcccagccaggtttgagaactgaagcctgagaagcatcctaactgtctctgtggctcagatgctctactcagcatgtcgggttagactcagtggggacagggactggggactgcccagacaagggtttagagcaaaaccgtctcacagggaaagagggcactagcagatacataaacctagcatcttcgattaagccagctattcaagacatttgcaaaaagtaaaaatgccacttattttttgttttgttttaaaaaatatagattgctgagaagttacttttaaaaaaatgaggatcccaaggagcttttatttctgtgggtcatatgaat

SEQ ID NO: 245028 - DNA, 595 bp, Homo sapiens
tattgatttttagatccttactctacagcataagatgattatgtgaactagctgctccttaaatctccttggtctttagtaagcatctttttaaatatctatataaagtctgtttttcttctgtattaaatttttctcaatgacaattactggtaacggctccttaagtgctcctcagatcaaagagaataaatacatcaaaggcacgcctgaaaaaaattgaacttcttaggttacccttaaatcatgagaagaactcgtgaagtgaaarttctcttcgtgtctattaaccacatctcatttaccgtcatacacagcagctgggtgtggttgtatagattgttcttgcaaaagagtgcctttcagtcaagggcaggtagaggctgaaatccactgaatcctctgctcaccaagcatgcacacatggagctgcacccaaccctaagtcacgcagaatcaatttacacactacctgggccaatgtgaggtcaatgcacagccccaggtccattagatcacgcaagtggcagagaaacactgtggctgtgtcaagcatggtgcttggcactaggagcccaaagagaaataagaaacc

SEQ ID NO: 245029 - DNA, 507 bp, Homo sapiens
tgtaaacaaataggagaggctggtttaggggaattaagttgagcacaaatcagagtggagcaaaggagcatttacttgattcaaaattacagttaacacctattttgtgcaggttgctgagaaatggggcgtcccacatgatctaatatgcctatatcccttctgtccttcactyacttgttcattcagcactttgaacggtaactgttctggggacagtagtctaaatgcaaagctgatctctcccaatgccaagtcttaaattgacagtgatgaatgaaaaatctttatttgcatgcttgtggttttcttaaacagactacacgagtaaaatttagctgtttattggtcatattttttacccatttgaacataaattttgttactgggctaaaatggagaaatgctctccaggatattgagaaatgtatatactctgccattagccaaaaaagcaccacattctctttttaatgtacatgtgtgagctctctatctcttctacag

SEQ ID NO: 245030 - DNA, 507 bp, Homo sapiens
tgtaaacaaataggagaggctggtttaggggaattaagttgagcacaaatcagagtggagcaaaggagcatttacttgattcaaaattacagttaacacctattttgtgcaggttgctgagaaatggggcgtcccacatgatctaatatgcctatatcccttctgtccttcacttacttgttcattcagcactttgaayggtaactgttctggggacagtagtctaaatgcaaagctgatctctcccaatgccaagtcttaaattgacagtgatgaatgaaaaatctttatttgcatgcttgtggttttcttaaacagactacacgagtaaaatttagctgtttattggtcatattttttacccatttgaacataaattttgttactgggctaaaatggagaaatgctctccaggatattgagaaatgtatatactctgccattagccaaaaaagcaccacattctctttttaatgtacatgtgtgagctctctatctcttctacag

SEQ ID NO: 245031 - DNA, 599 bp, Homo sapiens
atgaatgaaaaatctttatttgcatgcttgtggttttcttaaacagactacacgagtaaaatttagctgtttattggtcatattttttacccatttgaacataaattttgttactgggctaaaatggagaaatgctctccaggatattgagaaatgtatatactctgccattagccaaaaaagcaccacattctctttttaatgtacatgtgtgagctctctatctcttctacagaatgtgatgcatgggctttgtggcagctgtctgagttccagaggactttccttcccacwattgccagactctggctgtgttctggataaatgaggttgtcagaaaagaaagtttctgggaaagaaagcatcacaacacagctatacacatcccttccaacagtagcctgcagtgaaatgtttgggacaatatattcgcaaattccaattaatcagaattttaagaaaattgtatgtactagactgaatttcttactcatcttaaggctggacacaactctgaaagtaattgcatctttctccagtaaatcagaatcttagttgatctcaaagtcattcttctaaaatcagttttaactttacag

SEQ ID NO: 245032 - DNA, 577 bp, Homo sapiens
aattactatcccaaagtcttctaacttcagggtctgccagatagcaaaaggagtccataagctactttcagtttttctaagaatttagtagaaaccatatattttcctatgataagatcatgcaagctaaccatattaagcttatttgcctttggtaagtattttgtcagctttgtgtgccaaccttgtccatcttttgctgattggaagctctgattagcagttatataagtctttgaataaaaaaaaatgagaaaacctgtgaattattattttataagcaattcttttgttgaaaaatattttcaaaaagtattcctcaggaaacatgcataataaaaaatgcctttgaaaaggactattgggaagcaatatcatcattcytcttacttttattgatagggaaattgaggcctgagggttaagacagccccgccaggagtttcagatctctcttacctcaacatttatttaatccttcttgatgcctcagatttttttgttgagctgtttgaaaacatatcttcccaacaattttaatttcatatgaggaaggtatattttacagattctgtcc

SEQ ID NO: 245033 - DNA, 578 bp, Homo sapiens
tccctttttcaattaacatcattagtatttcatactactatgtggcttttataattactttgctggttacacagactgtaagagttaattttatgtgtcaacttgactggaccacagggtgcccagatgtttggttaaacattgctcatgtctatgagggtgcttctagatgagactaatattagagtcagtaaaattgagtgaagcaggttgtcctccccagggtacacaagcctcacccaacctgttgaaggcatgaatagaatgcaaggttgagtaggaaagaattactgtctccacctgactgtctttgaaccttagacatcagtcttctcctgacttaaaactaggacttctaaggaacctacaccatcagctctgctgggtccggatttctcagcctccaaaatcacataagccaattcctaattttaaaaagtctcttcacacacaaacacacacacacacacacacacacacacacacacacaygtaccctattggttctgtttctctggagaaccctaatacacagaaccataatttaccaaatcacttcctgttatgagacctttagg

SEQ ID NO: 245034 - DNA, 553 bp, Homo sapiens
ctgaaatgtcaggcaggggtattcttcccattactatgactataattgatacyataaggttagtttctatattccctctacttctgataaatctccacatccttctcataccataaaggtaagagcttggactgggagtctgaggacagttcaggctactgacttgatgattaaccagcagctagattcgaggaaatttgcataacttccctgagcttcagtcttctcattagtaaaatggagattgtagtgggaatgaaattagctaatgtgtacggaagtatttagcagcctgtacccacagagaagcaccggataaattacagtaatgcatgggttattctccttgaccctcaagggtcattctccatcctctatggattggatccttcacttgctctcaggcttctgagaggtgccagacaataggagacatgggaaaaacaaagaagcaactggagaaagacataagggtgttatttattctcccacccctactccagggccagggtgtattcacttggatgcttctcctgcacccagggacatagct

SEQ ID NO: 245035 - DNA, 553 bp, Homo sapiens
ctgaaatgtcaggcaggggtattcttcccattactatgactataattgatactataaggttagtttctatattccctctacttctgataaatctccacatccttctcataccataaaggtaagagcttggactgggagtctgaggacagttcaggctactgacttgatgattaaccagcagctagattcgaggaaatttgcataacttccctgagcttcagtcttctcattagtaaaatggagattgtagtgggaatgaaattagctaatgtgtayggaagtatttagcagcctgtacccacagagaagcaccggataaattacagtaatgcatgggttattctccttgaccctcaagggtcattctccatcctctatggattggatccttcacttgctctcaggcttctgagaggtgccagacaataggagacatgggaaaaacaaagaagcaactggagaaagacataagggtgttatttattctcccacccctactccagggccagggtgtattcacttggatgcttctcctgcacccagggacatagct

SEQ ID NO: 245036 - DNA, 619 bp, Homo sapiens
tggggaaaaaattgcacgtgtactgaacaggtayagacttttttcttgtcattatctcccaaccaacacagggtaacaacgatttatatagcatttacactatattaggtattgtaagtaatctagagatgatggaaaatatacaggagggtgtgcatcagttgtatgcaaataccatgccatttcataccacggtcttgactatctgtagattttggtattcacaagaggtcctgaatcgattccccagggatactgagggacaagtgtattgtgactggagttgcagcagccatcctgcaaccaaaaggcaaatgcgtgagaataaaggtcaacacaccaaatccaagagaatcgagataaagaacctgcaattttgatgggatctttgtggagcaaataaaaccgatacaagcaattattcatctctacttttcattaaatgagaacttgtgtccctacttgttcatatgactatgaaaaggatttctattaggagcagtcattttctgttacaattgttaattcacaaaagggacattctgtaaactaagtatcctaaaatcaaagataatcattacatctagaacaatccaactggtaataacaatttatattt

SEQ ID NO: 245037 - DNA, 619 bp, Homo sapiens
tggggaaaaaattgcacgtgtactgaacaggtacagacttttttcttgtcattatctcccaaccaacacagggtaacaacgatttatatagcatttacactatattaggtattgtaagtaatctagagatgatggaaaatatacaggagggtgtgcatcagttgtatgcaaataccatgccatttcataccacggtcttgactatctgtagattttggtattcacaagaggtcctgaatcgattccccagggatactgagggacaagtgtattgtgactggagttgcagcagccatcctgcaaccaaaaggcaaatgcgtgagaataaaggtcaacacaccaaatccaagagaatcgagataaagaacctgcaattttgatgggatctttgtggagcaaataaaacygatacaagcaattattcatctctacttttcattaaatgagaacttgtgtccctacttgttcatatgactatgaaaaggatttctattaggagcagtcattttctgttacaattgttaattcacaaaagggacattctgtaaactaagtatcctaaaatcaaagataatcattacatctagaacaatccaactggtaataacaatttatattt

SEQ ID NO: 245038 - DNA, 619 bp, Homo sapiens
tggggaaaaaattgcacgtgtactgaacaggtacagacttttttcttgtcattatctcccaaccaacacagggtaacaacgatttatatagcatttacactatattaggtattgtaagtaatctagagatgatggaaaatatacaggagggtgtgcatcagttgtatgcaaataccatgccatttcataccacggtcttgactatctgtagattttggtattcacaagaggtcctgaatcgattccccagggatactgagggacaagtgtattgtgactggagttgcagcagccatcctgcaaccaaaaggcaaatgcgtgagaataaaggtcaacacaccaaatccaagagaatcgagataaagaacctgcaattttgatgggatctttgtggagcaaataaaaccgatacaagcaattattcatctctacttttcattaaatgagaacttgtgtccctacttgttyatatgactatgaaaaggatttctattaggagcagtcattttctgttacaattgttaattcacaaaagggacattctgtaaactaagtatcctaaaatcaaagataatcattacatctagaacaatccaactggtaataacaatttatattt

SEQ ID NO: 245039 - DNA, 619 bp, Homo sapiens
tggggaaaaaattgcacgtgtactgaacaggtacagacttttttcttgtcattatctcccaaccaacacagggtaacaacgatttatatagcatttacactatattaggtattgtaagtaatctagagatgatggaaaatatacaggagggtgtgcatcagttgtatgcaaataccatgccatttcataccacggtcttgactatctgtagattttggtattcacaagaggtcctgaatcgattccccagggatactgagggacaagtgtattgtgactggagttgcagcagccatcctgcaaccaaaaggcaaatgcgtgagaataaaggtcaacacaccaaatccaagagaatcgagataaagaacctgcaattttgatgggatctttgtggagcaaataaaaccgatacaagcaattattcatctctacttttcattaaatgagaacttgtgtccctacttgttcatatgactatgaaaaggatttctattaggagcagtcattttctgttacaattrttaattcacaaaagggacattctgtaaactaagtatcctaaaatcaaagataatcattacatctagaacaatccaactggtaataacaatttatattt

SEQ ID NO: 245040 - DNA, 520 bp, Homo sapiens
agacacgagaaagggaaaggacacaagagagcgaatggtaactagatgggtgatttgcaatatgtttatgtgttttttttttctattagaaatctgtttaagatttattttcatttatttttcctgacttttgaactacttctttctagaaacactaaaattaatccttgaaatagtcactggaacgctggcaccaacactgtcctccactgttgcaatcactgacaagtattatcgttgttcttgagcaaggaaagggtgagctcatgcagtgacattgtggtcctattagttacttcaaatggatgggctggagagatgagagattaaaatcattccaagaaactggctaatcggcattccagtctgaagcaagaagaaacgccagccaaacagacctccatggaaagagattcaacatgatggcttccaggcatctcrggacggggggccaggcaggagggaataaaaaagacctatggccagctggacgcaaaaagcagcttgtggcaaagttggc

SEQ ID NO: 245041 - DNA, 598 bp, Homo sapiens
gcaatggctggctagatacagcctgtagtgcccagattcaaatcttctctgggtgaccaaaacttagccctagtgtcttagagaagcagcaggtgcttttcaagaggcagtgtgctcaatggtgaagagcacaggcttcaaagacagagagttgtgaatctagttacttgtgaatctaacaatgtaaccctcagtagattatgttataataaaaattgttaacatttatttagcatttttatgcctttctatgcactagttgtgtgtgtgtgtgtgtyaaatataatttcatttatcctcacaatatcgctaaaaggtacaaaatactataacctcctttatgtaaattatgcaatgggttcagagagcttaaatgacctgcccaaagtcacacagctagtttgtggcaaaccctgggtaaagtgcatgtaatcccatgtaatcccatgtaatcccatgtaatcccatgccagagggcatgttcttattcatagcattatagtatctatagggtgctactcagagtgtgattggagaagtgaaggctgttgtttaaaaggtaaagaacttataaacaaatcacatccctaagcacact

SEQ ID NO: 245042 - DNA, 598 bp, Homo sapiens
gcaatggctggctagatacagcctgtagtgcccagattcaaatcttctctgggtgaccaaaacttagccctagtgtcttagagaagcagcaggtgcttttcaagaggcagtgtgctcaatggtgaagagcacaggcttcaaagacagagagttgtgaatctagttacttgtgaatctaacaatgtaaccctcagtagattatgttataataaaaattgttaacatttatttagcatttttatgcctttctatgcactagttgtgtgtgtgtgtgtgttaaatataatttcatttatcctcacaatatcgctaaaaggtacaaaatactataacctcctttatgtaaatkatgcaatgggttcagagagcttaaatgacctgcccaaagtcacacagctagtttgtggcaaaccctgggtaaagtgcatgtaatcccatgtaatcccatgtaatcccatgtaatcccatgccagagggcatgttcttattcatagcattatagtatctatagggtgctactcagagtgtgattggagaagtgaaggctgttgtttaaaaggtaaagaacttataaacaaatcacatccctaagcacact

SEQ ID NO: 245043 - DNA, 588 bp, Homo sapiens
ggattccaactcccgggagaaagtgtctaatcaatctagtttgggtcacacatagtccccgtggctaaagaatggcacattcattacgaacaacaacaacaaaaaaacctccaaaattgaatggagtctccctactgaagagggatagaatagttccccaaagcaaaatcagggtattgttaccagaagatgggaaatgaagctgaacaaaaaaacaaaaacaaaaacaaaacacagatgtccacttctgcttctacataaacagtcttagcattcctattgaactgtttattttttcaacttctagggacaactttggcaaaaactacaactaatgctattacccaagtctgcgttacaatgtcccatataaagaaccacatgataaattccagggccttcaagttagaaaaacgtcagggctccagatgagccaatatacattcttctattaggccatgaaggttaagtaactaatcatgtttctctttttcctygggctgctaggaagctcagacctaaaagttttaggccgagttatgaccttggttataattctagtctaggttttcaggcacaactaaattc

SEQ ID NO: 245044 - DNA, 554 bp, Homo sapiens
gcctcccacttgtgcctggaacccctcccagatgctctggattagaaaataggataagccccaacacttctagtttctatgccttggtttacccaggagacaagcaatgaccatggctccccactccaatcatgaaaactccatcgcacagctctcaaaatagaggggacagaagttggcctccatgcacctgcaggtgggctgcgagagctgtacttggagagcaatgaatggtgctaaacaagtaaaatcagttaccaccttggcctttaagagtcagaagaccaaggacctggttctgtttccaacacaaggtgaacttgagaggcagcttttacattggccaaatgaagsagctgaactacattggtgtccccaattcaagtatccacagggctcagcaagctgggtgactcagtgagatgcaccaaggaaagctcagaaccagctggaggccacattccatccagatggaacagcagctgctcagtggtcgctatttgaaaattcaagccctccgtgatctgacgtttttcaaaagaattaagaagtcc

SEQ ID NO: 245045 - DNA, 568 bp, Homo sapiens
catttataaactgctgatctctttggggcattgttctcataaactttttgtaaaacatcaatgacttcactatgcttccacccaagcttcaccataactttgatgtttgttcttgcttctattttagcagaattcatgttattttgtgttaggggctcttttcaaactgatgttttatcctttgtagtgcctcagaatagatcttgttcagacatgttataacaagttagcttgagtttattttggtgcaaaaaaatttgaagtccatgcatagtttttcatgacacacattttccatgaactttttgaagaccccttatataaagcaaatgaaatcggtatatctaagcaatgtctgtactctcatgttcattgcattattcataatagctaagatatgccaacagcctaagtgtccatcaatgmatgaatgaataaagaaaatgtggtatatacacagtggagtattattcagccatagaaagaaagaaatcttaccatttgtgacaacatggataaccttggagggcattatgttaagtgaaataaaccaggcacagatagacaa

SEQ ID NO: 245046 - DNA, 615 bp, Homo sapiens
tgtggctatatacccagtaatgggattgctgggtcaaacggtatttctggttctagatccttcaggactcaccacattgtcttccatgatggttaacctaatttacactcccaccaacagtgtaaaagcattcctatttctccacagccttcccagcatctcttctttcttgactttttaataatagccattctgactggcgtgagatggtatcttattgtggttttgatttccatttctctaatggtcagtgatgttgagctttttaaagtaatcaacataatgtttttaaggttcatccatgtcattgcatttgctcgtggcatgttcccttttactgctgagaagtattctaccgtaaggacgtaccacaatatgttmggctatttacctgttgatcaatgcttaggttgtttacaatttggcctatgatgaataaagctgctataaatacttgcatctttgtgtggacatatgttctcatttttcttgggtaaacacctagaagtggaattgctgggtcatatgataagcatatgctcaactttataagaaactaccaaaccgttttctgaaatggttgtgccattttatgttccaagcagcaatgctgaa

SEQ ID NO: 245047 - DNA, 506 bp, Homo sapiens
cacccactagatgccattaatacttccccagttgtgatgaacaaaaatgtctccagacattgccaaatgttgcagagggactaaagcacactcttctccacttgatagctacagttctagatcacgaaaaagaataatgaactatttgactggaaaacacctatatgcagagacagtgcctgtctgtaggtgttcctatctgtctgtctgtctctctctctcaggcagtgctgggaaaactgccaaatacctgctctttggcttccctttgtccagccaccatgcagctcatcttcctcaagaacatttgcttccttcagctgtgcagatgctgctgatggagctacaagccctttgtgtgcagggagatgrcagggctgtgtgtgtctcccattcccccagggcattttccttacgagattttagggggaaattactaaacaagccttcaagcaaaggtaaatggattgggattttgtaccagagtcccccaaacttcaagtgct

SEQ ID NO: 245048 - DNA, 544 bp, Homo sapiens
atacctgctctttggcttccctttgtccagccaccatgcagctcatcttcctcaagaacatttgcttccttcagctgtgcagatgctgctgatggagctacaagccctttgtgtgcagggagatggcagggctgtgtgtgtctcccattcccccagggcattttccttacgagattttagggggaaattactaaacaagccttcaagcaaaggtaaatggattgggattttgtaccagagtcccccaaacttcaagtgctctcaacagctaaaggtatttccagggaggcaggaaaaaagatgacatttgcaacctctcagaaggcacttattccaagtataatccaatttagaaagtgcatttgctttaaacttcctctaaaaacctaaatagaaaaaatatttctaaatcttggtccaaatagtgacactgccttttctccctccaactagctgttgyattccagtaattagggaaaggctctctgatgtgggtataactgtataaaactccaagcgtttcaagttgaaatgtacaaatgga

SEQ ID NO: 245049 - DNA, 629 bp, Homo sapiens
aaaaatttaataaataaataaataacgagataaataaattgaggcttagagagactgaaccatttgccctgaggcacacaactgtgtacagcttggtgaatacagaatcaggacttgagcccaagccccgctgtctccaaagcctaccacacttgtgctagtttcccaccaggctgtgatgcctccttaagagactcatttaaaaccccatctctactaaaaatacaaaaaattaaccgggcatggtggcgggcgcctgtagtcccagctactcgggaggctgaggcaggagaatggcatgaacccgggaggcagaacttgcagtgagccgagattgcgccactgcaccccagcctgggcaacagagcaagactcyatctcaaaaaaaaaaaaaaaaagagagagagaggctcatttattgcaaattccatatcagcaatcacagctacttttacacacccaaacctaaatgtgactatggtaataagtatcttaattttcatttcattgcctggcagttctcctcaactggataacatattgggctctggataactatattaaactgaatccaaattgcttagaaagcatttatcattactatctcagaagagtagttatgcacaagt

SEQ ID NO: 245050 - DNA, 629 bp, Homo sapiens
aaaaatttaataaataaataaataacgagataaataaattgaggcttagagagactgaaccatttgccctgaggcacacaactgtgtacagcttggtgaatacagaatcaggacttgagcccaagccccgctgtctccaaagcctaccacacttgtgctagtttcccaccaggctgtgatgcctccttaagagactcatttaaaaccccatctctactaaaaatacaaaaaattaaccgggcatggtggcgggcgcctgtagtcccagctactcgggaggctgaggcaggagaatggcatgaacccgggaggcagaacttgcagtgagccgagattgcgccactgcaccccagcctgggcaacagagcaagactccrtctcaaaaaaaaaaaaaaaaagagagagagaggctcatttattgcaaattccatatcagcaatcacagctacttttacacacccaaacctaaatgtgactatggtaataagtatcttaattttcatttcattgcctggcagttctcctcaactggataacatattgggctctggataactatattaaactgaatccaaattgcttagaaagcatttatcattactatctcagaagagtagttatgcacaagt

SEQ ID NO: 245051 - DNA, 489 bp, Homo sapiens
catgtggcagtattaagcatgatttaatgactatatagtattctttccaagagatatgccatacttattttagctgatctcttatgtcaatatattgaacttttcacctgatcacaggttaatgtatattayttttactatgtccgtgggataaatccccacaaatagaaattttatgtactaacctattttagttctgccctcacacaaagggaacataagagagaatgaagaaacaaagaagaaaaacgaagatggggaataaagaagaggagaaaataagagagagaaggcaaaaataagaggagatgggaaagagaagaggagggaaagatgtgagaaaggaaggagggaatgatggagggaagaagtggaagggtcttgtctcagtagaggctaatctagaaatgaacttgactggcaaagcctccacttgcttttctcttgggttttgcatcgttcacgtggtttgttcccccgcagagatga

SEQ ID NO: 245052 - DNA, 532 bp, Homo sapiens
tatccagaataggcaaattcatagagacagaattacacttacagaaaaacaatgatacatcatagctgtgaagtgagagctatggggtctgcaaatgtacacccagatagactattgtatgaaaacagtagcattctccctgggtggcactgatgcaaagtattgtatagaaaggttcagataaaattacagtaaaacctgaggctatagaaaaaccactgttcagtacatccagttatccaaaacagcgctggactgagggatgtgtggatggggagtgatgcwcggcataaaaacatgtcatgtccagaaggaacctgggggcagaaaaaaagacttgaagctaaggacaggccatgtttaagaggggagaagagcaatcatgtgacatgcagaactcagattattagcaacatgctcaatttgtgcttgttgattaattaatggaatgaggtctgaaaacatggtcagtaaacatagtaggcagtttctaagatggcttctgacaatgttagggtggctcaccacctaa

SEQ ID NO: 245053 - DNA, 461 bp, Homo sapiens
gactagatcagctcactgcttcgtccaagttgaccttaaggacctggtatggtttatgaaacaaacacaagactgaaagaagtggataatgatacacacacacaagtaccttcgcctcagtaaaaactgccaaaaacagttctttaaaaagtagagatcattatgttacatgaaataagccaagcacagaaagacaaacattgcatgttctcatttatttgtgggatctaaaaataaaaacaattgaactcatgagcatagagagtagaaagatggttaccagaggctgtgaagggtaggggggagctgtggrggaaggcagggatggttaatgggtacaaaaaaacatagttagaaaggatgaataagacctactatttgacagcacagcagggtgattgtaggcaataataacttaattgtacattttaaaattaattaaaagagtgtaattggatggt

SEQ ID NO: 245054 - DNA, 461 bp, Homo sapiens
gactagatcagctcactgcttcgtccaagttgaccttaaggacctggtatggtttatgaaacaaacacaagactgaaagaagtggataatgatacacacacacaagtaccttcgcctcagtaaaaactgccaaaaacagttctttaaaaagtagagatcattatgttacatgaaataagccaagcacagaaagacaaacattgcatgttctcatttatttgtgggatctaaaaataaaaacaattgaactcatgagcatagagagtagaaagatggttaccagaggctgtgaagggtaggggggagctgtgggggaaggcagggatggttaatgggtacaaaaaaacatagttagaaaggatgaataagacctactatttgacagcacagcagggtgaytgtaggcaataataacttaattgtacattttaaaattaattaaaagagtgtaattggatggt

SEQ ID NO: 245055 - DNA, 610 bp, Homo sapiens
cattctatttataatcatgcttcattttattactttggggattcgaaaggattaatggaactcacttgtggttttctcacattctataccacttattgtaaataaggtatattcaggctccaactatgagaaaagaaaccatagtgacacttttttgtgacgtttaataagatatcttgyttattctttttaatgaaaattcttagatttctgcttttaagcatttattctaacatttttcacagaaataaatgacataaaatcaaaataaaattctgttaaacaatttgtatatttaacaactaatttgtatataattaaaagtaatgatatgaaagaagaaaacttttacttaaaatgaccttttatttaaacttttttaaactatttttctcttacatattagttcaacttataacctataaacatttttcatgctaagagtttgtctattttttcctttgacccttttttaatgcaaaataggtcaaataatctccaaaatctagcaggcatatacaaaattaaaccttcttcttcaagaattaaccttcttatgaagtttatgtcaatctggcatttcaagaaaagaaaaacctacaccaatttg

SEQ ID NO: 245056 - DNA, 591 bp, Homo sapiens
ttaaacaattcattgttaaacatgggttacaagctgcctctaggtaagttttatttaattcacagactgctttgttgttaaaatttgaagtggttttcaaaaattgagatacatacatagctgaaatctatatttccatgtcttttgaaaaatcagaagttctgcaaaaggaacattccctcatggttaacaattagctccagctgactgttgcaactgccttattgacctaggggctttcctctgcaaytggccatggtctctgcctgccctcctgccaactttctcgtttatactaaacaccatttgctatttttatagtcattgtatgccttaccaaattcactcccatacattacttgcttgtcccttttaggcatttgaatttgcaacccctgatgtaaaacgccaaatgctaggagcacagaacaaaaatttcacctactcatgaaaaaaaaaaaattcaagtatagctgaattgactcctacctgtatttaaattatgaaaattgaactaagagggtgtgagtcagtgaatgatagaataataatataacacaatataaacaggtcaacatgtctgtctgtcat

SEQ ID NO: 245057 - DNA, 604 bp, Homo sapiens
atataacacaatataaacaggtcaacatgtctgtctgtcattgcactcaatgaggatgggacatgaacaagtacttagaaatctgctcttctctgagttattcccacatgccccttgtggtgtgagtatcttgttgcactgaatacaattaaaatgctaacaatcaatattgtttacttccacttttaatcaggatgaattaacatgaacagggatgaccctcctacttaaaacaaccaraagttaagaaacaacagtttgtgaccctgggtatgaagcaatgaaggacagtggcccctgagagatgtgaaacaaatgaggtaagatgtacacctgcccagcttcctgccttgaaacagtttgcaggctgcagagcagggaggagaaacacaagcagggtgcagcggaatccctgagctaaggagacagagatgaaagcctggggggacaaacaagagaagagaacttcacagagagagaattctgtaaattttcagagggtctccttaaatattcagctgactactgatcagcatatgcataaaaggaaactcaaggctggacaacatccactggaaagaataagaggttagagtgctggtgc

SEQ ID NO: 245058 - DNA, 604 bp, Homo sapiens
atataacacaatataaacaggtcaacatgtctgtctgtcattgcactcaatgaggatgggacatgaacaagtacttagaaatctgctcttctctgagttattcccacatgccccttgtggtgtgagtatcttgttgcactgaatacaattaaaatgctaacaatcaatattgtttacttccacttttaatcaggatgaattaacatgaacagggatgaccctcctacttaaaacaaccagaagttaagaaacaacagtttgtgaccctgggtatgaagcaatgaaggacagtggcccctgagagatgtgaaacaaatgaggtaagatgtacacctgcccagcttcctgccttgaaacagtttgcaggctgcagagcagggaggagaaacacaagcagggtgcagcggaatccctgagctaaggagacagagatgaaagcctgrggggacaaacaagagaagagaacttcacagagagagaattctgtaaattttcagagggtctccttaaatattcagctgactactgatcagcatatgcataaaaggaaactcaaggctggacaacatccactggaaagaataagaggttagagtgctggtgc

SEQ ID NO: 245059 - DNA, 641 bp, Homo sapiens
ttactgttttccccagcagttacatctgactgtttcttacatggtttttatctctttgctgaaattccctatatgttcatgcatgctttccaccttttccaatagtgtttgatatattaaatattaatcatcattattttaaattccatatctgagtctactcagagtctggttctatcaacagctttttctcttcacaataattttttttccttgtttctgtgtgtgtgcgtctcatatattttggttgaatgccgagcatcatgtccaatatagtctaaggtaaatagcatttttacattgcattcttctgcccaagttaattattgtggggtktcaagtcaatctagtctagaactgggttgagtttgggttttattgctctaccacaggcttccatttctctagcattagcttgtccttaaggtggagtctggtttgcttaaaagtaatcatccattattgcctcaatattcctatgctactctcagctttctttgtactcctgaggctaggagaaggtccctctcctcactcttgccttgtctccaaaggctgactgcaattgcttgatactagcctgtgagttagtataaactctccttgggcatccagctcccagtggttctacactctcatgc

SEQ ID NO: 245060 - DNA, 582 bp, Homo sapiens
gcattagcttgtccttaaggtggagtctggtttgcttaaaagtaatcatccattattgcctcaatattcctatgctactctcagctttctttgtactcctgaggctaggagaaggtccctctcctcactcttgccttgtctccaaaggctgactgcaattgcttgatactagcctgtgagttagtataaactctccttgggcatccagctcccagtggttctacactctcatgctagcccacaattgacttttaaaaatgtaataattttagctggatttttcttacccctttgtattgcagtccatggtcttcctgtgatttgccatgagtgagtcagaattcatttgtagcctcttttgggakcccctgttttctatatatcagtctagttggatgtactatatgatcccagatcatagtacatgatttgatgggttcaagagaagttatgattgtataaattatctacatttttcttttttaagtttttaaacaggctcagaaggtatggatttttcttattggtaaaatgaaagcaatgctttctctagcttcctacatcctaggcagaaactagtag

SEQ ID NO: 245061 - DNA, 618 bp, Homo sapiens
caaacatttgactttggccaagtcgcatgtacttcctgagctttggttgccaataatacaaggccaataatacctttcatgaaaaattaatataaatatgtgtgtgtatgtgtgtgtgtttgagagacagagagagacaacatgagtgtgaaagatatctttctcatcaactgtctggtactttacaaggatgttgttatttaccttccaataatactctaaaaatagcagggcagattcattttgaggcatttgaacgtcagagcccagattctctaacatcttgcaacatttccccccacaatgtacattaagtacatagaagagtaactggcacatgcacgcatttacaaaaatttttattcttttccctcctattttctgccatttaaatatagacaaccatttaaaaatgtgtaaaarcatatatacaaaagtgttaacagcagctattatcaggttgtggaattgaatataatttttttctcttttctcttttgctctcttcttgataatttttattttctaccaatttaaaaaaaatgtgttttcattttatggaaagtttaatgtaagtgatttgtaattagatggaagatgaggcacagatcaagtaga

SEQ ID NO: 245062 - DNA, 603 bp, Homo sapiens
actgagaagcccaaacccaattggctctcagaataaatgatatcatttgtcagtctcttcagatagagaataggatttttaaawgtttaagtttgtaggagtcttagttgatttgacaatgtcatctgaaaagtgataaacaatgaaaaatgcaaaagatcataattaagattataagaagtttgtagctggaagctcacatcatgggctgcctgagttttatggtattctctgcttttatttcattgaaaatgaacacaatcctgcaactgatatcatatctttctgtaaggattaccatgggtaacaacaacaacaaacaccaaaggaatcaggcaaaagaaaatctaattcccgagagatacatctaaattcaaacaaatgagacaaatgtatctatagagacgtaaacagaaattcaaggccaacaagaaaaataatcttgttccctgagcagcaaacacctgagtgctggaaattaggatttctagatttttctcatagtcaaaggttagaggctttagcaaatatgcaattagtttcccttattgatacactgtgcaggcagaaaatagcccagctatccttttctggaggcagctt

SEQ ID NO: 245063 - DNA, 612 bp, Homo sapiens
gaattatgcctcaatacatctgttttttaaaatactgtctcaggccataaaaaagacctagatcatgtcttttgcaagaacatggctggatctggaggctattacccttaggaaactaacgcaggaacagaaaaccaaacaccacatgttctcacttatatgtgggaactaaatgatgagaactcagggacacaaagagtggaacgaaacacaccggggtctacttgaggtgaagggtgggaggagggagaggagtggaaaactattgagtactggtcttaatacctgggtgatgaaataatatgtacaacaaacccccatgacatgaatttacctatgtaacaaaccttcacatgtactccccaacytaaaagtttttaaaaaataaaaaattactgcctcaccacatgaggtggttgtgtggcataaattaataaaatgccaagtactgtgcctggcacatggtcagcacaaatacaagttagttatttttatgttttaaacagttagaaaaaaaatgtaccagaatggactaaggatattggttcttggttgagcaccacaagaaatcatattcaattttcattctgattttattgtattttcccaaaa

SEQ ID NO: 245064 - DNA, 612 bp, Homo sapiens
gaattatgcctcaatacatctgttttttaaaatactgtctcaggccataaaaaagacctagatcatgtcttttgcaagaacatggctggatctggaggctattacccttaggaaactaacgcaggaacagaaaaccaaacaccacatgttctcacttatatgtgggaactaaatgatgagaactcagggacacaaagagtggaacgaaacacaccggggtctacttgaggtgaagggtgggaggagggagaggagtggaaaactattgagtactggtcttaatacctgggtgatgaaataatatgtacaacaaacccccatgacatgaatttacctatgtaacaaaccttcacatgtactccccaacctaaaagtttttaaaaaataaaaaattactgcctcaccacatgaggtggttgtgtggcataaattaataaaatgccaagtactgtgcctggcacatggtcagcacaaawacaagttagttatttttatgttttaaacagttagaaaaaaaatgtaccagaatggactaaggatattggttcttggttgagcaccacaagaaatcatattcaattttcattctgattttattgtattttcccaaaa

SEQ ID NO: 245065 - DNA, 556 bp, Homo sapiens
atcctgggctctgatctgtcctgccgaggtattattggataatgttccagtttgttacttgataacagagtcctagaaatatttgtaataaatactgctgataatctttgtttacatttttaacataaaatcaataaagtacagtataagcagtcatgaaactttttcctttatagtaaatattttataaatacatgtcttacttttgttctataaaatccaagataacaatctaatatcaaaatttcaaaagctatcttgtgcagtatttttcctccctcaagtgaccctagaaacmtctatccctgtggttgccaatattttattaaaacttataaccattataaccctggaattttttcttaatttttatgtaattttttgtcctcttacaagttaccttaattcctttgtgaaatgaggtataatataaatacatacaaaaatactcacccaggagcccaaatatatatctgcatagaataattcacttaaggaatcatcatgaaatattaattatccaaaaaaattgatgattgggagagggacaaatgac

SEQ ID NO: 245066 - DNA, 580 bp, Homo sapiens
aggatgtatgtcacctcaggaccctgtgatgattgcattaactgcacaaattgtttgtagagcatgtgtgtttgaacaatatgaaatctgggcaccttgaaaaaagaacaggataacagcaatgttcagggaaaaagagagataaycttaaactctgacagctgatgagccgggcggaacagagccatatttctcttctttcaaaagcaaatgggagaaatatcgctgaattctttttctcagcaaggaacatccctgagaaagagaatgcgtccctgagggtaggcctctgaaatggccacttcaggggtggctgtcttttacggttgcagctgtagggatgaaataagcccctgtctcccgtagcactcccaggcttattaggactaggaaattcctgcctaacaaattttggtcagactggttgtctgctctcaaacactgtctcctgataagatgttatcaatgacaatgcgtgcccgaaacttcattagcaattttaatttctccccggtcctgtggtcctgtgatctcgccctgcctccatttgccttgtgatattctattaccttgtgaagca

SEQ ID NO: 245067 - DNA, 580 bp, Homo sapiens
aggatgtatgtcacctcaggaccctgtgatgattgcattaactgcacaaattgtttgtagagcatgtgtgtttgaacaatatgaaatctgggcaccttgaaaaaagaacaggataacagcaatgttcagggaaaaagagagataaccttaaactctgacagctgatgagccgggyggaacagagccatatttctcttctttcaaaagcaaatgggagaaatatcgctgaattctttttctcagcaaggaacatccctgagaaagagaatgcgtccctgagggtaggcctctgaaatggccacttcaggggtggctgtcttttacggttgcagctgtagggatgaaataagcccctgtctcccgtagcactcccaggcttattaggactaggaaattcctgcctaacaaattttggtcagactggttgtctgctctcaaacactgtctcctgataagatgttatcaatgacaatgcgtgcccgaaacttcattagcaattttaatttctccccggtcctgtggtcctgtgatctcgccctgcctccatttgccttgtgatattctattaccttgtgaagca

SEQ ID NO: 245068 - DNA, 628 bp, Homo sapiens
tgtaagtcttttctcaaatgtcacctgctctatgaggtctaatttccagagctctggaaatcactgcatgtcacagcatctggtcaggaaccattttagagtatatccatcactccttctagtatacccaagagtgatgagcaactcaggactggtaggcaaatggtgggcttctgtccttattatgacatgttctgtcatctcaggagaaatattagaagattgcctcccagtgtgctatttctcaaatatgtccagatgttttttttaaaatcatcaacatttaatattctgwtaatcaaggaaagaatagataaggtcccagaaatttatgatttgagtttttcttttataaatccctagatatgcgtgtatatgaaagtgagtttatttttaaaaataaaaacacaaaaaagaaattgctagatattttctcctgggggatatggaagaaatatgtgttaaataaaataattctcaagattttttttatagagaccgactcttaacttcataattaatataaagccataaatttccatagaaaactacttcagaggtaaaagtgctgaaaagaaattcattgtcaatcaatcacatttgtttttgaaactctccttcctgtcaa

SEQ ID NO: 245069 - DNA, 591 bp, Homo sapiens
aatttaattgtacattttaaaataaaagtatagattgtaacacaaaggataaatacttgaggagatggataccccatttcacatacacacacatttacatatatgctaattttaagttcaggggtacatgcacaggtttgttacataggtaaatgtgtgtcatgggggtttgtcgcacagattatttcatcatcgaggtattaggcctagtacatattagtttttctgatccactccctcctcccacactccaacttccaataggccccagtgtatrttcttcctttctctgtgtccatgtgttctcgtcatttagctcccgcttataagtgagaatatgcaatatttggttttctgttcctgtgttagtttactaagcataatggcctccagcttcatccatgtccctgcaaaggacatgatcctgttgttttttatggctgcatagtatgccacggcatatgggtaccacattttctttatccagtctatcattgatgggcatttaggttgactccacgtgtttgctattgtgaatagtgctgcagtgaacatacctgtgtgtgtgtctttataatagatttatttata

SEQ ID NO: 245070 - DNA, 610 bp, Homo sapiens
ttcactaccaccagatctgtcttacaaaaaaatgctaaaggaagttcttcaagctacaagaaaaataacactaatgaataagaaaacatctaaaagtataaaactcactggtaaaagtaagcacacattcaattcagaatattctaatactgtaatagtggtgtttaaatcattgatatttgtagtatgaagattaaaagactaagctattaaacataacaataatagctacaataatttgttatgatatatgaaatataaaaagatataaattgtgacatcaaaaatccaaaatgtggaaagggagtgcactaaaagtataaaggtgggttttctttttgcagtcagtgttaaattgtcacaagcttaaaataatcagttataacaataagatgttttctataagccycatggtaatgacaaagcaaaaaactatagtagatacacaaggaatcaaaacacactataagagaatatcatttagccacaaaggaatacagcaagagaggaagaaagaaacaaagaatctataaaacaactagaaaacaattaacaaaatagtagttgtaattccttacctgtcaataattactttgaatataaatggatg

SEQ ID NO: 245071 - DNA, 617 bp, Homo sapiens
taagtgaaatcaaacagtatttgtctttttgtgactggcttatttcacttaacatgatgttttcaaggttcatccatgtagcatgtggctgaatctcctttttcaaggctgagtaatattccrccacacccacataccacattttgtttatccatttatccaacatggacacttgggttgtgtctatctttcaggtattatgctgctatttttacattttaaaaaatgtcttccttcgagagtcttggttcctaaacttgaaaactaaaagctttcaagtattgttcatgttctgcattgcattagcctaaactgcttaagctttcttgttttattttatttagggctgcagttactctatatactctatactcaatacgctgatatactttgctagtcttcaatgtttgcccaaagcctgtgcttaggaatagttggaatacaaactccacaaagacaggatctttgtctgttttattctgtaatgaattccaaatgctaagaatagttcccagcacagagtaggctcataatgaatgtatcttgaaccaactgcacctctgattctgacttcacttctatctgttgtggtggttcccccgctgttcagtgttttc

SEQ ID NO: 245072 - DNA, 617 bp, Homo sapiens
taagtgaaatcaaacagtatttgtctttttgtgactggcttatttcacttaacatgatgttttcaaggttcatccatgtagcatgtggctgaatctcctttttcaaggctgagtaatattccaccacacscacataccacattttgtttatccatttatccaacatggacacttgggttgtgtctatctttcaggtattatgctgctatttttacattttaaaaaatgtcttccttcgagagtcttggttcctaaacttgaaaactaaaagctttcaagtattgttcatgttctgcattgcattagcctaaactgcttaagctttcttgttttattttatttagggctgcagttactctatatactctatactcaatacgctgatatactttgctagtcttcaatgtttgcccaaagcctgtgcttaggaatagttggaatacaaactccacaaagacaggatctttgtctgttttattctgtaatgaattccaaatgctaagaatagttcccagcacagagtaggctcataatgaatgtatcttgaaccaactgcacctctgattctgacttcacttctatctgttgtggtggttcccccgctgttcagtgttttc

SEQ ID NO: 245073 - DNA, 492 bp, Homo sapiens
ggacgtttaatcacatcatggcttggtttcatgctcatgtcacatagcacttttttataaccacctttctccgtgactgattttgttagaaatacgtagtatttctgattttttttttttttttaaggatacggagtctcactttatcaccaaggctrgactgaaagtacagtggcacagtcatagctcactgtggcctttcactcctgggctcaagtgatcctcctgactcagcctcctgagtaactgggtctacaggtgcacaccatcacacccacaggatcttgctatgttgtccaggccaatctgaaacccctggcctcaagtgatcctcccactttggcctcccaaagtattgctattataggcatgagccaccaccctagcctaaaaattaagccatggtttggaatgatccagtgactagctttggggaaggtgcagggcacaggggaagaaggtcagacatttggggccctgttattcatgaaa

SEQ ID NO: 245074 - DNA, 558 bp, Homo sapiens
atttttgttattcattcagcagatattttttggacagctactctgtgccaaggcattggggatagagcctatttttatagtactaatattttagaaaacacacatagttgttgggtacctttgtagaggtgcagtaaggatgaataaaatatcatctctgttgcaagttgcttgcagtctaactggagtgagatgacatctgttgtatragaagttgaataagaacagatttgaataactggtaagacaacagaaatgtatcacttgatggtatttgataaatattaatgcgaagtgtactgattgtggttatctttcacagataggagaggtctcacctgctgggtgaccttatgtatttaatggtctcagcttccagtcataaccctgactcttaggaataggaatatttcccctcctaacttctttctctgcttatagacttgccctgtttcttctgtctatgccatcttgcagattactatcacaattgctttcaaaatgcgtagacctgaccacgtcaccaactctgctgatacccatttgcctgcagaaaaa

SEQ ID NO: 245075 - DNA, 527 bp, Homo sapiens
tctattgtatgtatctaccatattttgtttatctacttatccaacaatgggtatgtcagttgcttccacctttggctgttgtaaataaattcttctgtgagcctgggtattgagatatctctttaagatcctgcttccaattccactgatgtatacctagaagtggaattggtggatcatatagtaattctatttttaatttttttggaaagctaagcaatatttttgcatcatatttctgataatttaggagtggaaactggaacactgtggaactgagaaatggtttgatctagaattatcctccactggtaactgcccagtttgtsaatgtgtgtaattgtaggccaaggagttggttgtgtgcctgttcactgttttccaaaacaatgactgtaaatcaagagacctgaatttgaagggagacgcagatacaatgcaggatggtctttgatcggtgtctgtgactttagttgtcattgttctatgcacgccgtgcctttgatcatggaaccttgcttcattta

SEQ ID NO: 245076 - DNA, 582 bp, Homo sapiens
tttctccactagtctgaccccatctgctttctgcctttcagggtttgcaaactttctgatgtgctgctaacacacattcttgttttctagcatcattasggctttgttcgttttttgttctgttttgttttgttttgagacacagtctcactctgttgcccaggctggagtgcaggggtgtgatctcagctcactgcaacctctgcctcccaggttcaagcgattctcttgctgagttcagcctcccaagtagctgggattacagatgcccaccaccacgcctggctgatttttgcatttttagtagagatggggttttgccatgttggccaggctggtcttgaactcctgaccttaagtgatctgcctaccttgcctcccaaagtgctgggattacaggtgtgagccaccactccggccagggctttattcttttccatatctgtctttctcttatttcatggggaccttgtaaaggatggtgtttggacataagttctcagtagatcttgctgacctcctactagcattctatttatttatttatttatttatttatttatttatttatttatttagaat

SEQ ID NO: 245077 - DNA, 582 bp, Homo sapiens
tttctccactagtctgaccccatctgctttctgcctttcagggtttgcaaactttctgatgtgctgctaacacacattcttgttttctagcatcattagggctttgttcgttttttgttctgttttgttttgttttgagacacagtctcactctgttgcccaggctggagtgcaggggtgtgatctcagctcactgcaacctctgcctcccaggttcaagcgattctcttgctgagttcagcctcccaagtagctgggattacagrtgcccaccaccacgcctggctgatttttgcatttttagtagagatggggttttgccatgttggccaggctggtcttgaactcctgaccttaagtgatctgcctaccttgcctcccaaagtgctgggattacaggtgtgagccaccactccggccagggctttattcttttccatatctgtctttctcttatttcatggggaccttgtaaaggatggtgtttggacataagttctcagtagatcttgctgacctcctactagcattctatttatttatttatttatttatttatttatttatttatttatttagaat

SEQ ID NO: 245078 - DNA, 572 bp, Homo sapiens
ccagttgctaatggactctagggaacaaaaacaccactctcctgctcctgtgatgccagctggctagtatgtaggccataaaccataatggacaggtagtggaattcctcttcctggacgtctttttcctttctgaccaatatgaaataaaacttattttgaccttctaccctaaaaagcaacatgtgctgaaacaagtwtcttctgacaaatttgttcttatctagaatgattagatttggtagaagaacgtagttatacttccagttagcagtggcgtggtatttctctgagtagaatgatggtcgtctagaatctagactattacttcagtttcttcctctgaacaaaacgttgtttatgtatacctgcatttacataaactacaggggatgtgaaaatgactctctggggctgcctctctccattttggacctttctagacctcattggtttggctggttctgctttcactgtcagagcagatcattccagatgccattatgtaattttctgtcttgggatatgtgtttgcatgggggggtggttttgttttgttgttaagtgatgtt

SEQ ID NO: 245079 - DNA, 622 bp, Homo sapiens
tgttgtcttaattaggagcagtctggccaggacaccctcccttatggtgtcacaggggcaggacaccactgtaaatgaaatttgactcttccctctattttgtattactctccacgcagaagcatttaataggcagagactctgtcatgtgtctctgccccacctgccagggacagggacagggtagtcatctgatgattttcatcttctgtggtgtacagcttagcattgcatcctattaagagtacaacagtgtgatatgttaaaagggagataacagttgactgttacatccattgtttaacatgtgaaagttgactttcaaacacatattgaaagaccatattatgcacaaaagtatgtaatgactgtwatcattttttgtatcaggaccctttgaggttactgacttgagtccagagtctaggacagtggtggagtagagaaaagtcccctgagtgactacacaaactctcaattcctactcccgccatcaatgacttgagagaagctgagggtgttttttgatacttctattcacactccccatactgatattttttgtgaaattttgtttctcaaaggatagaggagcagaaaaaaaaataaggaatgaaggaaa

SEQ ID NO: 245080 - DNA, 413 bp, Homo sapiens
acctcaaatgtttccaattatcgaggcttccaaaacagaatctcctgtctacggatgcagcttggttatgtgagaagtacctcctagatatatatgaagaacaaaaatggggacaaaaatatcgatgatccagattcacaggaattcaaccagtgaagactggagaataaaaaacactgggtgggaagggtgtggtgtgactccttgaagatgccatcacactagcttttggaagttccctgttagtttctatgactttttccttgttggagacctggttggaaaatagtaacttcataaaagatatttgcacattgcccattgtctctagatctctctcaactataatttttgcccttaccctttagagatttcttttgwcagcttacagaagccaaatctgtctcaagtct

SEQ ID NO: 245081 - DNA, 535 bp, Homo sapiens
tatcaggatagattagtgtcatatatgacacacctcattggcattctcagattcttacccttagacaaggtaagaatcagttccactgaaggtgaaatggaaaacaacttctgctgcagtgttttttkttgttgttgttgttattgttgttgttgctgtataaacctgtctgtctgtaagcatatgtaatagataatgctcccagtggtctccagtgacattatccttgagcatcagaatccaggactaagctcagggtccaagagacacacagccaagcctattctgaacttgtctctgttttctagtcttagccttttgaccaagtggttatatagcagattgcttaacttttaatttctttagttttcctttctgtaaaatgcagatattaatacccttcttagaagactattttaagaacaacttacgttatcataaggaatttaaagaatagtgttacagaaatgttgaatgaagataaatcgtccttcctcctgtacttgcattatttaagtttttctcttttaaaaaa

SEQ ID NO: 245082 - DNA, 535 bp, Homo sapiens
tatcaggatagattagtgtcatatatgacacacctcattggcattctcagattcttacccttagacaaggtaagaatcagttccactgaaggtgaaatggaaaacaacttctgctgcagtgttttttgttgttgttgttgttattgttgttgttgctgtataaacctgtctgyctgtaagcatatgtaatagataatgctcccagtggtctccagtgacattatccttgagcatcagaatccaggactaagctcagggtccaagagacacacagccaagcctattctgaacttgtctctgttttctagtcttagccttttgaccaagtggttatatagcagattgcttaacttttaatttctttagttttcctttctgtaaaatgcagatattaatacccttcttagaagactattttaagaacaacttacgttatcataaggaatttaaagaatagtgttacagaaatgttgaatgaagataaatcgtccttcctcctgtacttgcattatttaagtttttctcttttaaaaaa

SEQ ID NO: 245083 - DNA, 526 bp, Homo sapiens
atgtttaagggaatgacctccaaggccccaaatcacagttgtattcatgttctttcatytcacagatacaatccaggccagtcccagatttgcagctgttaataaatgtgaatggttttccagtaagggggtagaaaaacatagggagagaaccgggttcagagttcaatatctggattcaagtccttcctttagcactttactaactgatgtagaataagtcagctactcaataggtgcctcagtttccccaccaaaatgcagacatagaaggtgctttgtctgctttgatgagaagtctttaagcaagtctatggggttcaatgtgttttaagaactataaagtaccatataaatgtggcctttattcccattgtgttcttggaagtaattcaatatagtgtgtacttcatagctgcttttggactattgccagccagtgtatcatcctaaactacatgtcagcatagtataatcctgccttaggtctacttttgattatttaggaagactccctgcccttcct

SEQ ID NO: 245084 - DNA, 554 bp, Homo sapiens
gttctgtcaatttccttgggccattcagttttgactgaaacatcattcctaaataagtatgctgcaatcttccatcactttgtaagtggcaggcttttattttctgccccaagagaaaatacaagataagcattacctttgatttttcttcattttctctataaaattctgccatctgttcctcctgctcttcaataacatccttgagtgtgtctacttggtagatcaaattgttcttctcattgtctaactgtgcattggaaaccatggctttcttgtatttttcttccacttcagacaaagattcytaaatgagagttaagtcatcagtctgatatctaaaatgttaattgaatacatgcaatataacaggaaattatagcactgccacaaacacataaagatgcattttcataaaatacaagcggtttggggaactccttgtttagtaacatgcatgtgaaacaggaagacaataataagccgataatgcctttataagaacaatatgtgctctctgttccccaagaaaacaaaattaagcagcaacatag

SEQ ID NO: 245085 - DNA, 583 bp, Homo sapiens
ttacctgaaaaaactgggaagccaccattctattttctctggttttgaaggaaaccattatgatacccttttgaaaactatgataccaaaattactgataggtggtagaaaatgaactgaaatatgtccacatcttgtatgaataatgrgaatgagttttaattttcaaaatattccataaattgaacatgtgaaaaccagacagtaagcattgaatggcaatgtacttaagtccagctgggctaaagtaaagtaatatcctccagaaattggaactgcataggaagcagtgcccatcaaactgtcctcccgctgtagatatgaggaagtaaacataaggaaaacttgtatgtacatactttacctactgaaggaacaaaaacaaagtcagcattatatttactaaaaagtaataggtaagatgaggactgtcaacatgaagggcaagcaacacctgaggaaaggaaggaggcagaacaatcgttagatattttgtcatcctcagtaggtatacaaatgttgtgacctttatgagacataaacaaacacacacgggaagagagcaagataatataaagagtaa

SEQ ID NO: 245086 - DNA, 583 bp, Homo sapiens
ttacctgaaaaaactgggaagccaccattctattttctctggttttgaaggaaaccattatgatacccttttgaaaactatgataccaaaattactgataggtggtagaaaatgaactgaaatatgtccacatcttgtatgaataatgggaatgagttttaattttcaaaatattccataaattgaacatgtgaaaaccagacagtaagcattgaatggcaatgtacttaagtccagctgggctaaagtaaagtaatatcctccagaaattggaactgcataggaagcagtgcccatcaaactgtcctcccgctgtagatatgaggaagtaaacataaggaaaacytgtatgtacatactttacctactgaaggaacaaaaacaaagtcagcattatatttactaaaaagtaataggtaagatgaggactgtcaacatgaagggcaagcaacacctgaggaaaggaaggaggcagaacaatcgttagatattttgtcatcctcagtaggtatacaaatgttgtgacctttatgagacataaacaaacacacacgggaagagagcaagataatataaagagtaa

SEQ ID NO: 245087 - DNA, 605 bp, Homo sapiens
tgcactggtatattcatcactgtgctactcacagtagcaaagacaaagaatcaactcaggtgctcatcaatggtagtcaatgacagattagataaagaaaatgtggtacattgctttgctggtgcatgtgcttgtgggcagaactttccttcacttccctgtcagtgcctgtgtgggcatgcaccctgacatgccacagctgctggcatgagtacactgcacaccttcaacaccctgctgtgctgctattaccattgaaaaaacagcattcacaggcacagaaaccaccagacttgcactcaccagcacccttcccccatgccaacactgccactggcagaaaactaccgagggagaccagcagacctgtccccaactcagtggtagatgctgcccatgttaacgtgcacacagaggatgtacacaagcccatgccaaccggtgcgctgccaacaccactgccagtgcaaatgtgtgtatgggcaccactgggttcccctacccccatgccatacagccaccaccaaagctgtgactgcctgcacaatggctggcatatctgcactcaccagcaccccmctacagttgatgagcatgcaccctgc

SEQ ID NO: 245088 - DNA, 630 bp, Homo sapiens
tttaaatccttacaatttccaaagtgatgtatttttgtgtggtaatcattgactgatggctggcagcccctaggtagctgcaggatgggacaggttatcagaaagatcaaggcaggattagaaggttgtgtcttttagtcctacccccaacctctggggataggagaaaggctgaaggttaggttcatcactactggccaaggtttaatcagtcaygtttacctaacgaagcctccacggaaacctcaaaagacagagtttggagagctttcaaaaagctgaacatgtggaggcttataggaaggtgaacaaaaactcatccatgtgtcaggaggtagagcactccagttccacaggggcagaagctcttgcactaaggatccttccagacttcacccaatgtatcttttaatctggatgtttattcatctctttaaaaatatcctttgtaaaaaactgataaatgtaagtaagtgtttcccctgagttctgtcagcagctctagcaaattaactgaactcaagggttggggggtggtcttgagaacgttgatttatcactggttgatcagatgttctggaggcccaaacttgcaactcatatctgaaattggaaggagcagtcttggac

SEQ ID NO: 245089 - DNA, 630 bp, Homo sapiens
tttaaatccttacaatttccaaagtgatgtatttttgtgtggtaatcattgactgatggctggcagcccctaggtagctgcaggatgggacaggttatcagaaagatcaaggcaggattagaaggttgtgtcttttagtcctacccccaacctctggggataggagaaaggctgaaggttaggttcatcactactggccaaggtttaatcagtcatgtttacctaacgaagcctccayggaaacctcaaaagacagagtttggagagctttcaaaaagctgaacatgtggaggcttataggaaggtgaacaaaaactcatccatgtgtcaggaggtagagcactccagttccacaggggcagaagctcttgcactaaggatccttccagacttcacccaatgtatcttttaatctggatgtttattcatctctttaaaaatatcctttgtaaaaaactgataaatgtaagtaagtgtttcccctgagttctgtcagcagctctagcaaattaactgaactcaagggttggggggtggtcttgagaacgttgatttatcactggttgatcagatgttctggaggcccaaacttgcaactcatatctgaaattggaaggagcagtcttggac

SEQ ID NO: 245090 - DNA, 630 bp, Homo sapiens
tttaaatccttacaatttccaaagtgatgtatttttgtgtggtaatcattgactgatggctggcagcccctaggtagctgcaggatgggacaggttatcagaaagatcaaggcaggattagaaggttgtgtcttttagtcctacccccaacctctggggataggagaaaggctgaaggttaggttcatcactactggccaaggtttaatcagtcatgtttacctaacgaagcctccacggaaacctcaaaagacagagtttggagagctttcaaaaagctgaacatgtggaggcttataggaaggtgaacaaaaactcatccatgtgtcaggaggtagagcactccagttcyacaggggcagaagctcttgcactaaggatccttccagacttcacccaatgtatcttttaatctggatgtttattcatctctttaaaaatatcctttgtaaaaaactgataaatgtaagtaagtgtttcccctgagttctgtcagcagctctagcaaattaactgaactcaagggttggggggtggtcttgagaacgttgatttatcactggttgatcagatgttctggaggcccaaacttgcaactcatatctgaaattggaaggagcagtcttggac

SEQ ID NO: 245091 - DNA, 416 bp, Homo sapiens
cacatcacaaacaagtttctgagaatgcttctgcctagttgttatgggaagatatttcctttttcaacataggcctgaaagcgctccaaatgtccacttccagatactacaaaaggagtgattccaacctgctctatgatagggatgtcaactctgtgtcctgaatacaaacatcacaaagatgtttctcagaacgctgcagtctgcaatttgtatgaattcccgcttccaacgaaatcctccaaactagccaaatatccacttgsagattccacaaaaagagcgtttcaaaacttctctatgaaaagaaaggttctactcctttagttgaggacacacatcacgagtaagtttctgagaatgcttctgtctagtttttatgggaagatatttccttgttcaccttaggccggaaa

SEQ ID NO: 245092 - DNA, 596 bp, Homo sapiens
ctagaatacataaagaactctcataactcaattttaaagagtaaacaataggcaaaaagatttgaacagacacttccccagggaagatagtcacatggaaaataatcacctgaaattaacaccattagtcattagagaaatgcaaattaaaaccacaatcaaataccaatacacaatgattagaatagctaaaataaaaagactttacaataccacatattggcaaggaggaagaataactaaaaatttcttattgtttaaatgcaaaatggtaccatcatttggaaaacaatttggtggtttcttayaaagttaaacataaatgtaccacataacttagagaccccaatcctacatattaccaaaatgaaatgtttacacaaaaacctgtacaagattgtttatagcggccttatatgtaactacccaaaccagaagaacccaaatgtctctcaactagttaatggattaacaagttgcagaacatccaaacaatgaaacactactccacaataaaaaagaagaactacctatacatgctacaacaaggatgaatctcaaatgcactgtgctaagtgaatgaagcaagacacaaa

SEQ ID NO: 245093 - DNA, 370 bp, Homo sapiens
agagaccccaatcctacatattaccaaaatgaaatgtttacacaaaaacctgtacaagattgtttatagcggccttatatgtaactacccaaaccagaagaacccaaatgtctctcaactagttaatggattaacaagttgcagaacatccaaacaatgaaacactactccacaataaaaargaagaactacctatacatgctacaacaaggatgaatctcaaatgcactgtgctaagtgaatgaagcaagacacaaaagtttccatactgtatgaattcactgaatgacattctggaaaagacaaaactataggaatagaaagcatagggtttggcaaaggagaagttaatcacaaaaggacggaggga

SEQ ID NO: 245094 - DNA, 564 bp, Homo sapiens
tgggagagagttaatggattctcagattctaaaatatgaagctatattattagaaaaagatgatttggctgtaagaacaaatacttgtctgaatccagccagtttcctatgggaaggagaggagaacaaagaggcataagaccataactgcttagatatcrtagaataccaaaccagagttagaccagacattagagaagctcctctacataatgggattaggctgtttgtggatgggtcatcccaagtgatagatggcaagatacataatggttatgctgtcattgatggaaatgaacactcgttatgtgaggaaggtagattacctaatggctggtcagcccaaacctgtgaattatatgcccttaaccaggccctaaagctccttgaaggccgagaaggcactatatatactgactccaaatatgcctttgggaggtacacacttttggagaaaatctagccagagcagggcttaagaaatagcaagggaaaggaactgatacatgggaaactaatcagcaggtcttaaagagccttctgttttcagcagagatagccata

SEQ ID NO: 245095 - DNA, 601 bp, Homo sapiens
tcccacattgtggaggtcagattccagagcaatcccctccttctctatagggaatatgaaccactcctcttgcctctttaggcaggggcagagttcaataagcctatgggagaactctcgacttgtacccacattctaaacatcacaggtaagtcaggcaatggcaattactcagcttttatatrccctgggctgatgtctgatggtattatgggaacaggaacctcggtaacctgttaccatctaattggaccaggacttgtgctttagttcaattggccattcccttcaccctggcattccataaaatacctgaaaatacacatggccattggaacaagagagacttaacaaattctttttttctcataaaaatattatatttttcagaagaaatattacacataatacattgaaaatcactgattgtttttcttcttttttctgtgaatgtgtaggtgtttgagtctcttgtatttcttcttttatacaggatatgggctgttagaaaactatttcattatatttatcatcatcattcatttcagccacttcagatttttgtctctccaaaaatactggtgtacaaactggtgtgggg

SEQ ID NO: 245096 - DNA, 647 bp, Homo sapiens
ttttcctacttttatcttgttgccaccttcaaaaaaagagaggagtattttattaatgatggcaacctgtggttttggattgcttttctaagcggttgctgccaccattgctgttgaagcaaaagtgaagcacattgttttggtacagttgtaatactcccygtggccacagactccaaatctcaggtacttaagacattgacatctactagaaatatgtaagtattagtccttacctccactctgtacccgtggtggtgtgtcctgtgtggaaaatgtgcatacagtctttgcatacaagtttctgaatcactttttcaaagtcattgtgaaaacatatgatctttagtgggattcctgggtgttagctgagaacgttcagcctattgttcagattcatacttcccttggcccccaactttttaatataaaaaatattcaaaaatatataaaagttgaaagaatgttacaattcatattcatatcctcaccaccaagtgtcaatagttgttaatattttgttatttcactttatctgtatacccacacagatttaaagctaaatctgtatctagagtgacactgtttttggttatccatttgaaagtgagttgcggacatcattttttcactattaacgtatcctg

SEQ ID NO: 245097 - DNA, 647 bp, Homo sapiens
ttttcctacttttatcttgttgccaccttcaaaaaaagagaggagtattttattaatgatggcaacctgtggttttggattgcttttctaagcggttgctgccaccattgctgttgaagcaaaagtgaagcacattgttttggtacagttgtaatactccctgtggccacagactccaaatctcaggtacttaagacattgacatctactagaaatatgtaagtattagtccttacctccactctgtacccgtggtggtgtgtcctgtgtggaaaatgtgcatacagtctttgcatacaagtttctgaatcactttttcaaagtcattgtgaaaacatatgatctttagtgggattcctgggtgttagctgagaacgttcagcctattgttcagattcatacttcccttggcccccaactttttaatataaaaaatwttcaaaaatatataaaagttgaaagaatgttacaattcatattcatatcctcaccaccaagtgtcaatagttgttaatattttgttatttcactttatctgtatacccacacagatttaaagctaaatctgtatctagagtgacactgtttttggttatccatttgaaagtgagttgcggacatcattttttcactattaacgtatcctg

SEQ ID NO: 245098 - DNA, 541 bp, Homo sapiens
ctcactctgttgcccaggttggagtgcaatggcatgatcatggttcactggagcttcaacctcccaggctcaggtaatcctcttacctaagcctcagcctcccaagtagctgggactacaggcatgtgccaccaggccaggcgaattttttgtatttttttgtagagatggggttttgccatgttgccaggctggttttgaactcctggactcaagcaatctgcctrcctccgcctcccaaaatgctaggattacagatgtgagccagtatttttttattttgtcagtaacttgtttaactactcatgttaatctctatattcttcttacatagtagaacagatgttgacaaatgtttatttactattcataagttgatggagttttggtattaaaaaaagtaagttaaaccatctgtgtaataaaagaagatcattttcttttttgaaaaaaagatcaacatcctgcttgttaaagactcaggagaagtttgatcatttaccttgataggggatagaggctagtaaagaccaagaaagag

SEQ ID NO: 245099 - DNA, 537 bp, Homo sapiens
tcttataaaggcttacagcctacagtgtggccatcctgacaggctgggaaacatatttaatagcttcgggcagagactggaaacaggcacttcaagagaggagaagctggaacagggatttatgcctaaagggttagccaggtatacatattcaacaggttataggcagagctatgagtatttacaaaggggtcctgatgggtgggtactgaacaaacgtgcagttacrtgcatcccatgttcactttgggatgaagacttaacgtggaaatacattacagttgggccctatatgtcaaaaggtgaggtggggacatgaaggcattcaagtgagcagcctctgtaaactggccagaatcagttcatggttggtggtcttcttactgagatagatttattgaaatcaatctcttgtccaattaaagctgtagctgtagcttgtggagcaggagggttagtcagtgtctgatggaagatgagctgcaattgttttaatatttattgcttatctcaaggtcagtgcttgttcagctacta

SEQ ID NO: 245100 - DNA, 583 bp, Homo sapiens
tttaatgaacccttttcactctctatttgctgaaccaactctctaaagtttaggttgttaatctccagaagtggtggaattaaacacaagcacacacacacatacacacaaacaaaaactcacctgtagtcttactctttcctcaatcctaggattgattcccagccagcatcagacagcctccttagtcttttcctggagtgtagaatagtctggagataataatcttccttagtacgactgtaaaatactgtaatacaactgtaaaataaaatatagaaaaaattacagagggcaaaaccaatgttttttwaaaaaaaaagaaagcagagaagtgtacatggggctagctcagttattttggaagctaatcatagaacaagaattagttttcatacgtttatccattttgaagggagagtgaaggaaatacattacatattatatggtattcagccaggaaaataggggcctgaccctagtccaggatcttcgttttcactgtgagatgggtttgtactattgagtgctatgtatttgaaaccagtgttacctaaacttctttaggtagaagttcaaaact

SEQ ID NO: 245101 - DNA, 583 bp, Homo sapiens
tttaatgaacccttttcactctctatttgctgaaccaactctctaaagtttaggttgttaatctccagaagtggtggaattaaacacaagcacacacacacatacacacaaacaaaaactcacctgtagtcttactctttcctcaatcctaggattgattcccagccagcatcagacagcctccttagtcttttcctggagtgtagaatagtctggagataataatcttccttagtacgactgtaaaatactgtaatacaactgtaaaataaaatatagaaaaaattacagagggcaaaaccaatgtttttttaaaaaaaaagaaagcagagaagtgtacatggggctagctcagttattttggaagctaatcatagaacaagaattagttttcatacgtttatccattttgaagggagagtgaaggaaatacattacatattatatggtattcagccaggaaaataggggcctgaccctagtccaggatcttcgttttcactktgagatgggtttgtactattgagtgctatgtatttgaaaccagtgttacctaaacttctttaggtagaagttcaaaact

SEQ ID NO: 245102 - DNA, 587 bp, Homo sapiens
ctccctgttgtttttgattcatcttttctgccctcctgcttttcagaaattaaaaggctaaaaagaggtactaaactttaaaacttctcttatagtctcccattaaactaattctaagaaccaccaaaaaaggggaaaaaaawttcaaaagcagtgaaatgatatggactgtgaggatgtaaaatattggaaataagtcattatatgttagtgctgctctgacatagggacatattattgagaatcaacttttgctcaattttcagagaaatggaataatcgtatggctgatctatgtaaacaagttgaagaattgtctgaaagaaaatatggtatgtctaaactggaaaagtcctgtaatcctttgttcatgagcatttacacaatggagttactgttcatcatggggtactgtggacaagcccagggctgctggtgaatcctgccatacttacaggtttctccttgtaaggttctttgtagtgtctaaatattagaaacattctttgtttctagattactgcaaagctaaggaaaagttgtacttctttaattatcattatcatttcttttaaactttcagcatg

SEQ ID NO: 245103 - DNA, 580 bp, Homo sapiens
taaaaaaccttttcaaaaattaatactgtaactttccttcataaaagactgtttggcaagtccacagataaggtaaacatttagtcttttacttagaagccaacattaggcccagatgctataccacaggtcaaatctcaaaatggcaaattggagtctgcccaaattttctgttgtattgaatattttcgcaatatttggaccatcagccaggacttgaacatttttgtcatacagggatttgttgtaacagaatttgacacactgttaatttgcttagtcctcccaggattcatggtgcattaaaagggatattcagtcttcctggagctggtacctgaagagttctgatgtcacttagatccccttccttttgaacagaagtttacaaaacgctcacccatagtcacaaagcagtctgggtcagttatcagcttcacacataatcacytttcaaaacacgaagtaatacaagggtaatgtttatttatctgataactccggttataagaaacactcagacaaggcttaacttctactggtattgccagtgacattccaatactagtctgcatgtgcc

SEQ ID NO: 245104 - DNA, 586 bp, Homo sapiens
gccgaggcaggcagatcacctgaggtcaagagttcgagactggcctggccaacatggtgaaaccctgtctctactaaaaatacaaaaattagctgggcatggtggtgcacacctatcgtcccagctactcaggaggctgaggcaggagaatcgcttgaacctgggaggtggaggttgcagtaagctaagattgcaccactgcactccagcctgggcaacagagcaagactctgtctcaaaaaaaaataaaaataaaaaataaaactttcaatgtttcacacttgctaaactaggtctctctcaggctgtaactgagcgacttaaggtgcaaatatatgattccatattgatttcaattaaattccacatttttatrcttagctcaccactctgacctcatgagatggatttcactctccagtgtgtcatccagcatgatgactatggctaccctttctagaacatctaagtcactgattccaagacatcagatgtggctctgagtggagccctgaatctcatccccctgaacttccactctggcctgacattaattcaccatcaatatctttttagtccagatgtt

SEQ ID NO: 245105 - DNA, 617 bp, Homo sapiens
tatttaatagtttggttccttttttttttttttaagatgccaccataggggcctgttgggagcaaagggattatgtttcccttgatgttaagtgaattagccaaacatagacttcctgttcattcttggtttttttccacgtcrtatatgcctattactatttttaagtgatttttatatcaatgttttagtttatttttttactttcttgttaacccgattataaactcccatgggagcaacagtgccttttttgccctcaggtttttatgtgcttaagcaatggcaggtctacataatgatagactatataatcaaagaaagggagtattcacgtgactttagaattagcatgtgtctgcacagaatatgcctctggctttaccagcagtagaaaatttatagaagagaaacagaaatgctttgctgttaatgacgcctaaataagaataggagtaaaggagagtattacctccaactcaccggagcctgcttttcccccttataagcagttcctaaagtgaatgaaagcagctctccttatgtgtctgcctactttattcttcggtaagtttagcagtttatctagctatcctttatttgaaatgattgccaca

SEQ ID NO: 245106 - DNA, 617 bp, Homo sapiens
tatttaatagtttggttccttttttttttttttaagatgccaccataggggcctgttgggagcaaagggattatgtttcccttgatgttaagtgaattagccaaacatagacttcctgttcattcttggtttttttccacgtcgtatatgcctattactatttttaagtgayttttatatcaatgttttagtttatttttttactttcttgttaacccgattataaactcccatgggagcaacagtgccttttttgccctcaggtttttatgtgcttaagcaatggcaggtctacataatgatagactatataatcaaagaaagggagtattcacgtgactttagaattagcatgtgtctgcacagaatatgcctctggctttaccagcagtagaaaatttatagaagagaaacagaaatgctttgctgttaatgacgcctaaataagaataggagtaaaggagagtattacctccaactcaccggagcctgcttttcccccttataagcagttcctaaagtgaatgaaagcagctctccttatgtgtctgcctactttattcttcggtaagtttagcagtttatctagctatcctttatttgaaatgattgccaca

SEQ ID NO: 245107 - DNA, 617 bp, Homo sapiens
tatttaatagtttggttccttttttttttttttaagatgccaccataggggcctgttgggagcaaagggattatgtttcccttgatgttaagtgaattagccaaacatagacttcctgttcattcttggtttttttccacgtcgtatatgcctattactatttttaagtgatttttatatcaatgttttagtttatttttttactttcttgttaacccgattataaactcccatggsagcaacagtgccttttttgccctcaggtttttatgtgcttaagcaatggcaggtctacataatgatagactatataatcaaagaaagggagtattcacgtgactttagaattagcatgtgtctgcacagaatatgcctctggctttaccagcagtagaaaatttatagaagagaaacagaaatgctttgctgttaatgacgcctaaataagaataggagtaaaggagagtattacctccaactcaccggagcctgcttttcccccttataagcagttcctaaagtgaatgaaagcagctctccttatgtgtctgcctactttattcttcggtaagtttagcagtttatctagctatcctttatttgaaatgattgccaca

SEQ ID NO: 245108 - DNA, 617 bp, Homo sapiens
tatttaatagtttggttccttttttttttttttaagatgccaccataggggcctgttgggagcaaagggattatgtttcccttgatgttaagtgaattagccaaacatagacttcctgttcattcttggtttttttccacgtcgtatatgcctattactatttttaagtgatttttatatcaatgttttagtttatttttttactttcttgttaacccgattataaactcccatgggagcaacagtgccttttttgycctcaggtttttatgtgcttaagcaatggcaggtctacataatgatagactatataatcaaagaaagggagtattcacgtgactttagaattagcatgtgtctgcacagaatatgcctctggctttaccagcagtagaaaatttatagaagagaaacagaaatgctttgctgttaatgacgcctaaataagaataggagtaaaggagagtattacctccaactcaccggagcctgcttttcccccttataagcagttcctaaagtgaatgaaagcagctctccttatgtgtctgcctactttattcttcggtaagtttagcagtttatctagctatcctttatttgaaatgattgccaca

SEQ ID NO: 245109 - DNA, 579 bp, Homo sapiens
ctatgacccataactatatctatggtaataaactgaaagagctagtatttttgaggtttccacattgccaactcccaaaaatttggagaaaggtgaagattcaaatttaaagtaacaagaatgtcatggacaagaaacataaagtacttaagttttcctttctgttacttttattataataaaaaaggagacagcggaataagtacttcaatactgtgtttctcatgtgtgtttgaaaatatgtaggaatagtttaatagttttggtttccttttttttttttttttttttaaagatgccaccttaggggcctgttggggagcaaagggattatgttgtccttgacgttaagggaattagccaaacatagacttcctgttcattcttgattttttttccatgtcatatatgcctataaatatttttaagtgactctytatattaatgtttgttgttgttgttgttactttcttgttaacccgagtataaactcccatggcagcaacagtgccttttttgccctcagggttttatgtgcttaagcaatggcagctccacataatgatagactatataatc

SEQ ID NO: 245110 - DNA, 184 bp, Homo sapiens
ttacatttttacaagctttatacaggaagctttacagcttgtgataggtagtccwactatcctacctttgagattctaccaaaataacacttctaaaggtaacgtctattagtaccttaagctcaacattcctgctggggcaaacctataaacattccatttgctgaaaaaggacttcaaatcc

SEQ ID NO: 245111 - DNA, 184 bp, Homo sapiens
ttacatttttacaagctttatacaggaagctttacagcttgtgataggtagtccaactatcctacctttgagattctaccaaaataacacttctaaaggtaacgtctrttagtaccttaagctcaacattcctgctggggcaaacctataaacattccatttgctgaaaaaggacttcaaatcc

SEQ ID NO: 245112 - DNA, 184 bp, Homo sapiens
ttacatttttacaagctttatacaggaagctttacagcttgtgataggtagtccaactatcctacctttgagattctaccaaaataacacttctaaaggtaacgtctattagtrccttaagctcaacattcctgctggggcaaacctataaacattccatttgctgaaaaaggacttcaaatcc

SEQ ID NO: 245113 - DNA, 575 bp, Homo sapiens
attcacacacagaatttcttggaaagatttatttttacaattcttccataacttgtttgaactttcagctttatcatctgtaattcaaaacggttgtttgatcctaggcaagaatttatatttgcatgccttcttataatgttgtattaaaaacacattttaccgtccttacacaccttgtctggaaatgtacttccagtggtttcaattacatattatcayggtaaattttagcaattttaactttaatgtaaagccaggtaaattgtcctaattatgtgctaggagcagccataattaagggtgtgtttagttccatttttcctcaggcttgaccaattgtgaagcaaagttgaactgttttcaaaaaccaaaaaagcagttataaccttaaaacattcagcaaacctagtatctgacctgcataatttagtccacctactcacatattgatgacatttgtgttttactgataatcttaaggctgtttttatttctcaagcattaaagtcatgtgaactaaaacatacacatctttcatctttccttcaaaaatatttgatccaagtgcttat

SEQ ID NO: 245114 - DNA, 565 bp, Homo sapiens
ttgtatgtgaatttgatataacgccactttactgaatttctttattaattctcaagatttttagtgtactatttagttctgctatataaaaaattgtatgatctgtgatcagagacaatctgaatttctcctttttcatttggatgtcttttatttctttctcttgcaaaatgatcaggctgagaattccagtactctgttgaatgaaagtggtaaaagtagacatcattgtcttgttccagatctcaaawgaaaaactttcctattttcctgttcagtgtgatatcagctaatgaatttcatattttgccttaattgtattcaggtagataccatctatacctaatttcttctgttgttttaatcacaaaggcatgttagatttttccaaatactttttttgcatctagaataaaaaataaaggtgcctagcagtaaaactaattaagaaataaacactgtctacactgtaaatcataaaacacttataaagaaagtaagacatgaaaagtttgagagatatttttgctcattagttataaaacatattgttaaaatggctttg

SEQ ID NO: 245115 - DNA, 534 bp, Homo sapiens
ggctcacagtaaatgacagtaacaagtagagcttttcttctacccattgttcagagaaggaaaaataagaggtataccatacatgtttcaagtacatggaaaatatcaacaaattagaaacactgcagaactatttcactattattttgttactacattttccatcaaagaaaatgtcttttaagctaacacatcaatgaaatgaactaagaagaatataaacgttatttatcaacagtaagtgatagagtatgtcaaaccctactttaaatatcaatgtcaccaggatcagagaaattagatgccagaaactcaagcggtttatatatatatactaaatcacatcagaaatctacccattccagaaccagaatatwtccagaagtcagcaatttatatgaggaggcatctggaaatcatttcaaataaaggatagctagatgaattgctaaacttacggaagaataaagtaggcagacacataaggagagctgctttcattcactttaggaactgcttatacgggggaaagct

SEQ ID NO: 245116 - DNA, 514 bp, Homo sapiens
gtaaaaattcagcattcaaaaatttcaactttactacaattttactaccatgaggtggaaatttctcccccatttatccccgaatgaccagcagccctttgtcaaagatatttttagtacctatgggtcaaacctaaaagcaattctaaacctccaggaagtacaaaaaaaaatttaagtttgtaacagggcccacatcccattgttcatgatgtatgttaaggtaaaaatgaggtacgaatacaataccctagcatcaattccaccaacaaaaacagtgtttggcacgattttgccttctggtaacacccagccttggctagctgcagctgatgaagactgggtgctggcctctctggagatggttgagtttggagtctcaggatttgcagcagactgtaatttggaaagtagacatcataattacgtatgcaggcaaaacccatacataatgtgaaataccatttttgtattttaagtatattttayataaattactttcattgtaattcag

SEQ ID NO: 245117 - DNA, 599 bp, Homo sapiens
taactctcattatattttaaaaccctagacctgcatttcatcaaagtttggggtttaaatctgtgacatattattggaatctgcaagccaagaaatgggtcctcctacaccatcaccctctctcctgcctaaagagatcctagacatggggcatctagaatgcctggcagaagcaaacataaagccgacttggatgaatccttctacaacctaggctgaaagaaaatgatcctttaaggacacgctcacagtaaaaatttatacaacactacttatcttgaataagaatggcatacaaacaagaaagttaaaacttacagaagaagcttctcagtagcaatagaaactagaagataacagtaatatgctcacgtgtgtatgtgttttgttttgtgttttttctttttgtcacgttattttwttcctcaacttatttggagtaatgcagtctatatttttaagtgactgttttactatttgaaaatgtaaacttaaaatataaagctaatacatagctttactctcctcttgaataatacaaaggcctttaggatgttttagctttggacaccctcccctctctcagtttatatgttatt

SEQ ID NO: 245118 - DNA, 543 bp, Homo sapiens
agaaagtaacaacgacaaaaaaattaatataragaatcacttaaaaatatttataggcatataggacatggaaaaaaatcaagaatgaacaggaagtctatgtttggctaattcccttaacgtcaaggacaacataatccctttgctccccaacaggcccctaaggtggcatctttaaaaaaaaaaaaaaaaaaaaggaaaccaaaactattaaactattcctacatattttcaaacacacatgagaaacacagtattgaagtacttattccgctgtctccttttttattataataaaagtaacagaaaggaaaacttaagtactttatgtttcttgtccatgacattcttgttactttaaatttgaatcttcacctttctccaaatttttgggagttggcaatgtggaaacctcaaaaatactagctctttcagtttattaccatagatatagttatgggtcatagatatacttgtatctatgagaagagatcctgagaatgactaccgtcaaacagccagctaaaatgaaaatataattgg

SEQ ID NO: 245119 - DNA, 543 bp, Homo sapiens
agaaagtaacaacgacaaaaaaattaatataaagartcacttaaaaatatttataggcatataggacatggaaaaaaatcaagaatgaacaggaagtctatgtttggctaattcccttaacgtcaaggacaacataatccctttgctccccaacaggcccctaaggtggcatctttaaaaaaaaaaaaaaaaaaaaggaaaccaaaactattaaactattcctacatattttcaaacacacatgagaaacacagtattgaagtacttattccgctgtctccttttttattataataaaagtaacagaaaggaaaacttaagtactttatgtttcttgtccatgacattcttgttactttaaatttgaatcttcacctttctccaaatttttgggagttggcaatgtggaaacctcaaaaatactagctctttcagtttattaccatagatatagttatgggtcatagatatacttgtatctatgagaagagatcctgagaatgactaccgtcaaacagccagctaaaatgaaaatataattgg

SEQ ID NO: 245120 - DNA, 543 bp, Homo sapiens
agaaagtaacaacgacaaaaaaattaatataaagaatcacttaaaaatatttataggcatatakgacatggaaaaaaatcaagaatgaacaggaagtctatgtttggctaattcccttaacgtcaaggacaacataatccctttgctccccaacaggcccctaaggtggcatctttaaaaaaaaaaaaaaaaaaaaggaaaccaaaactattaaactattcctacatattttcaaacacacatgagaaacacagtattgaagtacttattccgctgtctccttttttattataataaaagtaacagaaaggaaaacttaagtactttatgtttcttgtccatgacattcttgttactttaaatttgaatcttcacctttctccaaatttttgggagttggcaatgtggaaacctcaaaaatactagctctttcagtttattaccatagatatagttatgggtcatagatatacttgtatctatgagaagagatcctgagaatgactaccgtcaaacagccagctaaaatgaaaatataattgg

SEQ ID NO: 245121 - DNA, 625 bp, Homo sapiens
ttattcccaagtatattcctgtcaaaattcgacttcattacttctcaataagacagaggtcttcmttctacactaattctaagtgtttccttaaattttaggtacacttcactagtttaaaatgaccaactattccggaaatttgtataaacaagttaaaggcctcaataatacctgaaagcaaataattttactccttcttacattacctgataattatatacaggcaactgatatccagtggtgacctgaaatggtgaacttggataagcaggaaatgcctgaaaagaaaggttggcagaaaaaaatgaatatggtaaaccactttttaaaattacaaagaaatataattcccaatataacaacaatattacagaagggaaaatatcgtttttctacatacaacaatgcagaattccaaatgaatgactgatttatgaagaaagaaagattccatgtcaagtgctacactttgggtgtgaagggggaagaaatgacaaaagaattgacgacttcaccaaagtttaccttatactgtgtacgtattcacacccagacgttatttcttacactggtgataaggctccattaagagagattgcaaggtaagttaaattaatacatt

SEQ ID NO: 245122 - DNA, 625 bp, Homo sapiens
ttattcccaagtatattcctgtcaaaattcgacttcattacttctcaataagacagaggtcttccttctacactaattctaagtgtttccttaaattttaggtacacttcactagtttaaaatgaccaactattccggaaatttgtataaacaagttaaaggcctcaataatacctgaaagcaaataattttactccttcttacattacctgataattatatacaggcaactgatatccagtggtgacctgaaatggtgaacttggataagcaggaaatgcctgaaaagaaaggttggcagaaaaaaatgaatatggtaaaccactttttaaaattacaaagaaatataattcccaatataacaacaatattacagaagggaaaatatcgtttttctacatacaacaatgcagaattccaaatgaatgactgatttatgaagaaagaaagattccatgtcaagtgctacactttggstgtgaagggggaagaaatgacaaaagaattgacgacttcaccaaagtttaccttatactgtgtacgtattcacacccagacgttatttcttacactggtgataaggctccattaagagagattgcaaggtaagttaaattaatacatt

SEQ ID NO: 245123 - DNA, 536 bp, Homo sapiens
atgcctcacagtaaatgacagaaagaagtagggttttttttctasccattgttcagagaaggaaaaagaagaggtgtaccatacatgtttcaagtacatggaaaatatcaacaaattagaaacactgcagaactatttcactattattttgttactacattttccatcaaagaaaatgtcttttaagctaacacatcaatgaaatgaactaagaagaatataaacgttatttatcaacagtaagtgatagagtatgtcaaaccctactttaaatatcaatgtcaccaggatcagagaaattagatgccagaaactcaagcggtttatatatatatactaaatcacatcagaaatctacccattccagaaccagaatatatccagaagtcagcaatttatatgaggaggcatctggaaatcatttcaaataaaggatagctagatgaattgctaaacttacggaagaataaagtaggcagacacataaggagagctgctttcattcactttaggaactgcttatacgggggaaagct

SEQ ID NO: 245124 - DNA, 536 bp, Homo sapiens
atgcctcacagtaaatgacagaaagaagtagggttttttttctagccattgttcagagaaggaaaaakaagaggtgtaccatacatgtttcaagtacatggaaaatatcaacaaattagaaacactgcagaactatttcactattattttgttactacattttccatcaaagaaaatgtcttttaagctaacacatcaatgaaatgaactaagaagaatataaacgttatttatcaacagtaagtgatagagtatgtcaaaccctactttaaatatcaatgtcaccaggatcagagaaattagatgccagaaactcaagcggtttatatatatatactaaatcacatcagaaatctacccattccagaaccagaatatatccagaagtcagcaatttatatgaggaggcatctggaaatcatttcaaataaaggatagctagatgaattgctaaacttacggaagaataaagtaggcagacacataaggagagctgctttcattcactttaggaactgcttatacgggggaaagct

SEQ ID NO: 245125 - DNA, 557 bp, Homo sapiens
gaaaggatactcttgtctaaatctccccagtgtgtggaaaatgagaatgaagaaaacccccaaagcctttgatatggaggttattaacaacttatgccatcatcactaccacaaacttgtatggcctaggcaactgaggtactcacagctactgctgatattgaatgcagccaaagaagctgaatgaggccataccacttcaactatcttgaaaaagagtcactgcacccttctcaactggcacactaaaactcagatgcacgtgaaagtctttctctacaaaagcaagagaaaagcatcaagtcacatataagggcatctccattagactagtagtggatttctctgcagaagtcttacaggccaggagaaaatgagatgatataattcaacgtgctaaaaaaaaaaaaaaaaaaaaagaaarttcagtcaagaatgctattcccagcaaagcaatccttcataaatgagggagaaataaagtctgcctaaagcaagcaaaaactgagggagtccatcagtgctagactggccttacaagaaatggttaaggaagt

SEQ ID NO: 245126 - DNA, 615 bp, Homo sapiens
cagaaatgctttgctgttaattgcgcttaaataagaataggagtaaacgagagtattacctccaaagcaccagagctgctttcctccttataaccagttcctaaagtgaatgaaagcagctctccttatgtgtctgcctacttcattcttcggtaagtttaacagttcatctagctaccctttatttgaaatgatttccagatgcctcctcatataaattgctgacttctggatatattctggttcgggaatgggtagatttctgatgtggtttagtaggtatataaatcccgtgagcttcttgcatctaatttctctgatcctgcttacactgatatttaaagtaggttttgacatactccatcacttaatgttgataaaggacgtttatattcttcttagttcgttttatttatgtgttagctttaaagacattttctktgacggaaagtgaagtaacaaaataatagtcgaatagttctgccgtgtctctaatttgttgatattttccatgtacttgaaacatgtatggtacacctcttctttttccttctctgaacaatggctagaaaaaaaaccctacttctttctgtcatttactgtgaggcattactg

SEQ ID NO: 245127 - DNA, 590 bp, Homo sapiens
tttggtttccttttatttattgattgattttttaagattccaccttaggggcctgttgggtagcaaagggattatgttgtccttgacgttaagggaattagccaaacatagacttcctgttcattcttgatttttttccatgtcatatatgcctacaaatatttttaagtgatttttatgttaatttttttttgttgttgtttccttcttgttaacccgattataaactcccatggcagcaacagtgccttttttgtcctcaggtttttatgtgcttaagcaatggcaggtctacataatgatagactatataatcaaagaaagggagtattcacgtgactttagaattagcatgtgtctgcayagaatatgcctctggctttaccagcagtagaaaatttatagaagagaaacagaaatgctttgctgttaatgacgcctaaataagaagaggagtaaaggagagtattacctccaaatcaccggagctgctttcccccttataagcagttcctaaagtgaatgaaagcagctctccttatgtgtctgcctactttattcttcggtaagtttagcagttcatctagcta

SEQ ID NO: 245128 - DNA, 590 bp, Homo sapiens
tttggtttccttttatttattgattgattttttaagattccaccttaggggcctgttgggtagcaaagggattatgttgtccttgacgttaagggaattagccaaacatagacttcctgttcattcttgatttttttccatgtcatatatgcctacaaatatttttaagtgatttttatgttaatttttttttgttgttgtttccttcttgttaacccgattataaactcccatggcagcaacagtgccttttttgtcctcaggtttttatgtgcttaagcaatggcaggtctacataatgatagactatataatcaaagaaagggagtattcacgtgactttagaattagcatgtgtctgcatagaatatgcctctggctttaccagcagtagaaaatttatagaagagaaacagaaatgctttgctgttaatgacgcctaaataagaakaggagtaaaggagagtattacctccaaatcaccggagctgctttcccccttataagcagttcctaaagtgaatgaaagcagctctccttatgtgtctgcctactttattcttcggtaagtttagcagttcatctagcta

SEQ ID NO: 245129 - DNA, 590 bp, Homo sapiens
tttggtttccttttatttattgattgattttttaagattccaccttaggggcctgttgggtagcaaagggattatgttgtccttgacgttaagggaattagccaaacatagacttcctgttcattcttgatttttttccatgtcatatatgcctacaaatatttttaagtgatttttatgttaatttttttttgttgttgtttccttcttgttaacccgattataaactcccatggcagcaacagtgccttttttgtcctcaggtttttatgtgcttaagcaatggcaggtctacataatgatagactatataatcaaagaaagggagtattcacgtgactttagaattagcatgtgtctgcatagaatatgcctctggctttaccagcagtagaaaatttatagaagagaaacagaaatgctttgctgttaatgacgcctaaataagaagaggagtaaaggagagtattacctccaamtcaccggagctgctttcccccttataagcagttcctaaagtgaatgaaagcagctctccttatgtgtctgcctactttattcttcggtaagtttagcagttcatctagcta

SEQ ID NO: 245130 - DNA, 384 bp, Homo sapiens
tgtggtttagtatatatatgtaaaccccgtgagcttctggcatgtaatttctctgatcctggttacattgatatttaaagtagggtttgacatactctgtcacctactgttgataaataacgtttatattcttcttagttcattttattgacgtgttagcttwaaagacattttctttgacggaaaatgaagtaacaaaataatagtgaaatagttatgcagtgtctctaatttgttgatattttccatgtacttgaaacttgtatggtatacctcttctttttccttctctgaacaatggctagaaaaaaagtcctacttttttctgtcatttactgtgaggcatcactgattctgggtgtattcatgtatgctgctacctgt

SEQ ID NO: 245131 - DNA, 594 bp, Homo sapiens
atgcagttttcatctttactgtgaaatagctgaatgaaacatccaaactgactttcatgaattttcttagggagatagagtgaaataaatttatgctgcacttttcagagcacagaatcccaattacattttcattttagctggctgtttgaagatagtaatgctctggatctcttttcatagatacaagtatatctatgacccataattacatctatggtaagaaactgaaagaggtagtatctttgaggtttccacsttgccaactcccgaaaatttggagaaaggtgaagtttccaatataaaagtaacaagaatgtcatggactagaaacataaagtacttaagttttcctttctgttacttttattataataaaaaaggagacagccggataagtacttcaatactgtgtttctcatgtgtgtttgaaaatatgtaggaatacatataatagttttggtttccttttttttttttttttttttaaagatgccaccttaggggcctgttggggagcaaagggattatgttgtccttgacgttaagggaattagccaaacatagacttcctgttcattcttgatttttttt

SEQ ID NO: 245132 - DNA, 594 bp, Homo sapiens
atgcagttttcatctttactgtgaaatagctgaatgaaacatccaaactgactttcatgaattttcttagggagatagagtgaaataaatttatgctgcacttttcagagcacagaatcccaattacattttcattttagctggctgtttgaagatagtaatgctctggatctcttttcatagatacaagtatatctatgacccataattacatctatggtaagaaactgaaagaggtagtatctttgaggtttccaccttgccaactcccgaaaatttggagaaaggtgaagtttccaatataaaagtaacaagaatgtcatggactagaaacataaagtacttaagttttcctttctgttacttttattataatraaaaaggagacagccggataagtacttcaatactgtgtttctcatgtgtgtttgaaaatatgtaggaatacatataatagttttggtttccttttttttttttttttttttaaagatgccaccttaggggcctgttggggagcaaagggattatgttgtccttgacgttaagggaattagccaaacatagacttcctgttcattcttgatttttttt

SEQ ID NO: 245133 - DNA, 594 bp, Homo sapiens
atgcagttttcatctttactgtgaaatagctgaatgaaacatccaaactgactttcatgaattttcttagggagatagagtgaaataaatttatgctgcacttttcagagcacagaatcccaattacattttcattttagctggctgtttgaagatagtaatgctctggatctcttttcatagatacaagtatatctatgacccataattacatctatggtaagaaactgaaagaggtagtatctttgaggtttccaccttgccaactcccgaaaatttggagaaaggtgaagtttccaatataaaagtaacaagaatgtcatggactagaaacataaagtacttaagttttcctttctgttacttttattataataaaaaaggagacagccggataagtacttcaatactgtgtttctcatgtgtktttgaaaatatgtaggaatacatataatagttttggtttccttttttttttttttttttttaaagatgccaccttaggggcctgttggggagcaaagggattatgttgtccttgacgttaagggaattagccaaacatagacttcctgttcattcttgatttttttt

SEQ ID NO: 245134 - DNA, 594 bp, Homo sapiens
atgcagttttcatctttactgtgaaatagctgaatgaaacatccaaactgactttcatgaattttcttagggagatagagtgaaataaatttatgctgcacttttcagagcacagaatcccaattacattttcattttagctggctgtttgaagatagtaatgctctggatctcttttcatagatacaagtatatctatgacccataattacatctatggtaagaaactgaaagaggtagtatctttgaggtttccaccttgccaactcccgaaaatttggagaaaggtgaagtttccaatataaaagtaacaagaatgtcatggactagaaacataaagtacttaagttttcctttctgttacttttattataataaaaaaggagacagccggataagtacttcaatactgtgtttctcatgtgtgtttgaaaatrtgtaggaatacatataatagttttggtttccttttttttttttttttttttaaagatgccaccttaggggcctgttggggagcaaagggattatgttgtccttgacgttaagggaattagccaaacatagacttcctgttcattcttgatttttttt

SEQ ID NO: 245135 - DNA, 351 bp, Homo sapiens
cttctggcatctaatttctctgatcctggttacattgatatttaaagtaggktttgacatactctgtcacctactgttgataaataacgtttatattcttcttagttcattttattgacgtgttagctttaaagacattttctttgacggaaaatgaagtaacaaaataatagtgaaatagttatgcagtgtctctaatttgttgatattttccatgtacttgaaacttgtatggtatacctcttctttttccttctctgaacaatggctagaaaaaaagtcctacttttttctgtcatttactgtgaggcatcactgattctgggtgtattcatgtatgctgctacctgt

SEQ ID NO: 245136 - DNA, 242 bp, Homo sapiens
cactcagttagacagtcagatgcaaagyccaagatggtctcgttcacatcttagcatgctctagtagttggtgctagctgttggcagaggcctgacacagctggaacacctggacctcttcatgtgatctttcttgcaagcttctttacagcgtgatggtctcagggcagcattctttccgagagggcaagtcccaatgcacaggacttagggagcagatttgccaataccccattggccaa

SEQ ID NO: 245137 - DNA, 429 bp, Homo sapiens
ctctctacatcctgatgcacaatttatttgaaaaggaggaaacattttccgtcccaagtccctttttactcctttctttcccaacaaaacctgtacagaatcctcacactactgtgttctgtagaggagcggagagggagaccagttctccactcccctggccctgctgacacctggagggtgccaggcatgttcatggaaacagcagcattgcagccttccttccttccccacagctgtatccgtgtgagtctggacaacaaggacttgtcaacacgaatctctctcttctcctggtgtaagacaraacaaaaacaaaagacgttggagtagagatcagaaaagggtgggtttgcgatgtttgggagggttgagtgggcattttgacaacttagcttctccttgggtggtatttagcagatgcccttg

SEQ ID NO: 245138 - DNA, 429 bp, Homo sapiens
ctctctacatcctgatgcacaatttatttgaaaaggaggaaacattttccgtcccaagtccctttttactcctttctttcccaacaaaacctgtacagaatcctcacactactgtgttctgtagaggagcggagagggagaccagttctccactcccctggccctgctgacacctggagggtgccaggcatgttcatggaaacagcagcattgcagccttccttccttccccacagctgtatccgtgtgagtctggacaacaaggacttgtcaacacgaatctctctcttctcctggtgtaagacagaacaaaaacaaaagacgttggagtagagatcagaaaagggtgggtttgmgatgtttgggagggttgagtgggcattttgacaacttagcttctccttgggtggtatttagcagatgcccttg

SEQ ID NO: 245139 - DNA, 505 bp, Homo sapiens
gcccagcggctccctgcagccatcagggatggtgaggacacagggacacagacacactgatgtccaatgctcagatttggaaatgtcaccttcaccacactggacaatgaggtcacatgcatgcatgcacacatgctcacagaatcacagctctgagcccacttcataatgaacagacggtcccatacccatccagacagaacacgcagacatgccccgccccggcctgccatgcacagatgcccacagccaccacagggtgcacactaagasagaaggcgacccacagtgtggggaggacatttagggcccctaacagagccggagtcctcccaggggccaggctgcctgagccttggcagggggcttgtggctgtgggttcctgagcaccaggggaaggagccccgtaaggtgggaggtctgaccgctctcgctcttctccacgacctccaccacgtcccccgtggacagagccatctcggagcccgaggtcttctcgtagtt

SEQ ID NO: 245140 - DNA, 505 bp, Homo sapiens
gcccagcggctccctgcagccatcagggatggtgaggacacagggacacagacacactgatgtccaatgctcagatttggaaatgtcaccttcaccacactggacaatgaggtcacatgcatgcatgcacacatgctcacagaatcacagctctgagcccacttcataatgaacagacggtcccatacccatccagacagaacacgcagacatgccccgccccggcctgccatgcacagatgcccacagccaccacagggtgcacactaagagagaaggcgacccacagtgtggggaggacatttagggcccctaacagagccggagtcctcccaggggcmaggctgcctgagccttggcagggggcttgtggctgtgggttcctgagcaccaggggaaggagccccgtaaggtgggaggtctgaccgctctcgctcttctccacgacctccaccacgtcccccgtggacagagccatctcggagcccgaggtcttctcgtagtt

SEQ ID NO: 245141 - DNA, 564 bp, Homo sapiens
tgcagcggtgctctcctgggcatgtcgaggcagggcagaggaaggttctagtggggctggttgtaagcagagaattttgtgggctctcggcacttccttcccttcctctagcggtctttccacacttgcgtaactgcctggccaagggtacttgtcctgtggacaccctgagcccctggctgtgatctttcaactctcctcctgtggcctcccaagaccctgttatgttccctcaaagtgctctgcagacaggaggtatccagcaagtttgttggatgagcagaggcaggaagcgctcygaacttgagtttgaccttgtaatgacctctgtaagcaggcttacagccttttttcaggatgacataggattttttccactttttatttattattattattattattatttttttttttgtagagacggggtctcgagatgctgctcggcctggtctcaagctccagtatcaagtggtcctcccacctcagcctcccaaaatgctgggattacaggcataagccactgtgtctggccaggatttaatttaatgcatggatgaaaca

SEQ ID NO: 245142 - DNA, 536 bp, Homo sapiens
ctgcctccccagagacccatcttcctttatcagccaaatcacctgcgctgggctctgcttggcaggggtggaccctgaggcctcggcagaggggaatcagggacctgcccttgggagactgtcccaggacacacctgaaccacacccctgggaattcccttctcccctagacctgatctccagcccttggcctagggacacaagagaatgggctccaggccccaggcattcractcaggggagtcagacggagacccaggccccgtggggagacgtgcaggctgacggctgagctgtgcacgtggctgaagctccctgagcctctgtcttttcatctgtgaaatggcactgaccactgtacccacttcatgggctgccgtgaggattaaatagggtcaagtactagggtggcaaacgttggccatcaccagatgcaaactgcgcaggggctgcctccaaggtgcggggcagggaaattgccaggtaggaggcagggaggcttcttgctgtttaaattgagctttgaatgaagaaaa

SEQ ID NO: 245143 - DNA, 536 bp, Homo sapiens
ctgcctccccagagacccatcttcctttatcagccaaatcacctgcgctgggctctgcttggcaggggtggaccctgaggcctcggcagaggggaatcagggacctgcccttgggagactgtcccaggacacacctgaaccacacccctgggaattcccttctcccctagacctgatctccagcccttggcctagggacacaagagaatgggctccaggccccaggcattcaactyaggggagtcagacggagacccaggccccgtggggagacgtgcaggctgacggctgagctgtgcacgtggctgaagctccctgagcctctgtcttttcatctgtgaaatggcactgaccactgtacccacttcatgggctgccgtgaggattaaatagggtcaagtactagggtggcaaacgttggccatcaccagatgcaaactgcgcaggggctgcctccaaggtgcggggcagggaaattgccaggtaggaggcagggaggcttcttgctgtttaaattgagctttgaatgaagaaaa

SEQ ID NO: 245144 - DNA, 536 bp, Homo sapiens
ctgcctccccagagacccatcttcctttatcagccaaatcacctgcgctgggctctgcttggcaggggtggaccctgaggcctcggcagaggggaatcagggacctgcccttgggagactgtcccaggacacacctgaaccacacccctgggaattcccttctcccctagacctgatctccagcccttggcctagggacacaagagaatgggctccaggccccaggcattcaactcaggggagtcagacggagacccaggccccgtggggagacgtgcaggctgacggctgagctgtgcacgtggctgaagctccctgagcctctgtcttttcatctgtgaaatggcactgaccactgtaccyacttcatgggctgccgtgaggattaaatagggtcaagtactagggtggcaaacgttggccatcaccagatgcaaactgcgcaggggctgcctccaaggtgcggggcagggaaattgccaggtaggaggcagggaggcttcttgctgtttaaattgagctttgaatgaagaaaa

SEQ ID NO: 245145 - DNA, 614 bp, Homo sapiens
taaacaattctcattcctgagcctccccagtagctgggattacaggcttctgccaccaggtctggctaatttttgtatttttagtagagacagagtttcaccattttggacaggctggtctcgaattcctgacctcaggtatccacccgccttggcctcccaaagtgctgggattacaggcgtgagccaccacacccggcctgctttattttttaatagagacgaggtctccccatgttggccaggttggtcttgaactcttggcttcaagcaatccccccacctcagcctctcaaagggctaggattacaggcgtcagacaccacgcccagctattctgcaaattaaatgagatatttctgtgcaattcttagcataacacctgcctggcacaccataagaacacaagaaaagctgtcgttattattattactacctagctaagtactaggcacataataggtgctaactttaacttaaaaataatarcttattactacatcaacacttgatagtcttatttcaataacaaatgtttcttgactacaacaacattcactgatcatttcttgtggcttaaaactctcccaaacttaccaacattagtggcacca

SEQ ID NO: 245146 - DNA, 613 bp, Homo sapiens
aaacaattctcattcctgagcctccccagtagctgggattacaggcttctgccaccaggtctggctaatttttgtatttttagtagagacagagtttcaccattttggacaggctggtctcgaattcctgacctcaggtatccacccgccttggcctcccaaagtgctgggattacaggcgtgagccaccacacccggcctgctttattttttaatagagacgaggtctccccatgttggccaggttggtcttgaactcttggcttcaagcaatccccccacctcagcctctcaaagggctaggattacaggcgtcagacaccacgcccagctattctgcaaattaaatgagatatttctgtgcaattcttagcataacacctgcctggcacaccataagaacacaagaaaagctgtcgttattattattactacctagctaagtactaggcacataataggtgctaactttaacttaaaaataataayttattactacatcaacacttgatagtcttatttcaataacaaatgtttcttgactacaacaacattcactgatcatttcttgtggcttaaaactctcccaaacttaccaacattagtggcacca

SEQ ID NO: 245147 - DNA, 631 bp, Homo sapiens
tttcatgctacaatggcacagtggaatagctgggatagagactatatggcccgcaaagtctaaaatatttacaacttcactatttacataaaaatttgtcaacaactgttctacattaaacaatatatcagccctggcagatgtaactggttaccttgagtatctcatagcatgtatgcagtgtaattttcaagttcccaaacaaaactttccaaaagccatttcttaagaccacacactgtagagtcagatccaccaagttttgaattatctgaacagagctttgcaaatgtcaaaccagtatagtagatgatgacgattttgctgaaagatcactccactttcatcaggggaaacaagctattgggaatatattttaggacctcaattttccacacattgctctaattactagagtgctatagatgcatatctctgatttacagtccgccaagtcaagatttctgaatttcttggcataagtttggtagtacagtattactttgattatggcttcttatatctggcataaaaatattccctttgtgcatattctttttagatacagtacaaaaaaaagtatgactcttccttttttctctccytttactttaggaaaagcagctgtgaa

SEQ ID NO: 245148 - DNA, 548 bp, Homo sapiens
gatactttgtgtcagttataaacagtatatttcaaaattaagtatgagaaactccaggaggagattagacatgaggaaacaagctcagtaaagctaagaatcttgcctatagtcatctgtgcagtaagaatacactatgactattacagctaaaatatctttttaaatgccaggtattttctattctaattcttagaacaaattagagaactgagatttagagtggccccctcctctgcctaaaagcactccagatctggtcatttaatctctttggtatgccacttgtccccagggaaccaaactaacaagtttttcttctggtgtgctctttagcaaaaatgtagagtcatcagacattagtgtgtttgttgccagcttcgtgtgtgtgtgtgtgtgtgtgtgtgtgtgtgtgtccctctctcccctgcacttccaactgatttaactttccacttgtaggtgggtgtagctcagagaagatcaagaaatattgcactccctctacycaatattgtggaacaaattaaaacatgttcaatagttgt

SEQ ID NO: 245149 - DNA, 661 bp, Homo sapiens
gagggactgaggcaaacttcctgatgcctgtaacatttgaactgatctggaaggatgattataaaggattttaattgacaaaaacaatggtggaagagactgcatgagccagtgcaggaacattcttacattctaattatattcttatattctcatattctcacaggacattatctttaccaatgttaaatgattaaactaggtaataaacaaggcacacartgatcaaaagaaaggggctctggggatgaacattctgcctttaatcactaatggtgtggcctaaactgtggggattaacaatgctctgtaatacccctaactatgcaatggggataagaagaacctctcctccacctgggcattctttattgttgtcttcataaagacttaggtgtatggaaaattgggcccagtgactgacatatgacaaagcacttgaaacatgattctatttttatcattattagttctaccaataataattatatacaattaatagaaataattcgcttccccaaaatcaagaagatagaattttaatataaaataaagttttaaactaaggatatttttcttcactagtagaatttttgactcagcatcagctggcaaaacgatttaggaaaattaaggaaatgttctagcatactccaaatca

SEQ ID NO: 245150 - DNA, 661 bp, Homo sapiens
gagggactgaggcaaacttcctgatgcctgtaacatttgaactgatctggaaggatgattataaaggattttaattgacaaaaacaatggtggaagagactgcatgagccagtgcaggaacattcttacattctaattatattcttatattctcatattctcacaggacattatctttaccaatgttaaatgattaaactaggtaataaacaaggcacacaatgatcaaaagaaaggggctctggggatgaacattctgcctttaatcactaatggtgtggcctaaactgtggggattaacaatgctctgtaatacccctaactatgcaatggggataagaagaacctctcctccacctgggcattctttattgttgtcttcataaagacttaggtgtatggaaaattgggcccagtgactgacatatgacaaagcacttgaaacatgattctatttttatcattattagttctaccaataataattatatayaattaatagaaataattcgcttccccaaaatcaagaagatagaattttaatataaaataaagttttaaactaaggatatttttcttcactagtagaatttttgactcagcatcagctggcaaaacgatttaggaaaattaaggaaatgttctagcatactccaaatca

SEQ ID NO: 245151 - DNA, 661 bp, Homo sapiens
gagggactgaggcaaacttcctgatgcctgtaacatttgaactgatctggaaggatgattataaaggattttaattgacaaaaacaatggtggaagagactgcatgagccagtgcaggaacattcttacattctaattatattcttatattctcatattctcacaggacattatctttaccaatgttaaatgattaaactaggtaataaacaaggcacacaatgatcaaaagaaaggggctctggggatgaacattctgcctttaatcactaatggtgtggcctaaactgtggggattaacaatgctctgtaatacccctaactatgcaatggggataagaagaacctctcctccacctgggcattctttattgttgtcttcataaagacttaggtgtatggaaaattgggcccagtgactgacatatgacaaagcacttgaaacatgattctatttttatcattattagttctaccaataataattatatacaattaatagaaataattcgyttccccaaaatcaagaagatagaattttaatataaaataaagttttaaactaaggatatttttcttcactagtagaatttttgactcagcatcagctggcaaaacgatttaggaaaattaaggaaatgttctagcatactccaaatca

SEQ ID NO: 245152 - DNA, 661 bp, Homo sapiens
gagggactgaggcaaacttcctgatgcctgtaacatttgaactgatctggaaggatgattataaaggattttaattgacaaaaacaatggtggaagagactgcatgagccagtgcaggaacattcttacattctaattatattcttatattctcatattctcacaggacattatctttaccaatgttaaatgattaaactaggtaataaacaaggcacacaatgatcaaaagaaaggggctctggggatgaacattctgcctttaatcactaatggtgtggcctaaactgtggggattaacaatgctctgtaatacccctaactatgcaatggggataagaagaacctctcctccacctgggcattctttattgttgtcttcataaagacttaggtgtatggaaaattgggcccagtgactgacatatgacaaagcacttgaaacatgattctatttttatcattattagttctaccaataataattatatacaattaatagaaataattcgcttccccaaaatcaagaagayagaattttaatataaaataaagttttaaactaaggatatttttcttcactagtagaatttttgactcagcatcagctggcaaaacgatttaggaaaattaaggaaatgttctagcatactccaaatca

SEQ ID NO: 245153 - DNA, 616 bp, Homo sapiens
ccacagacactcctgcctatccctagaaattttgaaagctccagtatctgtttagcactagtaaatcatttcctgcttggtcaatccatattttactttgcgtatacagcctctacttttatccagttatatttaattaataaaaataattcctgtcttccaactataccaaggaaaatttcttcatcacaccattttagaacatttatttacaacatacggaaatacaattatatctttaagttaacaacttgtaactgagataagaagkcattgcttctctgagtttattttgttagagctgttcttttttttttttaaaggaagcttctgctcagaaaatgtgaaagaaataatctatctcaagaccttgctgttcttgactgttcaaaaattctttaaataaaatataatatggaagctgtgctctgcatgtcgagaccatttcactgttgagccttcacagccagaaaacaggctcaaaataattagacttgaacaaaatcacattatttactttttgctttaataaggaggtgattattagaagatgaaccatgactaccaagatagcaggtatagattctttttaacaaaattaatttagattatattc

SEQ ID NO: 245154 - DNA, 547 bp, Homo sapiens
ttgcttctctgagtttattttgttagagctgttcttttttttttttaaaggaagcttctgctcagaaaatgtgaaagaaataatctatctcaagaccttgctgttcttgactgttcaaaaattctttaaataaaatataatatggaagctgtgctctgcatgtcgagaccatttcactgttgagccttcacagccagaaaacaggctcaaaataattagacttgaacaaaatcacattatttactttttgctttaataaggaggtgattattagaagatgaaccatgactaccaagatagcaggtatagattctttttaacaaaattaatttagattatattcactatcttaagatacttatgcacataaatcatatctctctacgtatttttgcaygaaacatagagtatatgaaataaaatgaatgcaatgaatagaaatttaatcatatatttacctgaattattagattattcataaatagcttattagaggcagtaaaagtcgacagagaatgattgcaataggcagatgtgatgtaagtct

SEQ ID NO: 245155 - DNA, 561 bp, Homo sapiens
catcaccaaggaaactgtggtggagtaaaaaaattttaagaagatatcaacattgcagtaaatcaacctaacctggaaatgtgtttggtgacaaactgaattttcctaggtgtcggcaaactaactcttttaaggccccactaggggccttaagtgatctactccccaattcttccatagatgcacaaaaatactaactgatctattcattgtgtgtctttagaaatgcagacatttaatgggttacgaagcttaactgctagacacattcattagatgtgaacagttaatatgtagtcatttctgttggcttctaaawtatcctcatcactcttttgagacatagcagctcatcctaggccaatgatatcaaccatggctgtactgtgaactgtaatccagtatctttctctcaacacctcctctcttctcagctaagggtgttgtatattgaagatgctctgcttttccctctgactttcatcacttaaaactttgttgatttcacctgaggcaaattgacaaatatttttaatcatctttcacctttctttctcactt

SEQ ID NO: 245156 - DNA, 527 bp, Homo sapiens
tgttgctaagaatctcacctaagtctgtctaccatgtgaaactgcagatgacctcacagaaaatggaaagaagtatctctaaaaataagtttatttggcaacacactacaggctacaggttcacttctgattcttttcctttttttttttgagatggagtcttgctgtgtttacccaagacatgttttagactgtaaattggaggctgaaaaacatcataacatcacttttgccctactcaatgactatcctgttactaaggttgggccaaaattaaagggggggtcataggcccccacctctttttttattttcagacagggtctccctccgctgyccaggctggagtgcaggggcgcaatcatagctcactgcagccttgacctcccaggctcaagcaatcctcctgcttcagcctcccaagtagctgggacatgggcatgcatcatcacagctggctaattaaaaacattttttttttgagacggagtctcgctctgttgtccaggctggagtggagtggcgcg

SEQ ID NO: 245157 - DNA, 527 bp, Homo sapiens
tgttgctaagaatctcacctaagtctgtctaccatgtgaaactgcagatgacctcacagaaaatggaaagaagtatctctaaaaataagtttatttggcaacacactacaggctacaggttcacttctgattcttttcctttttttttttgagatggagtcttgctgtgtttacccaagacatgttttagactgtaaattggaggctgaaaaacatcataacatcacttttgccctactcaatgactatcctgttactaaggttgggccaaaattaaagggggggtcataggcccccacctctttttttattttcagacagggtctccctccgctgcccaggctggagtgcaggggcgcaatcatagctcactgcagccttgacctcccaggctcaagcaatcctcctgcttcagcctcccaagtagctgggacatgggcatgcatcatcacagctggctaattaaaaacatttttttkttgagacggagtctcgctctgttgtccaggctggagtggagtggcgcg

SEQ ID NO: 245158 - DNA, 616 bp, Homo sapiens
ctgtagccaccatagcctcctcacaccaatggctccccagaatgtcatgttgaaccactataaacttcataactgtcaaattttacccgtagctacagctgcatraaaatggcctctgcctcacttctgatttccaaatctcttacaagtgcatgtaaatgactctagctgcaaaggagtttgggaagtatactttttaacctctccaataggaggatcaaatggagattggtaagacttctcttcagaagattgactaaggcttctccctagaatgtctggcatgtgtatctcccatacctgacaaagaatgagggcttcaagacagctaaaaaattttgaacaagctttaaaggactattttctcatccccagtcccatcagctgagccagaataatgacttcatagtaatttttccctgtacctttgagggaaagtaatgcattcattattggaataaaagtggttcatgtgtataaatcttgcccttggcaaaataaattatcaaagctcatgccaatgggagagatggcaggtccatgatgctaagagccaagttccataaagtgatagggaagcagctttcttttatccaaaagaatttatgttttatgg

SEQ ID NO: 245159 - DNA, 428 bp, Homo sapiens
tgcatgtaaatgactctagctgcaaaggagtttgggaagtatactttttaacctctccaataggaggatcaaatggagattggtaagacttctcttcagaagattgactaaggcttctccctagaatgtctggcatgtgtatctcccatacctgacaaagaatgagggcttcragacagctaaaaaattttgaacaagctttaaaggactattttctcatccccagtcccatcagctgagccagaataatgacttcatagtaatttttccctgtacctttgagggaaagtaatgcattcattattggaataaaagtggttcatgtgtataaatcttgcccttggcaaaataaattatcaaagctcatgccaatgggagagatggcaggtccatgatgctaagagccaagttccataaagtgataggga

SEQ ID NO: 245160 - DNA, 500 bp, Homo sapiens
gtgagatttctgttttctctggaaattagagagctgaactgtgttttgtgtgagatcatccaacagtttttttaaaaaatcttacttcagaatcacattgaaatcattatgtcttctggaaaccagctgatagccaaaacatttatttaaattgtttataaaatgggtgggtggtatttcataatagttattggtttactatgcatgacctgttgatctacctgttgaaaccattattttaaaatrtatttcccccaaaaatgctacttctgtatatttgtttttatcaaatataaatttacctagctcttttaagacacagatctcacccactgaattataactaacatgaattttggaaattgtcctattttgatatgtcaggagagaacgttttactagcaggtttcattagccaaggtggaccagtgggtattttctgacattgcaaaagcagcttcaaagtgccactttcctttcctttccaggacgggtcaaat

SEQ ID NO: 245161 - DNA, 500 bp, Homo sapiens
gtgagatttctgttttctctggaaattagagagctgaactgtgttttgtgtgagatcatccaacagtttttttaaaaaatcttacttcagaatcacattgaaatcattatgtcttctggaaaccagctgatagccaaaacatttatttaaattgtttataaaatgggtgggtggtatttcataatagttattggtttactatgcatgacctgttgatctacctgttgaaaccattattttaaaatatayttcccccaaaaatgctacttctgtatatttgtttttatcaaatataaatttacctagctcttttaagacacagatctcacccactgaattataactaacatgaattttggaaattgtcctattttgatatgtcaggagagaacgttttactagcaggtttcattagccaaggtggaccagtgggtattttctgacattgcaaaagcagcttcaaagtgccactttcctttcctttccaggacgggtcaaat

SEQ ID NO: 245162 - DNA, 536 bp, Homo sapiens
attttaatctgatattaccaaacttcccatgaactaaaaaaaaaaaaacccataaattttaagtccagtgagatttctgttttctctggaaattagagagctgaactgtgttttgtgtgagatcatccaacagtttttttaaaaaatcttacttcagaatcacattgaaatcattatgtcttctggaaaccagctgatagccaaaacatttatttaaattgtttataaaatgggtgggtggtatttcataatagttattggtttactatgcatgacctgttgatctacctgttgaaaccattattttaaaatatatttcccccaaaaatgctacttctgtatatttgtttttatcaaatataaatttacctagctcttttaagacacagatctcacccactgaattatractaacatgaattttggaaattgtcctattttgatatgtcaggagagaacgttttactagcaggtttcattagccaaggtggaccagtgggtattttctgacattgcaaaagcagcttcaaagtgcc

SEQ ID NO: 245163 - DNA, 611 bp, Homo sapiens
gcttcgtggagaagggaacaaattagttggtgttttaaaagacagaagtatgtagacagtgaaagaggaatttgcaggaaatgtggtgggaagggtaccagtaaatcttaaactgagggaagagctcaggcgaaacctccagtgatcttcacaatkctcaggagaatgcttatacatgatttgcacacaaaatattgaatttgaaaaaatcttatattgaattcccaagccacttgtagaatgcaatgtggcacactaatgtggtagaagggacataaaacaaacaaacaaactccctgcacaaatacccatgggaaaggaagaacagcctcacagaacttcaaaaagagaaaacaaagaaaaaaaatctcattttccaatgtatgcaaacatttattttctgagcaaagacaggattacaagtaggcagaatataagatttgaaaagcaaaaggaaaggttacatctccccaccacctaccacccacaaaccagttcatccacaggcaagctgatactgagactctacaactacatatttatacttttgacttaaatgtggccttctcttgaacagcaaataatcccaagatttacaaattaagccacat

SEQ ID NO: 245164 - DNA, 585 bp, Homo sapiens
ttatatctttgtaattttgtgcaagaatttctaaaagaaaaaatcttagaaatcctagaaaaatcccaagtcaaaaggcacttgtatatataattttgaaaggtcttgtcatattgctctccatagaagatacaccaatgcatcttcccacctgcaatgtatagaacacctgtgtccccatattcttttttctttttttttttgagacgaagtcttgttcttgtcacccaggctagagtgcagtggcacgatcttggctcactacaacctccacctcccaggcagagaatcaagagaatcaagtgattgtcctgcctcagcctccccagtagctggattacaggcacctgccaccacgcccggccaattttcgtatttttagtagacacggggtttcaccatgttggtcaggctggtctcaaactcctgacctcaggtgatccgcctgcctcagctccaaaagtgctgggatttcaggcatgagccactgcacctgacctgtgtccccatattcttgccaacatagtktattatcaaacttgttgatctttgccaatctgaaaagcaaaagtagtattcccttac

SEQ ID NO: 245165 - DNA, 570 bp, Homo sapiens
ttaagtcttattttaatttcattgatacatttaggaacaacttttattgttctgtgaaaaacgggtttgttttccagagattattctgtaactgccatttggtttttatgttctctttaaaaatgacaatacatactatgctagtttttgttgtttttaagaatatacctttttcatttgactaaaaatccttgaccagctctttccagaaaatgtggcaggggaacagagtcatgttcaagtctaaaaagacagaattatatatgttatttcaattttacttcgccccagtctaccaaaatcaattctgcagagctgctcacaatgtgaaatttccttatgtcctctacctcactgatactctacctgcaaatgcagctcatctgtgaacatggcccataaagatttccctctctatttctcctcagaatcagactcagggaatttcccactaagagtccctagaccttggtcctgttgtaaagaaaaacgtgccgttttgcaataggttgtgccacttaagttagwaaggaatgctttgccaacattttctgagctctgaagttatga

SEQ ID NO: 245166 - DNA, 585 bp, Homo sapiens
tattctatctctttcccaatcaactgtcctttctcacctcccttttaaatctccagcacctgctccctcatgttyattctcaatgcacaatctttttttctccttcactgacagaggtgaaacaattaaaagagaatttccccagtctctcactactgcacctgctcaccctcccacaagcacgtgtactcactgtgcttttcttgctgttttgaaaggtgaattgtctgtggtctttctagagccaatctcttcacatgtgcaccagattccaagccctgcggcccactcaagggcatccctgcatgtcttctcccatctcttaccttgtcaactctttccactttttgagtcatcctcctcagcacaaaagattgttactcatttatcttaaaaagcaaaaaactaagccaacaaaaacaagaaaaaacagaaataaaaccttttactggaccctctctccctaccaggtatgactccatttctctttgcctttgcagaaaaacatttagaaagggggtctgtattaattctatccagttcctctcctctcattctctcacagacccactgaaatcaggtctt

SEQ ID NO: 245167 - DNA, 586 bp, Homo sapiens
caaatctaccaaggtctcaattcctacaagttcccccagctgctgagtgtgaagccccacgaggttctttgaaaagtgttcctttgccagtctaaactgttctgggacttcattatagcaacgcctgctcaccacaggcaaggaaccagcaatctgatgaaggatttattgaaaatgtgggtaaatcagagtttttgttcccatgtgaatgattcccccrgcaggcttgagctttagaagctctataaatacttactaagtaattaattgattgactaaagaaataaatgaaaaaaataacaataattataaatcgaggaaatgtaaaatatgtattattgtcacaatggatgaaaatatcccaaaagagatcatttggttgtgagttaggttttaaagtatacgcaatattagaaatgaataattgaagatagtttcaataattttaaaaactactgcccaatggtaaaagatataaaagattatgtaatttacaaggcagatgtcctatatctcttgaattattttagactgggacacaaaaagcccaggcagtcaagatgatattaaatgattcaaaaatagc

SEQ ID NO: 245168 - DNA, 586 bp, Homo sapiens
aggacctagccagatagtcattgccctgttcaaaataagtttaacaactgttaaatgacaagtttagatggtgccatctgaatcctccataagcactgcaaattcagcatttcattctcccattcttacttatctgtgttgattgcttcaccacctacccatttgttaaggtcaaaaatgttggcttcatcaatggctgtacactctcctccctttgaaattcttaccctrttatttgcctagtcctacagattctctgcgaattctctattactacacaaatttagctttcattattactcatcaaaatattacttttgtctctttcattgtcaccaatagaatgccttctctaccttctccaacctatttcattataaagctagttgtgcttgctttctaaaaagtggatatgcttttgctttcctcccagtttcccctctgtttagatttttaatggctcccgattttctgtattatctaaatgctcagcatgtcctactggacttcactactacctttaaataacagctccccgaccagctcttgcctagactctccttgtgccttatatgaacaacaaatg

SEQ ID NO: 245169 - DNA, 461 bp, Homo sapiens
ggtctcctgctatggtcatctcactgctctagatgctttccagctgttcttcaaggaagcacactgaagcataagtgctcagtcctttcagtctcctacacagtcaactcagggtgttcttagttccaggcagcaggacagaatggtkcaagcacctgtcacttcgtatgagtagtgctctttttccttcccttctttcgcttcttatccccatctcttgagccatcatgtcaatatcacactggttgttctttttaactctatttacaggtatgaatctcagcccacaaattcaggtgagcaagaaatctacagtctttacattataaaactttattttttgttgtaagagccgcctttatcgcatgactagtgggaaacttaaactcagtcccattcatgattttctgtcccttagtgggttctcagagagtgccttgggattaaggagtgggatctct

SEQ ID NO: 245170 - DNA, 461 bp, Homo sapiens
ggtctcctgctatggtcatctcactgctctagatgctttccagctgttcttcaaggaagcacactgaagcataagtgctcagtcctttcagtctcctacacagtcaactcagggtgttcttagttccaggcagcaggacagaatggtgcaagcacctgtcacttcgtatgagtagtgctctttttccttcccttctttygcttcttatccccatctcttgagccatcatgtcaatatcacactggttgttctttttaactctatttacaggtatgaatctcagcccacaaattcaggtgagcaagaaatctacagtctttacattataaaactttattttttgttgtaagagccgcctttatcgcatgactagtgggaaacttaaactcagtcccattcatgattttctgtcccttagtgggttctcagagagtgccttgggattaaggagtgggatctct

SEQ ID NO: 245171 - DNA, 461 bp, Homo sapiens
ggtctcctgctatggtcatctcactgctctagatgctttccagctgttcttcaaggaagcacactgaagcataagtgctcagtcctttcagtctcctacacagtcaactcagggtgttcttagttccaggcagcaggacagaatggtgcaagcacctgtcacttcgtatgagtagtgctctttttccttcccttctttcgcttcttatccccatctcttgagccatcatgtcaatatcacactggttgttctttttaactctatttacaggtatgaatctcagcccacaaattcaggtgagcaagaaatctacagtctttacattataaaactttattttttgttgtaagagccgcctttmtcgcatgactagtgggaaacttaaactcagtcccattcatgattttctgtcccttagtgggttctcagagagtgccttgggattaaggagtgggatctct

SEQ ID NO: 245172 - DNA, 461 bp, Homo sapiens
ggtctcctgctatggtcatctcactgctctagatgctttccagctgttcttcaaggaagcacactgaagcataagtgctcagtcctttcagtctcctacacagtcaactcagggtgttcttagttccaggcagcaggacagaatggtgcaagcacctgtcacttcgtatgagtagtgctctttttccttcccttctttcgcttcttatccccatctcttgagccatcatgtcaatatcacactggttgttctttttaactctatttacaggtatgaatctcagcccacaaattcaggtgagcaagaaatctacagtctttacattataaaactttattttttgttgtaagagccgcctttatcgcatgastagtgggaaacttaaactcagtcccattcatgattttctgtcccttagtgggttctcagagagtgccttgggattaaggagtgggatctct

SEQ ID NO: 245173 - DNA, 567 bp, Homo sapiens
tgatactctggtgagggttattgataatatgggaggctatacatayacaggggcaggggaaatacaggaaatctctgtacttacctctcaattttgctgtgaacctaaactactctaaaaaatacaaaaaaaaacctctttctaaaaaaaaactctttaagttgaggaatgtatcttcttcattgtgtccccggtagctagtacagtggcagaattgatggcttttaagtatagctaatgactgaaggagcatgttataaaatatttattaaagcctgttctataatatttggcaggtaatagacatttaataattattagatcatagctgatgatttgactcttgacagaactaattgctacttacatttaaataatgctaattagaatgacaggctattggaaagcatgcagaagaaacatatggaagttaataaacctagagtcaaggcctgcccttctcacagttattcaaccctaataaatagctttctcttgctgactctcagtttcctcacttataaaacgagcacattacctacctcataacgctgttgtgatgttgtg

SEQ ID NO: 245174 - DNA, 567 bp, Homo sapiens
tgatactctggtgagggttattgataatatgggaggctatacatacrcaggggcaggggaaatacaggaaatctctgtacttacctctcaattttgctgtgaacctaaactactctaaaaaatacaaaaaaaaacctctttctaaaaaaaaactctttaagttgaggaatgtatcttcttcattgtgtccccggtagctagtacagtggcagaattgatggcttttaagtatagctaatgactgaaggagcatgttataaaatatttattaaagcctgttctataatatttggcaggtaatagacatttaataattattagatcatagctgatgatttgactcttgacagaactaattgctacttacatttaaataatgctaattagaatgacaggctattggaaagcatgcagaagaaacatatggaagttaataaacctagagtcaaggcctgcccttctcacagttattcaaccctaataaatagctttctcttgctgactctcagtttcctcacttataaaacgagcacattacctacctcataacgctgttgtgatgttgtg

SEQ ID NO: 245175 - DNA, 567 bp, Homo sapiens
tgatactctggtgagggttattgataatatgggaggctatacatacacaggggcaggggaaatacaggaaatctctgtacttacctctcaattttgctgtgaacctaaactactctaaaaaatacaaaaaaaaacctctttctaaaaaaaaactctttaagttgaggaatgtatcttcttcattgtgtccccggtagctagtacagtggcagaattgatggcttttaagtatagctaatgactgaaggagcatgttataaaatatttattaaagcctgttctataatatttggcaggtaatagacatttaataattattagatcatagctgatgatttgactcttgacagaactaattgctacttacatttaaataatgctaattagaatgacaggctrttggaaagcatgcagaagaaacatatggaagttaataaacctagagtcaaggcctgcccttctcacagttattcaaccctaataaatagctttctcttgctgactctcagtttcctcacttataaaacgagcacattacctacctcataacgctgttgtgatgttgtg

SEQ ID NO: 245176 - DNA, 531 bp, Homo sapiens
tttcattttaaaaatggccattaggtttatcttacttataatacaaagtgtactttatttattttttaacttttattttaaatttaggggtatatgtgcaggatgtgcaggtttgttacataggtaaacttgtgtcatgggtatttgttgtacagattatttcatcacccaggtattaagacttgtattcattagttattttttctgagtgtattttaatagaaaactaaacactaatgaaatcactgaagatatcataggaatataaaaccctcaagagatgatttagagttttccattttcagttcatggaaggcaaggtttccactcaacagagaaagtacaaaatggcagtcatcaggactaaaacattacaactgtagaagttacacaatgtaaagcttctgatattataggcacaaattacatcatgaaaccatttcactagarcacattagtaaactcagtttccaacggatttcccttggggccctcgccgtattgaaacaatcactatcttaagaagaaaaa

SEQ ID NO: 245177 - DNA, 626 bp, Homo sapiens
tccttgaactctttgggatatcaagaccaaaaataaaagcttcctttgaagtttgttatctggagaatcagacagacttcttactcttccctggttctagggaccatgtgacaatttatggcaaatgacattagatattaatctttgatatttagtagcatagatcataagcctttttcaaatcaggtagctagaatcatattttcaaagtacaagcccttaatttccgtaatagctacaaaaggtggaggaggacattttattgagattattgttagccagccacccacacacatgggatccaaagtatagtgttctttgcttcatattcaaatctaaaatccagcrcatactgagcccatagtgaaatgtgtttacatacacccaacagacgaaagggaggcaacaaaggagactgagaagaaatggctaggattttcagaaacaaaattaggaggctgaggtaatcacttgtctcttcagggatctgctacttcttgaagaggatttatgggatgttacaggtttctgaggcttaccctctgttgtctataactgcttattcatgcaggacaagagaagaaggttaataagtaccctcagggatgtaatactgaaggactttg

SEQ ID NO: 245178 - DNA, 626 bp, Homo sapiens
tccttgaactctttgggatatcaagaccaaaaataaaagcttcctttgaagtttgttatctggagaatcagacagacttcttactcttccctggttctagggaccatgtgacaatttatggcaaatgacattagatattaatctttgatatttagtagcatagatcataagcctttttcaaatcaggtagctagaatcatattttcaaagtacaagcccttaatttccgtaatagctacaaaaggtggaggaggacattttattgagattattgttagccagccacccacacacatgggatccaaagtatagtgttctttgcttcatattcaaatctaaaatccagcacatactgagcccatagtgaaatgtgtttacatacacccaacagacgaaagggaggcaacaaaggagactgagaagaaatggctaggattttcagaaacaaaattaggaggctgaggtaatcacttgtctcttcagggatctgctacttcttgaagaggatttatgggatgttacaggtttctgaggcttaccctctrttgtctataactgcttattcatgcaggacaagagaagaaggttaataagtaccctcagggatgtaatactgaaggactttg

SEQ ID NO: 245179 - DNA, 550 bp, Homo sapiens
cagagtcccaggaactaggcagggaatgaacaygagggggtgggaaatctcgagggccatcttagagttctgcctaccacagtggacatctgtcgtgggtcttcctcagcaaaagcagaacaaatgatcactggtgacgtgataaactactgacttctccataaggcatgtgagcctccctctgctctgctctgctgtagtcccttgggatactatatcactctctcgtgctgcccttaagagaagcagtaccaaattggaacatgtttagagataaaaaatgttcttgcaactgtgtatagaaggaaagcctgaagggtctgagggtgtttagtgtgtaggataggggtcatagagacaaaattaattattttattgatttaaaatatttgcagtgttgccacaaagtaaatattcactgtgggtctttaaggtgtacagtaacaatgaataggtgaaggcaacaagaaagaattctagtgagagacatagaaggaattactaggaaaaaaattatggaaaatccctggatatacctagctactttatc

SEQ ID NO: 245180 - DNA, 550 bp, Homo sapiens
cagagtcccaggaactaggcagggaatgaacacgagggggtgggaaatctcgagggccatcttagagttctgcctaccacagtggacatcygtcgtgggtcttcctcagcaaaagcagaacaaatgatcactggtgacgtgataaactactgacttctccataaggcatgtgagcctccctctgctctgctctgctgtagtcccttgggatactatatcactctctcgtgctgcccttaagagaagcagtaccaaattggaacatgtttagagataaaaaatgttcttgcaactgtgtatagaaggaaagcctgaagggtctgagggtgtttagtgtgtaggataggggtcatagagacaaaattaattattttattgatttaaaatatttgcagtgttgccacaaagtaaatattcactgtgggtctttaaggtgtacagtaacaatgaataggtgaaggcaacaagaaagaattctagtgagagacatagaaggaattactaggaaaaaaattatggaaaatccctggatatacctagctactttatc

SEQ ID NO: 245181 - DNA, 550 bp, Homo sapiens
cagagtcccaggaactaggcagggaatgaacacgagggggtgggaaatctcgagggccatcttagagttctgcctaccacagtggacatctgtcgtgggtcttcctcagcaaaagcagaacaaatgatcactggtgacgtgataaactactgacttctccataaggcatgygagcctccctctgctctgctctgctgtagtcccttgggatactatatcactctctcgtgctgcccttaagagaagcagtaccaaattggaacatgtttagagataaaaaatgttcttgcaactgtgtatagaaggaaagcctgaagggtctgagggtgtttagtgtgtaggataggggtcatagagacaaaattaattattttattgatttaaaatatttgcagtgttgccacaaagtaaatattcactgtgggtctttaaggtgtacagtaacaatgaataggtgaaggcaacaagaaagaattctagtgagagacatagaaggaattactaggaaaaaaattatggaaaatccctggatatacctagctactttatc

SEQ ID NO: 245182 - DNA, 550 bp, Homo sapiens
cagagtcccaggaactaggcagggaatgaacacgagggggtgggaaatctcgagggccatcttagagttctgcctaccacagtggacatctgtcgtgggtcttcctcagcaaaagcagaacaaatgatcactggtgacgtgataaactactgacttctccataaggcatgtgagcctccctctgctctgctctgctgtagtcccttgggatactatatcactctctcgtgctgcccttaagagaagcagtaccaaaytggaacatgtttagagataaaaaatgttcttgcaactgtgtatagaaggaaagcctgaagggtctgagggtgtttagtgtgtaggataggggtcatagagacaaaattaattattttattgatttaaaatatttgcagtgttgccacaaagtaaatattcactgtgggtctttaaggtgtacagtaacaatgaataggtgaaggcaacaagaaagaattctagtgagagacatagaaggaattactaggaaaaaaattatggaaaatccctggatatacctagctactttatc

SEQ ID NO: 245183 - DNA, 472 bp, Homo sapiens
gcaatactaataatttgtgagtcttgactagacctctttttttaaagagattattcactttatattcaaataaatttggtttatacagtatatgatgatgcaaggaaacaagtttcagcttattcaatgcccaaacttgaaatttatttgtttccattgttttcttcatttsgggctttaagaagttgcattaagcagagttctggcaagaaacagaactcaaaagaagcaattaaagagtttcaacagaggcacaaagcatgggcagggttaagggaattcaaccaaggagggtgaaacaagcattcctgaggctcccaaccaccaccacgtctgaagtgaagagagaagggaatgtttaaagagtccatgcagcctgagtctgaagggaaggccacccaacaggagctggggccgatggaagaggagctcagacactgccaatccatgaaccgagggaacaaacaccccg

SEQ ID NO: 245184 - DNA, 546 bp, Homo sapiens
gattatagtggtctgggaaaacagaatgatgctgaagttacttgagaaaggaagtaccaccatttgctgtggcygtaatcaagtctgtaaaggctgcaaagggtctgagcatgttcctccaattatcaaaaacccattcacaactcaggaactctcaagaggttcctcccttctctattgccacttacagaccatcttgctcaaagtgatgctagaagtgctggcaaagagaacatcttcactggagtgtcttgggagaaaaatttctttgctgcacatttcttaataaaattcaattatgtaaaatgaggagagagttgactaaagaagatagaatgaaaaggaaccattgcacaaagatatgtttttatttgaccaacaggctttattttgattccccaatcttctggaactcagactttctcagcaaacaattgcactgcccactgagagtaaacagcaaacctgccaatatcacaatataccctgagatgaacacgtgtgagggaaagacttcatatgccagacataatcctgatggttccc

SEQ ID NO: 245185 - DNA, 546 bp, Homo sapiens
gattatagtggtctgggaaaacagaatgatgctgaagttacttgagaaaggaagtaccaccatttgctgtggccgtaatcaagtctgtaaaggctgcaaagggtctgagcatgttcctccaattatcaaaaacccattcacaactcaggaactctcaagaggttsctcccttctctattgccacttacagaccatcttgctcaaagtgatgctagaagtgctggcaaagagaacatcttcactggagtgtcttgggagaaaaatttctttgctgcacatttcttaataaaattcaattatgtaaaatgaggagagagttgactaaagaagatagaatgaaaaggaaccattgcacaaagatatgtttttatttgaccaacaggctttattttgattccccaatcttctggaactcagactttctcagcaaacaattgcactgcccactgagagtaaacagcaaacctgccaatatcacaatataccctgagatgaacacgtgtgagggaaagacttcatatgccagacataatcctgatggttccc

SEQ ID NO: 245186 - DNA, 546 bp, Homo sapiens
gattatagtggtctgggaaaacagaatgatgctgaagttacttgagaaaggaagtaccaccatttgctgtggccgtaatcaagtctgtaaaggctgcaaagggtctgagcatgttcctccaattatcaaaaacccattcacaactcaggaactctcaagaggttcctcccttstctattgccacttacagaccatcttgctcaaagtgatgctagaagtgctggcaaagagaacatcttcactggagtgtcttgggagaaaaatttctttgctgcacatttcttaataaaattcaattatgtaaaatgaggagagagttgactaaagaagatagaatgaaaaggaaccattgcacaaagatatgtttttatttgaccaacaggctttattttgattccccaatcttctggaactcagactttctcagcaaacaattgcactgcccactgagagtaaacagcaaacctgccaatatcacaatataccctgagatgaacacgtgtgagggaaagacttcatatgccagacataatcctgatggttccc

SEQ ID NO: 245187 - DNA, 546 bp, Homo sapiens
gattatagtggtctgggaaaacagaatgatgctgaagttacttgagaaaggaagtaccaccatttgctgtggccgtaatcaagtctgtaaaggctgcaaagggtctgagcatgttcctccaattatcaaaaacccattcacaactcaggaactctcaagaggttcctcccttctctattgccacttacagaccatcttgctcaaagtgatgctagaagtgctggcaaagagaacatcttcactggagtgtcttgggagaaaaatttctttgctgcacatttcttaataaaattcaattatgtaaaatgaggagagagttgactaaagaagatagaatgaaaaggaamcattgcacaaagatatgtttttatttgaccaacaggctttattttgattccccaatcttctggaactcagactttctcagcaaacaattgcactgcccactgagagtaaacagcaaacctgccaatatcacaatataccctgagatgaacacgtgtgagggaaagacttcatatgccagacataatcctgatggttccc

SEQ ID NO: 245188 - DNA, 493 bp, Homo sapiens
cctgatggttcccaaatacacactggttcccagataaagtctggtgactggctaatgcttttcactgtgattaaaagcaaatactttaaaaaatatttaatgattcattattatatttttctgagtgcttaagtctattgtctcattattgtttgtttattygtagtttgggaaaattttgttgggacaaggtaacaagatagatctcagctacagccagaagtcataatgttcagacacacattaattctgtggacaatatgagaaaatgggagcaacaattaccctataattagggttgtgaactggggaagggcaatgtccaatatcacagagggagggttgaaagaaactagagatttgacagaaagtgatcaagctcacaaacgtatctatcattgcctcattttttaatgttttaggtgaatgaatttgagtttctgtgttgagcaatgacttgaatatttcatctcactcatgtagcccttgtcac

SEQ ID NO: 245189 - DNA, 592 bp, Homo sapiens
gggggcatccattgagtggcttctactctgagtcagatgaacagctttcaaaggatccttagcagataagtgatgtgatctgccttatgacttagaaaagaaaaccygagctaccctgagaatagaccctcgagagaaaaagggaaggaaatagacgagttaagaagctgttgaaataatgcagatgagagatgaggaaggtttgtattatcagtagagatgggatggagaagttacattctggatatatttagaagctggggtagataggatttgccaacaaattggattaaaaatgtgaaagaatgaaagtcaaggataattccaagtttttaatctgagcaaatggaaggtcagaattgccatttattaaatggagaaaagtttgggagaagcagatttggtggaggcaagtggataaaggtttgaacatttaaggatggggttgagtaagcaattgcatctagaagtctctatgtcagggagacagcttttgcttcaagattttgaggccatgagaagaagagaagaagtccaaaggctgagttcttagacactcattgtttagagttcagggagataaggagaaccc

SEQ ID NO: 245190 - DNA, 592 bp, Homo sapiens
gggggcatccattgagtggcttctactctgagtcagatgaacagctttcaaaggatccttagcagataagtgatgtgatctgccttatgacttagaaaagaaaacctgagctaccctgagaatagaccctcgagagaaaaagggaaggaaatagacgagttaagaagctgttgaaataatgcagatgagagatgaggaaggtttgtattatcagtagagatgggatggagaagttacattctggatatatttagaagctggggtagataggatttgccaacaaattggattaaaaatgtgaaagaatgaaagtcaaggataattccaagtttttaatctgascaaatggaaggtcagaattgccatttattaaatggagaaaagtttgggagaagcagatttggtggaggcaagtggataaaggtttgaacatttaaggatggggttgagtaagcaattgcatctagaagtctctatgtcagggagacagcttttgcttcaagattttgaggccatgagaagaagagaagaagtccaaaggctgagttcttagacactcattgtttagagttcagggagataaggagaaccc

SEQ ID NO: 245191 - DNA, 592 bp, Homo sapiens
gggggcatccattgagtggcttctactctgagtcagatgaacagctttcaaaggatccttagcagataagtgatgtgatctgccttatgacttagaaaagaaaacctgagctaccctgagaatagaccctcgagagaaaaagggaaggaaatagacgagttaagaagctgttgaaataatgcagatgagagatgaggaaggtttgtattatcagtagagatgggatggagaagttacattctggatatatttagaagctggggtagataggatttgccaacaaattggattaaaaatgtgaaagaatgaaagtcaaggataattccaagtttttaatctgagcaaatggaaggtcagaattgccatttattaaatggagaaaagtttgggagaagcagatttggtggaggcaagtggataaaggtttgaacatttaaggatggggttgagtaagcaattgcatctagragtctctatgtcagggagacagcttttgcttcaagattttgaggccatgagaagaagagaagaagtccaaaggctgagttcttagacactcattgtttagagttcagggagataaggagaaccc

SEQ ID NO: 245192 - DNA, 493 bp, Homo sapiens
attccaccatggggttcaaattttttaaatgaaatcttagacccttggtagaaaaagagccaaggatttatatatcaatgtaaaaatggcctatcttaaaatatacttatcacaaatataagaaattcctaaaatttggggttttcttctatggctttctcaaaggtcagaatgcaatgtttctattcaaatgaacaattcaactagttaactaatacgaagccccttttcttatcttctgctaacctctcacctttgaaatcagttrtctaacttcaagtgttgccttcccaattaatgaagttatctacacaattttcaaaatgtgactccatgtctatgagtttgttgttaatattactggaaagacaatataatgtgaaacaatagcaaaaagcaaaaattgaaggcactagcaccttctttgtgggacaggaaaactaacaaaacttggtgatttgtattaactcaggaccacagtaatctcataaaa

SEQ ID NO: 245193 - DNA, 493 bp, Homo sapiens
attccaccatggggttcaaattttttaaatgaaatcttagacccttggtagaaaaagagccaaggatttatatatcaatgtaaaaatggcctatcttaaaatatacttatcacaaatataagaaattcctaaaatttggggttttcttctatggctttctcaaaggtcagaatgcaatgtttctattcaaatgaacaattcaactagttaactaatacgaagccccttttcttatcttctgctaacctctcacctttgaaatcagttgtctaacttcaagtgttgccttcccaattaatgaagttayctacacaattttcaaaatgtgactccatgtctatgagtttgttgttaatattactggaaagacaatataatgtgaaacaatagcaaaaagcaaaaattgaaggcactagcaccttctttgtgggacaggaaaactaacaaaacttggtgatttgtattaactcaggaccacagtaatctcataaaa

SEQ ID NO: 245194 - DNA, 581 bp, Homo sapiens
aacattatacgcttcagagtccttacattttcaattgacagagaaacagaaaatcattctaacgtttaccgtagcttttccctctaagggcttcttgcaaagaatttgcatgttgcaattatacctcaaattagagatttgagtttccctgcctggtcaattataagacccttggccttaccagagaatgaatacacgctctcaactttgcaaaggtctgagtcaacagcttgttgggctttgaagaacctcagccgtttttgcggctggagctttttctccttttcstgtttcaggaccactgctggttttcattcatcttcattcagtgggtttcatgtgacattttggggctggaaacataatgtgtcagaagatagctgcagcttcctactgcgttattgtttcctttgtcagaaggtgagtgagcacaaacattttccaattgctctgattttcagacaggtttagatctactgagccatcactgatgcacacgcctataccatttagaaacacttgatatagatttcagaagagatttctaagttcagttctatacaaataaatgtactatcatt

SEQ ID NO: 245195 - DNA, 581 bp, Homo sapiens
aacattatacgcttcagagtccttacattttcaattgacagagaaacagaaaatcattctaacgtttaccgtagcttttccctctaagggcttcttgcaaagaatttgcatgttgcaattatacctcaaattagagatttgagtttccctgcctggtcaattataagacccttggccttaccagagaatgaatacacgctctcaactttgcaaaggtctgagtcaacagcttgttgggctttgaagaacctcagccgtttttgcggctggagctttttctccttttcgtgtttcaggaccactgctkgttttcattcatcttcattcagtgggtttcatgtgacattttggggctggaaacataatgtgtcagaagatagctgcagcttcctactgcgttattgtttcctttgtcagaaggtgagtgagcacaaacattttccaattgctctgattttcagacaggtttagatctactgagccatcactgatgcacacgcctataccatttagaaacacttgatatagatttcagaagagatttctaagttcagttctatacaaataaatgtactatcatt

SEQ ID NO: 245196 - DNA, 463 bp, Homo sapiens
tcatttgggttcaaaaacagcagctcacctttctgctggaagcaaaacattatcatgatcaacagaatctgtctgttgggattcagttctgcaatcctttcatggatcaaattcccatcagaatcagaattaagtcctaagtgaaaacttaaattacattataatactcagcctcataagttccaccaaggctttgccaaaggcattgaatgatttatgataaacttcagaacctcagtcccctcttcccagggtgtcttcaattaattctttgaagaactttactcttgattccttgttgaactgaagtaataaggggtttaaggcctttatatttttcctcraactttctcttcttaacttagaatatctgcaagtgaaatataattgattggatctttctaaatctgtcttttataaaattatggttaaatattatcttattcctgcagaatttatatga

SEQ ID NO: 245197 - DNA, 463 bp, Homo sapiens
tcatttgggttcaaaaacagcagctcacctttctgctggaagcaaaacattatcatgatcaacagaatctgtctgttgggattcagttctgcaatcctttcatggatcaaattcccatcagaatcagaattaagtcctaagtgaaaacttaaattacattataatactcagcctcataagttccaccaaggctttgccaaaggcattgaatgatttatgataaacttcagaacctcagtcccctcttcccagggtgtcttcaattaattctttgaagaactttactcttgattccttgttgaactgaagtaataaggggtttaaggcctttatatttttcctcgaactttytcttcttaacttagaatatctgcaagtgaaatataattgattggatctttctaaatctgtcttttataaaattatggttaaatattatcttattcctgcagaatttatatga

SEQ ID NO: 245198 - DNA, 463 bp, Homo sapiens
tcatttgggttcaaaaacagcagctcacctttctgctggaagcaaaacattatcatgatcaacagaatctgtctgttgggattcagttctgcaatcctttcatggatcaaattcccatcagaatcagaattaagtcctaagtgaaaacttaaattacattataatactcagcctcataagttccaccaaggctttgccaaaggcattgaatgatttatgataaacttcagaacctcagtcccctcttcccagggtgtcttcaattaattctttgaagaactttactcttgattccttgttgaactgaagtaataaggggtttaaggcctttatatttttcctcgaactttctcttcttaacttagaatatctgcaagtgaaatataattgattggatctttctaaatstgtcttttataaaattatggttaaatattatcttattcctgcagaatttatatga

SEQ ID NO: 245199 - DNA, 559 bp, Homo sapiens
agctgtccattaagggcagaaataatgtcttaatctctagcatagaatatttacaagtagaaggacttagggggaaaatgcaaactgaacaccttaaattattatcaataaaagcactagccagaatgaggagttgaggggcatttgaagcaacttggaaaaccatggcagcttatttggggtagaaaggccctcttttatccatcataaatcatcatcagatttatactttgttagcaaaagggggctgaagtacaacatgtcatatagtgtgttgcaattgtaacagggcctcactcttctttcttcttcccaaggcctaatcagttacataaaaaaagaaagaagagaggagacgagagaagaaaagagaagacaagagaagagaagagaagagaagagaaaagaaaggaaaagaaaagaaaacaaaagaaaggaaattaccaygaaaccagtcctggaaaatgtaaaatgttacttgcatcatcatgtgaaaaagctcaaaagatggaaaaatattttctaagtacatttatttggacataacataagtatcttc

SEQ ID NO: 245200 - DNA, 538 bp, Homo sapiens
acttggggattggtaatacccagatggggagctggaacaccgtccagggcagatggcatttgaactgaaacctgaaggaaaaaagaatctggacagcctcaacaccagatcaaacagtttttgaaacatagaaaacaagaacaaagcccccagtgggtgagaggaactgaagaagcctagtaggatggaagtataatgatactcatacactggagaatattgctaagcgcaaacaattctaagcttgtgaaagttccttgtgattattctatatttctttgaatcatattgatgaaaaattctttgtaataattcccatccaaatgtgacttcttgggtgcaaacataattttcacaacttatttaaaagcctatttaactttgcctatagcatgcttcacagaaatagtaacayccatcttacaggactttcatgaagactactatgtacggcagtcctcacttttttcctgctcaaaatcctgtctccctttccttttaaaagaacacagactttgttcgtgaccataatgtgttc

SEQ ID NO: 245201 - DNA, 404 bp, Homo sapiens
tgataaattctatcttacacaattcccataaaaatatatgttgtgggattatggttacacttatacttttcaggtatattcctaataggagagacccaycattttgactaggcatctacaaaaacttaactctacccctgtcccttacaatttttcatgtttaatgtttagaagagttttcaacagaccatcttctagctccagatatttcaccttttctctgccactacccaagtatttttctatttctttaattttttaaattaaactttttttaagtaaatcatagatccacatgcaattgtaagaaataatatagagagacccatttcttccatatggcaacgtctggcaaaactattctataacatcgcaaccaggatattgatgttgatacagtcaag

SEQ ID NO: 245202 - DNA, 404 bp, Homo sapiens
tgataaattctatcttacacaattcccataaaaatatatgttgtgggattatggttacacttatacttttcaggtatattcctaataggagagacccatcattttgactaggcatctacaaaaacttaactctacccctgtcccttacaatttttcatgtttaatgtttagaagagttttcaacagaccatcttctagctccagrtatttcaccttttctctgccactacccaagtatttttctatttctttaattttttaaattaaactttttttaagtaaatcatagatccacatgcaattgtaagaaataatatagagagacccatttcttccatatggcaacgtctggcaaaactattctataacatcgcaaccaggatattgatgttgatacagtcaag

SEQ ID NO: 245203 - DNA, 404 bp, Homo sapiens
tgataaattctatcttacacaattcccataaaaatatatgttgtgggattatggttacacttatacttttcaggtatattcctaataggagagacccatcattttgactaggcatctacaaaaacttaactctacccctgtcccttacaatttttcatgtttaatgtttagaagagttttcaacagaccatcttctagctccagatatttcaccttttctctgccactacccaagtatttttctatttcttyaattttttaaattaaactttttttaagtaaatcatagatccacatgcaattgtaagaaataatatagagagacccatttcttccatatggcaacgtctggcaaaactattctataacatcgcaaccaggatattgatgttgatacagtcaag

SEQ ID NO: 245204 - DNA, 404 bp, Homo sapiens
tgataaattctatcttacacaattcccataaaaatatatgttgtgggattatggttacacttatacttttcaggtatattcctaataggagagacccatcattttgactaggcatctacaaaaacttaactctacccctgtcccttacaatttttcatgtttaatgtttagaagagttttcaacagaccatcttctagctccagatatttcaccttttctctgccactacccaagtatttttctatttctttaattttttaaattaaactttttttaagtaaatcayagatccacatgcaattgtaagaaataatatagagagacccatttcttccatatggcaacgtctggcaaaactattctataacatcgcaaccaggatattgatgttgatacagtcaag

SEQ ID NO: 245205 - DNA, 552 bp, Homo sapiens
gagtttctcagcctttgaaaataagattctgtgattagaagccttgtctctttattttttatttttatttttttttgagacggagtctcactctgtcacccagtctggaatgcagtggcacgatctcggctcactgcaagctccgccttccaggttcatgccattctcctgcctcagcctcccaagtagctgggactacaggtgcccgccaccacgcccagctacttttttgtatttttagtagaggcagggtttcaccgtgttagccaggatggtcccgatctcctgacctcgtgatctgcctgccttggcctctcaaagygctgggaatacaggcgtgagccactgcgcccagccgtctctttaaaagagtaatgttttcacagattttgttgttatttttgttggtagagtaaaatgacattctcttgcagctttctacatttttagcgaaaagggagacaaccagtatcattttatatgagaaatatgagacttggagaggccaagtaacttgccgtgtatcgtaatctattaaatgttaaggccaac

SEQ ID NO: 245206 - DNA, 594 bp, Homo sapiens
catgttgcagctttttcaaagagacttcaattttcctcctgcagcccagataaactttccactgcctgtggaccctggccatggctggcagccggctccagcacaggcgtgccaaacacaaataaagttcgaaggacaaactcagccagaaagcatcagacctttccatccagcatccagacttattatttcttattatttctcaagagcatccactgctcttttaaaaacaagagccctattttgtgagctgctcaatggtctattttaaactcatggctgtgtttgtttacgttcaatcctaggccttggcctttgcaataaaccgccactggcatcatgcaaaaagctagtggagactgccatatcactgtttacagccttctcacttcaagaaaggggtggaaatcraatatttgcaattgtccaaattctgagagggctctagaaaggaaaaacagtgctaagctgacaagtctaagaatttctggggcaggagtgagtagtatctagggcttgaaatggaaaagagtgaattcttctacactgagggaaataatcaacatgttcatatattcagcaaatactcattga

SEQ ID NO: 245207 - DNA, 535 bp, Homo sapiens
gtttgttattatatatgcacactctgggctcaccaacttgaaatagaactttcggtcctattccattgtcctgtaaggatgttacccttgagctccaagatcaagcaataggtaagtttacaatagttgtagaaaactctatctttaaccataagtctgtgaaacttcagaatcatgggagtggcatataataaagcataaaaaggccccatgaagtcattaatttagtctgttcctttgtgattgggcaacaatgactcaaatyagaccagttctgtgtcttcattacttgatcgcaaagtgtgtcaaagacctaccctgggtcctgcctaaatactactgtatgtggtttatatcattccttatgaccacctgacactttccttctcctgtgcacataggaagaccatatgtccccatcccccttgcagttgggttagggccatgtggcttagttctggccattagagtttagcagtggtgatatacccattttcagacctaatccttaagagcatccatgagacattccatc

SEQ ID NO: 245208 - DNA, 544 bp, Homo sapiens
gatattaactgtcagcagtttttttgggtcttattctgagtacaatccaaaggagttcataaataaatagtttataagtaatactactagcatagaactatgacttacatagaagttacaaagattaggaagatcattaacactttagaacaaaagccagtgttggtggagtgttaaattcatcataaagggttctttgggtggctttattaagagacaacttgtagaatcatgtataccaaataccaatagagtatgtcatttcagtacctgaacaggaaacgaagtaagaagttacataagcacatatatatctgtatatacacatacagagagagacaagagagaagatgaacttggattcttagaggtttttctagtgaaaaatatcacaatatamaacagtaattttttttaatatgatacatagatgtcatacttttgaagggttaagtcttatttatctgaatggaactgcaggacagttttgcagaacactttaacacaaatacctatggtttactttgacgttacatttttttgt

SEQ ID NO: 245209 - DNA, 626 bp, Homo sapiens
tacatttagtatacgatattctatttaaggaagcaggaaaatgtgttttacatcaaaacatttctgttaaaattattaaagagtttttgatgcttaaaaagatcagcatctgggccaattggttttattatttgtaaattgaaaaggacaaaataatttaattaaaccttttggataaaaaacggctcaaattatagttgaataataaaaaattacacaacaattatttgtatatcaaaatgctgaactacactcaatgacaactgactgcggaggtggcaaagtgttcactgtcataaaatgacaactcagccagatgattgatttctccacctattgcctgaaacttatttttaagaaaattcatgaaaaagcaccaagactagaatttaaacaaagtgataataaatgtatacttatgttgcaaaataaaattcaaactgccccacaggcagctgtgagcccctcagtatcataaatccacataaactctacacttcagaccattgatttccrtgtttgtaaaataagaaaaccacaatatttttaaaaaaacagcttaagaaaaaagatcaatgtttagagaagtaaactgacattaaacatgtaaccatccagtaaaataa

SEQ ID NO: 245210 - DNA, 506 bp, Homo sapiens
gtgtttattctaatggatatccttattgagaataaatatgcattttgactgcattttctttatcaaataaaattttggattaaaaaaataaaattactgacaggctctwtgttatgttaccagtagaatagtgtctctctaagaatgcctgtgagctagcgccgggtgtattgttcagcgttaaacagcatcacagaatattttaacttttggatgattctttcccttaaggaagaatgtttagtaactttttaggcaccatggattgggtactggttttctgtttcccataaaattaccaacagaacaggagacagtagcctagtaaaacaagaagtgagcaggcagagtggagagtcagggaaactaagttcaaaacccagttcttccacttcctgcctttgcaacctgggacaagtcatttagcttctcagagcctcagttttacctcggggctacattcagggacctgctacatattaggtgtgcaataaagtcaaacaaag

SEQ ID NO: 245211 - DNA, 611 bp, Homo sapiens
acacgcagtattttctctactataggttagtactgtacctatttttacttaggcaaatggttgtttcctgcaacctcataacactcgtaaatgttccaatttaggtatggctcttggactgaagaatgccaagaatacagcaaagacacactggggagaaatatcgcatgctggtttcccaggacttttatcctcagcaaagggcgtgactggcttgcggtgcttgttaacggctccagcaagcactctgctatcaggccctttgatcagctgtttgcccttcacgccattggtaagaccgacttaacccaaagctgaaataactgaatctcggaatctcagcactggaaggaagggttataaagatcacctagttttactgcttctctgatgccaagtaagcatcagacccatgtttgaaaaccactggggcaaggttctccattccaacaccaccagtgakttttgctggacaactctgtgttatggagggctgtgctgggcactgtaggatatttagcggcatctctggcctctacacactagatgccagtagtatgcccctctgtccttgagctgtgacttttaaaaaagtctcagactttgccaaa

SEQ ID NO: 245212 - DNA, 283 bp, Homo sapiens
atcaatacttcctgtgcagtcttcgtgagaattgtgttactaatgataaagcacttagaacagtgcctggcataaaggtttaataaatacactacaatattatttagaaggtatgatttggctgtgacatatctatatccaatggaatataactttgtgtaaagaatcatagcccttactaaagaggttatgcaattctctccagtartatatttcttaggtgaactaaaaatgtcactttcatgaaaataggcaataaaagatgccgaggaagacctaggaa

SEQ ID NO: 245213 - DNA, 544 bp, Homo sapiens
gtaacatttatatgttaaaaattattgtactccttaatgttgcagctaactcatacacacacagacacatacactcactcctacacatacacatacagacacacacactcaaagattttaataaatycccgatatttacccaatgtagacatgtctaacagttctgcatgacttgatctgaaatattgaacacttcaacagtgcaacaaagcatgattcgttagggataatactaaccaatctcatttttaaactgattatagggatccaatttgaataatttgctgctgtggattatttggaaacagttgtagcacattttgtttgttgctcgaggttatcagtgttttcagaacactatcttcctttcatagttcttttgagtttaatagttatacaaaagccccatttaccagatttttcaataaatgtagtgtgctgatgattacaggaggatttgccagaaaactcctttacatatacatagtgcaatatcttcagatattatcctcttctttgctttaagtaggtcaggttcacaatg

SEQ ID NO: 245214 - DNA, 485 bp, Homo sapiens
cctccaacactgcaggatagcatggtaggaagggtacaggctctctagtgagccctgagctcaaaactccactctatttcttgtaaatgacattgactttggatgttttaatttactcctctggatttcatttttcttaactgaaaaatcaggataatgatactcctcagaattgtgcagattaaatgagataatcaatgcaagcagccaacagcacccaataggatgttgtaagtgcttaataaacttcttaagcatctccatgcgcccaatactcaacttagtatatttacagtttttcttctgggtctcttggtccatttctgtccacgtcttctttatttctaattatttctagagacagctgcactttgttattaaactattcttttacaagctactctgctgtyctgattttgttatataaagcttcctgagtgctttatatattttaatgtttttttctcattataaaagttatatta

SEQ ID NO: 245215 - DNA, 602 bp, Homo sapiens
actaaaataaataaataaataatgagtactttgtggggaggtattcaaagattacaccagtacctgatggtcatcaaacktgtacccaccagccttagaatccattaaagactccttcctgaattagtggcttttatgatggttgtcaaacggtgattctccattgctatctttccttctacatatatcagctgacattctactctaaggaagagtgttcccctctcccccatttatttatatacttacttacattaggataaattcatggcttcttttgacaggtggtaatacattactatcattatttacactgatgctcaaattgtccccattttggccactgggagtccttttaagttgggctcttcgtatgttttacattttactattattcattaagtgtttctttactttctggtccagtaaggttcacattatactttttttcctgcaatagtcccagaatcagtcattttgtcagggagctctggttctttttagtggaggatggctttgagaactaagaggtggagacccaatgtgctcattgttactgagggtcattgatcctaggccttctcagcaacagagctgggaaa

SEQ ID NO: 245216 - DNA, 602 bp, Homo sapiens
actaaaataaataaataaataatgagtactttgtggggaggtattcaaagattacaccagtacctgatggtcatcaaacttgtacccaccagccttagaatccattaaagactccttcctgaattagtggcttttatgatggttgtcaaacggtgattctccattgctatctttccttctacatatatcagctgacattctactctaaggaagagtgttcccctctcccccatttatttatatacttacttacattaggataaattcatggcttcttttgacaggtggtaatacattactatcattatttacactgatgctcaaattgtccccattttggccactgggagtccttttaagttgggctcttcgtatgttttacattttactattattcattaagtgtttctttactttctggtccagtaaggttcacattatactttttttcctgcaatagtcccagaatcagtcattttgtcagggagctcyggttctttttagtggaggatggctttgagaactaagaggtggagacccaatgtgctcattgttactgagggtcattgatcctaggccttctcagcaacagagctgggaaa

SEQ ID NO: 245217 - DNA, 556 bp, Homo sapiens
tagctcccatttataagtgagaacatatggtatttggttttttgttcctgattactttccttagggtaatggcctccaattccatccaagttgctgcaaaagacattattgcattctttttgtacagctgagtagtatttcattgtgtatgtttaccacattttctttatccactcatcggttgataggtacttaggtggattccatatctttgcaattgtgaatggtgctgtgataaacatgcacgttaggtgtctttttgatatagtgacttctcctttggaagatttctcaaaaaactaaatgaggcctacaatttgattcagaatttttttttaagagatgaggggtctcactatgttgcccaggctggtctcgaactcctgggctcaggcaatcctcctgccttagcctcctgagtagctgggactatagctgggctgggatttttttttttatggaagtagcagtttcattttatcagtactcgttatcamctgccctagatcagctggcttctctgtcttatcttaagagctaacttcccaatttttac

SEQ ID NO: 245218 - DNA, 530 bp, Homo sapiens
taaatgagccaaagtgcctagcatgatggtgctggctcatatagtgtagtccctggaatggcaaattaacatcacccaggaacttgttagaaaggcaaattcttggacacaaccctcctgatttatggaatcagaaactctggctgtggggcccagcaacctgagtttaaacaatttctctgggtggttctgcggcacactaaggtttgaaaatcactrcaacaaatgctaacttctaatccccttgatgagctttcacgaagtctcacggcttctctagggactccatggtcttcagagtcgttcacagatgaccaaggacagactgtgtcccagaagccaaaatgagagagagagagagagagcacgcgtacgtgcaccctggggcagtgtctcaccgtatgaacaagggatgtaacactaaaagcccattagggggcagtgtttcccgcctgttgtagaaactggtacagaaaggaatatgaagttcctgaaactgacctttgtctattattaccttctctgaaaag

SEQ ID NO: 245219 - DNA, 530 bp, Homo sapiens
taaatgagccaaagtgcctagcatgatggtgctggctcatatagtgtagtccctggaatggcaaattaacatcacccaggaacttgttagaaaggcaaattcttggacacaaccctcctgatttatggaatcagaaactctggctgtggggcccagcaacctgagtttaaacaatttctctgggtggttctgcggcacactaaggtttgaaaatcactgcaacaaatgctaacttctaatccccttgatgagctttcacgaagtctcacggcttctctagggactccatggtcttcagagtcgttcacagatgaccaaggacagactgtgtcccagaagccaaaatgagagagagagagagagagcacgcgtacgtgcaccctggggcagtgtctcaccgtatgaayaagggatgtaacactaaaagcccattagggggcagtgtttcccgcctgttgtagaaactggtacagaaaggaatatgaagttcctgaaactgacctttgtctattattaccttctctgaaaag

SEQ ID NO: 245220 - DNA, 538 bp, Homo sapiens
gcctttaactcatattgaagtaaaacattcatacaaagaaacacatagatcactaagtgtgtagtttgatgaattatcacaaactgaacataccaatgtaaccagcattcaggtcaagagacagaatgttacagtccccagcccccaagtccccatgtgtcctcttctagtcactgtccttcaacaagaggaaccactattttgacttctattaacatatattgattttgcctatttttgcactctatgtaaatggaatcatacagtatgtactcttttgtgtctgacttcttttgctcaacactgtatttgtgggattcatccatgttgctgtatgtagttgtaaaacrtttatttgcattgctgtatagtattctattttgtaaatatgccacaatttttcatcctgtttactgttgaacattttggttgtttctagtttttgttttgtttgctattatgaatactacctggaaccttttagcacatgtcttctagtgagcaaatggaagcatttttctttagaatatacctagga

SEQ ID NO: 245221 - DNA, 313 bp, Homo sapiens
tgctgggattgcaggtgtgagccaccgcgcgcagtctggatccattcttgaatgttcatggctgagttggagacttttcaaaatgtttttgcatcttagaagagaattcccagagacaataataccttaattccaagacaaaatcttgggagagaaaaagtttccaggcaccaggcagtgggagrattaaaaaataacagaggtgtcactgaagctcagagaagttaagcaatgtgctcagggccacacagcaggttaagttgtgaagctgacatttgaacctaagtctgcttttcaatggacctcaaggaac

SEQ ID NO: 245222 - DNA, 344 bp, Homo sapiens
tcctttcttattttcattgagggagagcttgagttcatgataagtgccgcgtctactcctggctaatttctaaaagaaagacgttcgctttggcttcttccctaggcccccagcctccccagggatggcagaaacttctgggttaaggctgagcgaaccattgcccactgcctccaccagcccccagcaaaggcacgccggcgggggggcgcccagcycccccagcaaacgctccgcggcctcccccgcagaccacgaggtgggggccgctggggagggccgagctgggggcagctcgccaccccggctcctagcgagctgccggcgaccttcgcggtcctctg

SEQ ID NO: 245223 - DNA, 526 bp, Homo sapiens
gggaaaattaggtgaaaattttcctgaagcaaccttaacatgcgcagcccttgttggtttgtgacttgtggcctagctcatcagatgagccacgagaatcagacctggattttgatctggccctgttctgacatgcaatgaggcatttgtagsatttagtaatattgctagttcaaagaatactagaaatattagtaagaacctattcaaaagtattcatgagtattttctgcatatgaatcaggaattagaatattttgaaaatgatgttaataaaattttcctctggaaggcctttataatttttattcccaatcatttttcaaatttagaaagtttaatctgtcacaggagaaaaaaaattaaaaattttcaaaaatttagaaaatttttacccgtaagtattacagtttcctaattatcctatttatttcccacttgcctttgacctagattatttagagtagggtttctcagcctctgcactaatgacattttgggccgaataattctgttgtaggaggct

SEQ ID NO: 245224 - DNA, 550 bp, Homo sapiens
aaaatattcaaacatatgggcccttaagaaattggtgtgcactctacgtagctatttttgaaatttaactggtcatacaaaaattctttcaatttctatatttagaaacggggtatttccttgttataatctacacaaccaaaaactggctaatgtaagtaaccaaatctgaggattttgagtctccatagccatacagcagatatacagtttttacctaaggaaaaaagtataagacaagacattttaaagtcagattactaaaatgattcctgtaattccacattctcaagaaaaaatgtgtttaaggtgtaatagtaaattcttataggacttattctagtaagtgggtaaatsgtaaaaatctaaatttgggttaaattttttcgctcaaatacctacatttcctttatcgtaccccaaaaggagctctcaaagagtagtttgaacagtttttgacccgaagatttttttttttttttttttttttttgagcaggttggactcttcggcttcctggaagggaaaaataggtcctttagtggctggg

SEQ ID NO: 245225 - DNA, 595 bp, Homo sapiens
tttcttttcaaaacttgctgtgtctttcacctgggccacaccctacgcccacccaccccctctcagccaaaagggaggtaaaaaatcctgcgggcccagctgggggtggggaaggggcccacagtcccgctggaaaacctcagcggccacctcccggatccgggctggcctggggactggggtgggatggggtggggtccgcctcaggccgaccccgcagaaccgaaagtgccgagttgacamgtaaggcccagcccctctgcggccgcccgcgcgcccggcctgtcacgcgtggggacactgagcagcaggcatcggagcgagcagtacaaaaagaaatcaaggcgttgggcgcgaaacctcgacgcgcctctaaaggaacgttgagaaaaggcagggagcagggcgcgcggccgggggattgcatcattgcggctccccctccagaaaacgggccccgaaccgcggcgaccatcatggcgctcgcgccgggctgcgctccccgcgcgcctgccccgcgctccggccgcggccccggagcctcggacgcgcatttcacaaacattctcgccctctcccgagcgcccgcccccac

SEQ ID NO: 245226 - DNA, 568 bp, Homo sapiens
cgtgtgacgaaacctgcttcggcggcccgaggtgggggttttgagtcggttagtggaggcagtgggagcaggatgggcggagcttctgttccaaaaatttcccctaagtgcggttgacagtgtgcaggcaggcgggggtgcgcggggcggtcagcgatctgcagcttcgcggggacagagatgtaacccaactcgttcacggatgttccgcgcgccgtgtcaccggctgcgggccaggggtactcggaaggcgcgggcaggagcctggcgaggatgcaccttcccctgccttggaaaggtagaactggggagtgcgggagggtgraggtggcccggaaaagaacacctcttcgcaaccaaaaaaaaaaaaaaaaaaaaaaaagaggaaatagaggaaaaatgtgttatttcaaccgccactcagaacccatcataattcagccagtcggtgtcatttttattgaattaaattttaaaaaagttttctttgatttccagagcgtttttgcgggaggaatatgttaaaacaaactcaagatacgaaatgagacttttgaagtgcctttga

SEQ ID NO: 245227 - DNA, 525 bp, Homo sapiens
cctgacccgagtctatacggaccatgattagaggacatgataccctgcttcttgctgaacgaggactgactgttgggcaggataacacagaagatgcctccctcaggagtgtggagggagggaggctgcagctggaaagcaggtctcctcataaaccgtaagcttaaacagcagcaccatgactgtaagtgcacttataacaggcattattggaagaacattggaatatgctttccaaacctccagaagtacttggagtttaaagaatcaaaatacttttatttctcccaattcaactaaaattctttgaaagtacaaagaacaaaatctcttcaaagatgtgaagatgtagagtggaaatgaaagaacaagcaaagcacttctaactcacctaatgttttcaaatgaaaaagctttctcytagaggaaactgtacataaacacacacacacacacacacacagacacacgtataaatatcaatttatccaactgcagctactaataagaatatcataagactct

SEQ ID NO: 245228 - DNA, 581 bp, Homo sapiens
gcagaatgcaatagaccatagacctatacaggctgatagggaaagatcatgatagatatttgattaagtagcaaaggcagtgagcttggatatgatcctgtttgaataaacaacatatacttatatatagagagaatgtacttatcagtcttatagtactgataactatatatgcatataacatgtacacataataaatatacaaataaagatgcacctatcaggacttatacatgaatggaaattttacgcaaagatacattaaaaaccacctttgggaggtgcattagctgcctggaattcaatttcaaattttattctatgtttgaaattcttatttttttaactacatgmaaaatatgaatgttcttttctgtttcacaacattgacttccactgacctttcccaatttatctgctgttgtttatcctatcagtgaaaaccctaagcagaatttccattcctaaaagtgtccatgtgtcaatgtgttgggcttttgcagttcaccatgtttacatgcatgggcactttgttgagaatgatgctagctgattaagagagtttgtgaaaaactacccac

SEQ ID NO: 245229 - DNA, 545 bp, Homo sapiens
tttcattctcctgcattatgagaatgagttcttgactaattcattmaatgaagaaaacttttattgtgtacctaccacaaaataaaagattaagttcctttggatacatttctacaggttcaaattgttccgtacttttgaaagtgaacataataatggtcacctggtttgagaagttggttaaacatgcactctttgaagaagaactaactttttcaggtctcttgagtgccattgtatgtcttagaagaggaatgaatttggaattacataaccaggtagccactgttgtggatttctaacctttaaagtactctttaagagaaagccaagaacttagatttcatccagtgaccaagtttttaaaaaaatattttagtcccagtgctcaactgtatgagaatttgtttttgcttgaactgtgttagttttcaaactactattaataaagatcaactcatctgcctattaaaaattcagatttccatctaggcacacgcccagagtttttgatttagaacctactgactgatattctagtaatt

SEQ ID NO: 245230 - DNA, 641 bp, Homo sapiens
aaaaaaaaaaaaaaaaagagtcagttggagaagaataagttattcttaacaggtgggactccattaacaattctgccatgagtgccatgggacgggtattcatgataaatttttcattcatatgacaagcatttactgaccatatactctcccttggacactgtggtcccttcggacacggtggggcccagaaataaccccaacaaggactgtaagaagtatctsaagtctgcgaggggagattaaagataagacgaacatcaaagcaaagcacaagatgaccatcatttagtgacctagagggctattcattcattcataccgttatttattccaatcattgaataagcgacatgatggtggacagtgtatgctgtgggaatggggtgggctttagggtaagctttatattagaggttcttacctttgatttcatgttaaaatcacttaactaaggagcttgtaaaaaataagttaatgggtacaaaaaaaaatagtaagaaagaatgaataagacctactaccttacagcacaacagggtgactatggtcaaaaataagttaacggtacattttaaataactaaaataatataattggatgtttataaaacaaagaataaatgcttgaggggatggaga

SEQ ID NO: 245231 - DNA, 545 bp, Homo sapiens
tttcattctcctgcattatgagaatgagttcttgactaattcattcaatgaagaaaacttttattgtgtacctaccacaaaataaaagattaagttcctttggatacatttctacaggttcaaattgttccstacttttgaaagtgaacataataatggtcacctggtttgagaagttggttaaacatgcactctttgaagaagaactaactttttcaggtctcttgagtgccattgtatgtcttagaagaggaatgaatttggaattacataaccaggtagccactgttgtggatttctaacctttaaagtactctttaagagaaagccaagaacttagatttcatccagtgaccaagtttttaaaaaaatattttagtcccagtgctcaactgtatgagaatttgtttttgcttgaactgtgttagttttcaaactactattaataaagatcaactcatctgcctattaaaaattcagatttccatctaggcacacgcccagagtttttgatttagaacctactgactgatattctagtaatt

SEQ ID NO: 245232 - DNA, 540 bp, Homo sapiens
tctgaggtgggtggatcatccgagctcaggagtttgagaccagcctggacaacatggtgaaaccccacctctactaaaaatacaaaaataaataaataaacaaattagccaggcatggtgacacgtgcctgtaatccctgctacttgggtgactgaggcaggggagtcacttgaacccaggagacagaggttgcagtgagccgagatggcgctgctgcactccagcctgagggacagagtgagactctgcctcaaaaaaaaaaaaataaacatcataataaaggctaatatttactgggtatttcctgtatttcaggtactctgctaagctcttggagctcatcattgtagctgatttccacagattatgagttaggtactattagtcctgtttcacaaatgggaccaggacaaagtgagatgcagtagttttcccaaggtcaaggtggtggtgccaggatttgaattcaatcagggctgactccagagcttgctctttcaacaacaaaggcrtactgagctcagtaaaagtcagatgtt

SEQ ID NO: 245233 - DNA, 594 bp, Homo sapiens
tttcgcgaggacaaataatattctaagacatgcgatatgctacatgccacattctatcaaaagaaaagtccaaactcttaattttaaagaccaccgagtctaagatatatgtattctatatttataactattcattttccaacagtggaaaggatgttttccatcagcagaaatataacaagcaaagaaaatcttattttttttttttttaagccttgaaaatctggaaggaaaccaatatttacatttggctttttattttgcattaaatttatatgcatactaaatttcttcctggttcctcttcagtcagtactattagctcatactctatttttctacatgcataaaaagctaaagcaatttatctctttttatgagcggctcaaaaaagcaaaatcctttattgtgtttgcgtcacttaatgctcacaaacatcaktgtgggctttgccggttcttgattcaaacacacagaacaaaagggagggtggaaactgtaagacaaaagatagggggaaaacgagatccacaagagtccttgtgagcctagtggcaggagagatctagtttctgcactgcgtgcagaggaact

SEQ ID NO: 245234 - DNA, 582 bp, Homo sapiens
catggtggcatgcacctgtagtcccagctacttgggaggctgaggcaggaggaatatttgagctgccgtgagctctgattgtgcyactgcactccagcctgggcaacagaatgagatcctgtctcagaaacaaaatgaaaagaaaaatcaatactaaaaaataaattacataaagaacgtgggaggaggcttttggaggtgatggataaatacaaatatacagcattgattatggtgatggtttcctggatgtatagttacctccgaatttatcaagctgtatacgttaaacatctacagctttttaataccaattatacctcaataaagtgatttttttttcagcataaaagaaagaaactgacccaacagggatactgttaagcatttccataagaaaactctagaggtgcatgagttatctgtgaaacagcctttgtcttaagttcttgagtgaagtctttttttccctccaagcctcggtgtcctcctttctaaaagaaagaagatggattgaataacctcaaagcacctttaaagctgccatgaagatcgccagtcaatggggatggcaagaaatga

SEQ ID NO: 245235 - DNA, 616 bp, Homo sapiens
taaacattctcattatttcacagccatcagatgaatgggactttttcaggctaccagttccaacacactgagttgggacatttaattgaatttcgacataatatatcactcaaagagtgcttgtctgttatgaaatattagctttggtgttgcatcttatgagatggatctcaataaagatgctttttattaatgataataaacaatgtttacggaaatcttttagtgcatgacaacctgtgctaagcatttcacatgcataatcttactgactcatcccaacaaccttatgaggtcagtacaattatcattgctgatttatagataaccaaacagacacagagcgtctagagcacatattgagagttacatggtagactcaagatataaacttggatctccaccaccgtatctctgaagtttgcataccattttctatcataaattataagaagatgcttagtgaccatccttattaaagctgtcagttaagagataggtaaaacggtgtgtgagctgtgcatgtgtrtgggggtgttgggaggaaggaaggggaaaatggagagggaaggaagaagaaatgagggaggtagaggggctcaaataaagacagtaa

SEQ ID NO: 245236 - DNA, 467 bp, Homo sapiens
aaaaaaaaaaaaaagagtgacctttggaaatatgggcaaggacacaggctggtccccaggtgtccatgaccataaccaaatattcacactactcttccttctgttggttaggaagcaatcatattttagggaaaaataaaatcctgaaacactaatgtctcaaaacaaagtcaatttaaagttataaatttaaaaatcagaaagtatccaaaatgttaaatggctccatcttcaggataaatgtgaaaaggctctttttttttttttttttttacccccactgaaaatgcaggagctatttcaagttcttcctgaattagatggatgtarctgtggtctcaaatccccgtggctctagcaactggagccgcacaatcaattttgcctgtgagcagtgtccacaatgagtatgaaagtctccttaaccgactgcgtgcttgggtgtactcattcgtaattctaactct

SEQ ID NO: 245237 - DNA, 537 bp, Homo sapiens
gttattttctaaccaagattccctctctattctgtttcttgaaggtatagattctatttgactcctaattgcaaagtcattgcctagttcctcttaaatataatctgagtcctcattatgggcaaataaacaataggcagctaagagcagaaagcccaaaatacaacgaactgacygtaaatgagcaaatccattaaaaaatgggttagaaaaatatatccaaagtcataaagatgcttctatcctttgacttatacttctcaggcacttatcccaaagatgaaaactctataggtgctaagtaattaactctagtgattctggtattagtgagaaaagcagaaacctactagatattctaagataaagcggaaaaacatcatcctgatgttatattgtgtggccattataatgatgatcgcagggaatgagagagcaacatgaataaaaaacaatgcttaagcagcttcagggaagaaataataacacaaatcacaagcccatgatgaccacagctttggaccatacatctggact

SEQ ID NO: 245238 - DNA, 634 bp, Homo sapiens
aacatcactatgtaccccatgaatatgtgcaattattgtttgtcaattaaaactaaagtaacacatttatgttactttaacgtgatggctcatgcctgtaatcccaacgctttgggaggccgacgtaggaggatcacctgaggtcaggagttcgagactagcctggccaacatggcaaaaccccatttctactaaaaatacaaaaattagctgggcatggtggtgggtgcctgtaatctcagctacttgggaggctgaggcaggataatcgcttgaacccaggaggtgaaggctgtagtgagctgagatcgtgccactgcactccagcctgggcaacagagtgagattctgtctcataaataataataataataaagtaacaaatttttttttaataacagtttttgaaagaacacttagttttcagttagttttcaggtgtaatagtcacatttcaagcgttcacttgctccgtctggctgctggtaaccatattgaacagcacagataaagaatattccttatctattctcttagcagggttaactatgtaaggtgataagtatgttaagtagcttgattgtggtaatcatttcacaaggtatakgtacattaacatgtctcatatatacct

SEQ ID NO: 245239 - DNA, 623 bp, Homo sapiens
aaaatactgctaccttcaccaaaaataaagtccttgcatgcaatgagaaaggcagaaagtggaaaaatgcttacttgctgaaaacaaatgaaatttctataatgtaccccagcatcttaaagtaaaaaatttcttttttttttgcagtaattttcagatcatagtcatgtattccagctcaaaaagagcaaatgaactgttcttaaatgcctcaagaaatacatgctctcggtaactgatctgtgtttgctggcatttctttctactttgcagggtcatgtgactcagaagggggacagaatgtctcctgataagaaaaccttagggggrgaaaaaaagaaaccaaaaacacattttattttaatccccagctaataaaggcgcagttaactcattgataacctcacaaatttcccaggttcattggggagggagggctaaaggagggtggttctaccttgcaggccctcttctcatctctgatacaatagggcagaagagaaagacataggcaggcagcaaagtttttgtaacaacttcaaacctgcagaaaagagcttttcagagagaacaggatcaaagacatggatgtatttatggaatgaatgttcaaaatgggttgc

SEQ ID NO: 245240 - DNA, 623 bp, Homo sapiens
aaaatactgctaccttcaccaaaaataaagtccttgcatgcaatgagaaaggcagaaagtggaaaaatgcttacttgctgaaaacaaatgaaatttctataatgtaccccagcatcttaaagtaaaaaatttcttttttttttgcagtaattttcagatcatagtcatgtattccagctcaaaaagagcaaatgaactgttcttaaatgcctcaagaaatacatgctctcggtaactgatctgtgtttgctggcatttctttctactttgcagggtcatgtgactcagaagggggacagaatgtctcctgataagaaaaccttagggggagaaaaaaagaaaccaaaaacacattttattttaatccccagctaataaaggcgcagttaactcattgataacctcacamatttcccaggttcattggggagggagggctaaaggagggtggttctaccttgcaggccctcttctcatctctgatacaatagggcagaagagaaagacataggcaggcagcaaagtttttgtaacaacttcaaacctgcagaaaagagcttttcagagagaacaggatcaaagacatggatgtatttatggaatgaatgttcaaaatgggttgc

SEQ ID NO: 245241 - DNA, 586 bp, Homo sapiens
tccacttgcatgagttctttgaccagtttcctaaagaagaaaaaggggaatgactttagtatcaagaaatgtattcttgaattttgtccgcactttttttgtcatagtaatatggaccaaccttcaaaataggttctgactatattgtgaatttaacagcaatgatggtgatgatgatgatgaaaatgattcagttcttcgatgtatttttattacatcctctcagatcctggcaaagaaggtgttattatcttctctatttcagaagaggaaactgaggcccagacagctcccacagttgacaagacatgcatgtacatcktgaagcctgaatttgaactcgggcaagtcaacaccaagcttggaagtactcttctgtattcttctcttacaccatgagttcttgtcacaggaggtgttcaaggtaagactggaggttgacatttcagatatatcattatggattttccccctaggaattagcttggatgaaataaattctaaatttcctttcaacgctagaactgcaggattctacaatgtgcattcaggtgatacttacttaaagttcaaatatggaaatgat

SEQ ID NO: 245242 - DNA, 586 bp, Homo sapiens
tccacttgcatgagttctttgaccagtttcctaaagaagaaaaaggggaatgactttagtatcaagaaatgtattcttgaattttgtccgcactttttttgtcatagtaatatggaccaaccttcaaaataggttctgactatattgtgaatttaacagcaatgatggtgatgatgatgatgaaaatgattcagttcttcgatgtatttttattacatcctctcagatcctggcaaagaaggtgttattatcttctctatttcagaagaggaaactgaggcccagacagctcccacagttgacaagacatgcatgtacatcgtgaagcctgaatttgaactcgggcaagtcaacaccaagcttggaagtactctwctgtattcttctcttacaccatgagttcttgtcacaggaggtgttcaaggtaagactggaggttgacatttcagatatatcattatggattttccccctaggaattagcttggatgaaataaattctaaatttcctttcaacgctagaactgcaggattctacaatgtgcattcaggtgatacttacttaaagttcaaatatggaaatgat

SEQ ID NO: 245243 - DNA, 570 bp, Homo sapiens
aaagagagattcattttctccctttatatttgttgagtgagcctaacaagaacaaaacccaaaagccaatagttcttttattctttttttttttttttttttttgagacagagtctcgtactgtcacccaggctggagtacggtggcacgatctcagctcactgcaacctctgcctcctgtgttcaagagattcttctgcctcagccacctgagtagctgggattacaggtgcccaccacaacgtccagctaattttttgtatttttagtagagacagggtttcaccatgtcggccaggctggtcttgaactcctgaccttgtgatttgcccgccttggcctcccaaagtgctgggattaaaagtgtgagccaccacatccaggcaagccaatagttytaaactaaattgaaatgtcctagcatctctgataacactgtgcctgtgcactacttgtttcctatgtctgggattctgttctttttttttttttttttttaaaccactggtaaatttgcacctgttcttcatagcttcagggagtcctggctgactccccaagcacagtgaa

SEQ ID NO: 245244 - DNA, 571 bp, Homo sapiens
tggggattcccataccaggtcggatagaggactcgctaaaacagggctgggggagaagcagctttccattagacatgcacaccagcctgccatgtcggtttaccactgccatggcaacacctggaaatgaccacccatttcctagaaatgtctgtatcatctgccccttaatttccatgkaattaaaagtgggcataaatattgctgcagaactgcctctgggcacactgcctatagggggagccctgctctgtaaggagcagtacgcagttgcttcaataaaagctactgtttaacacacctggctcacccttgaattctcttctgggtaaagccaagaaccctcctggacgcagcgccaatgtggggattcatctactctgcagcaggagctgtttaagtctacctaggagagaacaaggaagtggcaaacaggagaatgctttgcttcacaagaatctagtgtcttgctcttccaaacatctcatcctactgtatcatcataacaccctaaaagccgccatatattgttcttgttttacaaatgacagacttgatgctcacaaagatt

SEQ ID NO: 245245 - DNA, 505 bp, Homo sapiens
agcaattcttttaacaagatttcccaagcatcaactctacatgaytcatatgcacaacataacttgataaacatcgctataaaaaaaccgttcacaccattctgataagcattgttgaccacaaacattttctccataaatttcaacaacatagagatacattattaagacacagtaattttactgtttgtaaactgaatgagagcttcacatctcacctggatgctgcacgcagctaagagttacatcaagtcacaaagtggaacatgtgagccatgttagcagagttccaggtgccttacagatgcttgtttatagacagaaaaggttgaagtacgcaaaatgcaccaacgcttaacactgttcattttttctttagcaagatatcaaaacttagaaaattttaggacaggaaagcatgggtaagctagactgaaaagcttatctgaagatgtgaagttctaccagtatttcctaaagatctttctagattagaaacaatagc

SEQ ID NO: 245246 - DNA, 660 bp, Homo sapiens
agtaattttactgtttgtaaactgaatgagagcttcacatctcacctggatgctgcacgcagctaagagttacatcaagtcacaaagtggaacatgtgagccatgttagcagagttccaggtgccttacagatgcttgtttatagacagaaaaggttgaagtacgcaaaatgcaccaacgcttaacactgttcattttttctttagcaagatatcaaaacttagaaaattttaggacaggaaagcatgggtaagctagactgaaaagcttatctgaagatgtgaagttctaccagtatttcctaaagatctttctagattagaaacaatagcataataattttggagttcctccacatataggtaaatgttcttaattctagacaatcagatgaygataaatggagaatggtcttaatatgccatttcatatgtatcacatatatgtatgcttatatgtgtgtgtgcttttatgtatatatgcatacatactctgagctggcgatctgcaagattttcactttcctgttctgattacacatttagtcattcatcaaatgtttactaaagtctaactatgaatcaggcactgccctgtgttagcagttgtgagaatgatgctagatgagcctcatgaacctgtgaataatctagtatttgg

SEQ ID NO: 245247 - DNA, 626 bp, Homo sapiens
tcaagtcacaaagtggaacatgtgagccatgttagcagagttccaggtgccttacagatgcttgtttatagacagaaaaggttgaagtacgcaaaatgcaccaacgcttaacactgttcattttttctttagcaagatatcaaaacttagaaaattttaggacaggaaagcatgggtaagctagactgaaaagcttatctgaagatgtgaagttctaccagtatttcctaaagatctttctagattagaaacaatagcataataattttggagttcctccacatataggtaaatgttcttaattctagacaatcagatgacgataaatggagaatggtcttaatatgccatttcatatgtatcacatatatgtatgcttatatgtgtgtgtgcttktatgtatatatgcatacatactctgagctggcgatctgcaagattttcactttcctgttctgattacacatttagtcattcatcaaatgtttactaaagtctaactatgaatcaggcactgccctgtgttagcagttgtgagaatgatgctagatgagcctcatgaacctgtgaataatctagtatttggtattgcagccctaacacctagcatcatctttgacacatga

SEQ ID NO: 245248 - DNA, 660 bp, Homo sapiens
agtaattttactgtttgtaaactgaatgagagcttcacatctcacctggatgctgcacgcagctaagagttacatcaagtcacaaagtggaacatgtgagccatgttagcagagttccaggtgccttacagatgcttgtttatagacagaaaaggttgaagtacgcaaaatgcaccaacgcttaacactgttcattttttctttagcaagatatcaaaacttagaaaattttaggacaggaaagcatgggtaagctagactgaaaagcttatctgaagatgtgaagttctaccagtatttcctaaagatctttctagattagaaacaatagcataataattttggagttcctccacatataggtaaatgttcttaattctagacaatcagatgacgataaatggagaatggtcttaatatgccatttcatatgtatcacatatatgtatgcttatatgtgtgtgtgcttttatgtatakatgcatacatactctgagctggcgatctgcaagattttcactttcctgttctgattacacatttagtcattcatcaaatgtttactaaagtctaactatgaatcaggcactgccctgtgttagcagttgtgagaatgatgctagatgagcctcatgaacctgtgaataatctagtatttgg

SEQ ID NO: 245249 - DNA, 545 bp, Homo sapiens
actgtgttcccctaacccacttcaacttgaaaacagtaagttcacaaagttcattcttggaggctgaatttgcattcaaatggagttttttgtgcctgtcgttggtaatgatcaaatgactctgaatacccttgggtgaggtgtgccttctttggtttgccatgaactatgctgttcccttatcattttatacccagcccaactcaaaatctgtagatctctgtaggcatttgagtttcagactcacctaaaaccccaactaattcactcttgattgattcctttaaatatatccttcaagtcaactctaccactatatagttgctgagcaaatattrccatgtatgggaaaaatgtaatccttgttcttacagatgttgcattctagtgcagggagatagagaaggaatagaaataaataatattatttaggattatcaagttcttccaagtctagtcttccttgtataaagacctactggctaggctgaatgaatctgctacccaggtgagcctgtgcagtatcctgttttagagcaatgttg

SEQ ID NO: 245250 - DNA, 505 bp, Homo sapiens
atgtctctctttccctggctcactcttgtgtcaaaggcatgtgaacaagggcaactccatattgaatakgggctgcgtaaaaggaggctaagacctactgggctgcattcccagatagtaaggaattctaagccacaggatgagacaggaggtcagcacaagatacaggtcataaagaccttgctcataaaacaggttgcagtaaagaagccaagatccaccaataccaagatggcaatgggaatgacctctggttgtcctcattgctacactcccaccagtgccatgacagtttacaaatacaaggcaacgtcaggaagttaccctacatggtctaaaaagggaaggcataaataatcctccccttgtttagcatatcatcaagaaataatcataaaaacaggcaaccagcagcccttgttgctgctctgcctatgaggtagccattcctttattccttcactttcctaagaaactttctttcactttactctgtggatttgcc

SEQ ID NO: 245251 - DNA, 505 bp, Homo sapiens
atgtctctctttccctggctcactcttgtgtcaaaggcatgtgaacaagggcaactccatattgaataggggctgcrtaaaaggaggctaagacctactgggctgcattcccagatagtaaggaattctaagccacaggatgagacaggaggtcagcacaagatacaggtcataaagaccttgctcataaaacaggttgcagtaaagaagccaagatccaccaataccaagatggcaatgggaatgacctctggttgtcctcattgctacactcccaccagtgccatgacagtttacaaatacaaggcaacgtcaggaagttaccctacatggtctaaaaagggaaggcataaataatcctccccttgtttagcatatcatcaagaaataatcataaaaacaggcaaccagcagcccttgttgctgctctgcctatgaggtagccattcctttattccttcactttcctaagaaactttctttcactttactctgtggatttgcc

SEQ ID NO: 245252 - DNA, 505 bp, Homo sapiens
atgtctctctttccctggctcactcttgtgtcaaaggcatgtgaacaagggcaactccatattgaataggggctgcgtaaaaggaggctaagacctactgggctgcattcccagatagtaaggaattctaagccacaggatragacaggaggtcagcacaagatacaggtcataaagaccttgctcataaaacaggttgcagtaaagaagccaagatccaccaataccaagatggcaatgggaatgacctctggttgtcctcattgctacactcccaccagtgccatgacagtttacaaatacaaggcaacgtcaggaagttaccctacatggtctaaaaagggaaggcataaataatcctccccttgtttagcatatcatcaagaaataatcataaaaacaggcaaccagcagcccttgttgctgctctgcctatgaggtagccattcctttattccttcactttcctaagaaactttctttcactttactctgtggatttgcc

SEQ ID NO: 245253 - DNA, 505 bp, Homo sapiens
atgtctctctttccctggctcactcttgtgtcaaaggcatgtgaacaagggcaactccatattgaataggggctgcgtaaaaggaggctaagacctactgggctgcattcccagatagtaaggaattctaagccacaggatgagacaggaggtcagcacaagatacaggtcataaagaccttgctcataaaacaggttgcagtaaagaagccaagatccaccaataccaagatggcaatgggaatgacctctggttgtcctcaytgctacactcccaccagtgccatgacagtttacaaatacaaggcaacgtcaggaagttaccctacatggtctaaaaagggaaggcataaataatcctccccttgtttagcatatcatcaagaaataatcataaaaacaggcaaccagcagcccttgttgctgctctgcctatgaggtagccattcctttattccttcactttcctaagaaactttctttcactttactctgtggatttgcc

SEQ ID NO: 245254 - DNA, 547 bp, Homo sapiens
ggctctgtctggtgagagcttattttgacagcactcagtaagtttggggccaaatgaaatttttgccctgctgtgtagcacatcttgtttgcattgccatatctcacttgaaagtggacacagttcaaaaaacccgaattcagctgacttcttccaatatattaattttcctttccccataggatgtcctagttgtgttcgaaggtcagggatagaaattccatactattttcaggtgatagaagttgacagggctattyattcaccattttgcattcaaagaggcaatcattgccattgttatataatcaccatcaccctcagtgttttccagcatgttcaccagagcagaaatctttgcatagctggttacctgcactatgaaccagcgtatagcttgaacacagttgcattttctcattacacagtcttcttttccttccttgagcttatcatgttccatctgccccagggcctttgcagaggctttttgctccatccaacatgatctgccccaaccctcttcacctggttaactcctgctcag

SEQ ID NO: 245255 - DNA, 515 bp, Homo sapiens
tgagttaagaagagcaaggctgctgttttttcctcaggcaagaagagagacagtgagagaaaggcaagagaaagaaagaaaagttctgagacactgtagtgtgtcagtgggaggtggagaatggaagagagttggacacttcttcaagggaaagtaaagaatttcaaatagaaagtcacagcackgtctgttcttggcttctgccagcctgtacactgtatagaagtttttaccaagccagagtgcagaaggctttgcacatatgtcctcagaactttcagcaccttggagattccgggagtaaaaaatatgtgcctcttttctaactgctgtgtaagagattggtaaagaaggttttgcacatacctgtctggaaccttcagaaccaacggaagcacagaattagagcctgtggccacttttccatctacttgagagaaaggcctgacctatggcctctaattcatggaaaattctcacctttgtgaaaagacatgttcccaggatttccaggc

SEQ ID NO: 245256 - DNA, 607 bp, Homo sapiens
aaaagatgagacattaggaaagagatatttaagattaggcacatgctaagtagagaaaataactccccagaaatttttttaaatgctaagtgcaagcatatgaaagggagacacaaacagtgttcaagtctcagaaggaactatgaacagaggtgagatccccagaagttctccatacacacagatcaggcaatgaggggtaagaccctaacagacttccctgtcacagaggctgatactcaagggtatatgcccaggaacctcaaaagagcacacctctctttctgacttctattctgacctccctggaggagaccaggcactttgaraatatgtctaacgttagggatttactagctaattctagttgctgacgaggttgagaaaaacctgagcctcagtttccttatctgtaaaatgggagcaatcatatttatatcttaaggttgttttgaggatcacattctaggatatgcctagaatatcgcctacactcaatttagatatattttgatattttcaaattcaggtgcagatccatggcaagtacttgcgataagcagaaaatgtaacattccaagaatgcacagaatgggatagacagagt

SEQ ID NO: 245257 - DNA, 578 bp, Homo sapiens
aatgctaattaccttgatctgatcagtatacattatatgtatcaaaacaacatcatatacmctttggatatgtacaattatttgtcagctaaaaaactaaattaaaataaaatataaaaatacatgtgtgacatacagaaggatttcagcaccaaatttaatggatgactttatatgttttttttaatcaccttcagagaggtatcatctctgattaatccctccctgcttttcagcacacttctcttggttctgagatgctgaattttttgactgttctcctccaactctctggcttcctctttgccacctctgccctctctccttggcctctctgaggtggatgtacccagggcacagtcctgggctttcttatctctgaacattgttccaaggtggtcctatttatatgtgtggtttcaaatatcatctactcactgaaggcatccaaatctatgtcccctgcactcaccagtcccctgaccgccagaatcataactctgcctgcctaatcaacatcaccagtagggtgtgtagaaggcatctcaaatctaccgtgctccgaaacaaccccaact

SEQ ID NO: 245258 - DNA, 603 bp, Homo sapiens
tattaaatcgatgacataagacttgcaaaagtgtatctgcagtattttctaattcattcatttgttcattcattaaacaaattttgtttatgccaagctccactgagtcctgcagtaagggaacagcaacaggggtggacatggatagcgtatgccctcgaggaatctataatgcagtgcactcaagtggcccagggcacatggagaggccaacaatggcatctaatgtgtgccaggcatggactagcttctttatgtttattttcatatttaatccttaaagaattctgattttaaaatgagaaaaatgagactctaagaaattaatttgccccaggtcacaccactaggaaactgcagaaccttcatcttacttatttcacttctcttgctttgctaaatgccacaagygtagagataagggagttcacaggcagggtatctagcttagaggtctttatgggagtattcacagaggagcgcagaggctgaaggatggatgagatgtcatatcaggaaatggggttaggaaaagagggaaggaggaattccatttttatagggtgttgcatgcagcaatccacacttatctaaaaaaaaaat

SEQ ID NO: 245259 - DNA, 523 bp, Homo sapiens
ttatatggcttccagaaaccaatttgtacaatttatggccacgaatggtttccatttctctcctttttgctattatattaraaaaaagattgaaaaagaaagaaaacaacccattttgtgctctggttaataaatggagggagagaaagccagctaggcatcaaccactgtctccaaccattatcatctgcatttgtgcgcatggtctgtccaaaacaacagtatatgttgattaaaagaccacaatggaaacaaacaaaaatcccaaacccatggctaaactgtaaagtcatcaacaattggtcttttcaggtatctgtgaaagtggaagacacaaatattctatggctcagcagttgcagtcttcggtgtataccaacagaaatgcgctcactcattaacaaaagaagcattattcataatggccccaaaataggacattacccaaatgtccatcaagattaggacagagacatccatgtgtgctgcattccagcaatgagaatgaaagcactgaaattac

SEQ ID NO: 245260 - DNA, 523 bp, Homo sapiens
ttatatggcttccagaaaccaatttgtacaatttatggccacgaatggtttccatttctctcctttttgctattatattaaaaaaaagattgaaaaagaaagaaaacaacccattttgtgctctggttaataaatggagggagagaaagccagctaggcatcaaccactgtctccaaccattatcatctgcrtttgtgcgcatggtctgtccaaaacaacagtatatgttgattaaaagaccacaatggaaacaaacaaaaatcccaaacccatggctaaactgtaaagtcatcaacaattggtcttttcaggtatctgtgaaagtggaagacacaaatattctatggctcagcagttgcagtcttcggtgtataccaacagaaatgcgctcactcattaacaaaagaagcattattcataatggccccaaaataggacattacccaaatgtccatcaagattaggacagagacatccatgtgtgctgcattccagcaatgagaatgaaagcactgaaattac

SEQ ID NO: 245261 - DNA, 523 bp, Homo sapiens
ttatatggcttccagaaaccaatttgtacaatttatggccacgaatggtttccatttctctcctttttgctattatattaaaaaaaagattgaaaaagaaagaaaacaacccattttgtgctctggttaataaatggagggagagaaagccagctaggcatcaaccactgtctccaaccattatcatctgcatttgtgckcatggtctgtccaaaacaacagtatatgttgattaaaagaccacaatggaaacaaacaaaaatcccaaacccatggctaaactgtaaagtcatcaacaattggtcttttcaggtatctgtgaaagtggaagacacaaatattctatggctcagcagttgcagtcttcggtgtataccaacagaaatgcgctcactcattaacaaaagaagcattattcataatggccccaaaataggacattacccaaatgtccatcaagattaggacagagacatccatgtgtgctgcattccagcaatgagaatgaaagcactgaaattac

SEQ ID NO: 245262 - DNA, 523 bp, Homo sapiens
ttatatggcttccagaaaccaatttgtacaatttatggccacgaatggtttccatttctctcctttttgctattatattaaaaaaaagattgaaaaagaaagaaaacaacccattttgtgctctggttaataaatggagggagagaaagccagctaggcatcaaccactgtctccaaccattatcatctgcatttgtgcgcatggtctgtccaaaacaacagtatatgttgattaaaagaccacaatggaaacaaacaaaaatcccaaacccatggctaaactgtaaagtcatcaacaattggtcttttcaggtatctgtgaaagtggaagacacaaatattctatggctcagcagttgcagtcttcggtgtataccaacagaaatgcgctcactcattaacaaaagaagcattattcataatggccccaaaataggacattacccaaatgtccatcaagattaggacagagacatccatgtgtgstgcattccagcaatgagaatgaaagcactgaaattac

SEQ ID NO: 245263 - DNA, 522 bp, Homo sapiens
aatgataattctatgttccaaatatgtgcaaggagatatgaaaaaatgacagcaggactgctcagtctaaaagccatgtcaggtagcaggaaaaaagtacctcacactatttttcttgttttttatgtaaaagaaagtgactgcccatgcatgacacatagtctgtgggraaaaaaaaaaggtgattctcacagcaaaatgtaagtaggtcattgcaacccagactgactccagccactggcagttctaaagaggtcctggttgttcattaacctctgggtatctcagcttactcctttgtgagataagtgggtaacggtgatgctctctaaggacctgccagagggtgaagagcagagccaccattacctgccccaaagaggtgttaaaagattcagttagatgcagaaacctggagatggtctgcagtccaggagaggtacatgagataggtatgatcccttgctcatcagcagtgtggcgcaccagcaatctgtgattcctctaattgcttttggtcaa

SEQ ID NO: 245264 - DNA, 522 bp, Homo sapiens
aatgataattctatgttccaaatatgtgcaaggagatatgaaaaaatgacagcaggactgctcagtctaaaagccatgtcaggtagcaggaaaaaagtacctcacactatttttcttgttttttatgtaaaagaaagtgactgcccatgcatgacacatagtctgtgggaaaaaaaaaaaggtgattctcacagcaaaatgtaagtaggtcattgcaacccagactgactccagccactggcagttctaaagaggtcctggttgttcattaacctctgggtatctcagcttactcctttgtgagataagtgggtaacggtgatgctctctaaggacctgccagagggtgaagagcagagccaccattacctgccccaaagaggtgttaaaagattcagttagatgcagaaacctggagatgstctgcagtccaggagaggtacatgagataggtatgatcccttgctcatcagcagtgtggcgcaccagcaatctgtgattcctctaattgcttttggtcaa

SEQ ID NO: 245265 - DNA, 583 bp, Homo sapiens
ctgggcactttcacccaaagaaccaaatattggagtcaaattaaattsctgtctgtaagcagaaagacaaagcaaaggattttccaatgcactcatcatattatctccctgtctttccatgtcagagaagctctggcctactattaaatacaattgcaagaacaactgacctggtttattccgaaacaggcgtataatataatgaagtctcctcatatggcttctgattttccctcctctgcagtaggaatgccgaaccctcgcgtggcctgttcttaagtgacttccttgaaactctaatcatgtgcacgattcctctgcagttccatgtggaggtgcagtattctcaacgcatgcttgtcagttctagttttcctctgaaagaaggcacagaggccggcttccctgagcttcatgggctgctgcagggcagagaagcggaagctggcctcggcctcacagcagcagagtggagctatgtgtttgcaagcagacctcagaaaaccggagcttaagaaagtgatcacctctggctgcagcccttaactgggtgctgactacagactacagaacaggaccagca

SEQ ID NO: 245266 - DNA, 598 bp, Homo sapiens
acatagaaaaccaagctatagcccaattaccttgagcacatgttctcaggacttcctgaggctgygtcacaggtcaagatccaaaagtttggcaaaaaaaaaaaaaaaaaatctaaattgattaaaaattttagaaaaattagaaacaggaagtatttgtctcagatactttttggcttacaggggacaataacaaaatgactatcctagtgttgttaggaggattaaattagataaaagggagtaatattgcagtgcttgctaagtcagtgcccaataaatgtttgctattaatcatataacatttttctcttgttaagatgttttcagaatcaaaagcatcatttccatcctcctccacagaagatgacatcatcaggattaaaaaagaattttaagttaacatatgctaaaatggacttttttgatacacagttctatgaattttaacacatgtataaatttgtataactaacactataatcagtatacagaataattccatcacttgcccaaaattctctcatgctacccatttgcagtcacaacccaccctctctctacctctaactcctggcagccacagaagtgttctcat

SEQ ID NO: 245267 - DNA, 551 bp, Homo sapiens
aatgtgcccatatatggggccaagtcctatgaggacagagaaaataagagccaatttttgccctatcctcttggaaacgcagcttcttcagttagaaagtttccttcccttagatctttaggccccttgtggctgctgctgtcactaccagaatattcctttcctgytccttgagcctgaaataaaaggacttctggatgtctgactccatcgatgcccacttcttgggtttgctgctacgttgagtccaggctgtggataccagagggaaaaatgctaaacttactgatgagtctgtggcactttagtatctttcccccaatctgcctcttactttttactttccagagttttctaatagctgatccatacattatgcttaggttttacatctctattcagtgggagaggaaagatgttgtgaactcatttcataccacccctgaattgaaataatctgggtagttttaaggcatggcattatccttataatgaatacaatggattctagagtaggaatagttaaaaatttatttattaaagacagagta

SEQ ID NO: 245268 - DNA, 583 bp, Homo sapiens
tcttattgccaactaaatgcagaggggaagggattctagttagtaactagttaggaaaagaaaacaatgaaaaaaaaagaaagaaaaaataaaaatgtctgctgcatctgctgtccaataccagctctgctacttactagttctgtgaccttaaacaaatcctttctttctctgatcttttgtttcttcatataccaaagagaaggacgtgaacagtaggtttaagatcctttccagctctaaatattctttgattatggatcatgtacacacaaatgctcctcaaatcccatatcacaaacaccatctttacacctagagcttaaagraggtagttttagaaaaaatgcaaggaaaggcttcttcctagaatttattgtttgaagaacatggactctgaagctgacagctcaggctttagtgccagatttccaacaggtcctgcactgtctcatacaaattgtggtgcttggtatgaacaacaggtttcataacaatacctcccttcgagagttgtgatggagagtatggcagacagcattccaagacggtcccatgattccgactgccaggcatccttgcc

SEQ ID NO: 245269 - DNA, 374 bp, Homo sapiens
ttcattacgtgtatataatgtgcagtgattgagtcagggtgttcatgaccttagtacgatactcttcggctaagcatagtcatcctattctgctaccaaaccttgaatttattccttttacctcactgtacgcttgtgcccttttttaagcatttattttaagttyaggggtacaggggctggtttgttacataggtaaatgtgtgtcatggggttcgttgtacagattatttcattacccaggtattaagccttatacccattagttatttttcctgatcctctccctcctcccatcttccgccttccacacaggccccagtgtgtgttgttccactctatatgtccatgtgttctcatcatttagctcccac

SEQ ID NO: 245270 - DNA, 374 bp, Homo sapiens
ttcattacgtgtatataatgtgcagtgattgagtcagggtgttcatgaccttagtacgatactcttcggctaagcatagtcatcctattctgctaccaaaccttgaatttattccttttacctcactgtacgcttgtgcccttttttaagcatttattttaagtttargggtacaggggctggtttgttacataggtaaatgtgtgtcatggggttcgttgtacagattatttcattacccaggtattaagccttatacccattagttatttttcctgatcctctccctcctcccatcttccgccttccacacaggccccagtgtgtgttgttccactctatatgtccatgtgttctcatcatttagctcccac

SEQ ID NO: 245271 - DNA, 374 bp, Homo sapiens
ttcattacgtgtatataatgtgcagtgattgagtcagggtgttcatgaccttagtacgatactcttcggctaagcatagtcatcctattctgctaccaaaccttgaatttattccttttacctcactgtacgcttgtgcccttttttaagcatttattttaagtttaggggtacaggggctggtttgttacataggtaaatgtgtgtcatggggttcgttgtacagattatttcattacccaggtattaagccttatacccattagttatttttcctgatcctctccctcctcccatcttcygccttccacacaggccccagtgtgtgttgttccactctatatgtccatgtgttctcatcatttagctcccac

SEQ ID NO: 245272 - DNA, 543 bp, Homo sapiens
gacacccactgtcagtcccaaacacacccaccccagaccttccaatctccctctccccactctgctttttcttcttcatttcacttactgcctttcatgtaaatactacataacttacttatgcttattatatattatctgcctcctcccactagaatgtaaactgcaccagggtaggagtctttttgttcattgatgtacactgagaacccaggccatatccagtacaagtaggatttcaataaatacaggaatgaatgaatayggtggtttgctttacttcccctttgccagtcaatgggacatctatctttacttatgccagtgacggtgggagccctgtttgtgttcaccatggtacctccagtgccctggagcattgtgtaacaaatgattgttaactgacctagttggttgagaaccactggcctaagccagtcatggaaattccatttctttatttaaagtgattgatgtaataacttaagcatgtgacataaatctggccaatgggccctggagctaagtcagctgggagtggac

SEQ ID NO: 245273 - DNA, 543 bp, Homo sapiens
gacacccactgtcagtcccaaacacacccaccccagaccttccaatctccctctccccactctgctttttcttcttcatttcacttactgcctttcatgtaaatactacataacttacttatgcttattatatattatctgcctcctcccactagaatgtaaactgcaccagggtaggagtctttttgttcattgatgtacactgagaacccaggccatatccagtacaagtaggatttcaataaatacaggaatgaatgaatatggtggtttgctttacttcccctttgccagkcaatgggacatctatctttacttatgccagtgacggtgggagccctgtttgtgttcaccatggtacctccagtgccctggagcattgtgtaacaaatgattgttaactgacctagttggttgagaaccactggcctaagccagtcatggaaattccatttctttatttaaagtgattgatgtaataacttaagcatgtgacataaatctggccaatgggccctggagctaagtcagctgggagtggac

SEQ ID NO: 245274 - DNA, 553 bp, Homo sapiens
gacagcccttccctctacagagtaagtttctcctttcctccctaaattactaggctatactagaagtcatcattcatattttgcataatttcyacccattattaatgcatctattcatgcttccatgaatccatgcattcatccatatatgcatccatgcatgtaggcattcttccaagaatccatgcatccatctacacatccatgcatgtagccatgcatctatctgttcatccatgcatgtggcaatgcatcactgaatccatgaatccatgtatgtagccatatagccatgcatccataagtccatgaatccatctatacacacatgcatgtatccatcaattctttgttctctgttattcctttttcaaataatcctcctttacatttctattttatttccttccaagacttctactacatctagcttctaaagctcttaagttagtgactatcattctatttctttatcatcccgtgatgatgtcagagaaactctttgagccaatattctaggtatctatacttttatttttaaatcaaaaagatc

SEQ ID NO: 245275 - DNA, 553 bp, Homo sapiens
gacagcccttccctctacagagtaagtttctcctttcctccctaaattactaggctatactagaagtcatcattcatattttgcataatttctacccattattaatgcatctattcatgcttccatgaatccatgcattcatccatatatgcatccatgcatgtaggcattcttccaagaatccatgcatccatctacacatccatgcatgtagccatgcatctatctsttcatccatgcatgtggcaatgcatcactgaatccatgaatccatgtatgtagccatatagccatgcatccataagtccatgaatccatctatacacacatgcatgtatccatcaattctttgttctctgttattcctttttcaaataatcctcctttacatttctattttatttccttccaagacttctactacatctagcttctaaagctcttaagttagtgactatcattctatttctttatcatcccgtgatgatgtcagagaaactctttgagccaatattctaggtatctatacttttatttttaaatcaaaaagatc

SEQ ID NO: 245276 - DNA, 553 bp, Homo sapiens
gacagcccttccctctacagagtaagtttctcctttcctccctaaattactaggctatactagaagtcatcattcatattttgcataatttctacccattattaatgcatctattcatgcttccatgaatccatgcattcatccatatatgcatccatgcatgtaggcattcttccaagaatccatgcatccatctacacatccatgcatgtagccatgcatctatctgttcatccatgcatgtggcaatgcatcactgaatccatgaatccatgtatgtagccatatagccatgcatccataagtccatgaatccatctatacacacatgcatgtatccatcaattctttgttctctgttattcctttttcaaataatcctcctttacatttctattttatttccttccaagacttctactacatctagcttctaaagctcttaagttagtgactatcattctatttctttatcatcccstgatgatgtcagagaaactctttgagccaatattctaggtatctatacttttatttttaaatcaaaaagatc

SEQ ID NO: 245277 - DNA, 603 bp, Homo sapiens
aattcccggcagacactgccgtttactagttgtggccttgggaaatgtctgaacctstctaggactcagtgttctcatctattaagtggggataatgaaaggccggtgctagggttgaatgtcatagtccataggaagcctcagcacactgggctaggctgaagcatgagaaattgctgatacaatttttgacgtacaaaatggccatgttatgtagttcagctacatctctgtttaatcaatgccaactgttactatttataactactgtttattgagcacctgctagttttctttctcttaatattttttctaatccctataatttggcaaagtactcattatgagcttcattttctagaagaggctcagagaggtaaatgattttcccagggccacagggtcagtaactggggctgtctgacctcaaatagtgagtgctgttctactttgctcccctggccttggggatcccagtgcagcccccatgtccagaaaaggcttgctgaaaatttgttgagcaaacggaaactgatgcttccctcctatccatgggatgagcaacgatgttttcaataaccccaaagacttcctcagccatct

SEQ ID NO: 245278 - DNA, 649 bp, Homo sapiens
atctctgtttaatcaatgccaactgttactatttataactactgtttattgagcacctgctagttttctttctcttaatattttttctaatccctatawtttggcaaagtactcattatgagcttcattttctagaagaggctcagagaggtaaatgattttcccagggccacagggtcagtaactggggctgtctgacctcaaatagtgagtgctgttctactttgctcccctggccttggggatcccagtgcagcccccatgtccagaaaaggcttgctgaaaatttgttgagcaaacggaaactgatgcttccctcctatccatgggatgagcaacgatgttttcaataaccccaaagacttcctcagccatctcatgcactcatttctaatttggcattttttttttcaaaggctaaggaactttctgcaggtggtgctgtcacacatgagctggggtttgtcagaaggtcaaggtagaaaactctaagccagtgttaatcctgaatgcacattgaaatcacccaggcagtcttaaaaaactgtgatgtctgggtcctgcttccaaggattcacatgtgattggaccaagcataggtattcttttaagttcctcagaagattctattgtgcagcaagattggaga

SEQ ID NO: 245279 - DNA, 649 bp, Homo sapiens
atctctgtttaatcaatgccaactgttactatttataactactgtttattgagcacctgctagttttctttctcttaatattttttctaatccctataatttggcaaagtactcattatgagcttcattttctagaagaggctcagagaggtaaatgattttcccagggccacagggtcagtaactggggctgtctgacctcaaatagtgagtgctgttctactttgctcccctggccttggggatcccagtgcagcccccatgtccagaaaaggcttgctgaaaatttgttgagcaaacggaaactgatgcttccctcctatccatgggatgagcaacgatgttttcaataaccccaaasacttcctcagccatctcatgcactcatttctaatttggcattttttttttcaaaggctaaggaactttctgcaggtggtgctgtcacacatgagctggggtttgtcagaaggtcaaggtagaaaactctaagccagtgttaatcctgaatgcacattgaaatcacccaggcagtcttaaaaaactgtgatgtctgggtcctgcttccaaggattcacatgtgattggaccaagcataggtattcttttaagttcctcagaagattctattgtgcagcaagattggaga

SEQ ID NO: 245280 - DNA, 649 bp, Homo sapiens
atctctgtttaatcaatgccaactgttactatttataactactgtttattgagcacctgctagttttctttctcttaatattttttctaatccctataatttggcaaagtactcattatgagcttcattttctagaagaggctcagagaggtaaatgattttcccagggccacagggtcagtaactggggctgtctgacctcaaatagtgagtgctgttctactttgctcccctggccttggggatcccagtgcagcccccatgtccagaaaaggcttgctgaaaatttgttgagcaaacggaaactgatgcttccctcctatccatgggatgagcaacgatgttttcaataaccccaaagacttcctcagccatctcatgcactcatttctaatytggcattttttttttcaaaggctaaggaactttctgcaggtggtgctgtcacacatgagctggggtttgtcagaaggtcaaggtagaaaactctaagccagtgttaatcctgaatgcacattgaaatcacccaggcagtcttaaaaaactgtgatgtctgggtcctgcttccaaggattcacatgtgattggaccaagcataggtattcttttaagttcctcagaagattctattgtgcagcaagattggaga

SEQ ID NO: 245281 - DNA, 649 bp, Homo sapiens
atctctgtttaatcaatgccaactgttactatttataactactgtttattgagcacctgctagttttctttctcttaatattttttctaatccctataatttggcaaagtactcattatgagcttcattttctagaagaggctcagagaggtaaatgattttcccagggccacagggtcagtaactggggctgtctgacctcaaatagtgagtgctgttctactttgctcccctggccttggggatcccagtgcagcccccatgtccagaaaaggcttgctgaaaatttgttgagcaaacggaaactgatgcttccctcctatccatgggatgagcaacgatgttttcaataaccccaaagacttcctcagccatctcatgcactcatttctaatttggcattttttttttcaaaggctaaggaactttctgcaggtggtgctgtcacacatgagctggggtttgtcaraaggtcaaggtagaaaactctaagccagtgttaatcctgaatgcacattgaaatcacccaggcagtcttaaaaaactgtgatgtctgggtcctgcttccaaggattcacatgtgattggaccaagcataggtattcttttaagttcctcagaagattctattgtgcagcaagattggaga

SEQ ID NO: 245282 - DNA, 585 bp, Homo sapiens
agggggctcaccccaatgtttctgccaccattgagtaatagagtattgggtttcctatcgtgctgttatgattgggacaagyggagccatttgtcttttgctacatgggagaggtgttaataccaagcacatccagttatgttgtgaaaggctctgttgtaattagtctgagtcgaatcatcaatcaagagattctgcaattataagcaccagtcacactacattgctgtagaaggcggtcattcatgctacagcaatacttgtctattaggtctgaggctagatgctttatacacaatatctcatttaattcttaatgaaataccctaagagggccaggcacagtggctcatgcctgtaatcccagcactttgggaggtggaggtgggcagatcacgaggtcaggaaatcaagaccatcctggctaacatggagaaaccccgtgtctactaaaaatacaaaaaattagccgggcgtggtggtgggcacctgtagtcccagctactagggaggctgaggcaggagaatggcttgaacctgggaggcagagcttgcagcgagccgagattgcactaccacactcca

SEQ ID NO: 245283 - DNA, 585 bp, Homo sapiens
agggggctcaccccaatgtttctgccaccattgagtaatagagtattgggtttcctatcgtgctgttatgattgggacaagcggagccatttgtcttttgctacatgggagaggtgttaataccaagcacatccagttatgttgtgaaaggctctgttgtaattagtctgagtcgaatcatcaatcaagagattctgcaattataagcaccagtcacactacattgctgtagaaggcggtcattcatgctacagcaatacttgtctattaggtctgaggctagatgctttatacacaatatctcatttaattcttaatgaaataccctaagagggccaggcacagtggctcatgcctgtaatcccagcactttgggaggtggaggtgggcagatcacgaggtcaggaaatcaagaccatcctggctaacatggagaaaccccgtgtctactaaaaatacaaaaaattagccgggcrtggtggtgggcacctgtagtcccagctactagggaggctgaggcaggagaatggcttgaacctgggaggcagagcttgcagcgagccgagattgcactaccacactcca

SEQ ID NO: 245284 - DNA, 600 bp, Homo sapiens
cccactctgcccccggtttttcccaaattctatttttctccagcgctcagggacatctctgagacagccatcaagtttgctgtgtctgtagacttctaactggggaaagacatttcaacctccccttgttgcaggagcctctggtatttgcargtacttcacttagcatggactcatggctttgtgggtgagctgaggagcaggtaccagagctctcagacataggatcagttttcttaagacatcttactcgttgctagattgttcctaagacctatggatgtcctgattatgattacatttaggacaggttctcatgaacgtgggaaaatggtgaaatatttttacttttcatagtttttaattttaatatcattggcttttggaaaatacctattgttttaaaacagctacctagggtttcaataaaagtggccttaatgttctattcctcagtgtacgaatgacccattctcggagcatatgttgtctagtagcccttgtcctgcctttctaggagatagagtttctcatggacccaaacagggcttcttaatggagatttataacatcaaaagggattacatgagaacaaagtaa

SEQ ID NO: 245285 - DNA, 480 bp, Homo sapiens
tgttgtctagtagcccttgtcctgcctttctaggagatagagtttctcatggacccaaacagggcttcttaatggagatttataacatcaaaagggattacatgagaacaaagkaattatccttcgtgtatgagtatcaacccaatttacgaaggagtgaaattagacactgcagttaattacagggacagtctcaactttgtggaccaattagggctcattggttgcaagcaacaggaaccaattccccttctacattaagcaaaaagaatacttattagcagtagtcagtgagcttacaaaatttagaggtagttgaaaaagcagtgttggtagcatgacaggcaccaagccactgtgaggtctcctccatgggaagaaatgaattccaactaagtcttccgtccatgtatcattctgctccagttctggatcccagaagagcacatcccattggccagacttaggcaatacctcccc

SEQ ID NO: 245286 - DNA, 596 bp, Homo sapiens
gtgttggtagcatgacaggcaccaagccactgtgaggtctcctccatgggaagaaatgaattccaactaagtcttccgtccatgtatcattctgctccagttctggatcccagaagagcacatcccattggccagacttaggcaatacctccccttcttgagctcaccctggctgggagagctaagatgtcamagaaagttcctttaggaaactctttatcttccagagtgggaaggcaaagtacccaatgtatggtcttacaaaggctgcataaaatgggggagctgtaacttctcttgggtactcttaggaaaaggaagcaccaaccagtgagcaagtgatctccattcccttttcatagagaaggtcgatttctatcctcttgcctggagggtttcagagctgccctaggctgtactccactccagggtggccctcagagaccattactgtttcctcatttcttgaatgtatggaggaccctccagttactttctgctttaaggcgatgtttattaaacattgtttctattagggctgtgctccttcctctgtaccctttaaatattcatctccctcatgctgccatcccctt

SEQ ID NO: 245287 - DNA, 610 bp, Homo sapiens
gaattgaagacccttctctggccccttgagtgccagtgtcaccaacaccactggtcactctcctctcactttctacctgtacaaaggacagtctmccagtgtccctgtggaacattgtgattactcgaagttgtcctagctacttgggaatgagtcctaagaagattcatcttacttctgatgcatcacatgctctgtgttgcaaagcacacttggcatagccaggagcatcctaggttggcctagtgctagatggcaggcattgaaaactgtcaacaccagtacaggaacaggaaagacaaaccatggaactagatgagaccctgatactgagttgtggacagatcaactatagtgatacaggattcttgattgtctgcaacagagaacttttctaagtaacctatgcacatgataatttgatttgaatgcttttggggagaatgcagtatcatcaggaaaatttgagaacctggctcagaaaatagacaaaagggatgaaggtaccattaggatccctgggtagaaactccctgctaaggatgctgttaccagcactgtgatcactgccacgtggcaccaccagcatccatagtcctgaacacagagc

SEQ ID NO: 245288 - DNA, 590 bp, Homo sapiens
ctatttttatatgttacacaagctcagtttctccctctctgttctctttttctcaatagtggcaatgtagattttttaaagtttatttttcagtttcttcccttttcctgcagtctccctctagagatgacactgactttaaactttgacccactaagatgcctctttagtttctatccaacgacttcatatatatctatctctaggctatccacaaaatggagatgtgtgattcatgcttttcatgcctttgggaatggayatcttgttcatagcagaggtgatacaggagtattaattaccaatgcttagtaagtattgatacccaggtgatttacacaaatcatcacaagaccacaatcatcacaagactacagtctacctcttgtataaatgcaacccaaaaatcttgaattataaacttacttgcttccttggacttcagataaatctctagtatcctcaagagtctttgaatactttcctgtctccagcaaatctcgtgggaaggaaaaaaatagatatcactttgcaatttatgtttttaccagcatgcaattgagtagattcaattgactccaaatgttttg

SEQ ID NO: 245289 - DNA, 590 bp, Homo sapiens
ctatttttatatgttacacaagctcagtttctccctctctgttctctttttctcaatagtggcaatgtagattttttaaagtttatttttcagtttcttcccttttcctgcagtctccctctagagatgacactgactttaaactttgacccactaagatgcctctttagtttctatccaacgacttcatatatatctatctctaggctatccacaaaatggagatgtgtgattcatgcttttcatgcctttgggaatggacatcttgttcatagcagaggtgatacaggagtattaattaccaatgcttagtaagtattgatacccaggtgatttacacaaatcatcacaagaccacaatcatcacaagactacagtctacctcttgtataaatgcaacccaaaaatcttgaattataaacttacttgcttccttggacttcagataaatctctagtatcctcaagagtctttsaatactttcctgtctccagcaaatctcgtgggaaggaaaaaaatagatatcactttgcaatttatgtttttaccagcatgcaattgagtagattcaattgactccaaatgttttg

SEQ ID NO: 245290 - DNA, 590 bp, Homo sapiens
ctatttttatatgttacacaagctcagtttctccctctctgttctctttttctcaatagtggcaatgtagattttttaaagtttatttttcagtttcttcccttttcctgcagtctccctctagagatgacactgactttaaactttgacccactaagatgcctctttagtttctatccaacgacttcatatatatctatctctaggctatccacaaaatggagatgtgtgattcatgcttttcatgcctttgggaatggacatcttgttcatagcagaggtgatacaggagtattaattaccaatgcttagtaagtattgatacccaggtgatttacacaaatcatcacaagaccacaatcatcacaagactacagtctacctcttgtataaatgcaacccaaaaatcttgaattataaacttacttgcttccttggacttcagataaatctctagtatcctcaagagtctttgaatactttcctgtctccagcaaatctcgtgggaaggaaaaaaatagatatcactttgcaatttatgtttttaccagcatgcaattgagtagattsaattgactccaaatgttttg

SEQ ID NO: 245291 - DNA, 541 bp, Homo sapiens
ggaaagaaaccaaatgtacagtcctacgtacggtaggaagaatagctatagctcctctcagctctggtataggaaacatgctctaatgaattttccttccagcgttccataccagtgtttctcaagcttttagtgagcacagggatctttccaggaatcttcctacaatgcatattctgtttcgtaggtctgggtggagcctgagattcggcacttctaataagcttccaggtgttgttcctgatgcyggttcgtgcaccagaatatgaacagcaatattttatagggtgttaagcaacagaaatgtatttgtacgtggatgtctctgcaatagaattgcatccagaggagaaatgaaatagcttacaattatggatgaattgtgtaggtattcatatagaatagctaacataaatggagccatgcgtgtattatttaacactcacaacagtatagatagacacagtgcttatctccatgacagagttgaggggctataagcttacagatgtttagtgatgtgatcgagttgctgagctaa

SEQ ID NO: 245292 - DNA, 577 bp, Homo sapiens
agcttttagtgagcacagggatctttccaggaatcttcctacaatgcatattctgtttcgtaggtctgggtggagcctgagattcggcacttctaataagcttccaggtgttgttcctgatgccggttcgtgcaccagaatatgaacagcaatattttatagggtgttaagcaacagaaatgtatttgtacgtggatgtctctgcaatagaattgcatccagaggagaaatgaaatagcttacaattatggatgaattgtgtaggtattcatatagaatagctaacataaatggagccatgcgtgtattatttaacactcacaacagtatagatagacacagtgcttatctccatgacagagttgaggggctataagcttacagatgtttagtgatgtgatcgagttgctgagctaacactcagtggagtttgaacccaggcagtatgatttcagagaccacgctgaagtrtctgtactgctcatggactgttgccctgaaatgcagtttatttgtctgaagtgtaatgtctggagttttttgcatcttcatcattataaacctcttacaaatatta

SEQ ID NO: 245293 - DNA, 557 bp, Homo sapiens
agaaataggtgactctggcattcattcattcatgtaacaagtatttatggagcacttacccaatgccagacactgttctaaacagaggttatggcagtgagcagcactggacagttccctgctcacatggagttggtcacagtgcagggatcagacagtgaataggtaagtcagtgatctgccgagaaagatgacaacagtgtcacatcagggtgacgtagtagtacctgagatagggcatagtgaatggaatattttttctaagcgcaatggaaagtcactgtagagttttaaatagaggagggataggatatgacttatgttttaaaaatctcagtgacacctaggtggaaatttaattgtaggaagagcaagaatatcaattctgggcaaatgctgtaggtcagmgatgatggtagctgctaagatagtagctgtgggcaggagctaatgatagaggaaggatactggacataaatatgaggactagaccctagacttagtggaagaggtgagcgaaaaagacttacaaacaactttaatggttcagcttgagc

SEQ ID NO: 245294 - DNA, 562 bp, Homo sapiens
tctgtttttgttttgttttcttttttgttattgttgtttttgtttttgagaaaaggtcttattctgttacccaggctggagtgtagtggttcagttatcgctctctgtaggcttgatctactgggctcaagcagtcctcccacctcggtctcttgagtagctgggactatatgcatgcaccaccacacctggtgatatggtttggctttgtgtctccacccaaatctcatcttgaattgtagttcccataatccccatgtgtcatgggagggacctggtggaaggtaattgaatcatgggaatggttacttccatgctgttcttgggatagggagcgagttctcacaaaacctaatggttttgtaacgggcttttcctcctttgctctgcacttttccttgctgctgccatgtgaagaaaagcctgtttgcttccccttccgccacgattagaagtgttctgaggcttcccaagccatgctgaactgtgagtcagttatacytctttcctttataaacactaagtctcaggtatatctttagtagcagcgtgggaacagact

SEQ ID NO: 245295 - DNA, 572 bp, Homo sapiens
tagttgatcattaagctacactgatatgcaaagccacaataataaacagcaggcaagattaaaaactccktaagacataatcccttatggtcctcttcataaacatacaaataatgaaaaaataaatacacgtttgctcaattctgcaaaaccagaaatgtcacagggggggatgcataatagtgattgtattgagggaccaaccttggttgattcttttgtggggtatacacagtaaactcagacataaacctgcaaggtaggcatcattattctccttacctttctagagatgagaccagctgaggctcagagaagtaagttccctggccccacaaagctaatgaagccctggagtttagattcagacacagattctgttatccccaaagactaagaccctcaaaacatgtcaagtgttaaccgatgcctaaatggaactcaatttttccagaaagaccctgcatatctcatttgggcttgcttttttttttttttttgccctttttttcccccaaaatcataattgcaaaggcaagcttctgaagcattgatcaagaatatattttgct

SEQ ID NO: 245296 - DNA, 572 bp, Homo sapiens
tagttgatcattaagctacactgatatgcaaagccacaataataaacagcaggcaagattaaaaactccgtaagacataatcccttatggtcctcttcataaacatacaaataatgaaaaaataaatacacgtttgctcaattctgcaaaaccagaaatgtcacagggggggatgcataatartgattgtattgagggaccaaccttggttgattcttttgtggggtatacacagtaaactcagacataaacctgcaaggtaggcatcattattctccttacctttctagagatgagaccagctgaggctcagagaagtaagttccctggccccacaaagctaatgaagccctggagtttagattcagacacagattctgttatccccaaagactaagaccctcaaaacatgtcaagtgttaaccgatgcctaaatggaactcaatttttccagaaagaccctgcatatctcatttgggcttgcttttttttttttttttgccctttttttcccccaaaatcataattgcaaaggcaagcttctgaagcattgatcaagaatatattttgct

SEQ ID NO: 245297 - DNA, 572 bp, Homo sapiens
tagttgatcattaagctacactgatatgcaaagccacaataataaacagcaggcaagattaaaaactccgtaagacataatcccttatggtcctcttcataaacatacaaataatgaaaaaataaatacacgtttgctcaattctgcaaaaccagaaatgtcacagggggggatgcataatagtgattgtattgagggaccaaycttggttgattcttttgtggggtatacacagtaaactcagacataaacctgcaaggtaggcatcattattctccttacctttctagagatgagaccagctgaggctcagagaagtaagttccctggccccacaaagctaatgaagccctggagtttagattcagacacagattctgttatccccaaagactaagaccctcaaaacatgtcaagtgttaaccgatgcctaaatggaactcaatttttccagaaagaccctgcatatctcatttgggcttgcttttttttttttttttgccctttttttcccccaaaatcataattgcaaaggcaagcttctgaagcattgatcaagaatatattttgct

SEQ ID NO: 245298 - DNA, 375 bp, Homo sapiens
ttaacaataataaagtcaactgcaaatamtgaaagaccattcagaaagaaacgtaaccaagtcagagtctcctaatgtattctgtgttcctattgtgtggtaagcattgtccctgctgtaattacatctattttctcagtaaaacaaagggaagtcttgtagatgaagttttagggcccatcaaaggtagtactctgagtgtgatcaaaccacactttcactatttggagctcagtgagttaggaactagaagagcagagaacagcagaaaagttgtgttttattttcattattattattattattattattattattattattattattattgagacatggtcttgctctttcacccaggctagagtgcagtgg

SEQ ID NO: 245299 - DNA, 583 bp, Homo sapiens
catttatggtgtgaggaagtgctgttatagtctccaaaactttgaaatcatctcttcttgacttttacttcgactcttttttcaattttaattctaaggttgacttgtattctcggtcccctttgaatagaaccttagatcccccatgtcacattcaaaagacatgtttcaagtgccgtttttcatcttgacatgttttgcaaggtccttgcctctgtgactttgagatctgtttaattcmctgcggtgggctgggtaggactcttccagtcttgtgatagtgctgtgttgctggttagatcaatgacatagactctttctgtttaagaataatgcagtaagcaatggtgaatgcttggaatgataactgtaatcatgcacctgttcactgcagttcaaagggggcaaaaacaggtgtacctttgctggtcatcacagcaaaactaatttagtttttttcttctttctttctctcctctttgacaatttgtgtaggggtctgtgcattaaaatggataattttaaggaaattctgtaaaataggtatgcatgagtattgtagaagtatcatgtagtagagatc

SEQ ID NO: 245300 - DNA, 434 bp, Homo sapiens
aagaataatgcagtaagcaatggtgaatgcttggaatgataactgtaatcatgcacctgttcactgcagttcaaagggggcaaaaacaggtgtacctttgctggtcatcacagcaaaactaatttagtttttttcttctttctttctctcctctttgacaatttgtgtaggggtctgtgcattaaaatggataattttaaggaaattctgtaaaataggtatgcatgagtattgtagaagtatcatgtagtagagatcatacgcaattatttctgtattaattaaagtgtgtccagatacctttaamcaacagttttaaacgttcaaaacagtggaatacatgttgcccaataagtgaaataatatatactgcaatgtatagaacaggtactagctgtatttaatagtgaagttatgcttaatttgaaatgctt

SEQ ID NO: 245301 - DNA, 621 bp, Homo sapiens
tgtattaattaaagtgtgtccagatacctttaaacaacagttttaaackttcaaaacagtggaatacatgttgcccaataagtgaaataatatatactgcaatgtatagaacaggtactagctgtatttaatagtgaagttatgcttaatttgaaatgcttcacatttgtttataaatccatcatcagaagcaatgtttgttatgatcaattcagacgtttggaatcaggaggtccagaaggcagccgtaggcagttgtttgtgcattcagactacagagtatcaagaaaatcccaatttgctcagataggtaggtgtgaaaaccaacaatttctttgaaccactcgtcttacaacctcagtgtattctatattgtgcatagatgacagaagaaacattcattcctaagatacctacaaaatgagcaaaaccagcagcataaatggacccagtagtaatctatctccagtgcgtcttaattttgtgcatcatccatttgtgactttcttttgttctttctgttaatcagagatcttttcagtggcaggtgacatatgcccaacttgaatggccttaaggaaaaaaacagtattgtctcatgtgattgaaacatctatgtat

SEQ ID NO: 245302 - DNA, 621 bp, Homo sapiens
tgtattaattaaagtgtgtccagatacctttaaacaacagttttaaacgttcaaaacagtggaatacatgttgcccaataagtgaaataatatatactgcaatgtatagaacaggtactagctgtatttaatagtgaagttatgcttaatttgaaatgcttcacatttgtttataaatccatcatcagaagcaaygtttgttatgatcaattcagacgtttggaatcaggaggtccagaaggcagccgtaggcagttgtttgtgcattcagactacagagtatcaagaaaatcccaatttgctcagataggtaggtgtgaaaaccaacaatttctttgaaccactcgtcttacaacctcagtgtattctatattgtgcatagatgacagaagaaacattcattcctaagatacctacaaaatgagcaaaaccagcagcataaatggacccagtagtaatctatctccagtgcgtcttaattttgtgcatcatccatttgtgactttcttttgttctttctgttaatcagagatcttttcagtggcaggtgacatatgcccaacttgaatggccttaaggaaaaaaacagtattgtctcatgtgattgaaacatctatgtat

SEQ ID NO: 245303 - DNA, 621 bp, Homo sapiens
tgtattaattaaagtgtgtccagatacctttaaacaacagttttaaacgttcaaaacagtggaatacatgttgcccaataagtgaaataatatatactgcaatgtatagaacaggtactagctgtatttaatagtgaagttatgcttaatttgaaatgcttcacatttgtttataaatccatcatcagaagcaatgtttgttatgatcaattcagacgtttggaatcaggaggtccagaaggcagccgtaggcagttgtttgtgcattcagactacagagtatcaagaaaatcccaatttgctcagataggtaggtgtgaaaaccaacaatttctttgaaccacycgtcttacaacctcagtgtattctatattgtgcatagatgacagaagaaacattcattcctaagatacctacaaaatgagcaaaaccagcagcataaatggacccagtagtaatctatctccagtgcgtcttaattttgtgcatcatccatttgtgactttcttttgttctttctgttaatcagagatcttttcagtggcaggtgacatatgcccaacttgaatggccttaaggaaaaaaacagtattgtctcatgtgattgaaacatctatgtat

SEQ ID NO: 245304 - DNA, 586 bp, Homo sapiens
attgcagtgagctgagatagcaccattgcactccagcttgggttgagagcaagactccatctcaaaaaacaaaacaaaaccaaaaaacagggacccaattctggctgctgaaacatcagaaagaagtccacaggaaaggtagccaggattttcttccagtttaaaaggagcaagccacataagcagccacctttttctgcactgacagttacctgtgccttgcctttgggtgtggtgttgatccttggagctgccatggccatcttgkcaccatgaagtgagtatcctcagaacaaacatttgttgggctaaagagggtgaaacagaaaagtagaaggaactttggtccttaataacaccgggagttgctcagaaagtccagggctgccttttattctggaattcttatttaagacaaaatgatatctttatggttatagtcactttggtcaggtttggttttctggtacttgtggcagaaggcatccttatagatgcacctatacatataccaatgtatccacatccgtgtcttcacacacacatctgtttcctatatgcagaacatgcattcataaatatgtag

SEQ ID NO: 245305 - DNA, 449 bp, Homo sapiens
ccttgcctttgggtgtggtgttgatccttggagctgccatggccatcttggcaccatgaagtgagtatcctcagaacaaacatttgttgggctaaagagggtgaaacagaaaagtagaaggaactttggtccttaataacaccgggagttgctcagaaagtccagggctgccttttattctggaattcttatttaagacaaaatgatatctttatggttatagtcactttggtcaggtttggttttctggtacttgtggcagaaggcatccttatagatgcacctatacatataccaatgtatccacatcygtgtcttcacacacacatctgtttcctatatgcagaacatgcattcataaatatgtagggttttttaaatgtgatcagacactatatagtttctaacttgcctttttttcattccactatataattaagacatccttt

SEQ ID NO: 245306 - DNA, 449 bp, Homo sapiens
ccttgcctttgggtgtggtgttgatccttggagctgccatggccatcttggcaccatgaagtgagtatcctcagaacaaacatttgttgggctaaagagggtgaaacagaaaagtagaaggaactttggtccttaataacaccgggagttgctcagaaagtccagggctgccttttattctggaattcttatttaagacaaaatgatatctttatggttatagtcactttggtcaggtttggttttctggtacttgtggcagaaggcatccttatagatgcacctatacatataccaatgtatccacatccgtgtcttcacacacacatctgtttcctatatgcagaacatgsattcataaatatgtagggttttttaaatgtgatcagacactatatagtttctaacttgcctttttttcattccactatataattaagacatccttt

SEQ ID NO: 245307 - DNA, 384 bp, Homo sapiens
atattacttacaaacctgccatcatttctggggaaatcagaactgaaacagtggacgggacacatctgaatccacctaaatatcttggcctgatagaattacaagtttatagatttaccatttaggaaacagccccgttatgaaacatttgtcctcacagacagacartataagtaacaagcaagattatatccttttatgtggatcaaggacatagtcaatgtaagaaaaaaaagatagaaaaaaaatccctttagaggaacgtaaatgctgcccttgtgaattataactggggaattagatctatgaaaaagcctctaatatgactaaacaaagtccctcaggtgatactctgagtcagaaaagtgtgagaaaatatagcct

SEQ ID NO: 245308 - DNA, 613 bp, Homo sapiens
ccatatagagtgtgtgtgtgtagtaggctacaccatctaggtttgtataactgcaccgtgtgatgttgtcacaaggatgaaatcacctaacgatgcatttcttagaatgtatcctgactcttaaagcaacatttgtggtttattgactgaagggataaaaaataaataaatgaatatatgaatacaaaacaatttttagaagataaatgaatgagtgagcaatttgtccttctctttcctcctgagatttkctatttttaaaagtgtgcttgtatttttgtctttatatttaaataatgatttaaatgatttatttaatactgaagccactgatgagctgagaactcataacacattgctaggcacagagcaaatgtgaaatttagtttttgttgtttttatccacatgttgttctgccaagttgggcaacataatgccccctcagaatgctagttaatgcacttaattctctcagggtcttcttactttagactctttgacatccttgggcaattaaagattagctattttaatgaacacaccacatcttttacaaagcctctttggcaaaagacctttgtcagtccgccatcgacatatattgcaaattac

SEQ ID NO: 245309 - DNA, 659 bp, Homo sapiens
tgaatctaatcaaaattgatttatgtgcaatcaaattataggaataaagaaacagcttcacctaatttagttgccgattatagtgttgcctgcctctgaagtcacaccaatatgcgtctcttagttttgtaccaacattgcatcaaggcctaaaattctgcaggtttttttttttttttttcccaaattgcatagttggttctgtatttctgaccttctgctgtccatcagattgaacatttatgccctctgattttgtgtcctgttcaacaaatgttgcccgggtgtcctttaagtgttggccatgtgactcttgcactagaggcccaggtcacccatgaacctagaagagaagatccatggtgtggaggagtgggtgttgcaggacctgggagctgaggctcgggagggctgattcatcattcttcctcctttgctgtggattctcaaccaaggcaaaaatagatacayacactcaacagggattaaggtacagaattcacgctgggcatggtggcttatgcctgtaatcccagcactttgggaggccgaggcaggcggatcacctgggatcaggagttcgagaccagcctggccaacatggtgaaaccctgtctctactaaaaatacagaaattagctaggtatggtggtgcgcac

SEQ ID NO: 245310 - DNA, 659 bp, Homo sapiens
tgaatctaatcaaaattgatttatgtgcaatcaaattataggaataaagaaacagcttcacctaatttagttgccgattatagtgttgcctgcctctgaagtcacaccaatatgcgtctcttagttttgtaccaacattgcatcaaggcctaaaattctgcaggtttttttttttttttttcccaaattgcatagttggttctgtatttctgaccttctgctgtccatcagattgaacatttatgccctctgattttgtgtcctgttcaacaaatgttgcccgggtgtcctttaagtgttggccatgtgactcttgcactagaggcccaggtcacccatgaacctagaagagaagatccatggtgtggaggagtgggtgttgcaggacctgggagctgaggctcgggagggctgattcatcattcttcctcctttgctgtggattctcaaccaaggcaaaaatagatacacacactcaacagggattaaggtacagaattcacgctgggcatggtggcttatgcctgtaatcccagcactttgggaggccgaggcaggyggatcacctgggatcaggagttcgagaccagcctggccaacatggtgaaaccctgtctctactaaaaatacagaaattagctaggtatggtggtgcgcac

SEQ ID NO: 245311 - DNA, 479 bp, Homo sapiens
cctttcctattattattgttgttattgttaatatttatacatctattggtataaggaaaattaggccaaaacttagtgtatcaagatcaaaacacattatctttcatagtttctgtgggttgagaatttgggagcagcgtagttgggtttcaccatttagtgtgataccagctgtagtattttgtagatgccctttataaagttaaggaagttctttctattcctcggttgtgagggtgtattttgtcatgaaagggtcttgacttttgtcaaattctttttctgcatctgttgagatgatcatatggtgtatgtcagggtttaaagttttttccatgtgtggctgcatttggtttgccagtatcttcttgaagacgtttgcatctatatttatraaatatgtagatctgcagtattctttccttttgattttttgtctggttttgatatgaggataacagtagtctcagatttcttcc

SEQ ID NO: 245312 - DNA, 589 bp, Homo sapiens
ggagctctctttgggtggtgaaataatgttagcttttctggtgctttttgaaatttcctaaactttccacaataaacactcataggttttataattataaaacacattgaaaacaatgttggttgtaatactattagaagaatattcctgtcagcagtgtgcttgattcctgccatctcaaggatgaggctatatgtgcatgctaagttataaggagatggaatggatattcggttgcaataattctgtttcttgcttaaaggaagtctgctacgcttcaggaatgagggtcattcacctggtctttgtttaaatttgtaaggtgaaccattttgtagacaatgcttggaaaatatgcccaggtgattcatgcatttgtctattagaaaacgtggtcacttaccagcaaccaatatagagctaatgggattcatttagaaatgtaaccacaagtccactawaaatcgtatgttctcccatctcaatatgcttcattaagctcacctttcttaatgtaactggattattaggtgtcaggacaaagaaaatcagtaggtcctagtgttctaatcctgcaaactttcaatgt

SEQ ID NO: 245313 - DNA, 565 bp, Homo sapiens
gagacgcggtatgtaagccgagctccagctccggggacctcggagactgtgctcagggctcgctctgggtgccccgtggtgggggtggtctggacacttggagagggctagggggcgtttagagggattggggagcccggagatgcatcgattttctttacccactggaagttagtgggcaacttccttgccaatgctcattggctccgtttaastttattcccagagatgaataagcgtttattaagaaccgatgtaaaagtcccaataggctagccatggttttgcaagagatgcgcggctctggaaatgagaggtttatgaaatgaatggccagatgggttgtgcatttgcgaagttggcatgctcacgttgcaagggagcatgtgtgtgcaaatgtgagcatatgcgctgcatatctgtgtaaacatgtccaccatgctcgttgcgctggtgtactcttcatcttctctgcctgtttcccatggaagagagattaaattgacaatactgaacacgcttcgacttgagaaataagctctgtaccattttatgacatggaata

SEQ ID NO: 245314 - DNA, 565 bp, Homo sapiens
gagacgcggtatgtaagccgagctccagctccggggacctcggagactgtgctcagggctcgctctgggtgccccgtggtgggggtggtctggacacttggagagggctagggggcgtttagagggattggggagcccggagatgcatcgattttctttacccactggaagttagtgggcaacttccttgccaatgctcattggctccgtttaactttattcccagagatgaataagcgtttattaagaaccgatgtaaaagtcccaataggctagccatggttttgcaagagatgcgcggctctrgaaatgagaggtttatgaaatgaatggccagatgggttgtgcatttgcgaagttggcatgctcacgttgcaagggagcatgtgtgtgcaaatgtgagcatatgcgctgcatatctgtgtaaacatgtccaccatgctcgttgcgctggtgtactcttcatcttctctgcctgtttcccatggaagagagattaaattgacaatactgaacacgcttcgacttgagaaataagctctgtaccattttatgacatggaata

SEQ ID NO: 245315 - DNA, 565 bp, Homo sapiens
gagacgcggtatgtaagccgagctccagctccggggacctcggagactgtgctcagggctcgctctgggtgccccgtggtgggggtggtctggacacttggagagggctagggggcgtttagagggattggggagcccggagatgcatcgattttctttacccactggaagttagtgggcaacttccttgccaatgctcattggctccgtttaactttattcccagagatgaataagcgtttattaagaaccgatgtaaaagtcccaataggctagccatggttttgcaagagatgcgcggctctggaaatgagaggtttatgaaatgaatggccagatgggttgtgcatttgcgaagttggcatgctcacgttgcaagggagcatgtgtgtgcaaatgtgagcatatgcgctgcatatctgtgtaaacatgtccaccatgctcgttgcgctggtgtactcytcatcttctctgcctgtttcccatggaagagagattaaattgacaatactgaacacgcttcgacttgagaaataagctctgtaccattttatgacatggaata

SEQ ID NO: 245316 - DNA, 461 bp, Homo sapiens
accttcctacttaagagggctccaagcagaattgtgaatccaaaagttttgttggcagtgtcacsttagtaaaacgttatgaaattatttgctaaaagagtcactttctgagtgtcttcacgtagaagaatttactcattgttgacatggtttcaattttggttacacagaaatgaatgcggtttattgctgaagcaggcaaaaatgattgtgtaatcctctctttagtagggtagctgggtagtaaattgtttggcttaaaatggggacatctttctccactgtgttccctattttttgatttaaatgtgtgctggaaaatccaaagagtgtgagtaaaagggtgtttgtggcatggagtaacttgcctttgtggtttgctatgactaagtttgaagagggttgtttgttaagtaagtgaatgcaagtcaatcagcaacagctgcttgccactcaggctc

SEQ ID NO: 245317 - DNA, 461 bp, Homo sapiens
accttcctacttaagagggctccaagcagaattgtgaatccaaaagttttgttggcagtgtcaccttagtaaaacgttatgaaattatttgctaaaagagtcactttctgagtgtcttcacgtagaagaatttactcattgttgacatggtttcaattttggttacacagaaatgaatgcggtttattgctgaagcaggcaaaaatgattgtgtaatcctctctttaktagggtagctgggtagtaaattgtttggcttaaaatggggacatctttctccactgtgttccctattttttgatttaaatgtgtgctggaaaatccaaagagtgtgagtaaaagggtgtttgtggcatggagtaacttgcctttgtggtttgctatgactaagtttgaagagggttgtttgttaagtaagtgaatgcaagtcaatcagcaacagctgcttgccactcaggctc

SEQ ID NO: 245318 - DNA, 560 bp, Homo sapiens
gggacatctttctccactgtgttccctattttttgatttaaatgtgtgctggaaaatccaaagagtgtgagtaaaagggtgtttgtggcatggagtaacttgcctttgtggtttgctatgactaagtttgaagagggttgtttgttaagtaagtgaatgcaagtcaatcagcaacagctgcttgccactcaggctcacaggaatccaggcttttcatttaaraagcaagattttccaagtcttatctgcccacacgcttcccacacgtgtgatgcctcccctctattagaatactcagaggttatgaagagggaattgttaatctgaggaatgaggtagggggacatgtagaaggagctcctccctccctctcttacccctcttctcttctctctcttggtctccctctgggtatttcttcctccttatcccattttttttcatctacgtgtatttctttccatctttctgtctttactgttttacctggtgcacagaaaccttttaggtatctttgctacactttaacatatgttttgcacgctggaggatcaccagag

SEQ ID NO: 245319 - DNA, 629 bp, Homo sapiens
ttagagatggagaaacaattttcaagactttttataattagaaaaagtgattagactgcaaatttttctgattccaatatgctaagataccattgaagtttattaatctgagtttagaatttagcatttagaatctgtttacacataatgggtacttaagagatacactacgttagggtttctcaaacaggatcaatttcctcccctaacccataataatatttaacaacattttgaagacagtttttgtgtctttgcgagaggatgactccctcctgcaaaacaaaaacaaattacctggccccaaaccaacagtgccacagctgagtaattataccctaggtaatatcagtgatagtctaatataaacatggtctgatttttcaagagagggkagaaggtatgtgtacttcaattattaaacatttaaaatctctggttggatactgtgactaggatcatgatgcaaaatcagacggtccttattcccttacagtctgacactaaaattgttacagctgcttccttggaacatctttctttataaatatggcatgggtcgttgtgatttaaagtgccctatttttttccaatttacttactctttagtacgagaagtgctggaaaat

SEQ ID NO: 245320 - DNA, 617 bp, Homo sapiens
aaagaagttttagggataagtgggaatatctgaatatagattgtatgttagataatagtatttatagtatttttatgtcatgaatatgccaataataaataaattaaaaaaagataatagtattttattaatggtaccttcatgagagtgactttgtatctcagatcatttgtactgaggttaygtaagagaacattcttgttcttagaagatacaggctgaaggattcaaggatgaaatatcacaatgtccacaactaactcaaataattcagaagacagataatagagtgggcacgagtgtggcaaaatgttaacagtttcgaggattacaagcggctgtggaactatgttcataacttttatgtgggtctgaagattttccagtgcccaggctgggcactctgcttagctttgcgcgtggattatctcatttcatcctcagagcagcttggggatgggagagctctatcacacccattttccagtggagaaaacagaggcacagctagttgtaagcccaggccacattatgcccccaccccctgttttgtgaaatttagtactaaagatactacatggctgtgtgatgtcgggcaaatcacttaacctctctgt

SEQ ID NO: 245321 - DNA, 573 bp, Homo sapiens
ttttttaagaatactaaaacacagtgttggcaaagatacaggaatacgtgtactctcgtacactgctattaggcaagtagcaaccaggggaaggattaaaaaatgataggaattacagcttacttktaacccatttagccctcacctccactccttaaggtaaaggaaacttcaagtcagggaaattaagttgccagagccacagagctgatgagcggctgagccaggcttttgagctaagcccagttggctccaggacccgagccactgtattgattatctgccgccacgtaacacatacctccagatttagcagattgggatcctatgtttattatctcacagtttctgcgggttgggactccaggggtgacttagccagatcctctggctcaaggtctgtcatgagggtgtaatggagctgtcagctggggctgtggtctcatatgatggctcaacttggcggttggacgatctactggcagtcccacttacggggttgtggctggattcagttccttggatgctgtcagccagaagccactctcagttccttgatacgtggacctcttc

SEQ ID NO: 245322 - DNA, 573 bp, Homo sapiens
ttttttaagaatactaaaacacagtgttggcaaagatacaggaatacgtgtactctcgtacactgctattaggcaagtagcaaccaggggaaggattaaaaaatgataggaattacagcttacttttaacccayttagccctcacctccactccttaaggtaaaggaaacttcaagtcagggaaattaagttgccagagccacagagctgatgagcggctgagccaggcttttgagctaagcccagttggctccaggacccgagccactgtattgattatctgccgccacgtaacacatacctccagatttagcagattgggatcctatgtttattatctcacagtttctgcgggttgggactccaggggtgacttagccagatcctctggctcaaggtctgtcatgagggtgtaatggagctgtcagctggggctgtggtctcatatgatggctcaacttggcggttggacgatctactggcagtcccacttacggggttgtggctggattcagttccttggatgctgtcagccagaagccactctcagttccttgatacgtggacctcttc

SEQ ID NO: 245323 - DNA, 573 bp, Homo sapiens
ttttttaagaatactaaaacacagtgttggcaaagatacaggaatacgtgtactctcgtacactgctattaggcaagtagcaaccaggggaaggattaaaaaatgataggaattacagcttacttttaacccatttagccctcacctccactccttaaggtaaaggaaacttcaagtcagggaaattaagttgccagagccacagagctgatgagcggctgagccaggcttttgagctaagcccagttggctccaggacccgagccactgtattgrttatctgccgccacgtaacacatacctccagatttagcagattgggatcctatgtttattatctcacagtttctgcgggttgggactccaggggtgacttagccagatcctctggctcaaggtctgtcatgagggtgtaatggagctgtcagctggggctgtggtctcatatgatggctcaacttggcggttggacgatctactggcagtcccacttacggggttgtggctggattcagttccttggatgctgtcagccagaagccactctcagttccttgatacgtggacctcttc
